United States Patent Application Publication US 2004/0265849 A1 - sequence listing, part 10

SEQ ID NO: 6970 - DNA, 21754 bp, Homo sapiens
aaaagctcaccattataaataattacaataaaatgataaagggttataattgaggtatgcacgaatgcatgtgctatgaaaacacagagtataagccaggcgcagtgactcatgcctgtaatcctagcactctgggaggctgaggccggcagatcacttgaggtcaagagttcgagaccagcctggccaacaaagtgaaaccctgtctctaccaaaaaatacaaaaattagacaggcatggtggcgcgtgcctgtaatcccagctaatcaagaggctgaggtgggagaattgcttgaacccggaaggtggaagttgcagtaagccaagaccatgccactgcactccagcctgggtgtcagagtgagaccctgtctctaaaatacaaaacaaaacaaaaccaagaaaatacagagtataattgatctgtaaaagggaacaatgggaaaatttacagagaagtgacatttgagatatgccttaaagcaggcattccagacccaaatccctgttgggaccaagcaggtaaataaactaagaggtttggttatggtcaagactatggcaaatcaaagattttatgcattcctaaaaggggtagctgttattcagcccagccaattgttgccttacaggactatttaggcccaatgttatcaggtttccaatttcttaagaatagatggaaatcagattgttgcataaaaataggttggcaactgatttaaaaaaaaaaaaaaaaacacttctaaggtcaaacaaaatatgtctgtagggtaaatttggactgccagccaatggattataaactctaatttaaagtataaatctacaaagtaaagagagaaaaaggcattctggaaaaaggcatatagaatggtacattgtttattgaactcaaatttctaaacagtacaaaaaaacccaccaagtatgtgttaccatgcaacccatttaaagttgtattacctcagatttcactttaaagccatagcacattttataattaaaattttatatatgtatctagagtgaagaaaaaggggttcctaatccaacattttctagagcagaattaacaaaaagccccaaatctagacataagtaaaaattaaaagctatttttaagagtatttgtgaaattagaactctcttatgtcaaatttgaaatgcgtcctactgttgtaaaggattattccatgatttaaactgcattaatgtctaaaaagtaagcttagtaaactctacaaactaaaactataaaaatattttataattctgtaaatattctgttcatacactgtaagtgattatataactatctattttgaaaaaaattctacataccttttttgctttgggaccctaaaagttggaaaacaaaagaattgatcaattttaaagacaattctgatacaaaagtatcatgattatgtaagatgttaaaattagaagaagcttggtaaagggcataagggaactctctgtaccatctttgtaactttctttgcaaatctaaaattatcccaaaataaaatgcttttttaaaaagagttcagacaaaactacaaataagtatagaaaaactaagttcacctactgaaccatttttttgtatgtagattttacactgtttcttaggacaatcaatgatccatgtttaatgaaatgccctgttactaaacagagtactagtcaagaaggcactagtttaaagggttcaaaggacaataaatcattgaccaattattggcactaatgtcaaatttgcaagtgtgggaatgatctcataaagaaataacctttccgtaaagttagattgatgatttttatagaaagggaatcagttatttaaagcacgcaaagtagcctcacacggtggctcactcctgtaatagcattcgcggaggccaaggcgggaggatcacctgaacccaagagttcaagatcagcccgggcaacacaggaagaccccgtctctacaaaaaattttaaaaattagccaagcacatgcgtgtggtcccagctacttgggaggctgaggtgggaagatcacttgagcccgggaggtcaaggctgcagcgagccatgacactcagcctgggcagccaagcgagaccgcatttccaaaaaatgaataaataaataaaacaggcggctgggtgtggtggctcacacctgtaatcccaggactttgggcggctgaggaaggtggatcacggggtcaggagatggaggccatcctggctaacacggtgaaaccccgtctctactaaaaatacagaaaattggccgggcatggtggcatgtgtctgtagtcccagctacttgggaggctgaggcaggagagtcgcttgaacctgggaggcggagctgcagtaagccaacatcgcaccactgcactccagtctgggtgacagagcaagactcaaaaaataaacaaataaataaataaataaagcaggtaaagctatgataaaatgaagattctattcagcaatgtgttttaaggcagatctattcttttctggaaattattttggaaagcacaggatttcaaaaaagactcacagttacaataatatcacttatactttcctgattaggctcatgtgtttatcagatttctggtaaggaatttataggagatcatgtgaacataagacactttacatatttgaagagttatacatgggaaatattagttcaacccataagattatactgtgtaaaactgaagtttaacacatatcagtagattccatcttcttgaagagtgcatatattacactaattcactcggcagatattaattaatgatttacacacaaggcaatctgaggcactggagatagaaaagtagagactttgctgccatataatttttacaaatagattctatttttatcatagcttctatcaattaatagttaacatacttccatcgtgaaataagtactaaacagctgaatatgtaaatagcattgctccagttctcaattagccatattttaaagaggggcaaattgtcacttctcacttgtgcttttaatgtaaatcaggtttggggtaagtacatatcctcatttctcctatatgtcataatagccactatgtagtgaagtagttctcaaagttcagagggcataagaatcatatgggaagcttgttagaaatgcatatttatggactaaacgtgtgtatgctcacttctcttcctacactgtggtttagtagatgttatgggctgaattgtattgctcaaaaaattacatgttgtccgggtgcggtggctcacagctgtaatcccagcactttgggaggccgaggcagggggatcacctgaggtcaagaccagcctggccaacatggtgacacctcgtttctactaaaaatacaaaaattagctgggcgtggtggcatgcacctgtaatcccagctactcgggaggctgaggcaggagaatcgcttgaaggagaatcgcttgaacccgggaggcagaggtttcagtaagccgagatcgcgccattgcattccagcctgggcaacagagcgaaactctgcctcaaaaaaaaaaaaaaaaaaaaaaaatcatatgttggctgggtgcactggcttactcctgtaatcccagcattttgggaggtcaaagtgggagaatcacttgagcccaggagtttgagggcagcctgggcaacaaagcaagaccctgtctaaaaaaatttaaaaattagctgggtgtggtggcacgtgccttgtactcccagctattcaggaggctgagttgggaagattgcttgaaccagggaggctgagacttcgataagccatgatggtgacactgcattgcagcctaggtgacaaagcgagacagtctcaaaaagaaaaaaaaaaaagaaaaaaaattcatacgttgaaattctgatccccagtacttcagaatttgatctaattggagacaggatcactgctgattttattagttaaattaagatgaagccatactgaatagggtgggcccctaatccaatatgatttgtgtccttatataataataattttaatatactcagatggagaatgccatgtgaagaatgaagttttgttgccacaaaccaagaaactactagaagccaggaaaggtctgaacagatctctccctaaggccctcagaggtatcacagacctgctgacactttgatcttggacttctagtctccagaactacgagacaataaatttcttttctttaaccactcagtttgtggcaattccttacttggcagacttaggaaactaatacagtagatttggagttgagtgggttcctggaatctgcatttttaacaagtactccgggtgcattagaaataaatgttccatgggccacactttgagaaacattgggagaaggatctgaagaagaagaaactcaggtaacaaattggaaggtaacaagtaagtgcttactgttcccccaatttattagcaattataaattgacttaaggtccatttgcattccgccaggaatgctctccactccctatttctttttttctctttttttttgagacggagtctcgctctgtcacccaggctggagtgcagtggcacaatctcggctcactgcaacctccgcctcccaggttcaagcgattctcttgcttcagccccctgagtagctggaattacaggtgcgcgccaacacgcccggctaatttttgtatttttagtagagactgggtttcaccatgttgaccaggctggtctcgaactcctgacatcgtgatctgcccgcctcggcctcccaaagtgctgggattacaggggtgagccaccgcgccaggcctccactccctatttcttcccaccatatgtggaaaactcgtatttatactttaaaacaggttgaaaagcaccactctccttcccttgtttcccctcactgaaatttcatcatttccaactgtgtgttaccccattttagatgcttcaattgttacagttgtaaagctgtattgtaattaatttgtttaatctgtatcctataagcagagttgtcgtcatgttcttcttggtattcttggcttctagcccagtgccaagtacaaagaatgcactccacatttttcccttaattaatgaattaaataagtaattacattctccacttcctctggttttaattatagaaaatgtcttgatggaaaccacatttaagaaaatcagagatactctcatagctacatgttggcctgtctccttgctgaaaacatggcagttgaggagtgcagaaaaacaaaatgagaagccttatcatatttaactaatgcaggatgagaaccttgaatcacaaaacaattcatattcccacaaaagacgacataaaatattttttcaaagcagagtaaattgcattagcttttaattaactgctggagaagtactaaaacatttccgccaagttgcaataagaaaatttagtgggaacgtctatcactactgaaagttactaggttgggaccaattttcaagcttagcaacattcgagatcaggataccgtgtgacagctttgaccatctcccgtttgcagaaactggtttgggactcctacctgtccgcctggtccaggtaaggaaagccattgctgagaagagggccgacccaccccaaggtatgagttatttcccaaaccgacccgcttcgctgtaaaatatgactggctcttgattacattatttaacactggtgaagcagaatcagtggtcgcccctccacctgtctgcctcatttgccttgctcaccattaagagtcaagctccactgcagtagtccgcagagtcggagcagaaattgtgtggacaaacgctcccgggttgcccggacgacaggccccgcccacttgagctccaggaaaagagcgcagccgcgcggaggctcttccggccggcgccccgccccctttactgacaggttgcccacctcccccaacgccaccccgcttcgcagtagacggacagaggagtcgtagcggtcgaggcttttgcggctccggcgtgccggaaagtgcgtgagtgccgccgccggggagttttgttccatttcccggatcctggggtctggaggcgaaatatgctctgggcgaggaccaccgggtgtgggaagagggttctgagcgtctcctgacgttgacggtttatttcctagagtgtgttgggtctttctgtgagggtttcgagaaggaaacaggcatgcgactggttcatgcagcggacacccggtgggaggcctgggcctctgcggtttaagccagcagggggatggggctcattcggcaatttaaagagagaaataagttggctccagagggttggttattttaagattaatgaccttcggattcttctttctgctctattgtttactttctgtgcagcgtacgcgtcctttttcctaagagcgccctcaacaagaattgaaaatgaagcaattcctggctaaaatattccttaacatgaagatcgctgaggccccaaagactcattagtttcccgaggtcacagactaattgtactaaccacacaacctttagaatttcagtctcctcccayatgaagaaacgccggcaccttacaccgacaggaaaactacaattaagtgaggctgttctcctcaagcccgactgagttctctgtaattgtagggcatacctacaccctgttttagcattatgagacctgaaatacttttaaattactggcaccatttctcatctctgaattataagtttataatgctctatcccttccagtgttattgactacatgcattattcatagataagtagtaggactaagctagtctttgtgggttaaagtgttattatccctattgtaacctgtaactattataggttgtgtaatagttattagcattttacatccatatcctggtagcaagataaaaacattttaatagcgacttcgtacagagttcttactcagtttaccatagctgtttgatatgaaagttaaggcttccttttaaattagtttcagtaaaactaatgtttaatgataaaacacctcagtcaactcaagttaggattcatyggggtaaggagatagttcagtaatcccaagttaccttaaaatagtgggcttttagaggaaaggctttactgaagctctcactgtatctaccccatggggaacaatgattaacaactttggccaccacataacccccagtaaaatgacaattttccattagcctggaactggaactggttaagtcctaactccttagcctagaatgacagggggaaaaaactatcaatggggactgcaaccgctgtctcatccagcgcacacatccaagttttcagaataatagggggcttctcttagtccttaactcttggctctttacttaaaacagtaacctccatgacttcatgcagagttcaggagcagcctcagggccctgctgaactcaaaattgtttattcactacattgtgaacccaaggagacctatttctcttagtggctaaagtaaacctaaatgcttcaaggtcaactgcataaagataaactgcattgcctggtgtggtggctcacgcctgtaatcccagcattttgagaggccaaagtgggtggatcacgaggtctggagatggagaccatcctggataacacagtgaaaccccgtctctactaaaataatacaaaaaattagccgggcgtggtgatcagcacctgtaatcccagctgctctggaggctgagacgggaatcgcttgaacccgggagagggaggttgcagtgagccaagatcgcaccactacactccagccgggtcaacagagcaagactccgtctcaaaaaaaaaaaaagataaactgcattaattcatataagttaacatatcaaagaagaacaaatttgccatagccacactagttacatttttgctgggcaagtgttttatgatacataatttgtaaaaagaccaacaactaaaaaggacaacttaagccaggtccctgaaagctttcacaagttacaaattgtgaattaaatgaagctgtgctgttaggcattaaacaggttatagtttgcaattcgaaattacatctatgtatatttaattttaaattatgtgaaaagaacatggttccgaagaggtgttttttgtttgttttgttttgagacagggtctcaaaatgaatttttcccaggttggagtggtggaacaatcacggctcactacagcctcaacctcctgggctcaagcgatcctcccacctcagcctctcaaatagctgagactacaggcacacgccaccatgcctggctaatatttttttacttttagtagagacaaggtctcactcactatgttgcccaggctggtctcaaactcctgagctcaagccatcctccagccctggcctcccaaagtgctgagattacaggtacaagccaccatgcccagcctaagaatcattcttagtaagattatttcacgctgctaatggctctctgccaaaagaaaaaaaaggaagtttaaagaatgaagtagttaatatagtgggttaaataccctcatctaattttactcccttccaaaactactaaatctacagtaaaatgatataaaaataaattggaaaaatggggacaggaggtaacagcaataaaactcagaagctggaaaacaggtgaatgaatgtgacttagcacaccagaaaaacccaattcactctgcagaattctcaaaaggcactgaaacacgcaccctgaaattggaagtggactacatgaaagctatttgagaaacacctctaagtaactctacccccttactcccatagaagactagaggtttatttctggacaaagtaatactagtccctggactggggcatcctcaggcattctagagaagcacactggaaacaaagttaagtgaatttaggaatacataatgctggatgcagggcccgcattcctcttatccttagaagactggaagactcaactctgaggaactgaccagcccaggaggagcaatccaagatagtgacatcagaggttccccagtaaaggcccacccagagcaccctaagtgaagcccagagtctatatgcttcacccacgtatacagatctaaaaagcttttttgtcttttcattcataagagtagacagaaaagaatgaccagactttggaagaaagctcagaagtgatagagacagaagcaagcagaaaagcaatttgaagtaaaacagctcagaagtgataagagacaaaagcaagcagaaaagcaatttgaagtaaaacaacagaaaatttcaagaaagcaagaatcagtgaacttggaaagaaaaaatgcctacataatatgcttgttatgtgaattagctcattaactagtagtaagtacaatttaacaagtattaatgtagaagtatttttttccctaggaaagaggagccagaaaagcagtaaatgtatgaccttcagttaagaaaaggtcatggcttcactgctatgctggcggcaagtgtctttcagattttttcattgattcaagtgtatattccagggttccttccccagagaggcataccccaagttctgtgtagccatcgactgaggacaggtagagtcacctatcctacccacgaattggcagccttgtggtttagatggatttctacttccatgtgttatttcagcatctcttagctctgttcttagactttggctggcatttctattatttttttaagttttgctgaagtagaattgacactgaattacacttacaaagtataattcgataaatttggttcatatatatacacatctatatatgcatatttatagatatatatgtgctataatatatactacatatagtataatatatagtatacatatttttgtttccatagaaacaaaaataaaaggaattactatgtactatatactatatatatctactatatactacgtagtatgtactacatagtacatatagtacatatagtacatactgtactatgtagtatatagtagatatatatagtacataactatatatgtactacatagtacatactatgtagtatatggtagatatatataccatagtatactatatactaaaaatggctggctacctctgtttgtcaatatatattttaatatatttttgcaagtaatagaaatgccagcaaaagtctaagaacagggctaagtggtgggaaaactacatactatatactatatagtatctatactaattatatagatttgtatatatacatatatgtatacatacacacacacacacacacacacacacacaatgaagccatcaccacaatcaagacaataaatatatccactatccacaaaggttgccttgtgcatctttgattccttcctggtctccagcccctactcccattcccaggctactctattataatttttgagtatttttaacatctctatagtagtctccagctatgctgagagcaatctgagtggtcaaaattaactgtccaggaagagcagaaatgaacaactcagtagaacacttggaagaagaaaatgagaaaatcccccatacaactaaataaaaggctgggcgcagaggcacacacctgttatcccagcactttgggaaaccaaggagagtggatcacctcaggtcaggagttcgagaccagcctggccaacatggtgaaaagccatctctactaaaaatacataaattagccatgcttagtggcaggcacctgtaattccagctatttgggaggctgaggcaggagaatcacttgaacccaggaggcggaggttgcaatgagttgagatcaggccattgctctccagcgtgggtgataagagcgaaactccatgcttaaaaaaaaaagacaaatggaaaatagtacagaaaaaaggaagagaacatgtttagaagttcaaacatccaaataataaaagttccaggaagggagaaaaaagaaaatggaggagggaggaaatcatgaatgaaatcatttaaaattttttcccaaattgaaggaaacaagtgtccagattgcaagggccaactgagtgtccagtacaatggataaaaataaatccattatcaacacatcactaacatttcaaaatcttcatggagaagattctgtaagtttctggggagagagagaaaaaatacatcacatacagaggatcacttaccaggactgctttgaacttaatagcaatggtaaaagcaaacagacaagcaactacttcaaaatgttgaaaagaaaattatttccagctttcaattctatactcagacaagctatcaaacaaatagagggagccagccatttttagacatccagggtctcatttaccttccatgtacccttttcaagaagttaggatgtgctccacagaaacaaaaataaaaccaggaaatggaacactttggaatgtagaaaatgggataatcaacatagaggataggcaagaggaatttctgggagcatggtcaagtaggattccagcaccacagttgtgcttcttgatgtagagagcagtcagtccagaatcaagcagcatgactcacattgatggctattatcactaagatccctgctgccattgtatcatctttttaatctgaggacattatgcccaggcaagcctggctcagattcttaccggtatttgccttgtcttgaccatgtggtgatgaaattcctgctctcttctgtgctgtgctgactggaccaactgaggacactcatttttacccttctttttcaacctattcctgaaagctgatgttgggcgttggtgagcttaaagcagaaaatagccttcctccttcccatttttgctatgtattggccagaaatcaggtatcaattctacactttgatctttccacatgcttcagttgtgaggagcccagtattcactcatgacattgcaaattaacttctctagaagggatccagaaagcctggagaaggtaaagccagactagggctgtttggctttaattaacagcagcattgttgcccttttccttgctagattcgtgcttgctgctcaaattgccaaaattaaatatttagggcaatgttcatgagtgctgggaaaactaaagagaataagcaggaagtcattagaggctatcttggtagagatggggaaggagaagcaattggagaggggcacatgggggcttctaagacttttgtttcataacttgaatgatgggtacccagatgtatattttactttaatttgtacattcatattttatgcagtttctatgtctaatacgtataaaaatttcagattaaatgaaatacatgaaggcactggcaccctgcctttcaaattgtaaaaggtgtaaattttgcaaaatgcctaaaggggcaggtgaggtcacaatgagaatctacactattgtacttcggggttcaacccaaacagaagttaacaggagaacttaaattatgtagcgcatgatttttaattgagtatggtactgtaattttaatccacattttctgctagttaactataaaataacccttaaaactgatctaaaagcctattttaaaaatataagttgcggccgggcacggtggctcacgcctgtaatcccagcactttgggaggccaaggtgggtggatcacaaggtgaggagatcaagaccatcccggccaacatggtgaaaccccgtctctactgaaatmcaaaaaaaaaaaaaaaaaaaaaaaaaaaaaaaattagccaggcgtggtggcgcgcacacgtagtcccagcttactggggagactgaggcaggggaattgcttgaaccagggaggtggaggttgcagtgagctgagatggcaccactgcactccagcttggggacagagcaagaatccatctcaaaaaaaaaaaagttgcttcctgcttgcctatcagagtaattcagtccaaaagtcattacgtggggctgagcaaggcaggcatctggggaaggtgggggcgagagaaaggctggcaaggtagtagcccagcaggggatactggagcccaaatgcagtgagggcctctgggggtagggacttgtgcacagcagcagcctagcaggggatgaggagggcatcctattagggtgaaggaaatggtggcacaggtttttggaatgggaacaaaaggtgagccttacccaggagggaggaaatggtgcagtgtaagttgcttgagcccaagaagggtaggttgggggaaagggggaagagaagaccatgcatgtgggatggtggcagtggcactctggcattaggtggcagagctcagagagtagagtgtgtgcgccgaatggtgacagcaagaggattttgattacatagtgagagaaggggtgatgattataaaaagtaaatttattaaggacaagtgggaaccagacttctcactgttcagcaagagtattaaacccatgtaaagaggggaaatgaaaataaaccctgtagtattggaattgaatgttaggtagcagattatatggagattaatataaaagtcatacacacatacaacacctaaatccgtatgtatatacacttgcagctttgtcacttagaggacctgggaacagtgacagtcccatggtgattagcatttttagcacccagaccttggtttctaaagcattccatccagattatagtttctaaatgctattctccattaaaaggactaggttccttggagaaataattttacaatggacaatcttagcaaatacattaattgggtaatcaaagttatcaatcacaatggaacaaattgcagttgcatccacctgataggatgcaatgttaagagcttactattcaactctaacaggtagtgggaattattttctaggtttagactgtcatgatgcctttaagtttggagcctcctctacaaagtagagttaacacattacacataaagaagcatgattttgcctgttcctcagggacaccctcttacaggttgttcatttggcctcttcaccaccaatcttactgcccatctactattccaacctgcttaactcacccagtttctgctagttttcagcctccctttggataagcacccatcagcatttgatcaggcttctrctcaatgtccttcaagtggctctggccttgccttgagagcagggtaaagataatctcttgtttgttgataaggaaaactcaggctcagcaaggttaattaatctgtacattatgcaactggaatttaaatctagtttaactcattccactgtggcataaaaggaggtacacgtacctatctgtgatgacaatccactttctcatttccttcatgtgacttctcacaatcacaattgtctttgcttatgtctcccataggaaaacgtcaattatgacagcaggtaattttatcggaagtgtttataactatatcccagtacgtggaacgaaaaagttatcaagaaatatttattgaatgtaaaaaaggttaccattttctcaatgtgtataacctttttttatttttttaagactacaatgcagctaattgcaaaaaaattttcctttctttaggtatgttatgcataaaagtggataatttacatgataaatgaaaatggccaattctttaagaggagaagtactaaaactttataaaaatgtaagtaattatgttgccaattttataaaaatgttattatatgacatggattgtttagaaatatataatctttctttttgaagctgctgtatcttggacgagactatccaaaaggagcagactattttaaaaagcgtttgaagaacattttccttaaaaacaaagatgtgaagaatccagagaagatcaaagaacttattgcacagggcgaatttgtaatgaaagagctagaagctttgtacttccttaggaaatacagagctatgaaacaacgctattattcagataccaacaaaactaattgatcattactactttaatttagctatcagtgccagctgtttatgtataccagatgttgtaaaataattctaacttaaaatgggaagatatacatgttgtgtaaaaaatccctgagctgccctactgaactaaataggtttcaacttctgttcatacggagaaagtatcagcaactttatgctcaattttgatacaaacatagcaatttagctatactaccgatcataaattaatgagcacccaattttgaatgaaaatataatacacttaatcctctaacttaataggacttagccaattatttttagcttatttctccattttactgacaagagaatgccatttaccgaacatttaataagcaaaataatttcttacacacttcttctcttaacttttgaaaggaatcccttattttttcacccaatttggtatattaacagcacatactcaaggttcactacaaaacaaacagttcctggtaatgatttaaatgtagttatagaaataaataatatgtwtggagtcattacttctgaccttgaaatagcctgctggtgactggcattaacatacataactaactattcaattatttccattattaatgttgctgctgctacytttgggcctaaaaccaagtcacctgttgtgtatcaattaccttctttgataaaaggaaataaataaataatgttatcctatttttttgtcataaaggcagatttgttttgcatctacttctaaatatggttttaagtttaagcaaacacgcctttacataatatccacagcaccttttagaaataaaggatacttctaacaagctgcataaaagattcactggtatactatagtgtctatggcttataaagtattccatatccatttcggggcaaacagttcaaatttcatgaataaatacacactcatagtcactgtaactatttttattacattacaataattaggagtagtacagttcatgacaaaaatattacaaattttagatcacttcacagcacatactcctataaacatttaaaagttaatttcaattaaaagagtggtcatttttaatgtttgatatgaccaacattcctaggtcagcgcaaccaaatgatggaaaacaactggatcacactgcatatgtcccacaaaagaaagcacaatgtacaaaatgtgcatgtttcagtttacactatacaaaaatagttaaaatacattccaggtaaacatgttacattaagaaatagtactagtaagaaattggcactcaaaggaaaaatgcaaaagtattttcaacatgaaaacacaagacagtggaattggaaactttcggataaaacactgtaacccagttagctctgtgggggtgtggggggagagatgggccctcaacatttctgcagataacttttttcccctaaattcatctaaattacctatcattatcccaaacaggcacttcaaactattaaactaaaacacagatcttaatctagttatgactattcttcaagaactcatgtgagtatctttctttagaaagaaagtttcattttatgacagctattcaggttctcaatgcagaattcatgctatccagtattaacacagaagttactaaatataaattcagctttaaggtaactgctgggttctaaaaaacattactacacaattatcaagaaaccattactttttgacaaatggaaatcttcagatagtttttgctgtctaaaaaaaaatcccctaaaaaaagttatatactgtttgaagaaaaaatgtttagaagaaaaaaaaaatcaatggaatacaaatgagatgaacttgtgcaaactgtaacttaacatgccccacaaagtttctatgtatatattaggacaaaattgtgcaatggtgacaacagttttgataacctataaaagttaggttctaaattcctatgcagtgtgactcagttaaatagagcctagaatgcctacttgggaacattcactcaaatgatacaatatacgtctgctatattcttccacaaacatgttaatgcctaagtctatgtaatttagcttttttttaaaaaacttcaacaaggatttttgtctttaaggctgtaataattaggtaacatttatttctagaattctccccctttaaaatctctacaaaaacaaatcttttgttaaaccattcaaagttcacataaaggtaattaaccactaccttaaaaaaatgcccatctacatcaaaaattcaagaggcctaaatatcccctcataagcactgcagttcctgaagtatggccatttctttctctgtgtagaaacgaggtactgtgtaagtcttaacaccctacctaaacagtgttccaaagatctgtagtttcacatagcaattcagaaatcatagtgatttttacatagaagtttccttgtctgtgaactagttcaggcacctgtttatttgtacccagataaaactattaatttttaagtatattttaattacttatgcagagaaaactggaatattacacatttgggtcaatatgaatatctgacatacaccttaatgtgtacagtaattgtcccaaaagaatcacagttatgccaaataaaaaaacaatataatcaagtttattcctttaaaacaatgaagtgatttacataaagtagcttgatcgaagagtttcagtggaatcgtagcaaaacaattatagagctggcacagagaccaaaccccttctttgcaaaactaaaatacgcatcgtgttatctctgggtcgtataccaaaggccttagtaagatattacagaccacactagcactacctaaggaccgggattatgtctcttgtttggggataccatatacccagtgccttgtgcggtgactggcatctggtaggcactcaataaatatttgctgaataaatgagttctgcaaaacaggtttatgaggccaaggtgggtgaatcacttgaggtcaggagttcgagaccagcctggccaacagggtgaaaccccgtctctcctaaaaatacaaaaattagttgagtgtagtggcacacgcctgtaatcccagctactcaggaggccgaggcacgagaatcgcttgaacctgggagatggaggttgcagtgagctgagatggcgccactgcattccagcctgggtgacaagagcgagactctgacaccaaaaaaaaaaaagtaagcttcatgaattaaagtatttttcattgcatgaagatttctggttactaaaacaatggaatgtattactgttaccaggagtagtcctagttatagattacctaaggaattctttcagcactatctttattaaattctccttccactggatagggttctgtctattcataccaggtttgaaaaatcctactgtcgctaatggattgggcagcaaagagatgttcaaagcatcagccaccacctgaaaattagtgattaggtcaaatccctttatggtatctgtcagattctcttgagccctgaggaaataagatgtagggcatttctgatgtgactcagtgggaaaacttcatggagatatccacagcagcagtaaatcttatggttaggggaattacaagtattaaaactgcatcaagtcatggggcatgtggaaggtagggaggcaagatgacactaatatggaagaagagtcctaaaacgagaatggatattcaaatataaacttcacctcttgcacaattttgcccaagactggcactgaagatggtgtaacataggttaaaaatttacagattgtgctgagcttgacaaataagtgtatccttatgtaaatggaatataaatcacatagttgtaaaaaaaaaaaactaagagtttgagatgacttcttttaacatgaagaaatggatagtaagtgatgtcctcaaaatcagagtcctaaaagacacctatctagaacctaagtcaccttcttcctagtccagtgatactttcacctcaccatgccatctcacttcatttattttaaaataagtaacattttaaatttatcaaaaggattgtttttatttttattttaaagcattattaaatatggatcagacttgaaaagtgtttatgcaatgttaatttaaccagtgttaagagaactagccaaacctagagattgtaaaactttttcacttcattgtttaaaaaaaaaattaatgtcttggcacaccaccaccccaaaatctcaacttttgagttaatatttaaaagtaatttttaaaaaagagtttgttttcttaagaaacaaaagcaatgctcttgatttgtcagcaggaccaccacagagtgagattgtatcttgttgagctatccaaactgccctagtccctccccattttgactaaccaatgcatgacaacactggatgaccgtggggacacagtccatgctgtgaaactctctatgaaagctcaaaggttcacacagggcctggccttgcaaccttggtctcttcaacacctaataagctataactggcccaaataatcttttaatgtcacaagcagaattaaaactatcttcaaagactcaagttgaagaaaagatttaaagttatactatgaaagagcagtctgacacagggagactacatttaattcctatgagaattttttatacttgttaaaatcttttcaattattataaaaatttagtagcatgtaaatatagccccaaaatggttgctataataatccccatttcatactgggtctgccttaacaggaaaagctattaggagtctttatagtaatttatctaatgtgaaaaggaaatggccttataatagtttccattgccttgtaatttttttccatttttttctttttatagaaaaaatataatattttggggagagtgaccatgactaatagcagtggaaaggagacaaaacctttgtgaacagtgtaactttacattcatcagggatgacaaactataggacatgatgcctagaagaatcatcatcaggaagcccataaatttgtgttccctcaatgtttcagtaaaaaccaattagaaggtctcaactgaaattagtaattaatccatttatgtgactagataaaacacagaatagggatgattcaaaagcttcattaatttgtttcacaccaacattcacaattggtaagaaaaataagaagtaatcaactgcatgcaccaaaaaccccaagacagaaatcttaggtattcagtttctttttcacaggcattgctagttcaaaaaccaaaactctgggaatactggcacttcgaggaaaaaaaaacttccactgtcattttaaaataagcatttaaggtaaaagctaacagtctgcatggagcaggaaaaaaattaggtaatgctaaaacaaatgctaataatttagtgtaatgtacaaaaattaccacttgtactagtatgccttaagaaaaaagtacaaattgtatttacataattacacactttgtctttgacttctttttcttctttttaccatctttgctcatcttttctttatgttttcgaatttctcgaactaatgtatagaaggcatcatcaacaccctgaaatacataaaaagtattaaaatgtgaatatatacgatggcttcatgtgtacaggtaacaaatttcattaatggaaaaaatattaagaaaggattctttatgtttctcttcaggcaactgaatatatattacatatattaggacttttagaattcttaaatgtcatccgcataggtgttttgtcaatattataaacaggaacactaattttcacaaaagacaaggataaccaatggcacagaattttaaataaggtaacgactttttcacaggagaacttaatttgctactattttttccacattggcaaacctaagtcatcaaaatccaaatgcatgtgtgtgtgtgtacacttaattgtccttatgtttctggactttagatataagccatgcaactgtaaactatgttcatatatcttcacacacagtaacagtatttgagctccagttctatacttacgtaaaatccattggatttaaaaatttaccaagaagtaaacagtattcgaacatcctattccaataatttatcaacaagtaaacagtatctaaacatattatttcagttttcaaatgatatatattaagggattagtttcaattcatatatttatcattaagaaaaaggtttaaagtgaccccaacacaggagaataccactttaaaaaaaacactaatacctcagatttgtggagaaattagctaaatcatttgaaaggtcttatagtttaccaatttggaggagattctttctatcccataaagttttaatttctgttgtattcaaaagcttgccatataaagccaaatatcctgtcttcaaagagtttaacagttagtcattgtgaccaccatctatttatgattaaagcaaggttatttaaatttaatggctaaaagcgattttaagccataatacttttcaacctaataatctacagtgtgaaaaatggcactctcaaactggtagtagagtagattttaaacctgcagtacttaaattatgcaagatccatacacaagtcaattcttgtcatgtctccaattaaaagaaaaatataaataaaagcaaaaaatgaagaaaaaatatgattctctct

SEQ ID NO: 6971 - DNA, 18800 bp, Homo sapiens
  misc_feature (1)...(18800): n = A,T,C or G, or insertion/deletion polymorphism (see Tables 1-2)
gtgtacctggttgagagtgtatgcgtgtgtgtgtgttacatttttatctgagtcactgtgagaatatgtggtttatgtgcgttttcctagtgtctgtgtgtctcttgtagggtctatgtgtctcctgaggggtgggtggaggtgctgtaggcaaaacatggggttatatttggaaaggtggcctggagatggaagtactgctgtcctctgccttgctctttgacaggggccacctgaacttactacacagcacctgagtttagtacagtagcacctgtgcttagtacatagcacctgtgtttagtatagtagcacctgtgcttagtacatagcgcctgcatttagtacagtagcacctgcgcttagtacgtagcacccgtgcttagtacagtagccctgcacctgcacctcccgttccctttcatacctgctgtctccaggtgacaagaggagctggagttggtttctggcctcctccaggctcccctgcatcaagcgcagctgagcagttccctgtaatggggagagggtctgtccctttatctggagcctccagttttgaaaatcagccctggatctccaactgctgcccagtctggctgttcagcaggccccatgcccccctttccccagtcttgaggcctgggactagggctgtcaggcacgtctgccacgtctgcccctctctcccctgcggccagccctctacagccacaagcccgaggtggcccagtacacccacacgggcctgctcccgcagactatgctcatcaccgacaccaccaacctgagcgccctggccagcctcacgcccaccaagcaggtaaggtccaggcctgctggccctccctcggcctgtgacagagcccctcacccccacatcccccgggctcaggaggctgctctgctcccccaggtcttcacctcagacactgaggcctccagtgagtccgggcttcacacgccggcatctcaggccaccaccctccacgtccccagccaggaccctgccggcatccagcacctgcagccggcccaccggctcagcgccagccccacaggtgagaggccctggctccaccccctcccttactgtccctgcccccttccatgttggtcccaccccttctgttgctgtccgtcactgtggggctgtgcatgcagcaggcctagggctgctgtgaggaagcactggcaggcgtggaggggtggggtgggcttccatgaagcccaagaggcacaggcgaccccaggaagatggggcccaccttacaagaacatctcagggactggactgaggaaaatgatgaagtaattgttagaggcagtggagagtaacgataaggaccaggtctgtgagccagaagcgactcttgcatgtgtttggtttggcttggctcagggttgaacattctttgaatttgttgccaacatttcaaaatcaggaattttcacatagaaatccagatttctggcatcttttggaaaattggaaaaattcatattcccatataacagtgcaccaggcctcactgcatccactcacatcggctccaatgacccctggcggtggggcggtcacctgagtttgtaatctatgatgccattgtcaggagtgggcactttggagtcaggtgggtgggctttgcagcctgcctttttgcaagctgccccctttctataaggttcctggacccggccctggcagctgtcatgacagccactgaggccattctgtgtcctggcattcaccccatgaggcgtgtccatgaccacccccattttacagatgagaaagtggacactcaaggaggggagggacttgcctcatctcccacagctaccagatggcagggccaggactcgaacccaggtcccacctcaaagcccattctcttaaccattgccatcagtcagggttctccaggaacacagaaccaacagatttatttgaaggacttggcccgtgtctgcggggggctggcaggcctgaaatctgttgctggcagctccggggagtgaattctgcagccttgaggcagaattccttctctgggaaaccggtttttgctcttacggccttccactgatgtaggaggcccacccatattttcagggtaatctccttcactcaaagccaactgattgtggcattaaccacatctacaaagcacctgcattcacagcagcgcctagattagtgtttgactcagcctagccaagccaacacgtacaactacctacctcggcatctcaccggggcttctccagtgttcacactaagatgtactcaggccactccatgggcggccgtggaccctggctgggaggctccctttgttaagaaccgagggtagaggtgtgactttggggttcctgttatctgctgtgatccaggaggtgtggccctgcctccccatcctgagtacccctagggacaggcaggtggggtgggtgtgggtgcctggtgggtggctagcagccttgtttgcctctgcagtgtcctccagcagcctggtgctgtaccagagctcagactccagcaatggccagagccacctgctgccatccaaccacagcgtcatcgagaccttcatctccacccagatggcctcttcctcccagtaaccacggcacctgggccctggggcctgtactgcctgcttggggggtgatgagggcagcagccagccctgcctggaggacctgagcctgccgagcaaccgtggcccttcctggacagctgtgcctcgctccccactctgctctgatgcatcagaaagggagggctctgaggcgccccaacccgtggaggctgctcggggtgcacaggagggggtcgtggagagctaggagcaaagcctgttcatggcagatgtaggagggactgtcgctgcttcgtgggatacagtcttcttacttggaactgaagggggcggcctatgacttgggcacccccagcctgggcctatggagagccctgggaccgctacaccactctggcagccacacttctcaggacacaggcctgtgtagctgtgacctgctgagctctgagaggccctggatcagcgtggccttgttctgtcaccaatgtacccaccgggccactccttcctgccccaactccttccagctagtgacccacatgccatttgtactgaccccatcacctactcacacaggcatttcctgggtggctactctgtgccagagcctggggctctaacgcctgagcccagggaggccgaagctaacagggaaggcaggcagggctctcctggcttcccatccccagcgattccctctcccaggccccatgacctccagctttcctgtatttgttcccaagagcatcatgcctctgaggccagcctggcctcctgcctctactgggaaggctacttcggggctgggaagtcgtccttactcctgtgggagcctcgcaacccgtgccaagtccaggtcctggtggggcagctcctctgtctcgagcgccctgcagaccctgcccttgtttggggcaggagtagctgagctcacaaggcagcaaggcccgagcagctgagcagggccggggaactggccaagctgaggtgcccaggagaagaaagaggtgaccccagggcacaggagctacctgtgtggacaggactaacactcagaagcctgggggcctggctggctgagggcagttcgcagccaccctgaggagtctgaggtcctgagcactgccaggagggacaaaggagcctgtgaacccaggacaagcatggtcccacatccctgggcctgctgctgagaacctggccttcagtgtaccgcgtctaccctgggattcaggaaaaggcctggggtgacccggcaccccctgcagcttgtagccagccggggcgagtggcacgtttatttaacttttagtaaagtcaaggagaaatgcggtggaaacttcttgcttgtccacaaatcattcagatggggtttgggcaggtagcgggaggctggggcaggccagaggcctgcgaagaggagacaggctccagcacccacgctctcacaccccacatctctgcttttcttgctctgctgagactctaatgacaaagccagatttcatcttaacctcaagcttctactttttaaaaaaattttgttttggagacagggtctcactgtcacccaggctggactgcagtggcattatacagctcactgcagccttgaactcctggactaaagggatcctcccacctcagcctcacaagcagcctcacaggcgctcactaccatgcccaactaatttttgtattcttttttttatagagacgaggtttcaccatgttgcctaggctggtctggaactcggctcaagtgatccacctgcctcggcctcccaaagtgctgggattacaggtgtgagccaccatccctggccatgagcttctacttcttttctttttcttttttttttttttttttgagatagggtcttgctccattgcttaggctagagtgcagtggcgcaatctcggctcactgcaacctgcacctcctgggttcaagcgattctcccacctcagcctcctgagtagctgggattacgggcgtgtgtcaacatgctcagctaatttttgtatttttagtagagatggggtctcgccatgttggccaggctggtctcaaactcctggcctcaattgatccacctccttggcctctcaaaatgcttggattacaggcatgagccactgcacccggccacaagcttctacttcttgcagaatgcctttgtcccatgaaacctagtccacgagtgctatgacacttcctgaagtcttgggtggggtgaacgcacaaatcctgggggtgtagagaggaggaggatgtttacttaaaatgtcttaaggttcagcattgacagagaggcaatatccaaatcactctaagttttgttttgggtcctctgacaattgagtttccataatctggtcggctcagagacaccatcatgtgtggtatattcacaaatgcagacaaagaaaattctagaaagccaggggtgaaaaagctctcctttctcagacgattctgtgaagtctatgtgggctaaggagagaagaacaaaagtttctctgggccttggcctcttggggatcccttctctcattttctaaaaactgtttctcacaccaggctaaggaggtggtggggaaggtctcccttcccctgcccacctcagacagttctagggagatggaggtttcaccacttggccactagtctcaaataactggaaggttccttttttcctgaggtcatgaaatgttctggaaccacagcgcccccgccagccctccgtgggagcacagaggggcnnnnnnnnnnnnnnnnnnnnnnnnnnnnnnnnnnnnnnnnnnnnnnnnnnnnnnnnnnnnnnnnnnnnnnnnnnnnnnnnnnnnnnnnnnnnnnnnnnnnnnnnnnnnnnnnnnnnnnnnnnnnnnnnnnnnnnnnnnnnnnnnnnnnnnnnnnnnnnnnnnnnnnnnnnnnnnnnnnnnnnnnnnnnnnnnnnnnnnnnnnnnnnnnnnnnnnnnnnnnnnnnnnnnnnnnnnnnnnnnnnnnnnnnnnnnnnnnnnnnnnnnnnnnnnnnnnnnnnnnnnnnnnnnnnnnnnnnnnnnnnnnnnnnnnnnnnnnnnnnnnnnnnnnnnnnnnnnnnnnnnnnnnnnnnnnnnnnnnnnnnnnnnnnnnnnnnnnnnnnnnnnnnnnnnnnnnnnnnnnnnnnnnnnnnnnnnnnnnnnnnnnnnnnnnnnnnnnnnnnnnnnnnnnnnnnnnnnnnnnnnnnnnnnnnnnnnnnnnnnnnnnnnnnnnnnnnnnnnnnnnnnnnnnnnnnnnnnttttttggcccaactctcgagcaagccttcatcaccatcagggtctcatgggcagtctgggtttgccagcccagtccttgaacttggagagggaggtggggcttggaaatgccttgtccccagggtgggggggacaccttgtccttggagctggctgagccctgtgcccatggctgggttcagtttgcaggtatagctgtagcactctttgctggtgggaatggagaggtctcgctggccttctttgcctttttcttctttttggtcccaagcgacacctggtccccrttgagctcacctgacttctgcttctggactgtggccatgctggtgggggtggtggcagcgacagccgagtcgacactggccaccttcttggctttctttttcaacttccttttcttctttgcctccttctccacwgttccagggctgtgratggctgactcctgtaggatgtcggacgccgacacagctgcctcccggcaccgccgccactcctcgtcactgtcctcactgctgcaacgagagggtaccctgggttagctggagtcaggacacagccccagagctgcctctcgctgtcctcccttggtccaggtcaccagraggtggccgcagagagaggcaggtagtgagttcaggcttgggagtgaggccaacctggcttccaatactggcttctgggcgtagcagccttgtgacctccttaagtgacttaacctctctgactgtatcatctctaaaacggggatcttaacagagtccaggcctcccagggatgtcccaggaggcaactatgatcaagtgaggtgtctggcccaagacaggtgctcaaaagcagtaaacatccaaagctgccgccaagagggctttccctcccgctgagctcaygatttctccagctgcctgacagggccactgccttggcctggtcctgactggagtctgcttggctattccagggaacccaccaagacagaagaggagaaaaaaggaggggacgtgaggagaggtgtgagttctcacctggagctggagggctgtcgctttcggsggggttggggagactcttccttctcacggcctccagggacagatgtgaagaaaaggcggaaacctaagattcaatggggcagagtcaaacaaaaacaaaacaaaacaaaaagaaacataaaaaaataaaaaataaagaaacaaaaaagaaaaaaattttaaaaaggaaaacgaaagaaagaaaagataaagagaaacaaaaaaaaaattttaagaagacacaaaataaaaaaatttaaaaaagaaacaataacaaaaaaacccaaccaagcaaacaaacaaaraaaacaaaggagcagagtcagcacccccagatgccagcccctcctcccaggtgccaggtgctgaagctgccccgcctctgccctcaggagctcctggtccagaggcaaagacccaggaatcagtcgtctaactacaaagtgattctgcatctgccaagggtcatgctgatgcctgatggagccagtggagggcgcgctggagcaggagccagcagccacatcagctcagcaagccctcagaggcttctggaagtcagcacttgagctcctgacctaaggcagccttcaaagtggcaaatgtgttggtacaggacagacgcagatgggcgaggctgtggagggcagcagtaaagtgctcctgctcagggtgacacagacgaggccgcctcaggcaaatgacttcgtttctcagggcctcagtctccttgtctgtacatggggttcaatcataatacctgcctcaccacaggggctgagcagatgaaagaatggtgaggtggcccatgcctgtaaccccagtactttggtagtctgaggcgggaggatagcttgaggccaggagtttaagaccagcctgggcaacatgacagaaccctgtctctaaaaaaaaatacaaaaattagccaggtgtggtggkgcacgcctgtagtcccagaactttggaaggctaaggtgggcagatggcttgaggccaggagttcaagaccagcctgggcaacatagcgagatcctgtctctaaaaaacataaataattagccaggggtggtggtgtgtgtctgtggtcccagctactcaggaagctgaggtgggaggactgcttgggtccgggaggttgaggctgcattgagctataattgctccactgcactccagcctaggtggcagagagagttcctatctcaaaaaaaraaaaaaaaaaaagaatataccaaaactgtttcgcccacctccagacacacattaggtgcttaataaatgatagcttctattaagtataaccactcaccatcatcctccaaagcgactttctgtaccttagcttttgctggctcctttgctgcttctgagatggtaatgaagctacagggagacgagacggttgatttaagatgagatttttggataacgacaaaaacaaaattctttttcaagtggaggggatggggtatgtgattgtaaatgcaaaagcgaaagcgtgctggcctagtaagagggctgatggtctggttataacatgctgaccagcctctgccacgcgaactgcagtgcttcatttctttaaagcccactttattccagtaagtgttgaagaagttttaaagacatagtaaaacaagatgaggccaggcatggtggctcacgcctgtaatcctagcactttgggaggccaaggcaggcagatcatgaggccaggagatcgagaccattctggctaacacggtgaaaccccatctctactaaaaatacaaaaaattagccgggcatggtggcgggcgcctgtagtcccagctactcgggaggctgaggcaggagaatggcgtgaacctgggaggcggagcttgcagtgaactgagactgcgccactgcactccagcctgggtgacagagcaagactccatctccaaaaaaagaaaagaatttaacaaaatgaatgcaatttcaaataggacaaagagatataagggcaagaggaacagaaagacctagaagtgtagtcaggaagtcctatacacttgttagagagagggcatacattttgctctgagcttcctagcagcaagcatgaaaagggaaatatgaccaatctagaaaactggttcagaggacagcttctggagcagggcagacctgtttttaaatttttttttttaattaaaagaaattggagataattgtagacatgcagtagcaacaaataatgcagatgttccatagaccctccatccattttctcgcaatggtaacattgtgcctcgctatagtacaacatcacaactaggaaatgcaaattgatccaattcatggacctcattcagacttcagagacctgggttttgaatcccggttttgtcacttattagctatgtcccttaagcaaatgactttatctctctgagtctctgttatccacctgtgcagtgggaacgatgaaggtccctacctcttaaggttgtcacaaggattgaaggggaaaatggatatcaagcacttgtggcacacggcctagccacaagtagctgctcagcaaatggtagctatgatgacgatgcagatgatgactgtcatcaagaraagcttcagccttcacargctctctaacataaaaataaaccacatttctctagaggcacaaggccaggaagcatgtgtctggtgagtgcagatggagatgccactgtgcacagcagagaacaaggctctcagcaatgccctcgaggcagaygcagcaatgccctgggtgctttccctaacctcccttcctgtatgccaaaggtgccccccaagccctgttcaggaaaagcaacccggggagagggagtagagatgatgccacccaggcacctgttcttgaccccacacagtggttcaatggtggccatcaggggcatttggcaatgtctggagacatttttggatgtcacaactggtggggtgagtgctactatcatctagtaggtagaggccagggaygttggtaaacatcctataatgggaagaaggatagacccccacgacaaatgctagtcaaagatgtcagtagcgccaaggttgagagacactgacctaacactagggaccaaatgcagtatcatttacatttccttttttttttttgagatgggatctcactctgtcacccaggctggagtgcagtggcacgatctcagctcactgcaacctctgcatcctgggttcaaacgattctcctacctcagcctcccaagtagctgggataacaggtgcacgccaccatgcccagctaatttttgcatttttagtagagatggggtctcaccatgttggccaggctggtctcgaactcctgtcctcaaatgatccacccgcttcagcctcccaaagtgctgggatcagaggcatgagctgccacgcctggcctaaggtatcatttagatttctttggagaaacatgaaaatgctgcagggaatattctaaccatggctgactggcatttctactgcagaaacatctctgtgactcagtgcaatgccaagcaggccctgttcagcctgaagccagagagtcacaaaggaaaactgctcccacaggctgawmtgcagctgccttcctaaacacctcctctacwttctccaattgaggggaaccctgtgggattcaggctgcggggctctggcccatcattctgtctcagaagaatagctggttcacactttgggaaggctcatttgtcctttttgatatctactttgaatggaatgacaatggccccaaatcctgcctcatctccctttcaaaaccctgccagggctctgccagtcaggaacagatctagaccagtgtatccccagacctgttccgcaggttgttgactggttttccatgaaacaaaggcactgtggccaaacaagtttggaaaatgctgggytaaacagttacacaggtctcttcactacaggaattctcagagccttgaatatactactctggcttgcagtctgcaaggacacgtggaggtatgtagattgcagtgtttctcacgcttctttgctgttggacctccttttttctaaagccacgctttgggctagtgctagaatccaaatgtttgtgtcctccccaaattcttatggtgaaatcctcaccccagctgggcatggtgccttacacctgcaatcccagcactctgggaggccgagccggtggatcacttgaagtcaggagttcgagaccagcctggccaacataatgaaaacccatttctactgaaaatacaaaaaatacaaaaaattagccaagcgtggtgggtgcgcacctgtaaccccagctactcaggaggctgaggcatgaaaatcgcttgaacccaggaactggaggttgttgtgagccgagatcacgccactgtgctccagagggagactctgtctccaaaaagagaaaagaaaaagagaaatcctcaacccaaggtattaggattaggagatgggggcctttgagaggtgattaggtcgggagggtggagccttgatgaatgaaattgctgctcctataaaaaaggtctgagagagacccctcgcccatgccactatgtgaggacacagtaggaaggcgccatctgtactgggaagagggctctccccagacactgaatctgctggtgccttgatcttggacttctcagcctccaaaatgtgagaaatmcatttattttgtttataagctacccagtttatgttattttgttatagcagcccatatggactcaaacaggttgtatccttgacacctactttaggaatgccaacctgaatccttaccgactgggttatcaacctgtgctgagaatgtaagatagagacctggcacagtgtctagcatacagaaggcacccaagaaataggaacacggtccttccttgccctcttgtggcgggaatgagcttctcgatgttcctctcttactctcatggttgcaggataatgcaggggttaagaacatgggcttggcccggcacagtggctcacgcttgtaatcccagcactttgggaggccaaggcaggtggatcactcgaggtcaggagttcgagatcagcctggtcaacacggtgaaaccccgtctctactaaaaatacaaaaattagcctggtatggtggcaggtgcccgttaagtccagctacttgggaggctgaggcatgagaatcgcttgaatccaggaggtggaggctgcagtgagccaagattgtgcgtgccactgcacgccagcatgggcgacagagtgagactctgtctcaaaaaacaaaacaaaacaaaaaaatgtgggcttggagtcagacgcacttgggtttgaggcccaattctgttccctcctgggttctgaatcctggctttgtcacttaatagcggtgtcccctgggcaaatgactttgcctctctgagcctcagttacccatctgtacagtgggaatgataacagtccctacctctcagggtcatcagaaggattaaatgagaaaatggacatcaagcacttagcacagagcctggccacaaacagttgctcagtaaatggtagctgygatgatgatgtgacttcaggcacacctgtctccttgctgacagcctgtttcctcacctggaggataaaggtaacaacaggacccacatgataatgttctttataaatgcagggagatgacatatgccaggtgcctgccaccgtgccagcctggacaccgtgagctcccagccaatgtgagccattgctgttcatattaacaagggcaagagaggagaaactccacctttgtttacctgtccagcagggctcccagcttcttggctacgtgggctcggaattcaggggtggtctgaagctcgttgccatcttgttcatgctcattcaccttatgcctacgacacacacaaagagacctcacttcctgcccgctcagaagctgtccccatgagcacagggaccatgtgtgtcttgttcacctggaaatgccaggcgtgaagcctagcatctggcacacgcaggggatcagtatttgttgaataagtgaaacttgaacccaaagtgcatagtacctgaggctcggttgggaggttgacaactggctatttgcagcacctgtggaaaaatgaaaattagggcatttatagaggaaacaatgacagcaacaacaaatgcgtgccaggcactattttcagcagcttaaaatacatataactcatatatatacatacacatgtaactcatatatattatatttatatataacttaaaatagttatatacccataacttcaaatagttacatataatttagttatatatgtatataatatagttacatattttatgtaagtacattatatatatatatatcttagttatataacttaaaatatatatataacttagttatatatataaaacttaaaatagttatatatataacttagttatatatacataaaacttaaaatagttatatatgtaacttaaaatatatataacacatataactcagtgaatcttcccaacaacccgattggagggattacaattatcccattttgcagaagaaacgtcaaagatatgtaaaataacttggccagagtcaaatacctaataagtgacagggttgggctgggggcccaggccatctgactcctgagccccctcttaaccaccacgctgtgctgaacaggcaggtctaagtgtgatttgactgcacagtttaatgcctgcctggctgtgtgctaagtgccgtggaagagagagaagatggctcttttgtggatcacatttttcaagccaaaacggtggggatgcccggccttttggtcattccctcaaaccagatactgaatgccttttattaaccaggtgttgtcattgctgagcaacttactcgactatcactgtctgcaggagcttacattctagttggtggagagagatgataaacacacatacgtaaacaaaatgtcaagttggataatgctaagtgtatggaaaaaaacggaaacaaagtaggcgagagaggtggggagtgttgggctggggattgttaacataaaggtgggcagagagggcttcactgataaggcaacatttgaacagagatttgagagaggagagggagtgaaccaagtggacatgtgggacacagccttccaggcagagggaaagcatctgcaaaggccctgagactggagcctgctttgtgtgtttagaaccagcaaggaggtcagtgtgaccagagcctgcccagtaaaccgggagcagcagagatggagaactcagaggggccagatcatgaagggccctgacgtgggccaatgggaggacctggactttgaggaggaggagctctggaaatgagcagagaagggacataaactgacctgggttttgacagaacatctttggctgctgtgcagcgtgagactgttggggcaaaggcaggaacacggagtctgctgcagtaattgatgtggtgagaagtgggtgaactccagatagatgcacttttaagatggagtcaaggccgggcgcggtggctcacgcctgtaatcccagcactttgggaggctgaggcaggcggatcacgaggtcaagagatcgagaccatcctggtcaacatggtgaaaccccatctctactaaaaaatacaaaaattagctgggtgtggtggtgcacgcctgtagtcccagctacttgagaagctgaggcaggagaatcgctcgaacccaggaggcggaggttgcagtgagccaagatcacgccactgcactccagcctggtgacagagcaagactccgtctaaaaaaaaaaaaaaaaaaaaaaaaagatggagtcaataggattcactgatggactgactacagggcgtgagaaatgagtgaaagttagctctgaggtttctgacttaactaacaagacaaaacgtgcttgtatatttaaggggccaactgaacaaagtggacacttggtagctccgggcccagtggagggccatggtgtaagaaacagctccatgggggcactgctgtgtttatgtcatcacccatacacattgcatctgtgtcctagtaccttgtggtctgtgtcactgtactccagagcacaacacagaatgctaaacacgccccatgctcctggaggtgggtaatgtgggggcctggatggacagtctttaaagacctggtctttcgtcttcagcacataatcacttggaagaagagcatctcttccatcatgactacagtgtgatgaaggtgaggtaccgtcagggaacagaaacagtattacagagggagacagttcagttgagtcctggctctgccaccaagctgtgtgatgccgggcaagtcactttctctccctgagcctttgtttttctcatctataaaatgggaatacgattaccaaccttctggagtcagtgttgtggacgctgtttccatacccatccccttcctggatttgtaagctacttgaatacgtggtctgcctctttttacctctgtatccccagatcctgccatagtgtcttggtttgaattaattgtcagaaaaataagtcaaagtagatgccaccctaaaattaaagtggtttgagtgacgagttcatcactggatttaagagctgtctctagaggttacataaataaaatagtgacctatatttccacagtcatggaccaaagggtgggagttttgaccacaatagacacttgtccatggcagagtggcacagcagcaatgaagagcatggacttgggagtcaggtaggcctgggtttacgcctggttctgccactcacaaattggacaaccttggccaagttattttaccattatgagaatcagttttctgtaaaatggggctaatacaccctcttgtggcattgctgggaagatgaaaacagacaacaaatacaaagtgtttagaacaggggcaaaaagaaaattctcaactcctggtggctattactagacgcactcaagaatgtaatctaggctgggtgtggtggctcatgcctgtaatctcagcactttgggaggccaaggtgggcggatcacctgaggtcataagttcgagaccagcctggccaacacggtgaaaccctgtctctaataaaaatataaaaaaaaattagctgggcctggtggtgggcacctgtaatcccagctacttaggaggctgaggcaggagaattgcttgagcttgggaggcggaggttgcagggagccaagatcgcgccattgcactccagccttggtaacagagcgagactgcgtctcaaaaagaaaaaaagagaccaggcgcggtggctcacacctgtaatcccagcactttggaaggccgaggcaggtggattgcctgaggtctggagtttgagaccagcctggccaacacggtgaaaccctgtctgtactaaaaatacaaaaaattagctgggcgtggtggcaggcgcctgtaatcccagctactagggaggctgaggcaggagaatcacttgaacccaggaggcagaggttgcagtgagctgagatcgtgccattgcactgcagcctgggcaacaagagtgaaactccatctcaaaaaaaaaaaaatgcaaaaaaaaaaaaaaccccaaaaaacaaacaaacaaacaaaaaaaactagaagccgagcacagtggctcacacctgtaatctcagcactttgaaggttgagaagggaggatcacttgagcccaggagttcgagaccagcctgggcaacatggcaaaaccccatctctacaaaaaatacaaaaagtagctgggactatacatctgtagtctcagctacttgggaggctgaggtgggaggatcatctgagtagggggaggtcgaggttgcagtgagccatgattgtgtcagcctcggtaacagactgagtcctagttttgaaaaaaaaaagagcgagaattaggcaggaggaggaaagcagtccatgtggaaagaccaaccacatatttgccaccatgtattgggcctttaagatgtgccaagcactgtagattgcattatctcagttacttctcaaccttatggggtgggtactatcactacccgcactgtacagatgaggaaatttaggtacagtgagatttaagtactttgctcaagttcccaccgctaatgagatggaaaggcagatctgtaaatagaacttgcagagaaaactgtggttatggtactagggggtgagaggggcagactatggtctggaagctacctacaggaagtgcagtatggcaggagggaaggaagggagaggaaggcaatggatcaccaaagggcttgtaagtccttttaaacaaatccagcggttcttaaccttgctttgccatagccttctctaacagcctggtgaagcccggttctcttctcagagcaatgttttaaatgcatgaaatgcaacatacaggattacaaagaaaaccaatgataccgaaatttaattatcatgatagtaaacaaccaaacttgtgatgtatgtgcttcttacatcttagatatagagatgggtctaaaaattagagtggcacattttaaatcagggatgagtgtaaatgacttttttccccaatatctttttatcaataaaatgatatattgatatctgtatctgcaaagattgtaatgagatatgaaaatctgtgacttctgttgggataaagtaacggcattgccagaactactgtggcttagtgcttgcaagacggaaagagatgctaaaattcagtcagagatgaatagaaagcaaagatgcaacatgttttcattccaaattcaagaacccttgggttctatccatgattaggccccttgatgttgcggggctctgtatttattcccagggcactagggagtcacggtcagagtgatgtgctgggcactgctcttggcaacaacctccagggtgggagaatgtgttggaggtggggaaaggctgggtgcgagaataccgggagggggctgttgcagttatctcgaagagacggcagccttcccagtgtggggcagtgaggatagacccaaggaggcagaatcaaaagacatttgggtacctcagcttccccgactggaataatgaaataccctccctactgcacctgcccatgctttcaatctgcactacacccagtccctggaggtctctcggggaaggaagccgagtcccagtgactctctcctcaccatccatcctctcaggctccaggggaagatcccacgcccctcagccagtctccccaaacatagtaccctaccggctcttggcttccctgccacgtgcgggcgttgctccaagccccaagccggcattgccgcctcgcggcaccgctccagctcctccgcatcgctactgctgttactactttccgaatcgctcacagtgccactgggcgccgccatcttgaaccaccgcaaaggattgtggagaacaccgccgttatcaagcctccttcatgacgtcacgtgagaggagaggcgcgaggcattgtggggattgtagttccaagacttggaccgccattggccatgaactgtactgggttggggataccaggtgggaatggggaggtgggcggttctcaaaggcaagagctagaagggcctaagagattaacttctccaatcatttcttgatgacagatctccagaggggatgggaatctcctaaggagttaatgacagacccaggattagttcccaggttttgattccatgtcatttattctagtaatttcccagtccagttgggcctaagaaacaccttagagagctggttaaactgcagacttttgggtctcacagaaaatactaa

SEQ ID NO: 6972 - DNA, 12840 bp, Homo sapiens
aatggagagtaagatggaaaaataaacttactatctagattaagtcaaaggaaggcatttcacaaaatccaccacagtttctggttaccatggcatttagttttgatacaccaaacagattcaagaaaacaagtatgtctttgcagaactagaagttcttttatagctgagtcatttttaagccctattagtttggcacttaatgaagaaagtcgtgcacagagattttcaaagagacaaagagatttaagaaaaacagattctttataacctcttcttaggcatcaccaattttcatatggaagcagaacagaaatagtttgtgattccccaatacctgtgttgcatggttaagcttctttgtggaattgatagtcatggttcctcacagatggttaacaatgggagagaaaaagtaggtggtctgttcagattgacagatacaaatctccaagaacccagagatccccaccttcctcattctcagaaatgctcggaaatggattcctgttacttcataagaaacctttccaagcatttctgttgtgacaatccctgtgttaggtgctaggaaacaaagatgaacggaatatgttcttcctccagagatttgcagtctagacggagtgatagccaagaaatcacacaattataattatgtgataaatgttgatatagttatataataggtgctctgtgagctgataggggaagaatagtctgaattaggcaactgaaaatggcttgttgcggaagatgattttaaatgtgatgatagcttgtaaaggtagctgtgtcaacttcatggtggcttgtgcaagagtaaattaagcaatgtagtatagcaggaaggaagaaattaagtgaagttaagaaattgcacatatatctagtaggactacaataatatatattcatgatatgtaagtagaaatttccaagataacttcccttatataaaactccagtcattcttgggccttctcaattttggaggataactaattgaataacagttactgaatacttacttttataaaagtgacaaatacatgtcaatattgctttctcatttagattttcaaagtcagagcatctaacgaataatgcagaataccaattgtatattttgaagagaaggaacacaacccagaccacctcaaatatcaaatgtcattaaggaaaatagtaatgtaagcttgtgaagttaatgttagagagttttttacagccatgtagatcttattgtgacctgatgtgtgatgaagttttttttgttgttgttggtttttttgtgtttgttttttggttttttttgagatggagtctcactctgtcacacaggctggagatcctggctcactgcaacctccgcttcccgggttcaagcaattctcctgcatcagccttcctagaagctgggactacaggcatatgctaccatgcctggctagtttttgaatttttagcagagacagggtttcaccacgttggccaggttgatctggaacacttgatctcaagtgatccgccggcctcagcctcccaaagtgctgggattacaggtgtgagccaccatggctggcttaagttttttaaaataagaatcttgcactgcttactttcaaagctattttttagactaggttgaatgtttttcaatcaggggcattaatgacaattagctcgtcctccaacccctgtcttagttgactacctgctgatatgtagaaatagagacaaataggtagagagacaatattatcttccccatgatgatgtttttcttttttttttttttttttttttttgagacggagtctcgctctgtcgcccaggttggactgcggactgcagtggcgcaatctcggctcactgcaagctccgcttcccgggttcacgccattctcctgcctcagcctcccgagtagctgggactacaggcgcccgccaccgcgcccggctaattttttgtatttttagtagagacggggtttcaccttgttagccaggatggtctcgatctcctgacctcatgatccacccgcctcggcctcccaaagtgctgggattacaggcgtgagccaccgcgcccggccgatgatgtttttcttgagttatttccttgtatatgttattcaaaaataaagttaactgatcctcatctatattcgttcacggtttcattactttggtgatttctttttttaaattattttcttagtagaaaaacatttacctaaaacgtttcattaccttggaatcaatttttatttcatccatatcatttcatttcctcctgatttaaatgagaaccatcggctgggcgcagtggctcacgcctgtaatcctagcactttgggaggtctaggcaggtggagcacttcaggtcaagagttcaagaccagcctggccaacatgatgaaaccctgtctctatgaaaaatacaaaaattagctgggcattgtggcaggtgcctgtaatcccagctacatgggaggcggaggcacaagaattgcttgaacccaggagatagagtttgcagtgagccaagatcacgccactgcactccagcctaggtgacagagtgagactctgtctcaaaaacaaataggaaagataatctctttatttaaaccacaaatgccactattttcaggaaggttatgccaaataattgtgattacctttggcagaagaaccttgcttttttttttttcttttttaatatttctagaacctggttgtaggtattggtctacaggaccataggtactgcttagtgaagcgtaatcagcacaggagcaaatgaacccatgactatccatattagatatggtgttactatattaacaaagaaacggtaatgatacatcctggcctggatggtggttaagaagtatttctgacactttctcatgaaatagatatatgattatgatataatgttaagtatataaaaagcaacatataaaattgtgtgctaaaatagggactggacctatgaaatgataagattttgtgtttgaggctggacatgatggctcattcatgtaatcccagtacttttggaggctgaagtggaaggatcacttgaagccaggagttcaagtccagtcttggcaacatggcaaaaccttgtctctgcaaaaaatacaaaagttagccgagtgtgctggcatacacctatggtcccagccacttgggaggctgaggtgggaggatcacttgaatctgggagtgtggggctgcagtgagccatgatcatgccactgtactccagcttggcatggcagagtgagaacctgtcttaaacaaaaacaaaataaggccgggcatggtggctcatgcctgtaatcccagacctttgggaggccaaggtgggcagatcacctgaggtcaggagtgcgagaccagcgtggccaacatggtgaaaccctatgtatactaaaaatacaaacattagccaggtgtggtgatgggtacctgtagtcccacctactctggaggctgaggcataggccaggcgcggtggctcacaccttaatcctagcactttgggaggctgaggcgggcggatcatgaagtcaagagatcgagtccatcctggccaacatggtgaagccccatctctactaaaaatacaaaaattagctgggcgtggtgatgtgcgcctgtaatcccagccactcagaaggctgaggcaggagaattgcttgaacccaggaggtggaggttgcagtgagctgagatcgcgccactgcactctagcccaggtgacagagcaagactctgtctcaaaaaaaaaaaaaaaaaaattactactattcttacttgggcttcataatctaacttaaagtagatactctaaatcttttcccctatggaaaacaattatggctaaaacattttaaattaattaattaagtagaaactgggtcttgctttgttgcctaggctggtctcaaactcttggcctcaagtgatcctgctaccctggcctcccatagtgctgggattacaggtgtgagcggctgtacctggcctaaagttttcttctctggatcttttttttttttccttttgagatagcttctcactctgttgcccgggctggagagtagtggctcactgcagcttcaacctgccgggcttaggtgatttttccacctcagcctcccaagcagctgggactacaggcaagtgcctccatgcccggctaattttttatattttttgtggacatgaggtttcccaatgttgcccagtctcgtctcaaactcttgggctcaagtgatctgccagctttgtcctcccaaagtgcatggattacgggcatgagccaccttgcctggcctggatcttttctataatggacatttctcacttatttacatctacctttattcttaagtctgtggcacttaaatttgtttcacattacttttccttgtgaaaatagtaattgtatgttggtgtttatatacactttttttttttttttaagatctagtatctactagttagcatttttggtgcctttgatatctcagatcaaagattcacaaactttctgtaaagggtcagataatcagtattttaggcatcatggcccagaaaatctgccattgtagcatgaaagcaaccattgacaagatataaacaaagcttcatttacaaaaacatattgctggctgaattgactcataggctgcagttgtcagcccttgccctagggaaccaaacaaataaaaatggctgccatgatggttttacattctagtatttttcatgtctaaaacttcttcacctctgttttctattcatatctttgggggacaagagtgtacaggattttgatttccacttactgtttgataagaaagcctcttttgttgtaactacatattaattcccagcagtgcatgtccttgattctcaggaagaagggaagttgaaaaaaaccatataagcccatttaccatactctcattagtagtatgtactcacagaacaatccttcttaacatctacttgtcaatcataagacttaaggaaaaatctaaagtttcacagttagaaaatcaggccctgtgaagatggtggtgagggaaatgaagggactctgggtgtgggtctggctttctgctactgactcatgttggcagatatcttatttattaatttattctcaacttactttttacagatttgccatcatttgatttgtctgattaactttgatttttatcccaaataatttttttcatctgtttatcttcaatacaatattcagaatatcaggtgaagtgtcaacatcctttggaaaaagcttcttcaatttctgtgttaaagtttatttttatgacttttcccctctttatttatttgcttagttacattattgtccataaattccatcatgaagctgaaaaatgaaatcacatctctaagagaatattttttatttttaaaattgatttattcttttttttactttctttctttctttatattttttgagacagggtctcactctgtcacccaggctggagtacggtggcaggatctccaggctcaagtgatcctcccacctcagcctccctagtagctgcgaccacaggcacacaccactatgcctggctaattttttgtatttttggtaaaggtggggtctccccatgttgcctaggctgatctggaactcctgagctcaagtgatccacccacctcggcctcccgaagtgctgggattacaggtgtgagccatcacttctggccactaggagaatatttttaatgttttgcgtttttgagttgaaataaaagtgaccctgttggaaaatatgtatttcataagtattattatttgcattctatttaaacctgaatatagattaattagaaggtggttaaaataatctatatgcagattgtattttgtaattaatctatattcagaaaatcactgaaatataaaagtttgttttttacatcctgcattcatgtcttgaataatttccccctcaaatataaactgatgtttctctgtctacaagactagtagtcaaacatctttggatggtcttragacataccatactcatccatttaattcagcagaatctgagcttcactctcccctcaactaagatttacatgattataattatattgtttgtcatttttatcccttcctgtctgaacaaaaactgtatggaatcaacaccaccgagctctgtgggaaaaaagaaaaaccttctcccttcgctctgctggaagctggagggcgctaggcccctgtgcagtagtgcatagaattctagcttttttcctcctttctctgtatattgggctcagagagtacactgtgtctctatgtgaatatggacagttagcatttaccaacatgtatctgtctactttctcttgtttaaaagaagaaaaaaaaaactaaaaaaaaaatgaggttatagaaggtcagcaaagggtgggtttgagatgtttgggtgggttaagtgggcattttgacaacatggcttctcctttggcatgtttaattgtgatatttgacagacatccttgcagtttaagatgacacttttaaaataaattctgtcctaatgatgacttgagccctgccactcaatgggggagtcagcagaaccygtaggatcttatttggaattgacattctctattgtaattttgttcctgtatatttttaaattttctttttgtttcgctggaaaggaaagatgatgctcagttttaaacgttaaaagtgtacaagttgctttgttacaataaaactaaatgtgtacacacacaaaaaaaactatattgtttgttatacccttttgttcatctaagatattctttatcattttttgctctattatgtattgaaaacgcaatttattttccccagatttggagttgggaattttgtattacctctctgtgtcagtcagtgactgacttgaccttatgttgtcctcgttttattggcacggggattgtcaggactggggaaggataccttgctcagtattttttacgtagtgtggccttgggcaagttagcctcacttagccctactccttacatatgaaggataggaatcatgacttttgtatggtttaaataagaaaatatatgtaaatcatttagcaaggtccttggcagtggcagctaataagaatgatcaaatcatgagaagagattttatactcaatttatcttttgttatgtgccttgaaattccctccagtggtgcttggtattctggtgcttggtattctaggtaggtagtgattagtctacccaatcagagaaagtgatcattttcctcttatatcatgaatctgggagaaaatttactattatgtcgtaaaattgagaatcccaatacacatttgtttagttaattgggtacatatgctaatgaagaattacagtcaatttgagcttcacaaactagctgagaataaatatgctcttgaacttttgagtactcaattttaatttaataacttttgaaaaaaacgcaatttaactttatttgctgaatcaatagtcttttgtctgaaagttttcaattgtgcattctcagccgcagactcatttgttataataaagaactataacatacgcattggttttagagagacaagttgcagtttacacttacatgaatcatgtctctttatatatagcaatatgacatctgtgatttctgctgtaatctaaaggaattttccatttttatttacctttttggcctgatttatctcattcattgaagtttttctaaaaaaaaaattaagatttaaagttttaacttggcattcctttaaactttctccttttggtgtccatgctttcagtggcagtactttctgggctcatgtaggtagttgctggccccccatgggctgtactcagggagctgagcggttcttgttgatgagaccctattctgcccactcatattctgccttccctaccgttgtgatgtttatactgtgtcaacctttattaagatgaattataatcatttccatacagctgggtggcagttgtggtagtttacattatcaacgcaaaactcagacttactcagccaatttggatgtcaataaaacatttgttacttattttcagttttatcattggttgtaatttatacttagaattgaaaatgttaacatgtgtgactgcgtttgttttaattaagtgtataattaggctaatgaaccttgtaaaaatgtagtggtgcaatccttaatataatctaagtagttaaattctaattatgcatccaaaatcatgtacaaagaagcagcatttcaatggctcgctttgtgctactgtaccctagcttgtcttttttttttttttttttttttttttaagaaacattgttcaaaaacgaagtcttgaaagaaatatgcatgtaacatacttttgtattaggaaaattattcagaagtgatatttgtatgcagcggatctagtgttttcttcttttcaaattttgaagaaaatataggagactagaagaggaatagatttggggatgtttcagctccatcaggaaaaatccatttgcttgaaaagcataaagccaagtagggtttatcttagattcataaggaaggtagaggaggttctgtttcacataaccctaaaccctataatcatttcttcttaaatctgcgccaccccactaataaatgcccaactcttttctcttatgtcttttgtcctagcataacaaatctggggttgttctgctcttggaaccattccccaaacagagcttactccaatgcctcctttcctgacacctacctcttttattttttgcaaagtggtttcttcttaggatggaacatggttgacccaataaggaattctggtattagctgccaagaaggaacactgttctctctaccagcacactgacgtgccaaaatgtttagaacttcatttgctttgattactttctctaataaaactgttgcagcagccataccataggcagttggttctttattactttagaacaaattctgatttctagttgagtttgcaaaatatatccctaaaatttgtttttaattatattgtttgatacagctttaagttgcaaatgagggctatggaaatgtatctgctcgcgagcacacatttttcaggaaagtgtctcttcttactacttttgatttccttcggaggttcttttcattctcagtctagctgttatcagttggattttcttgtgacttttttttcttttgatagttcattcccattcctttgcaatcattttcacctagtggagtaaatgagataattttgcagattgtaccactttccttttaaattaatccattctttttgagagaatgattctaatagtgtggttaagtacttagaaatcagcaggctactaacttcaccttaattcagtctgttcccttgattccctcatctcttgctgtgtcagtcagggtgatgttctttctcttctgcagtcttcttccaccctctatctcccagccccccatcaggtctcttgtactgagtaaaaggaatctgagatctgagattttcatgacttataacaatgttggttgctaaagcctcagttaataaatttccattatagtttctatacgtgtgtggtgtatttatgatttgtagaatttctactgtatgttaggattgctaatgcatttggccattgatgaggacttatttagaaagacaaccattcaagaaatggaacattacatgcttttctactttggattattagtctagaatgattaccagaaaaaaaacacataggtttaaaactgaaaaattatgagatgaatataaatctgttcatctacttatctgaaaaaaattattgatgttacttctagaattaaagagcagatttcagctggcacagtggctcaagcctgtaatcccaatacttttgggaggccaagtccaggagttcaagaccagcctgggcaacatagtaagaacccaagtctacaaaacaaacaaacaaactagccaggggtcgtggcacacacctctaatcccagctactcaggaggctgaggcaggaggattgcttgagccccggggtttgagcttgcagggagctgtgattgagcccagtatacctccagcctgggtgacagagcaagattctgtctcaaaaaaaattaaagtgaaaggatttataagttacactgttttaagttgtcataaatactgaaaggatgtatccaagatagtttcataaatttaaataaatgatcggtgctaattaactgctaagtaatttccattgaagaccgtttatatatatattttttgtaaaaattttctatggactattttagattacacaaaatataatacataaaaacatactaattgttagtcacttacatttgcagtaatattgtagtcatattgggaaatcgcttatgatttcaccaattaaaaactcattaactggagtgagtcttggtagggcatatttttattgcaaggactgaaagcatacacattccaaagtgtgtctggtttatagtggtggcttttaactacagctgtggcacctcacatgtggttctgttatgattacctgtgggtgactgagacatcgtttccttcaagatgttctttgaaactgaagtggtcagatatcttctgcatgttctagtggtaccagtaactgtgatttaatttaatttcttgtattaatcttcctcattcatcggaatcatagatatatcttaataattcttttttttttttttttggacggagttttgcgttgcccaggctggagtgcagtggcgcgatctcggctcaccgcaacctctgcctcctgggttcaagcgattctcctgcctcagcctcccaagtagctgggattacaggtgcccgccaccatgccaagctaattttatacttttagtagagagggggtttctccatattggtcagtctggtattgaactcctgacctcaggtgatctgcctgcctcagccttccaaagtgctgggattacaggcgtgaaccactgtgcccagccaataattcctttgattcctatgatagaacactttgttcagttgcagatagaaacaaacaatagggaatcctagggagataaattatggacatgatcacatttaaacaataacttcatttttggtttggcatattatggaatctctttctcccaaatatgaactgagagttaagttgctcctgaagataaatcagtgtactttattcttacctttgagttgagataattttatgtctttatatagctgcaataaatgataataagtaactaaatattatctacataatattgtttttactagtcactaatatttttagactcatacactagtaggtgctgattctcaacgctaaaattacaattcttgcaagctgataggcttcactctagtataatgccaccttattatatttattaataaaagttagaatgaaattaatcgttgaccttactaatatcgtaaaaatgttaaactgcaaaattacaagtgaaataggacttttgtctgagtttaatttatttcagtttcatcatatctttagtagaaatgatactttcatgaagaaagaatctgaatctaaattctattcacttgtattctattttgcaaaaagcttatagaaatagacttgtttgcctcagctaacctcaatcatgccttcattcagttgtcatttatcaagaccttactactagttcagtgcttgaactgctgaatcttatgttctctgtctgctaggagcttatagtccactaatagagataaggtatgtatataagagaagaatatgataaatgcccatggaacagatacaacaattactggaaaagtatagaagcagcagctatctattttggtatatttctactggaaaacatacacagatgactgcaagttgtaattctcttggaaatcatttagacattatttgaaaattagggtgtcttcaattttaatttatactggattctcaattttagtgcctgtgtaggcatttttgtctctttattaggattatgaaagaaaatacaaattttggaagtaaaaagactaagttcatataaaaattttaatatcatgatacaaaatttatgccagccatcaagtaattaacagtggctcatgcctgtaatcccagcactttgggaggctgaggcgggtggattacctgaggtcaggagtttgagaccagcctagccaacatggtgaaaccccagctctactaaaaatacaaaaaaattagctgggcatggtggcgcatgcctgtgatcccagctactcaggaggctgaggcaggagaatcgcttgaacccaggtggtggaggttgcaatgaaccaagatcatgctattgcactacagcctggacgacaagaacgaaactccatctcaaaaaagaataaaataagactaaaaaaataaaaataacagcaatcagagctaggttaagacccctgttgcttatactgtgatttaaagaagtatttcttatttgtcccagtctgtatagaatgtcctgtcagttatgaagttagtgttctagagcaagtagggggtctctcaaaggtcattcacacttttctttcaacctgagtgagtacatatgtggaagagatgaatggtgattggcattatttgaacctctcactgacgtttttctgttgggtcatttgtttttccaaatgggaatattgacaataaatgacttacttttgggagacctaaca

SEQ ID NO: 6973 - DNA, 13771 bp, Homo sapiens
ttatagagaatattagatgagtactgaatggtcgagatgattaaagttaatattttttactgctaaccatcagctgagccttcaatgagtcataatctttttgctggtggagggttttgcctcaatgttgatggctgttgatcaaggtggtgcttgaaagttggggtggctgttgcagtttcttaaaataagacaataatgaaatttgtcacgttgattgacaattcttttcatgaaagattttttttaaaccacaggaaaacttttttttgagacagagtctcgttctttcgcccaggctgaagtgcagtggtgcgatcttggctcactgtaacctccacctcctgggttcaagcaattctcctacctcagcctcatgagtagctggcactatgggcgtgtgccaccatgcccggctaatttttgtattattagtagagcttgggtttcaccatgttggccaggctggtcttgaactcctgaccttgtgatctgcccaccttggcctctcaaaatgctgggattataggcatgagccaccgcacccggccaggaaaacttccaaagttagagtcaatcctctcaaaccctgctgctacttcataaactaagtctatggagtattctgaatcctttgttatcatttcaacagtgttcacatcttcaccaggattaggttccatctcaagagaccactttctttgttcatccacaagaagcaactgcttatccattcatgttttattatgctagtgcagtgattcagttacatcttcgggcagccatagccttacaaaatgtatttcttaaataatgagacttgaaagtcaaaatgacttcttgagctatgggctgcaaaagggatgttgtgttagcaggcatgaaatcaacatgaatctccttgtatatctccatcagagctcttgggtgaacaggagcactgtaaatcagcagtaatattttgaaacgaaatcttttttttttcctgagcagtaggtctcaacaacagtgggctgacaatatttagtaaaccacactgtgtaagtagatgtgctgtcatctaggctttgttgttctatctacacagcagaggcagactagaattagcataacgcttaaggactctaggattttcagaatgataaatgagcactggcttcaacataaagtcatcagctgcactagccccctagcaagggtcagcctgtcctttggagctctgaagccaggctttgacttctcctctctagttatgacagtcctgggcggcatcttttcccaaaataaggttgtttcaactccaatgaaaacctattgtttagcaaagccgtcttcatcagtgatcttaggtagatctcctagatgacttgctgctttatcttgcacttgcacatttttttttttgagatggagtctcactctgttacccaggagtgtggtggtgtgatcttggcttacagcaacctccaactcctgggttcaagtgatcctcctgccttagcctcctgagtagctgggactacaggcgtgtgccaccacacccagttaatttttgtatttttagtggaggcagggtttcaccatgttggccaggctggtcttgaactcctcacctcaagggatccacttgcattggcctcccaaagtgctggaattacaggcataagccaccatgcctggcctatcttgcacttttgtattatagagacagcttctttccttcaacctcatgaaccaacctctgatagcttcagatttttcttctgtagcttccttacctctctcagccttcagaaaactgaagagagttagggccttactctggattaggctttatcagaatattgtggctggtttaatctatacagaccactcagagtttctccatatcagcaataaagctgttttattttcttaccatttgtgtattcactgtaggagcacttcaaatttccttcaagaacttttcctttgcattcacgacttagctgtttcaacatgccttcctcaccatgcttaatcattaatcatttctagttttgatttaaagtaagagatgtgcaactcattcttttatgaaacagtagccattttagggctattaattgcctgatttttttttttttttgagtcagggtcttgctttgctgcccatgctgaagtgcagtggcgtgatcacagctcactgcagcctcgaactcctaggctcaagcaatcctcctgcttcagtctcccaagtagctgggactacaggcatgagccaccaccatgcctggcccctaatttcagtattgctgtgtctcaaggatagggaggtctgagcagaaggagagagatagggaggcagctggtcagtgcagtggtcagaacacataaaacatttatcgactcagtttgctgtcttatataggggtggttcatggtgccccccaagcaattatgacagtaatatcaaagatcactaatcacagatcactataactgatttaataacggaaacattccaagaattaccaaaatgtgagagagacatgaagtgagcacatactgttagaaagatggtgctgacagacttgctccatgcagggctgccacaaacctccactttgtaagaaacatatgatacctgtgaagtgcaataaagtgatacacatgaaaacagttgtgcctgttacatgacatatatacacacatatatataacttgagaatttaggaagcgacatgtcaaacagcttataacactatagtgtactatccaagtgtttgagacacagttaaaataatcagtaatgaggacaatgacagaatacctagtaaatcttaattccctatcaaaccatgcgcaaaaatgagtcttagtaaattcagcattgttgccctatgtcagggacaaagtacatgtattttgcatagatggacatgtgacaaaatagaaattggttttctgagacaggattctccacagcttctgcaggagggagaatgtaactggataccaggattgcaatcataaccttttataatttcggctagttttgtgtcttttaaaaaaattacattggatagttatttcaggatacagtgtgttatgggttaaattgtgtccccctttcaaattcatgtgttaaagacctcacttccagtattttataatgtgaccttatttggaaacagggttgttgtggatatgattagttaacatgaggtcatattaaagtagcgtctactgtactccaatatgactgatgtcctcataaaaagaacgctaagtgtgcagacagacacggacatggaaaacgtcatgtgaagactggcgggggcatgctgccacaagccaaggaatgcctagacgctgagatgcattaacaggctcccatcacagctctcagaaggaatcaaccctgccaataccttgatttgggacttccagtcagacctctgacaataaatttgtttaagctgcctagtttgcagtattttgttcctgcagccctagcacatcaacagtgaaaagaatatggattctgatgccagcctttagtctttgccctgctgcacgattatttttgacttttgacgagtaatttccacattctcatgcttaaaattcaatttagaataacttttactttattggattcctttggggattaaattagttacaaaagatgtaaagcgactgatcctcaaaatgatttctttcccttgttttgtgacatgtcatgctctcagttattttcagtgacttttatggaatcctaaatatatcaacttaaaaaattacattagcgatattcttggtgttacctgactgtggtgcggtccagcaaaataaaaccacctgttagaatgcgggttaattagatgggacactgcgatttacaaagctttctatttgctgccatgcccagtacaatgtctttgcatactaggtactaaataaaattatgttacttaaatgtcacaacctctaaaagtttaaaaaatgacttctctaaaaactcaaatatttttttccttggcgttcctcttacagaattgtttttagtgataaagttttattaatatacttaatgcagaaataacttcacttcttttttttttttggtaatctggatcccctaaatagaatgctaaatttgtttcttgtgcaacaaacaagttaccacttctgactcttcatcttgagcttccttatttttttttggagacggaggctcgctctgtcccaggctggagtgcagaggcgcgatctcggctcactgcaacctccgcctcccgggttcaagcgattctcctgcctcagccttccgagtagcaggggttacaggcgcgcgccgccacgcccggctagtttttgtatttttagtaaagacagggtttcaccatgttggccaggctggtctcgacctcctaatctcgtgatacgtcggcctcggcctcccaaagtgttgggattacaggcgtgagccaccgcgcctggccttgagcttcctttttaaaggaaggagcaggaatgttaacctacacagaaaaaaaaaatgctttcacgctcttgatttactctaggtgggcttcaaatgcgcggttagcgctttctgtagagcgttgagacggctgtttacgtaaagaccatcatgcgacgtttccaacctagattctaagaaaaaagcggcccaagtcccacctttcgcagggaacagctgattctgtttttccttcccagccaatggtgatcaaaagcttcaggacgctggtgagtcactgcggaggagccgaacactgaccgcgccgtccccgccaggctcccgcgcggccggcaccgcggccctgagcgcaggcggccccgggtctcaggcctcaggcggaccgcgccccgggctcgcagccctcccgccccggctgccgggctacggggcagatggactcggagcgccccgccggtgagtagctacgacccccgaggccacctcccgcgaaccgctcggcggcaggagtaggtgaccaagggtgggggcgttggcccagcagccgaaggggtcttcagcgcgcccagacccctcggggctgcggggcggaagccggggcgtgacttccggcgccgccgggtgtggggcggaggtgtggggcggcttccggagaacccagcggcgcgggactggggcgggacttccggcgacaccggaagtgcattagcgccaggttggggttgtggggtcgcgtcagtgcggagacagcggtgtcctgcgcgtcttcgggtcagtacggggggccgcgtcgtagggactcactggcggtgcgcgacctgggctggctccgggggtggcgggcgcagctgctgtgacaggtgagtgccgccatcttcctacctgtcaggcgccgagtcgttccccggatgccccgaagaggagtcgggacactgcagggctcaagggggtgcaggggcagtcggggcatagtggcggatggggtgcaggtgggcttggaatgcagagggtccgtggtggtgcaggaggggtcgggtccctggaggacccgtggcggtgcaggaagggccgtggtgcagaagggttcagggtgcaagagaagtcggggcgcaggagtagtccgtggcggtgccagagggaccagggtgcgggagggatgggggcccggggcggtgcagaagatgtcggagtccaggaagagtcggggcgctggaggggttgggggcagaagggttcggcccggggtctctccccgccccctttgcttcggcctgggcatcccggggaagtgcgtctccagggaagcacttgggaggcccttcagagaggagaatggcctttcttctctccaaagagtggggatggtcggcttcaagaagggtggtgagtgtggagtgacggatgctgaagtgattaacacagcgccatgatattgttccccttttgaagacttccttttccttcccttccccctgaaagcagccaccgctggagggaaacattttaagacagctgttcaccggaataacacaagagcaacartaataatgtactcatttactaaaccaagttgaataaatacatttttccaggttgtgagtgaaaatagcttaaggtctgccaggtttttagagattttgtcatttaacttaaacgctaaaacattcgtcccttgaagcggataccattatagaaaagtgttaattgcttggaagtttcatttattgaagttcaagtgtttttctcttaaattcagtatgttggcctgtgagttacggtcataaaagtattgcaggaattatttacctctgaatgagaaagctcaagatagttatatctccaggaactttcttcgtcttctgaacttcccccaaccccagcagacacacacactgttctggttactttcctgatcaaattcgagtctttcaaaatagcttttgatatgtcccaggagttaaacacggtatgtaaataagttaaacacttgtaaacactcaccaatgtggaacaaatggagtgatctgttatcccctgggtttagacgctgcctttctattaatactgctcacaggagacagagtagggactcgtgtgcactggccacgtctcaacagcagtgtgaccttgggcaaggccttcctaagtcccgactccctgtcctctaacatggtgttcatatcagcctcattttcttactgggaaggttacgttatgtaatatrtgccagccatttttgcaaagtgctgtatacaggagatcttgagtgagtgtgtttccctcctcctctttttgggtagctatgttaggctgttcactttgggcatttgccctgaactaaaatccctaagtccctttccccaaggtgaaactaagatagagttttcatatttatcctgtcttattcttttcagggaaaagattttacatctgttgaatttcatccttggtttaaagttgttcttttaactactgagatcttttgaaaatcttgatggctatttatctgattaatggtatttcctaattgattgtcatccacagaattgatggtgtatgtattccatgccttcatttcgtcaatgacaaaacattttaagcaggttaatactgatgacagatttctgaggttgcctgtagagaccattctcttcctcgatattgctcagaagttgaatttggtgtctcagcccactaggaattcgtctaacagtgttattacgataaaatgttactacaaacttgattaaacttctggtggaaattccatcacattttatgcaattttcaatttatttctccaatttatttttaatgccacatggacattatattccttaaccattcttttgcatgtgattaacatttgtgaaattaaccacttaagcaagtgtttttgctttgatgaaagaaaaatgtttaaaatcctactggatatgaaactgaaagtaatgttttgtgttttttgtttcaaatgaaagtgtaaattaagaatttgttggcagggcgtggtggctcatgcctgtaatcccagcactttgggaagccgaggtgggcagatcacctgaggtcagcagtccaagaccaccctggccaacatggtgaagtcccgtctctactaaaaatacaaaaatcagcygggcatggtggcgggcacttgtagtcccagctactcaggaggctgaagcaggagaatcacttgaactcaggaggcagaagttgcggttagccgagatcacgccactgccctccagcctggggagacagagcgagattctgtgtcaaaaagaaaagaatttgtcgtattgctgtttcaagctactttggttatgttatctgccttcctcaaattatacacacttaggagaatgataatttctatagctacaaattaattaatattggaaatattgaaaagaatctggccaggcgcagtggctcatgcctgtaatcccagcactttgggaggctgggtcaggtgaatcatgaggtcaggagttcaagaccagcctggccaggatggtgaaaccccgtatctactgaaaatacaaaaaattagccaggcgtggtggtgggtgcttgtaaccccaactactcaggaggctgaggcagagaattggttgaacccgggaggtggaggttgcagtgggtcgagatcgcgccactgcactccaacctgggcgacagagcgagactctgtctcaaaaaatatatatataaaagaatcttttgagaaagagcagaaagctaagtgttcattgatgctgtttaatattacagcatttctgtcacgcaggctggagtgcagcggcatgatctcagctcaccactgcctccacctcccagggtggagcaattctcgtgcctcagcctccagggtagatgggaggcgtgtaccatcacgcccagctgatttttgtattttagtagagacgggacttcaccatgttggccaggctggtcttaaactcctgacctcaggtgatccgcctgcctgggcctcccaaaaggctgggattacgggcatgagccatcatgcctggcccaatattacagcatttctaaagatgaggaattcagcttgctaacacagtgtgtttatgggtttcattaattagtcgaatgtttggccagtgcctgctgtgtgtagagcactgtgctgcatcacagctgtgtgcctgttgttctgactgcttacaagcagtggggtgtattacgtacacggcaacatatactaagggcaggtgaactggacagactaaatgagtcaggagttcagaaggagcgtttattctgttaaatccatggtaggataaagagattgaatttttagaggggactatttatagtttcttgaaaataatgttttattgaaaaccagaaggacatttaatctccataagccttctttgtaatatggtaatctgtccaataatattgggtaaatgtgaatattttgaaggaaaataattacgttttggaatctcaggtttctctttgcttgtatttaggtaaaacagtgcatagaggttaaagaaggttatatttggagtgaagaagtttgttttttctctttacagttctataatcagtttattagtgtttagtctgttaaatacaatcgggtgccacataacaaatgatgttttggtcaacaacagacctcatgtaagatggtggtcccataagattgtaatactctatttttactgtaccttttctatgtgtagatatgtttaggtacacaaatagataccattgtgttacagttgtctgcagtattcagtacagtaacatgctgtgcagggttgtaggctaggagcagcaggctgggccatctagcctaggtgtggagtaggctgtgcacctagctttgtgtaagtgtactctgcgatgttcccacagtgacgaaatcacgtaacgatgcatctctcagaacctgtccccatccttaagtgatgtatgactgtgttgaaaggctcttaattggatttgggaactctgtctcatagggatgttatgaggattagtgactctttgtatttattgatccatttgagccttacagcaattctttgtagtagctcttcagcctctggtagatctgccagtccaccaactttcttccagtatctctccattaattctttctgttttcacttcccttcctgtctattttagattccatggtataccatttcagtagttttacaaacacctgccacttccttgtccctcttcccatgataccaacctgaaaaccccctaaactggtgattaaacatttaaataagatttatgctacgccggttgagcatcctaatccaaaaattcaaaatccataacatgacacaagtggaaatttccacaccttaccttgtgacagacaggttgtagtcaaaatgtgggtgcgcaacatagtttattcaggatcccctagggcaaaataaaattaccttcaggaggcctgctgtggtggctcaggccagtaatcccagcattttgggaggccgagctgggcagaccacttgaggccaggagttcgaaaccaccttgccaacatggtgaaaccccgtctctcttaaaaatacaaaaattagctgggcatggtgttgggtgcctgtaattccagctacttgggaggctgaggcaggagaattgcttgaacctgggagatggaggttgcagtgaaccgaggttaacaccactgcactccagcctgggcaacagtggagacgtcatctcaaaaaaaaaaaaaaaattaccttcaggctacgtgcatgaggtatacatgaaacataaatgaactttgagtttagccttgggtcccatccctaggatatcttactatgtatatgcggatattccaaaatctgaaagcatctgaattctgaaacacttctggtcttgagcttttttttttttgggggggccaaggactgagtttccatggaggatgtggtgtgaaaggaaggaagtggtgataggaccaatacagacactgggaaaaaatgtggagggtgtgaatacagagatgataagattactccagtatgaaaaaatctgtatttggtgccaagttccagggaggtgattgtaggaaatgcatacatttggttgtagttgatcagcagaaaaagattgccggcggtattgactattttgtgaagtggcgaagaaagcaagctaaaccaaagagaacaccatgcaacttacggagaggctggaatagccagtgagataaaatcagtgatccaaaacttataattttgatgagaaaggaaaggtgatattgtaatctctgcatttttggtaacgaacttgtagaatgtctggaatgcatcagaatgtttctacagatgaagttcttaagagagggaagggaaaccctttgctggttttatttgcttcatttaactgaagatagagtctccctttttctctgaggccatatcaggacagctttcacaggcttttgatgtggtttctttttttcctttacaaaacatactccataaactacaaagtaactgttttatgttgtaaagcaagacttacttctcctttaaaaataggcctacacatatgcaatttgagaataaaagatgattcttggctttctgcttgcggaaagatggagacttatttttccttattcctcccatgaagtacatctaaaaacactggacatatataaaacaaatgtaagagtgggccgggtgcagtggctcacgcctgtaatccaagcactttgggaggctgaggcgggcagatcacaaggtcacaagttagagaccactctggtcaatatggtgaaaccttgtctccgctaaaaatacaataattagccagatgtgctgttgggcacctgtagtcccagctacttgggaggctgaggtaggagaattgcttgaacccaggaggtggaggttgcagtgagccaagattgtgccattgcactccagcctggggaacagagcgacactctgttaaaaaaaaaaaaaaagagactgaaagatggagaaaagaaggtagacttccttcgtacattgggaccacagaaatgacaccaaacttagttctgtgagttttctttttgcctcatgtatctcatatgttgtgctggataagctagcagcgcaggtataaaaggactcagacaaaacaaggcccaagaaaagcctgctctctgtgtctgaaagaccaggaaaggggcagcctacaaatcacagaacttttcgatggtaagtactttcctccagctaaatatcacaggaaaccctgcagcaccaccctcaccctgctaatcagagaacttttcggcggtaagtactttcctccagctaaatatcacaggaaaccctgcagcaccaccctcaccctgctaatcagaggctgagcaggtacttcagattcccactcatgacaagctgggatgagatgctcctctctgcagggttgctgtcagagaagactggctgaggagttggggttttacttctgctgggtggtgacagagcacagcctcctttctgctagggtatcataagagggaccttgcaaaactcaggaactttactgctgccctgtggtcatgaggccacccccctgtggtgtgggggagactgtatagggagcagcacggaggcagccctgattcagccttggtggtgggagtggaagttcggcaggaggctgaactttccttctcatgcaggggtccgtggaggctgagtgggaatctcaacttccacctcaccgtccacatccacctggcagaggcctgctctaacagaagacttacatcagatcctgagtctgatgtcaggatttcaatggaaaatcactcataggaaaatctcaacctcagtaagaaaagaccactgatgccaacgtagagatgacacagagtttagaattatttgacaaggaccttaaagcagcgattgtagaaatgcttcaataaccaattaacattcgagacaaacgacaaatagcctcaggaagaaaatacaggatgtaaaaaagaaacacaaaatttcaaaagtgaaaaatagaatatgtgaaataaattcagtggatggcttagcagcagaaaggagaggacagacaaaagaagctgtcaatttgaagatagaacaatagaagttacccaatctgaacagcagagagaaaatagactggaaaaaagtgagcagagcctcaggggcccgtgggactttaacagaagatgcaacatctgtcatcagaggtctagaaagagagaaggacggggtggggggaaaacgtgtctgaagaaatcactgctgtatgtttcctaaacttggcaagccatacaccttcagacgtaagaagcagcataaacccagagaagataaacacaaagatgctaagacacatccaggccaacttctgaaaactgaagacagaagcatagtaagagagataccacttgacctgtagtgggaaacaatttgagtgacaatggatcttttttttttttttttttttttttttttttgagatggaatcttgctctgtcaaccaggctggagtgcagtggtgtgatctcagctcactacaacctctgcctcccaggttcaagcagttctgccctagcctcccaagtagctgggattacaggcatgccacatcacgcctggctagttttgtatttttagtagagacggggtttcaccatgttagccaggctggtcttgaactcctgacctcaggtgatctgcccgcctcggcctccctcacgcttgctggaattacagtcatgagccactgtgcctggcctgacagtggatcttatcagaaattgtggagggcataaggaagtggcaggacatttttttcaggtgctgaaggaaaaggactatcaactcagaattttatatcaagtgaaaacttccttcacatgatttatctccagctgacctactctatgaaaataacaaataaaggaaattctccaaacagaaaggaaatgacaaaagaaatgtgggaacatcaggagggaagaacaaagaatggacagcaaaaatatcggtcaatttagtattcgtttattttctaaattgtgtttggaatttgaagcataaccgtggtgtggttctcagtgtatgtgtaggaaatatttgtgattacgttataaatggggaaaggtaaagaagcatagaggaaagtaagatttgtatactttatgtgaactggtaaaatgttgataatcagtagactacaataagctgtaaatgtataatgtaaaacctagagcta

SEQ ID NO: 6974 - DNA, 15471 bp, Homo sapiens
gagtaccagacccggtgagagcccccattccaatgcacccccatctcagcttctggccagaagacctgagcaagtccctccttcttcctggccttggccttcccatgggtggaaccgggagggctggctttaatctccaccagactcttgccccgggactgtgatgggcgattggccacttctcaataatcttcctgttttccttccgccttctgtttggctttagacaggaccagtgcatctataacaccacctacctgaatgtccagcgggaaaatgggaccatctccagatacggtgagggccagccctcaggcaggagggttcactgtgggaacagggcaggccagcataaggtgggggctggatgtagagccctggaggctttgggcacagagaaataaccactaacatttttgagctctaacgatgtgctcagaaacaactctaagaggacactgagagaattagaggaggaaaaagaagaacagagacctcaaatagtttccccaaggtcacacagcttataattagaactagaattggaactccaggctggcttcagatctgcctctctctcatgccctctttaagatcctttgcaaaccaatggtagaagcctgtatgttggagaggtggtaccttcaactatgtcccccatcaccgcagaggtggcacatggcagggagctgatggagctgaactgacaccatttagcatcccgagcctcctctctgggcctcattttcctcatctgtaaaacggagaaaggccctgacagccacggtctgtgtgaggctcctgagatctcatgtacagaaagtgcttggcgtggagctgggcatgcagcaggggctgggcacacggtggcccaaaggagccctgggccttcactgatgggctgtgtggccactgacacacctaggcctcctcacctgtaagacagacaccattgtgccatcccatgttctcacccagaggctccttttctcttccagtgggaggccaagagcatttcgctcacttgctgatcctcagggacaccaagacctacatgcttgcttttgacgtgaacgatgagaagaactgggggctgtctgtctatggtaggcatgcttagcagccccaaactcatgcccctctcaggcctcaccccccattcacccacccctgggctggcccctagaaccccagccctccctggcctcccgccgggccccaccatgtccccagtcagtctccttgctccccctgcagctgacaagccagagacgaccaaggagcaactgggagagttctacgaagctctcgactgcttgcgcattcccaagtcagatgtcgtgtacaccgattggaaaaaggtaaacgcaagggattggacagtgcccaccttgtccatggcccaacttgggcagccccagaggcccagagcaggagagctgccaggcaaggctgcacagctaggcagatcttctgcttttaggcacctgcctcactgtagggacagctgagctctacagaggcccaggggtggtggatgagagcccaggagggagaagtccctgtgaaaccagggaggacctgaaagctaacaggagggaacagcgtgagccacggggttgggggattggcaattggaggggacgtaatgcggggagttaccacctacagacgcgtcccaaaccccaggctttcaccccacctccactccccrctcatttttaatacccgtgcagtggggaattgatactgtggttttcaatgtcacccacactgcagcacggccacagtcaccatcccgatttttgctacaaatgaaaattactttataatgagctccttaacacttttctttaaacctgtgtttggaagacttgcgttggtgtggccctgtgcccaatacctgtgaaatcacagcaccgatgagctggttccaatttttaaaatatatacatgcagtacttccatgactattcaaagaaaaacaattccttccatttgccatctgagatgaccaccagtggtgtgaactacctcctgcccccatctgcagtcccaggatcctgggacagggcttatgaacacaaccactgtagtcagctcacctgatccacagcctggcacccccactgtctggctagggagcctcgaatgggtcccaaggccaccctgctcctcagttacatcatctgcatagtagtggtggttgtgaggaattcaggagctgcagcataagggctcggcaggtcctaagtgcacagtaaatgccagtgattcttaagagtctgagctcccattgtagaggcaagtaagctgaggttcagagacagaaaatgacttgcccaagatcacccagctgggaagtgacagtgccagggttggagccctggttgagctggttccacaggccagagctcattctgccctctcccyggaagacctcccaccctgtccccatgcctctgcttctccctcaccccaattccccgctgccttctaggataagtgtgagccactggagaagcagcacgagaaggagaggaaacaggaggagggggaatcctagcaggacacagccttggatcaggacagagacttgggggccatcctgcccctccaacccgacatgtgtacctcagctttttccctcacttgcatcaataaagcttctgtgtttggaacagctaagctgttagtcatttgttcattcattcattctgaagcctgccctgagttcaaccctggctgggcactggataagacgctgtccctggtgggaagagccccacacgtgccaggatggaggatgacaggcaccgagtgctgtgggagcccagcactgtgggaagacattttcttctgcagggcgaaaatctgggaaggcttcctagaaggggcatctgaaccaatctagaaagatgaggagcataatacaacctgctgttctgtgtacaatgtgtgatgatcaaatcggggtcatttccaccacctcaaacatttaccatttctttgtgttgggaacattatcacacagttccccataaatatgtacattatgtgtccatttaaaacaatacaagcaaacaaatgtgaatttctaaactgagactactgtaaggcctttctcctaatagcaagattgtaataaaacttcaactagtcataaaaaaaaatccttttctgtttctgctgcaagcaaggaaatgagaggatgcatttgagtaaccttgaggcagaagaccctaaacaggagtggaggtgtgatattgtttggctctgtgtccccacccgaatctcacatggaattttcagccccatgtgttggaggcgggtcctgctgggaggtgattgtatcacggggctggtttctaatggtttagccccacctcccaggtgctgtttctcacaaggtctcattgtttaaaagtgtgtagcacctcccccttcgctctgtctctcctgctgtcttgtgaagaagggacttgcttcctctttgccttccaccatgattgtaagtttcctgaggcctcccagccatgcttcctctgaagcctgcggaactgtgagtcaattaaacctctttttttcataaactacccagtctcaggtagttctttatagcaatgtgagaacagacaaatacaaggtggatggggtggggagagttcaggcatgtggtgcctatcacaaggaccttattccagtattaccatggccatcgggggaggcacgttgtggggaccaggctggaggcaggaaggcctgagtgaaggctgctgtgggcaactaggcaagaggcggttgcctgggccaggacagggcagggcagggaagggctggggtgatgcagagggcttggggcccaggccagaggggctgggtgtctccatggacgtgtcctcagggtgctcacctgggagacccagaagaaggagacaacacgtaagggtgaggctggtccctggaaatcagttgacatcttgcaaatgtggagccctgaggtggagccaagcccgaggcacagcccactcagtggcacaagccacgaagggccggcctcacccagacctgggggctcatgattgacagcctcttgttacgtgagggaagcagcactcctcccgtggcagaaaagttgggcctgagttgttccatctattccgtatgtgcagctgcgtacaccatacagggtgataagaccatgagcctgaggctctgacaccccagggtccagtcctgtgtcctcaggcaccactcccctttgtacctcctgtcccaacagccaagctccacagggccaagactacagcatcctttgctcagcacccaaaccactgctgtgcccacagcacggaggctggggacaccgagctgatgtcctcagaaggcaagtggacaggacagcctctggggtcccacagtggcctggaactgaaggctcagaacctaaaagaagtttccccatttcaatgttactttcagtaagacaccattttcaaccatactgaggaggatccgctgaaaaatgaaacagaaatgagtcgtgatgggcagggcagggagaagcaagggagacgagaagtggggaacatggaaggaaaagccacgtgaggaagaaaccagaggtcaagagaaaaagaatcatggaggtagaggaagcaaaaaacacacataacaaagaatgtggactttggagtcaaactaatgtgagtccaaacccaggctctctcccaaaccagtttgggcagatggcccagtggaacctcactctcctcatcagtaaaaagggggcagagtgagggtcctgagagctagtacagggactgtgtgaagtagacaatgcccagtgtttagcgtaagaatcagggtccagctggtgctccctaaacagcagctgctgttcactgttgaaaggcgctctggaaggccaggcgcggtggctcatgcttgtaatcccagcactgtgggaggccgaggtgggcggatcacctgaggtagggagttcgagaccagcctgaccaacgtggagaaaccccatctctcctaaaaatacaaaattagccaggcgtggtagcacatacctgtaatcccagcgactcgggaggctgaggcaagagaattgcttgaaaccagcaggggaggttgtggtgagccaagatcgagccattgcactccagcctgggcaacaagagcaaaatggcgaaactccatctccgagaaaaaaaaaaaaaagaatactttctgaaagtatttattcatacaaataaagacttgacccataaggtaggaacgcaaatgggccacggaatcactcattccacagtatacaccgagtgcccttgaagtgctgggcactgctccaggattgggggcatattggtgaaagagaagcaagctgcctgctcagatggcagggaatggggaaaaacagggagacagtttcctgtttgagatgttgggagatgcttcgagtagtatatttactggaaatagacattcaacttggatgtccctttttggaaatgtgcctgcgtccagggctgggttggggccccattgaactttggctctgacacagctgttgccacactcagtggaactgaatccatgtttgccttcacccggcatccttcaccccaactctccccgccacaacatacatcccatgccagcctggggaccctcaaaggtgcttcatcattaggtttgtggctgggtcccactgaagtaagtcttggcactcagagggataggaattgaatgaagacatgagattcctctgcgggaggcctctctaggaaatctgtggactcacacgtttactaatgttgctgcagccccgcacccaccttggccttgggcagccatactctagggcttttgtaacctctccatgtgaggaactcaaattagacctgggtttggaggcggtgctccgagctggcctttgggggaggttttgtgcgaggcatttcccaagtgctggcaggattgtgtcacagacacagagtaaacttttgctgggctccaagtgaccgcccatagtttattataaaggtgactgcaccctgcagccaccagcactgcctggctccacgtgcctcctggtctcagtatggcgctgtcctgggttcttacagtcctgagcctcctacctctgctggaagcccagatcccattgtgtgccaacctagtaccggtgcccatcaccaacgccaccctggaccgggtgagtgcctgggctagccctgtcctgagcacatgggcagctgcctcccttctctgggcttccctttacctgctggctgtggtcgcacccccactcccagctctgcctttttctcttctgggtccccagggtgaaattctcaccagcccaggggactctggaggcaccccctgcctccaaacacagaagcctcactgcagagtccttcacggaggacggttctgtgctgggcctggaggggctgcctggggggcaatgactgatcctcagggtgagctcctgcatgcgcactgcccaccaggggcctcatctccccatctgcaaaatcagggagagatctgcctgagtctcctcccagctgacagtcaaagattcagcatcaagcccccatcaccagctccccccttctccccagatcactggcaagtggttttatatcgcatcggcctttcgaaacgaggagtacaataagtcggttcaggagatccaagcaaccttcttttactttacccccaacaagacagaggacacgatctttctcagagagtaccagacccggtgagagcccccattccaatgcacccccatctcagcttctggccagaagacctgagcaagtccctccttcttcctggccttggccttcccatgggtggaaccgggagggytggctttaatctccaccagactcttgccccgggactgtgatgggcgattggccacttctcctygataacattactgtttttcttccgccttctggttgactttagccagaaccagtgcttctataactccagttacctgaatgyccagcgggagaatgggaccrtctccagatacggtgagggccagccctcaggcaggagggttcaccgtgggaacagggcaggccagcataaggtgggggctggatgtagagccctggaggctttgggcacagagaaataaccactaacatttttgagctcttaccacgtgctcagaaaaaatccctaagaagacactgagagaattagatgaggaaacataagaacagagacctcaaatastttccccaaggtcacacagcttataattagaactagaattggaactccaggctggcttcagatctgcctctctctcacgccctctttaagatcctttgcaaaccaatggtagaagcctgtatgttggagaggtggtaccttcaactatgtcccccatcaccgcagaggtggcacatggcagggakctgatggagctgaactgacatcatttagcatcccgagcctcctctctgggcctcattttcctcctctgtaaaacggggagaaaggccctgacagccacagtctgtgtgaggctcctgagatctcatgtacagaaagtgcttggcgtggagctgggcacgcagcaggggctgggcacacggtggcccaaaggagrcccgggccttcactgatgggctttgtggccccggacacacctaggactcctcacctgtaagacaggcaccattgtgccatcccatgttctcacccagaggctctttttctcttccagagggaggccgagaacatgttgctcacctgctgttccttagggacaccaagaccttgatgtttggttcctacctggacgatgagaagaactggsggctgtctttctatggtaggcatgcttagcagccccaaactcatgcccctctcaggcctcaccccccattcacccacccctgggctggcccctagaaccccagccctccctggcctcccgccgggccccaccatgtccccagtcagtctccttgctccccctgcagctgacaagccagagacgaccaaggagcaactgggagagttctacgaagctctcgactgcttgygcattcccaggtcagatgtcatgtacaccgaytggaaaaaggtaaacgcaagggattggacagtgcccaccttgtccatggcccaacttgggcagccccagaggcccagagcaggaaagctgccaggcaaggctgcacagctaggcagatcttctgcttttaggcacctgcctcactgtagggacagctgagctctacagaggcccaggggtggtggatgagagcccaggagggagaagtccctgtgaaaccagggaggacctgaaagctaacaggagggaacagcgtgagccacggggttgggggattggcaattggaggggacgtaatgcggggagttaccacctacagacgcgtcccaaaccccaggctttcaccccacctccactccccgctcatttttaatacccgtgcagtggggaattgatactgtggttttcaatgtcacccacactgcagcacggccacagtcaccatcccgatttttgctacaaatgaaaattactktataatgagctccttaacacttttctttaaacctgtgtttggaagacttgygttggtgtggccctgtgccctaatacctgtgaaatcacagcaccgatgagctggttccaatttttaaaatatatacatgcagtacttccatgactattcaaagaaaaacaattccttccatttgccayctgagatgaccaccagggatgtgaactacctcctgccccatccccagccccaggatcctgggacagggcttatgaacrcaaccactgtagtcagctcacttgatccacagcctggcacctccactgtctggctagggagcctcgaatgggtcccaaggccaccctgctcctcagttacatcatctgcatartagtggtggttgtgaggaattcaggagctgcagcataagggccctgcaggtactatgtgctcagtaaatgccagtgrttcttaagrgtctgagctcccatkgtagaggcaagtaagctgaggttcagagacagaaaatgacttgcccaagatcacccagctgggaagtgacagtgccagggttggagccctggttgagctggttccacaggccagagctcattctgccctctccccggaagacctcccaccctgtccccatgcctctgcttctccctcaccccaattccccgctgccttctaggataagtgtgagccactggagaagcagcacgagaaggagaggaaacaggaggagggggaatcctagcaggacacagccttggatcaggacagagacttgggggccatcctgcccctccaacccgacatgtgtacctcagctttttccctcacttgcatcaataaagcttctgtgtttggaacagctaagctgttagtcatttgttcattcattcattctgaagcctgccctgagttcaaccctggctgggcactggataagacgctgtccctggtgggaagagccccacacgtgccaggatggaggatgacaggcaccgagtgctgtgggagcccagcactgtgggaagacattttcttctgcagggcgaaaatctgggaaggcttcctagaaggggcatctgaaccaatctagaaagatgaggagcataatacaacctgctgttctgtgtacaatgtgtgatgatcaaatcggggtcatttccaccacctcaaacatttaccatttctttgtgttgggaacattatcacacagttccccataaatatgtacattatgtgtccatttaaaacaatacaagcaaacaaatgtgaatttctaaactgagactactgtaaggcctttctcctaatagcaagattgtaataaaacttcaactagtcataaaaaaaaatccttttctgtttctgctgcaagcaaggaaatgagaggatgcatttgagtaaccttgaggcagaagaccctaaacaggagtggaggtgtgatattgtttggctctgtccccacccgaatctcacatggaattttcagccccatgtgttggaggcgggtcctgctgggaggtgattgtatcacggggctggtttctaatggtttagccccacctcccaggtgctgtttctcacaaggtctcattgtttaaaagtgtgtagcacctcccccttcgctctgtctctcctgctgtcttgtgaagaagggacttgcttcctctttgccttccaccatgattgtaagtttcctgaggcctcccagccatgcttcctctgaagcctgcggaactgtgagtcaattaaacctctttttttcataaactacccagtctcaggtagttctttatagcaatgtgagaacagacaaatacaaggtggatggggtggggagagttcaggcatgtggtgcctatcacaaggaccttattccagtattaccatggccatcgggggaggcacgttgtggggaccaggctggaggcaggaaggcctgagtgaaggctgctgtgggcaactaggcaagaggcggttgcctgggccaggacagggcagggcagggaagggctggggtgatgcagagggcttggggcccaggccagaggggctgggtgtctccatggacgtgttcttagggtgctcacctgggagacccagaagaaggagataacacgtaagggtgaggctggtccctggaaatcagctgacatcctgcaaatgtggagccctgaggtggagccaagcccgaggcacagcccactcagtggcacaagccacaaagggccggcctcaccccaacctgggtgctcgtgattgacagcctcttgttacgtgagggaagcagcaccccttccgtggcagaaaagttgggcctgaattgtttgagcaattccacgtgtgcagctgcgtataccatccagggtgataggaccatgagcccgaggccctgatgtcctggggtctagtcctgtgtccacaggcaccactcccctttgtacctcctgtcccaacagccaagctccacagggccaagactacagcatcctttgctcagcacccaaaccacagctgtgcccacagcacggaggctggggacaccgagctgatgtcctcagaaggcaagtggacaggacagcctctggggtcccacaatgtcctggaactgaaggctcagaacctacaggaagtttgtccatttcagtgttactttcagtgagacaccattttcaaccatactcaggaggatccgctgaaaaatgaaacagaaatgagtcatgatgggcagagcagggagaagcaagggagacgagaagtggggaacatggaagaaaaagccacgtgaggaagaaaccagaggtcaagagaaaaagaatcatggaggtagaggaagcaaaaaacacacataacaaagaatgtggactttgggtcagaccaatgtgagtttaaatccaggttctctcccaaaccagtttgggcagatggcccattggaaccccactctcctcatcagtaaaaggggggcagagtgagggtcctgagggttagcacatggactgtgtgaagcagacaatgcccagtgcttagcaccggaatcagggtctagcaggtgctccctaaatggcaggtgctgtttgctattgaaagtactggaaggctgggcgccatggctcacgcctgtaatcccagcaatttgggaggctgaggtgggtggatcacctgaggctgggagtgcaagatcagcccgaccaacatggagaaaccctgtctctactaaaaatacaaaattagccagacgtggtggtgcatgcctgtaatcccagctactcgggaggctgaggcaagagaatcacttgaacccgggaggcggaggttgcagtgagccgagattccaccactgtaccccagcctgggcaaccagagcaaaactcagtctcaaaaaaaaaaaaaaagaaaaagaaaaaagaaaaaaaaaagaaagaaaggagcactggagagtccaggtgcatactcttgtagacagcaacttgctgtgtgcctcatttacatctctggcctcagtcaaaagggacttggctaggcagccccacctcaaggccctccgcagttgaaagatttatggttctgagataggcaaagggggaaaactggagaaacagaagccaccagagggaggcaggcagagcacccaacaggtcccctgggaaagggcttggctgggcatcaaacctaccaccccataaacttgacattgaaggcaaaagttaatgacatacagcagagacacggatggctttgggtattttttttgtcttcttttctttttttaagatcaatattcattcttcatttgccctcgtaacgaaaatagatttttaaatgcctcaaatatacaaacatcattgatgcacacacattccagaaatgcagaggtatgctgctgccacggggtaggggtgcgggaggcggcctggcctcatggccgcagaccgtgccccagcccgggcctggcaggtagctggccactgataaatgccactgggatcctaggagaagctggggaccatgcgtgaggtactgaaggggaccatggtggatggcatcctgggcactttgtagcttgtctgagggaaaggcctctgctgccatagaaaagctggacacatgtcaccctggggccctgacatcctaaaatgccccactgactaccagtcactaggagaaaggtctccggctatgcccttcccagtgatgcttgccccagagtgactggtcacaggtgggggacaggtttgctccagaaaccgtaggcctttcttgtctggccccctaaagaggacccaagatcaggaaaactccccagtttaaaaaaatatctgtccatctgtatataaaatacctattattagctggagttgcacacatgcaggaccaggagagactgcctgaggttctgcctggaccgaaggaggcctcgctcacagcacctctgtgaggggactggtgctcctgggaagtcacttctcttggtgaccgagctgacaccccctccacttggaaagcacagggactgagcaggcgggacctgtgctggagggagaccctcctggtgaggaactatgcgggccttctgggcctcagcagctccagcccactcctggcctggcaggccacctgcccacccacccacccatctgcctctgggcccccagtgaagtcagaagaggcaggagccccgcaggctgtgagcctggcgcaggtcggctgacagcgagcttctcatctgcctggtggtagagcggacgctctcggcagcctgcacggcccggctcagggccttgttgagctcctctaggtcgcccaggtcgagctggatggagtgccggtgtctccgggctggtgggggagaggctgtgggcggccacttggcagctggttgggctgaggtaggtcctgcaggcgcatagtacctgaggagagaagtgagtgggctcgttacacatggggagggctggggacaagccgaggagcaccgtgtgtggggtcaacccccttctaaatcccagctgggccagtggctcctactctctgggtctcagtttctttacctctaaaatgggaataatgggcacacatccagggatttcttagaaagatgaaggaagataacaacatgagtgcctgacccagaacaggtgttcaaggacaggaagttcaatctacctgttcatctgatttactgcccatctagtacatgccagccagcgtgccaggctctggggttacagtgggacaagaaaacatggactcctgcaatcttcttggagccggatcttgggaaggccaggatcaccctaggcttgatagcaaaaccccctcatggaagaatatctgggggttccatttgccaagcaaggggtgctggagaaaggcaataattaataattaataatagtaataataataataatagggattctgcaggagtgggagggtctggccccatgtcctgggaagtgggtagaagagcatccttcctagcccagtcctataggaatgtgaggtgttgttttaaagtgctgtgggaatgggctgacaagcccattgagatgaagcacggatttccctaagaggtgacaatggcatccatcagggccactaagtttagggttcaaggaaaccagcagtgggcaagagggggtgtggcctcagcactgttaaataaagggtgtgtgtggtggaggagggagataaagaagcatggacctaaatcaggaataagtttaggaggacgcagcagagtcattcattggcatcttgcttggcacactgtaaactctggctttattcctgagcccctgctgtctaacttgcattgttatacagtgtgtagaaacagatgatccaaacagacatttctccaaaggagctattcaaatggacaatacgtacatgaaaagatgcatatccttagccatcaggaaatgcaaagtgaaaccactgcacaccctctaacatcaaaaaggacagatagcaacaagtgttgacaagaatgtggagaaactggaatcctcagcactgctggtgggaatgtaaatggtggagccactgtggaaaacagtctgacagttcctccaacagttaaacccagtgcctagcccagggctggcatcctcatctttggtacccatgtaccagttggtgcctttatctttattttacagatgagcaaagcggagctcagagaagctaagtgattcaggaggcagtagaatgcaccagccttagcagctcaggccctggagccctgccccaaatcccagtcattctgctgggctactcatgggactctggacaagctaagtcactttgcaaggcctctgttttcccacctaaaacgaccacagttagcaacctctcagcttagagctgatggaaaattcaggtaaaaagctggcactgcctggctccggtaagtgctccataaacgtgagctcctaagacccagagtcagacagctggaaggggcagccatgggttcacacctgggcccgactctccccacatatctaatgtgtgctaattggcaagcagcagatgctgataaaataatctgaactgtatgaacaggcttcttgcatccccaaaacagcagcctgcactccctcctctagggaccgtctggtgtaagtaactacagaggctcctcaaattacgatggggttatgcccctataaacccgctgtaaagtcgaaaaatcataaatcgaaccattgtaaaagtagggactgtctgggctgggttttcatacacccccaccttctgttaatttgatgaccaacttggcctgaaagttacccaaaactctccctagggccaacactgaaaaagtccctctgggctggaaagtctcggctgcaggggctat

SEQ ID NO: 6975 - DNA, 12590 bp, Homo sapiens
ggatgggggcagggaatgcaccttggagggcaggatttgggaaaggagtggggaggagagaaaaggggcttggttttggttgccaggaaacagagcctgatgtgtatgtgtgtctgtgttgccacctctcactcatgttccctcctttttctgccacccacctctcctccatctgcaggctcttcattgatggtgaccgcatagacgcccccagtgtgaaggagcacctgcttcttgacttgggtctggaagccgaatacaggatccaggtgcatccctacaagtccatcctgagcgagctcaaggccctgtgtgctgacctctccccaagggagaaggtgtgggtcagtgacaaggccagctatgctgtgagcgagaccatccccaaggttggtgaccccactttggcccatctaaactctgccacccccttcccagttctggtattgtctttggagcacaggcagatttctgaggctgcctgttggatcagaactgtggtctccatggatgaggccttaaagctggagccatagcaagagcctgagggcccttattgcttgttgagtcttgtgttttccagagtgtggcatgagagattattttaggtggtacacattattatttaggtttacttaaatatatctgttttaacagcatttagcatataatagaaaaaacataactagcatgagttcatgatataattatttaaaataaagttgaatttaataaagctgatttaaagatggtctaaagtaaagtactaagtgaataagggtacagcagttaagaagctagggtaaaagctgtgcaggtggtataagaatgcttgaagcttgggaaatgcttctctaccccctccttctgccgcaccacattttatagctaaggacacttgaggctcagagaggattggggagttggggatttggggatttgtcaaattcaagtgatagtgatagccttgccctttactgagcccttgctgggcagtgctaagcagctgacacttgttgcctcattttcattagggtctgagatgggactggaatccaggcctctttagaggtaggcttttctactgtcctcccctgggcctctggctgccaagtggcctttggcaagcccagtgatgtcctttcttctccactgagcagtggggcatcctgggaagaatccaggcctggctctctagatctggcttgccattgtacccctgccatcatcacacacagtgtgactcctcctctctctctctcctctctctctggagagaaagagaaaaggagataagatcacaaaagcaattttagaagctttgtgcaagtgccaggtgtgctgaggcccctctgctggattctaacttgttctcaaattggaaagggtcttctccagcccttcaagatcagattattatcagtagctgagataggaccactgggcgggaagggagggagcaggagacctcactcatcaggtcatgtgcatggctagacagggagaaaaagccccctttgtacagcaagagaagggtgatttcggtcaagctttcagtgttagtgaactctaaccacaaccacagtggcttggaaagcaatgtcttgctgacggcaggcagccagcagtctcaaagagctaagggagtgagggatggaagagagacaccttgtttgatgtacttactctttttggttgagcttaagctcagggtcatcaatcaaaagggacaggtcgttggggccccaggggatagctatatgggtcgccagtgggagctcttcaaatgatttgtctaaagtaagttttgctgagcaaaaaggttgttgccttggtcttgggtgggtggagccggtttgatttcccaccctactgccctttgcctctaggaccaccgctgctgtatgccttacacccccatctgcatcgccaaagctgtgaagaattcagctgagtcagaaggcatgaggcgggctcacgtgagtagaggagctggtgcagaagatgggatgtgaggtggtcagaaggcccggctccttcacctcctctgtggcattgagcctggcacaaggttagaatctctctgagcctcagcctcctggccttccaggaggagttattgagggaatgaaataaaatacttgatggattagatctttacaaagtataatacacaatacaaaaggagatattgatgttcacagtgtagatgatggtgatgacgtgatgctgatgaagaaagattttgggcccagaggtggcttttgatagtggcctgttttttcctggcccctgtagggttcttaacctttaagttaaccttttggaggagctccctgtgctctgaggtggggcccttcctgattgtacctgaactactgaatagcagaggagcctttccctgataatgggagttgctgcacacaccagcttcccagaaatgtccacatgtaaagctctggttgctgatgatgtgtggccctgcaggtacagccttctcagtattgcattagggctaggctctgaatctggtcacgtgattttcagtgataacttaaaaaatgtctccattgtttgcacagattaaagatgctgttgctctctgtgaactctttaactggctggagaaagaggttggttcttagtctttgtttaatatgtggatatacattattcagacctacctatatgtgattctaactctagcatctcccatgctctgctgaccatgagatctgagatcttcatcaaatttttgggctctattttaataattctctctggaaatttggtgtgtgtagatttcaaaattccttaattatgaaaatagtaacaagaatgaagaaaagttccataatagagtggatgctttttgggttagggaatcataactaagtggaatttcattataaggaaaaatgagtcttataatattattataggcaagctgattgtattaggagaaaaagatctttgtgtacattttgaacttcagtttaagccttgagcctttttatattaaattgactcttggccattaatttcttgctctagttgacaagagggtggtttctctgtggtgttattaaacaatatcatgttccctttaagtattgtataaacaactctttaattgggaaaagaaaatattgtctttattcccactagtgtaactttttccctcatgtttccttctggtgattgttcatctatgtaaattattattattattttattttattttattttttgagacggagtctcactctgtcacccaggctggagtgcagtggtgtgatctcggctcactgcaacctctgctgcccaggttcaagagattctcctgccttagcctcccaagtagctgggattataggcgcctgccactgcgcctggctaattttcgtagttgtagtagagatggggtttcaccatcttggccaggctggtcttgaactcctgaccttgtgatccacccacctcggcctcccaaagtgctgggattacaggcatgagccaccatgcctggactttatgtaaattattattattacatttttattatttttttttatttttgagacagagccttgctccatcacccaggctggagtgcagtggagcgatctcggctcactgcaagctccgtctcctgggttcacgccattctcctgcctcagcctcccgactagctgggactacaggcgcccgccaccatgcttggctaattttttgtatttttagtagagacggggtttcactgtgttagccaggatggtctcgatctcctgaccttgtgatccgcccgcctcggcctcccaaagtgctgggattacaggcgtgagccaccgtgcctggccgtaaattatttttaaaaatataaattatttttacatgtctcttagtgtgcagataaattttttttctttttttttttcttattttgagatggggtctcatctgttgcacaggctggagagtagtggtgtgatcacagctcactgcagcctcagcctccccaagctcaggtgatcctcccacctcagcctcccgattagttgggactacagcccagctgattttttctgatttttttgtagagataaggttttgccatgttgcccaggctgatctgaaactcctgggctcaagcgatccacctatcttggcctcccaaagtgctaggattataggtgtgagccatcacacctggcttagatatgattttgtgttttattttattctcttagaatcatagtgtgaacattttccatgtacattgaggccttaaaaaaggatccaaatgaaaactgcatctagtggctcttctgatttactaacccagtcctcctatttttaaatgtttgggttgtttttaattttttgctgttatcagtaatcctgcaataatctctccgcatttatcttttttatttctctagaatgattttcttacgatgatttcttaggaggggatgcttttgaatttttaaacttagatatgttgttttgggaggttttaggataaaatactgaagcacaatagttgagtgaaaaattaaatgaatagaaactattggattttagatagctttggtgagagcctttgggagttctcccttgctaaagatgtgtcctgtagattggtcagttgggatgaagcaattgaggaaaaagtgagcttttaatgtacctcctctaatttgtaagaggcacacatgaatttatctcaccagatgatttataagcaattttctcataggttcccaaaggtggtgtgacagagatctcagctgctgacaaagctgaggagtttcgcaggtaaggatccatttggggggacccaggagcctcgtgctgattttcttgctagttgaatgaggctggaagggccctgaatcttagcacagtaaaaacctttaagccactctgctttctgtctttctgttacaggcaacaggcagactttgtggacctgagcttcccaacaatttccagtacgggacccaacggcgccatcattcactacgcgtaaggcatgcggaggagcatgctgcctggccttgctgcttctgcacaggagcctgagcaggggagagacattattttaccagaggcctctgtgcccaccttcatctgtctgttgagactgtaaaatgaagggaaataagacttctaagattttattttctcccaatccccaagcctctgccttttgggagcctcttcttaggctcagtatggcactggcattctctgcagggtagtcagatgggtgtccctctttcctttctgaagctgcaggaactgtatgcatagcccttgcatcttgatgactaagtttttttttttttggagacaaggtcttgctctgctgcccaggctggagcgcagtggtgccatcacaactcactgcaactttgaactcctagactcaagcaatcctcctgcctcagcctcctgagtagctgggactataggcatgtgctaccactcctggctaatttttagatttttttgtagagatgaggatcttgatgtgttgcccaggcttgtctcgaatttctggactcaagcaatcctcctgcctcagcctcctaaagtgctggaattacaggtgtgagccactgtgcttggcccatgactggaatttttgagtagttttctttcttggtaacagcagctgttttgtactagtccatacatcttgtgagctccatcagttccataccaaaaaaaaacttagtagtaggttgtgaggcaacctgttttgggtggagagataatcagtaccctctcttcctgtccccctgagcctgaagcctggcatcccagtatgtggtttttttaccacgtggtctacaagaacccatggacccacagggccgagcctcccttccttgtgagacagaggggcactgatatgtctaggactgacagatcttcctgtggagatggggggaaatgtcattaggtgtggccattgggcttcagcctcagctctgcctggttcaaaccgcttkgctttgcactgggtattttgagttctgtgcatccccatctgttacatgcacagccaacaaaagaacactgtgcttgggcacacacttttttcccccttttaataattgtttttagagcttttagtcttggggcagattttgaagctgtgtgtgggagacagtcacagatgggacagtacagtttcctcacttaatgcttctgttccagcataaaaatatcagagggacttcagtttttgtttaactcaggatgaatttcctggctggatactatcctagaattttccgtataattaaaacattaaacagtttcatgccagtggaaraaatttgcctctgcgttggcatttcttcattgtgggtggttggaagcctgtttagaggcggggttctggaggtactggttgtcttttttagttgttcagcttgtgtgtggactggtgcccttattgctgaagagggggtggtacctggaaatggaggacaacctcacttcagctgcagggcagagacttggagtgctctcatccctttgggtgtttcccagtgcagtgatattgttttgaaaacggtgtggggaaagagatcactttttgaaaatacctcatgtttgtttgaagcagaagaatatcgtgatccattccttttcccagcaaaattcctttagtttttctcccaagttgagacatccactcctgcctgtctagcagtctggggagcgagtggggaggtacctgctggggtcagggctgaaggaggggcctggaggctgaggcaggggcctggggctcccagagacaagcaaggctgcagtgactccaggctgctcctgtcccagttcccaggactctagctaggtcctgttgcatctaatcgttctcatttttttagcttttagaattatctcttgaacacctattttgtttcagacacaaacagaggtagacataaagaaatgtgttacttttcctttgttgagctctttatctcagctggggagataggttgattggatctttgaaaagtagaagtttaatattagttgaaataattcattattgcataactttctattttgatataatttcaggcttatgtaagttgcaagaatagtacaaagagctcttgtgtgtcctcctcccagattcactaagtgtttacatttgtggaataattaatttttaattaactttgttaggccagtccctgagacgaataggaccttgtccctggatgaggtgtaccttattgactcgggtgctcaatacaagtaagtaaaccaggactgctgtggaacttgactatggattcgaggcagtggagaaggtggacagctgagctccagctgagagcactcagctggtcatcgccctctgtgctggccactaatggaatcgttcctgtgtcttgtcatttttttcacccctatttgaaatagcccagttgtgactctgttctcacaaaagactgtttgatagaaatgttacagtccttggctggaagttttaaaaatataagtaaacaactgtgaagtaaagcaagcttttggaaccgttgaaagttttccaccccagcccatgaaccgcctgccggttccctgtactctcagctgccccagggccttatgaagtaagggattaattttgaatgaataaatgagaaatgagggctgcccccacatttctgaatttctttctccatgttttgctgctttcacggctatcatctctggaacaaagtttctcagagaagaacccaagatttggttgggtcttgatacggaacccaaaagaaggagtaagaatagaccctgtctgcattaagagggcacgagcaaggccttttttttgagacagagtctcactctgtagcccaggcaggagtgcagtggcgtgatctcggctcactgcaagctctgcctcctgggttgcagccattctcctgcctcagcctcccaagtagctgggactacaggtgcccgccaccacgcccggctaattttttgtatttttagtggagacggggtttcaccatgttagccaggatggtctcgatctcctgacctcgtgatccgccggtctcggcctcccaaagtgctgggattacaggcgtgagccactgtgcccagccgagcaagaccttttagtgctgctccattccccactgaagttgggactatggctaagggaggacctaattattgaatgagctcagccaattacgtggcaaccatgcctggccttgggacacaggggtgttaataatatcagcctagagctaaggattgcttgataatggtgtaaacttttcttcacttctaaatttttagcaggattctagaagttatcctttctatgtcagggatatagtctagtgtgtgttaagatatgtacttggatatttttagggtctctgtccaggaaaccccctgctgttctaacaggagaagttgggttttggccctcttttgctagagatgggctcctgttttctttgccttcttctgtcttgttcataaccccagtgatagtgtctctcgtgaaacagcccttatgctgtagaccaagaatgtgtgtatcaggggctgacgtcactcccagtttatttagccatccctgcattcacactttgtttcattttttaaaataacttcattggggtaaaatttatgtaccatgtaattcacccacttaaaatatacaattaattttttttatatattcacagagttttgcagccatcagcacaatcaattttagaacattttcattaccccaaaaagaaacctcatacccaatagcggtcactacccccttttccactaccctggagaaccactactctcctttctgtatctatggatttgcctattttggacccttcatagaaatagaattgtattatgtatggctttctgtgtctggcttctgtcatttagcacaatgtcttccaggttcatccatgttgcagcatgtatcagtattccatttctttttaattactgaatggtattgcactgtgtggataatcccccattttgtttatccattcatcagttgatggacatttcagctgtttccatcttctggctattatgaataatgtggctgtgaaccttcatgtacaagtttttgtgtggatgtatgttttcagttctcttggatatataactaggagtggaattactgggtcatatggtgactatatttaaccttttaaggaactgcgaactatttgcaaagatggctgtgctattttacatgcccaccagcattgtatggggcttctcacttgtccacatgcttgcctgtgtcatatttgacttaaagcttattttgacgggaaaccaatttgtcctttttttggaaagggatggcaccacagatgtgacgcggacaatgcattttgggacccctacagcctacgagaaggtaaggtggaggtaaaaaactcaagaggtcctctctgctttcttaagaagagcattgcttttatgaaaagggattgtataaagaagtaaaaattacatgtggggtagtaaaattgctccttgctgtggagtcaggcttatctgctttacgaggttcatttaactaattattggaataagacatttggagaaatttttaaagcattctgctaaggttagggcagctcaggtgtaagtttaaatataatagctttggccttctcttgagtcaggaaatgcctttgaggctggggatgagatagtgaaatacatgctttataagcagtgcctagatttgattttgaaggccacccccttctttttttgagattcttatttacaggcttaactctctggaaactttctgaaatgacagactctattaagtttctggtatgattggcatggaaaggggaaagagagctgtgaggcagagagatgtgtactaggggtctggagacctggcttcagagcttctgtgccatttactagctctgtgacgttgaacaaagcagtcaccatccataaaaatgaggataaaaggacccaccttcccgggtggctgtgaattcccatgagcccagcaagttcctggatcatagtcactgctcagcaaatgctgattgagcacctaagtgaatctgtttgtccaagagagctccttcaggaagattatccaaggaaaagggttttatgcaatgtagtggggcaggtttcattgtcttggtcccttgccttttccatttgtattcaccagtgccttagaagaatttggaccttgcgtctaggattcttttggtgtgactctttttgtgcttttcaaagagctcaaccaggctgaggagcatggagttttagtcctgactctgcaccttactggcaagctgctacacttctgagtagcacttctcttgtccggacagtggggataacccctgaagataggatggtggtagggagcacagctgttgaagcaagagtgcctggctccaaggccagatgctgccacttaggcactgtgtgatctgggcatgctactgaatctctctgtgaagcgaggataacagtagtgcctccatcgtgaagtgtgggatcaaacatacagtgcttagaatagtgcgtggcacagaggatagctcagtaatgttagctagggtcatcagtactttttattacttttccattctttctaaggctcacatgatggagtatgtcagagtgttcattataaagtcatgtggggtcatctctctgacagtgctcttctactaaattgaatttcaagattttctgggaaattggtcccgtggccaggctttttttccaccagatttttttctttttacttacattttctctatgatattgctaaaaactttagcaggcaggattttctgaactaccagaaaactacaggattagacatctgtccccattctgcaacatgcccctgggttttctttgcaggaatgcttcacatatgtcctcaagggccacatagctgtgagtgcagccgttttcccgactggaaccaaaggtaggtggtgcattctgtcacatggcaggctctttttcttgtttgagaatcaaatatgtctatgtttgagtgaaagaacatgtcgttccttcactgtgaggtccccatcccacttcaggcccagccaggtgctcatggggtgagtctccataacccactgactgagcccagaggcctcagggagccgggttaggattgggcccagtaccccctgtgcaccattctcctgaccacttatggtattggatgacacatgtggatggctcccaggagaggacaaaccagatatgaaggtcacagggcctgagtggaagttggtgcagcctcctgtctgccctttagtactgggccagtgcttcctttcgggattcttaggatttattttactgggaccctgacttcagctatgtactactttgcttgaggcctggtgggtggagcattggactgggcattgacaagacctgggctgccttgcttttgggtagattagacatgtactcatctccctaggcctcagtttcctcatctgtcatgcctgcctgtctgcttgcagtctggttagagtctcatctttgtaattctgaaaccttagggtcgcagagctggcaagggaacgtccatgtctgatacggcctctgtgtgctgtaggtgtctatccccgctcaccagcatcctgaatggatgatcgcctagcttcagactgagctctgatggtttctcaggagctctgattgttagaaagttcttccttgtgctgtgctgaaatctgaaccctccagtaacttacctattggtttctgtttcacgttctggagccacacataataaatttaatctctaaagcgctgtacaaatacaattaagtggctctttatgtctttcaggtcaccttcttgactcctttgcccgttcagctttatgggattcaggcctagattacttgcacgggactggacatggtgttgggtcttttttgaatgtccatgagggtccttgcggcatcagttacaaaacattctctgatgagcccttggaggcaggcatgattgtcactgatggtaagtgtccctcacatagagggcatgcgtggatccttgagcctttttgaaagctattcgttgttttgtattttttaattagtttaaagtaaattggcaatacttttcccttccaacaaacttttctgattatagaactgatacatgttcattttagaaaaaatgagatgggaactgtgtaaaaagaaaatgaaaatcatttgcaatctaaccactcaggggaaacatgacttagtgttttactgtattagcttttggtctttcaggtatgtagatagcattttttttttaaatcattgagatcttactgggcatcttgtcttatgttctgctttcttacttgatacattgccttttctcaggtcattgccaagtctttgtaaatatattttaatgccttcattattgtgtcttacggatgtgaaccatgatttatttagtggatccactgttactttactccttaccctgtagccagtgtgcagggacttcagagtcta

SEQ ID NO: 6976 - DNA, 20153 bp, Homo sapiens
tagaacttaaagtattaaaaaaaaaaagaactgtgcaagaacaacaacaaaaaaaaacatagggcataagaggattaacctatcatgaggtctagggcacaacaaaataagaaaagaacagctatactgtgaactctcgattatttgggggtaatgtggagattataatagtaggaaatgctacctacatgggaggtgctatgaggcttggtataaaaatccaagcataaaaggaagttagaacagagcagatcttggaaaaatcttcatgaatgaactgagccctgagagcacaaagcaaacgtggaaaggtcaaggggaatgtattcgtgtggatgaaaagttgctggctctgaagtgcagcatttggcttagagatcagactgttagcctgagatcctgggtggacacagtctccaatgtccctccctcctcctctgcccctgcacaattactgtctatactcatctgtctcactgagaaggaaaagaaaagctggggagcccaatttgctccactttgggggaagtgaggaggtcaggggacaatagacttttccttcccctctagaggtttaccttctagtccaggtttgatgccaaatgttctgagcattctgggctagtcaccttcggctgcgactttgcaaccattcaaagaatgtaaggttctaaggcaggtcctatggaggcttttcaatttccctaggtcattgtgacttctcttttagtaatttctccccagagcccaggtcatagtaagacccagggaacagacccagagagacactcattgagacatgcatgtatctgtgcatttagaaaactgaacttggccttcttaagccttgttttgattcaattatcttcaacgatgcccatctgctgcattttgtttccttagcatggtcaagggagttcctcagtaacccctcactgtccacccttctaccccctcctccattattaccctagttgaacacattgtgacagctatccatcccctcaacaagcccaagcttccctgcccactgccactcccattcccgcatcgtcacattgctattagaatacttccactctttaaggcagtcttaatgtcactgcttaactagctatatgaccttagggcagttacttctctgtgcttccatttcaaaatagtaaaatggagataactgtgtgataattgaatgaatgaatacatacaaagagcacttagcatagtgcctggcatacagtacattctatgaaggttcttgtctttttctcacctacggctcccagcccatccaccctctgaacactcaggtgctatttggaatacaggtggtaactaaacatctccaaccaggatttactttattttgccctcagttattgtccccattttattgtctattagttttgaaaggaatgggtgtatagtactgagtttcttctctgctgttcctaatttacttattcagtgtgaagtcctcatgccaaaaggaacccttggcttttttttttttttaacagcagctttattgagatataattcacattccatacaatttattcatttaaagtacacaagtcaatagtttttaatatagttacaccacaatcaattttaggtccttttttcacctccaagttaagtctcatacccatttaaagtcactccctactttcccatcctcactagccctaagcaaccaccactaatctaccttccatcgctacagatttgcctgtttgggacatttcatataatccctggcttctttaagaggcataattcttctttaactcagcattcatctgtttcatcaaagtccccagccctaggaccaggcacatagtaggtacccaataaatgttctgttgaatgaaaaccaaagcagggggttgatcgagttaaatatatttttttcacatttcatctttagaccttattggtccaaagcaagatagagaagtaggtgaggaacaaaggcattgtgtttttctaaggtataccaaagctccattgagactccttaaaatgaaattctagtgcagtggttctcaaactggctgcaccttagagtcacgtggggaacaaaaaaatactgaggcctgagccctgccccactgcataccatatccaatgtactgatttatctgtgtggagccatggattatatcttttaaagtttccccagtgattctatgagcagccagggttcgttgggaactcttgttccaatggaaacaatcattcaaagcaagaataatttgttgaattccagccatgcccagcatgatacacagccaaagttttcaactctgtcttcagggaaatgaacctcaaaatttttaagaaagcaataaaaaacagaatattcatttcacaaaaattttctttatagccaacattactattacactgagccatataaaattgctgatatttgactgtttttgacctagaaaaatcaaaatttcatatcattcaacctaattgaatgcatttgtttcatgaaatgagatacatttaatattcaatctgaatcactatcttgttaatcacccattcaccttccttgtgcttcatgcatttttaaaaaagaatattttaaattttattaaatatatatctctaatacaggatggaaaataaattagccatcaaagggggacaaaaatcatggaaattcacaacagataaaacaaacagaaactttatagatgacctctacattttgccacacattatttctggaaagcacgtcataaagtagattgtcataaagcaagatgtattttcccataggaaaaatttcatgattagggattctgttcctgtctaggcctcacataaatcaaagatacgatcaacaacaggtcatgaaagcaaaactgcgacagccataaacctttataaaccttcggcggcactacaaacatttaaaataataaacttattattcaagcactataaaatgccaaaataatatccaatccattgatcattatactggcatttagaaaggcaactgagtactacccatcgaaattcaaaaagtgtacattctttgatccacttctagagatctttcctataggaaaactggtttggcttctttcctctcttccagaaccaagtgtaaatgcctcagtctagacccacggcccttcacagtaagtatcactactgagtgggcagtgccttgcaggggctctctagccacccactcttccaactccttatccaagtccccattccttccaccagcaagctgagggctgccctaggctctgaggacaatcctgttccctgtcaggaggaatttaaggagctttagttctctggtgcaggctccacaatgtctagtcaactgcatttctgctttcattcccatctcaggctgggaatttggcttccacctccttttgtgaccaaaactgctggtgtctcagtcctagtgagcctcgttgcttgccaggccctttcttcactccacctctgcccgcaaggggctgaattcctcccactgaatcccaccctgcagctggaaggaaccctgcttcctattgccacatttttctgatgccaaacacctttctggaaaataaatgtctcatgagtgagtgaacgaatttctagatttctacatactccattgctgtgtacaactgaatacccactgccacctcttgctgagtctcccagggagtgggtatttgggatgtatcagtgcatgattctagaacagcagttctcaaccagacgttattttatcacgaccacccacaccagggacatttggcaatgtgtggagacatttttgtttgtcacaactgagggcatgctacaggcatcttgtgcgttgaggccaatgatgctgctaaacattgtccagtgcacagggctgctcccacaactagctgaggttgagaaacactgttctagagaaatcaaaagcactttctgcagcactacaaaccaaatcaagctgaaaattaccaacagagaaggatgatgcttctgttttcagtaaaacacccttttcccattccaattttcaaaattcttgcttattacagaaaaactggaaaataaagaaaagcaaaagatcacctgtgataccactaccactgtgtagttttccatagttgtgatgtcatattacacaacatttataatctgcttttctacataatgtattaaccaagtttttctccatattactataaagttctttagacctcactttcaattctatgtgagattcctcctcatgatttcacaacagtgtaagtaaccattctcttattactattaatttgtttctgggttttcactattgtaaagctgttgtgatacacatatttgtgcataaaactttttctgcacatgaggttatttccttgacaacccttagaaaaggtctatccttggccaggcacggtggctcacagctgtaatcccagcactttgggaggccgaggcaggcggatcacgaggtcaggagatcgagaccatcctggctaacacggtgaaacctcgtctctactaaaaatacaaaaaattagctgggcgtggtggcaggtgcctgtagtcccagctagtcgggaggctgaggcaggagaatggcatgaacccaggaggtggaccttgcagtgagcagagatcgcaccactgcactccagcctgggcgacagagcgagactccatctcaaaaaaaaaaaaaaaaaaaaaaaaagaaaaaagaaaaaaaggaaagggtctatcctcctgatatcaatttgaaaggcaaacatgatttgccaaaggattctaacatcaaagcccatgtgaaatgttcctctgaaccccatctctgcactggtctaaaaacatacaacaaatctgcaacttcaagagtctttgtctgaggaacatcaaaggagccaggaaaaaaaaaaaaaacatcccagagctttctgaatagagaacattgcagtggatcatgagaacaagaataaaagttcttgtgatttttggcacagagagacaaaactgctatgtctttaatatggtagaatttgctggttgcagaggcaaaatattttatgtagaatacctttcttataagcctaatgccattttccatttattaaggaagtttagctttattgtatttaattttattttttggccatattttctcctttgagacagagtctcgctctgtcacccaggctggagtacagtggcacaatcttggctcactgcaacctctgcctcccaggttcaagcgattctcctgcctcagcctcccaagtagctggaactataggaacgtgccaccatgtatggcgaatttttgtatttttagtaaagatgaagtttcactatgttggccaggctggtctcgaactcctaacctcaagtgggtcacattttctttttatctcaggtatttatttagattttggggaatgcaataaatttgataaacatcttaacagctatttattgagataagtccagaacattttgaaacaaaaataggtcaaaaataatatttttttcattaacatctagatagtattcttatgttttagcagctgactacagtataactgcaaagcagaagttaaactcttaccttcatcctgctcccagattcacagggaaacctacaagtctgtataaatcaaagcaaaggccaatatatctagatacaaaaactcaaaagatggcaggaaatggtaaaaagaagttgggaatcagaggacctgggtttctgcttgtctatatcaactagcaagcctgcaccttaggacaagtcattgatatttctacatttcaattgcagaaaaggaagtctatcaaatatgaaacgacatatgtgaagtgctcttaagagacaaagttcttttttaaatgcagtaacatacaaagagggctgttactgggtatcactgtgtatgatgtattgtgctttgtgatgtcactgcaggtataatcaaggacagaaaatcagtattgatggggcaagccatgggactggaaggcagcaggcagatgtcagggttggggattactggctcagaagcaggtatcatagcagaagcccaagtctcttccaagtcacagggctaggaaccaagatatcagcaggggaagcagggggtggagggggtataaaaatgacccaactacaaccaccaatactaccatttactgaggcttcgccatgcagcaggcaccctgaaaagtgttttgtttgcattatcttagtcagtcctcctagcagcctgattagtagaagttgttacagaaacacagatgaaaccatgggttagaaagaggttgagtgctagagaatcttatggctgcaaaatgagtaagcagagacttcaaccactgtcttctgactcacagcccaagggaaagaccaggcaagagtaggrgtgaagtaagtagctcggtgacagcacagaacctgtgagccagggctcaggctgaggctcctggcctccctgactcttccttcaaaggcacacagtaggcaaggcacttggggcactggctgcaggggagctcccaccttgcttgtgatagggtggaatggggttgggaggccttaccaatggactgggatgttctttcagaaacaggagcagttcttgctgctgcacttgccttctctcacctcaccaagtcctcacctcactgaggtcagggctgagctacaaggctgtcagactctagcttgtgctatggaattgagagaagcaatggtggagccttggtccatgagtaaaatttcctcccgttggttagatccacagtccatccagcccacggcttgtctggaatagtggagtcaaacaactaatgcaatcgtttgtagactttaaaaaaaataaataaataacaacttttttttgtccctcacaaaggaaatctcatgtagaagcccagaactttcaagagataagaagtagagagattctggtttaaagagagatgacagaagccctgaatgtcctctcttctgctcccccagataccttcatggactacagggctgtacatacggttagactccttgacctcaatgtgaatgtctaaagactccaagcatcctaactccaattagaaatccagcagcaatgtattaccatgcagttgtctaaaaccttaaaaaaaaaagctatttaaattgtccatcttttcacacttttggttacagagtccactgtttactagccccatttggaagtactacttactacctttctcttgtcctaaactcactctgctgtaacttcatggggtatctttgtagttttacactagaactatttatgacttcagaaactttgctcacatcctcctcctgtcttccagacagaccattcctaatctgtttagtctgttctcactgggggattaaatgcaataatgtatgtaaagcaccaagcaaggggggtggcatgaaggaggagttcagcaacgtcttgcctttatcttcctttttctcatctccgtcatcatttaaaaggctcttctccagttttgctttcctttgtaactctttgttcctttcttaatcacactcactgctgtgccctaaataacggataccaaatggggtcatctttaacaacacagccaaatactgaggctacaaacatcaacccaattggcaccacataaagcgtcgccactgccagcaacagtcagaactcactcttctctaggtagcctccgagactccttgatgtgaatattgtatcaaagaaactactatggttttatataaccaaggaagcagaggggagaggggaaggagaaaagggtgttgggggggggaggggagggggagagagagagagagagagagagagagagagaaacaagagacaacacgagcaccagtcagttaacaaggaggatttgatattatggggcagcaggggaagaaaaaatacattcactgtgcaaaaagagaggcatagaggcatgacaagcagagaatatgagctcccagagaggagaggactggaacggttaagaaggaagcattcaattcccaaatttgtgtgcagaggaaaagggaatcatggcaaactgcaagacactatttgtgggaggataaattggcaaactgcaagacactatttgtgggaggacagcattttgggggccatttatcagtatctatcacagttttaagtgtgtataccccaagactcagcaatcacattttttaggaatctgaattacagaaatatttagcattacacacatagatatataaagatgctcactccagcattgttcctaagggaaaaatcttgggaataactgaagtgttcatcaacagggactgaaaaaataaattatggtgtgtatccatacaagagtatactaggcaacaatgaaaaataatgtggctgtgatatatgtaagagatatgtgtaggaatatttatggaaatatctcaaaaatatagtaaatttaaaaggcatgttgtagtatgtataattttggttttaaaattatgtaaatatactagttaacataagaaaagcatctggaagaatacatattatctaaattctttttgaagtgggtgaaaaattgttactttttatgtacttccagactgttgaagtttataactaaaaataaaccaataggaaagctagccatgccatagtggctacatgcatgggatgtgaagccacacttcctgagtttgaatcccagctctgcctcatcttaaaagtgtgatcatagagaggtaacttaacttgtggctcaattgccttatttgtaaaatggtaataatgatagtaccaaccttataggtttgttgtgtgaattaaacgagttaacactcataaaaaggtgaaaaaaggcttggcataaacactcaataagttgagtatttattggtaaacaataaatttttaccttaaaaaagagctatttggttgtttaattagcagaggacagaagggaggaagcgagcaaaatgggaaaagattaatgccagatgataaagggccttgactaccaagctaagaaatggagattaatttctttagtaggaaatgaggagcctttcattcattcaacacatatttattgagtgctttcagtgtgccaacatcattctaaatgattgggatacatgagtgggagtgagtgaagtggacaatggcagcattttagaaaaggattaaggtaatcaacactactttttgagaacaatgggtctgtgccttaaaagtgttttgtgtgtgtgtgtgtgtttaggggagatgatcaggacgatggggaggcgctatcagtcaatgtattgtttgggtgagtggtgataagtgcctaatacacaaagcgagtacaggcctgaagcctgaagagatatctctggtctgagataactgacaggtgatccctggtgtctgggtgttgactgagactggaggggtcaggtggggagctgtggtgggcaggaacaccagcttttcagagtttacctcaacactgtccaactcagttggcctagagtcaggcaacctggttttaagcccatgttcmccacctttgattggaggaacccaggcaaactgcacttctctgggcctcagaatccttctataaaatgaaagggtctcctctgattatttccaaggccctccatcagctcaaacatgctatcaytttcatggcatcacaaagaggcgaatgaatggggcttccttcctcatttccaactgattatattccagactcaaaagagaaacgaataaataaaacataggattcagatgtgcaggataatatatgagaagactgtttacatttgcttcctttttgagaaagcgcatgttgaattttaagccaaatgtatgtgtcaaggtttgaaaataggttactcagataatttcattccatatgtgcagctgctgttctaaagtataaaccacactcgtctagtaaaaccatcatctgttctataaggaatatgaacattcatctggcccttatttttagagtgagaggtcaaatgcacaagaggtgaactgtacttgagtccaccgtgccagatgcagatgggggactgaaggccaaatataaatcgtaatatctgaatttgtgggtatttcaattagatggcttagaagatcaaaagaaataaatcctggaatatcaaagtggcaaacagaagccgcaaaaggccatcattcatttggttcattcattcaacaaatcactctcacaaaatcaatcatcaaaataaacaggctctgactcatttcccattgcttattgtagttaggtttctttttctccccagggtcatgggatacatgaacttcaggcttaatctctgtgtgagaaaaacagcatgaagataatcaactctatgtcagaagaaattggcaacactactaaccacgagtaatgcacaccgaaggcaagctacctgagccctgatcccccacctgccactctagcgatgtgattttgggccagttaattagctcctttctgcctcactttccccttcatagggttgtgaagaggacgttactatttgtacactgttttgagcagtgcctgctgtacagtaaggaccatatatgtgtttataaaataaatcttagttgctataggcaacaccacgcagctgagrgtggccgcacattgactctcttaaagaacacttcctctcttgctcatcctactcagctcataaaagttccagggaaaatcatacattggacaagacaaggatcagctgttcttcatttttacttaggaaggctaagaggaatttacactgaaaaacctcctgcaaggatggctgaaatcaaaatgacatttctctttaaaaaggagatagtttgttggtagacccgaaatgagaatgtcctggcctggtgcctactagccttgaagtctgtaatttcaaatgactttgcttgagttattcgaacccattttattcttagctgttttggtgtgtgagttgcactgtgtgtgcatgtgcatgcacacacaccgtgtgggtaaggatagaaggaggcaagatgcttgagtttgcttcattttagctcaacacttagaattgcctacagcaaatttctttcttccttttttttattatactttaagttctggggtacatgtgcagaacatgcagttttcttacataggtacacacgtgccatggtggtttgtacagcaaatttcttgagcctcaattactgaaactgaaacatagcactgatgttaatctaaaagaagagaaggatcttgacaaatggtcttttgcgtgctttttttctggatcaagaactattattcaaagtggctgggataatctgtttttacaatgattgctctcttgaaggccagagggctgctgccactcccctggcttagatgctttctcagggtgtctggtagcatcagtaattaacagcacaaacactggagtcaggcccaaggttcaagccctagctttgccatttatcttgtaaaaataagcctcagtttgcctatctgtaaaatggtgataatgacagtaacagtatctgtcttatcaggtggttgtgaggaataagtggaagactcagaaactcagcatgacacctgacagtcagcgcctaataaacagtagattcatagtaacagctgttcttgtccccaggtgccccagtgaaatttttggtatatctatctttagattgtgatgggcagtttattagttagtttttatattggcttttaaaatctccagcaagaactcttttaaaacatgccatctgcctcctccactgtttttcttctttgtatttttaaaaaatttcaaaacaaaccaaactattttaaactatgcctgagtggttacctattattcatcagaagagattccagggctttttgtagacggatttcacattgggatgctttggtcaaagagccgcctgtcccattctgtcttcctgctggatagcccctgggaatgggtgggcttctcataagacccgtcgtggcaccaggatgaggagatgggagtgcagcccagggctggggtgtggaggatgcagacaggatagccatgggagaggcgctggcatgagttctggcctaggcctctctgataaccagctgtgtgaccttggtcaggtcactcaaacacactggaatgtattgtcttcacgtgtgacatgagttgcctagcaatgggcaaagccaagaagacaatccacccaggaggcagatggcagacacattgttcaccttcactagttatcaacaaaatgcaaaaggggacaaaggtatcattttaatatttattaaagtaaaaactgaaaaacaataatactcaatgttgcttatgttttacattaccatgagcacagcattggtgcaactgcttgggattggaaaacacaacttagactatgtctctctcgtgaaagagaaattggtacacttgggtgtggttcctcatctctgcaattcactagtttgaaggctcaatgtttctgaagctcactggaatatggggcaaaatggggattaaaaacaatgccccctagacaggttgttgtgaggtctgtgaataatgtagataatgggcatagcctaatgcttggcatagaacagatgcttattgttgctactgatgtgacaatgctgatgcctgattcaatgcatctggctcatgttataatgccaaggagaaaaaacccatttgcccccctttctcagattccctgtcagaatctcacttctcaataggctgagcagagacctgcccatctgcagccccactcatccgagtggttctgacccatagcccctgtggtccccaggcaactctgggtacatgtcctgggtacatgtctcctatcacatgcccaccaccgcacaagagatgccagttctgcccagcccaggtggcattcactcagctctacaaatggccttccgggccagaccccttcagcgcctccacacagagcagggggcaacatccttcccgtgcccacaacctctgcctccaaaggcaagccagcccctccaaagagctcaggctctctgactcactcctgctgccaccatcactccggcacatcttcctgtgccagccactggccctgtatttaccgagtagctcaccccatggacaggaggtcacctgtgtcacttgttttcaaatgcccacttgcttctcaggggggttttctcctcttcctcacgtctctcctttgattcatttcttgtttgttggtaactcaagcccagtgtagactagaattgccataaattctttatctactcaatatcaaagatgtctcttcttaaatgcttctttgaattatttctcaataccaggttctgtctctgtttccattttgcaacctaataaggactgaaatctgttttcagtattactttatttttttttcctcagctttaaaaatattttcagagagccaaagagctgaggaactgaaaggacttcattaagtcctcatttcattcatgagaacaccgaagccccgaggggtgagccatgtgctgtgcacacaggggtgaggtgcgcaggtgaggctaggaagtacccttctagcgccttgctgtctcatgccccatttcctcataagcctcacgctgcctcggcagggcttctgacaaacaatgaccatatttcctctgtggagagctctgaggggcctgtggatctgcagaaatagctccccacaggggtcccaaatccatcatggactcactcctctctctcacttctaggcttctgtaaatgctgttccctctttgtggtaactacagctaagtcacactccatctctaaatgcttcctggaggaagccccatctgagcctccaattccagacagggaaccctcccctgtggcccctgcagaaacttgtatgccctccggagctggtattgctcaccagtcttccaacaggccattcctgttgcatccatcttccatagtggtctgcatacagtatgaggaagagcagacacaattaactcacaccaaagtgttagtgacttgaaaatctctcttatctgcaggaggacccggggaagaaccaagagaagacaagaactgaagttcttccattcccacctctgcatcaccttccctgctttctctttccccagaagagactcagtcaacatcccaaagaccaatgatttcattgttttacaccaaatatccctcctctaaatttttcaagaaattgggaataaacttcttacgcaagaaaatttggggagcaaaagcaagtaaccagcctagatgagcacatccaacctctctcctcttgattctcacatgtattacccagggtcctgtttctgcagaaaggagggaacccttgagaacattttcactatgtcactttagcagcctaactctgtggtacccctgatttagggagggtgagggggtggtgaagactgcaaccccaatagaagcagggaaggtgacatagaggtgagaatggaaggacttcagttcttggcttctcttggtttctgccctgggtctttctggcactatctttccctaaagtatttcatctaattcctcaaacatccctggatagcctatatcataaagtcctttatgatctctgttttacctggaaagaaagtgagatgcaaagaagtttagtaacttgctgagaccacagaaccagacagaggttgtgctgagacccacccagagcaccaggctcttcatcacaacctctttttgtaatttcccacacagtcttcttaatggcatcaggggtgcacatgtgtgttctccctgaccattaaaccctcactggcattaactggacaaataggaagtttaaagagggtatttaacaccccattcatctagtctccctgcctgagctgctcccccatcctagaatgtgcttttatctcctgtgataaccaaagacccactggatcctccctgccccctctctcaccataagggcctcaatgcaagttaatgtctccattttccacattcctattatgtttatagatggttctgtacaatttcatgttttacagacttgttcaaccattgatataataacaaccatgaaaacaaatacttttgagcatttgttatctgttgagtaggttttgtcttaatttccatgataattccataaagttgatatgatagctccctccttataaacaagaatactgaaccttgacatatgtgttcgagagaaataatatatcttggcagtttaaagtttgagctttgactttgtctgggtttaaatcctaattcactaagtaggtaaatgtatgcaaactgcttctctaagcctcagttttgtgatctgtaaaacagggttgctgagaggcctaaaatgaggtaatgtgtatgaagtactgagcacaggactggcatggagtaaagtgcccattgactgcaggcacttaatatcagaaggaagcagggtttaaagtctaactccagggcccatgatgcctgcttttcatataatcctgaagtaggcagagtttttcctcgctattttaaagaagaggaattaggttcagaaatataaagtgacttgttcaccaacacccagctgttaagagtcaaggttggggtttgagccaagtgtagctttacttgacttcccaacactgagctgcctatgttaatctgttagtttcatgcaatcttctttcttccaaattcgtgataagctccttggagccaagcaaaggcacttccactttgcctgcatttcccagatggcctggcacagcctcacacgtgctgtgctctcaatatacctctagtaaagaaaatccttgctgcccttgcacagcctggcactcagctccctagaaccacgaggagtatcagctatggaggactgagaatcctaaaacagaaggaatacaagataggtcattgcagaattacctaacaattttatgcctgttgtattcgtaagaagtaagcctcaaacagtaactcaaggtgttccaaagaaagctgaatgtcgtacaggtccatagccacagattcttcagtaagtaaagagtgtatataaagagagaataaaaagagataatctattagagatgaaaagattcacaagacatatcagtcaaatgtaatatttggacctcatctgattcctgttccaaaaaccaaatattaaaagccattttaaagacaatcagggaagtctgaatataggcttgtcattaaatcataattcggaaatatttatttaggtatgataatattgcagttctcttttttatgaagtctctatttattaaaaatatactaagaagtatttatgcatgaagtgatataaaatctaggatttaaatactccagcaaggtagaggggaaatactcctgaggggagattgataaaacaatattggcaatgtttataaatgttgaagctaggtgatgggtaaagagggggtcattatactattctctgtatttctgtgtttgtttaaaattttacacagtaagtttttgttaaaaaaggaaggaatggtgaatccccagcaatcttccattttgttctgcaactacttgtcttccacgagagttcagtctccttgacgacatgaaaagtcattctcttcctaagggtcctaaatgtacttatccaagtgagggctaagcagctgttgtgaggacagctcacctggaccattctccagtcccttccaaatcaggctacttcagactgaccttgtcactttccccaaatatccacactgtctccataatctcatctctgtcgcctgtccactgctgtaggtcagaaacctcagcaccacctttgtctctttcctctccttcaacccctaggccaggcagccaatgctactttggagcatgactcagatgacacatttcctctccattctgactgccccagctctggctaaaggctcagcaccacatacttggacgatggcagcaggctcctgctgggttcccttattttgacatttttcctttctgtgcaaatagctgaactttccaaaatactagaccaccaagcttaatgcttttacttggaatcacccattttgaaacccatttgttacatccctgtctcaaataggcctctcaggagttctcatggttaagctccgccttactacctttcatagctcactggataccttccttaatcatttcagaataagtctggtcacagctagactggaagctcaaagggaaggaggcttgtctgtctactctacatcctggcacttagcatcatgcttggcacactgttgtgggtgcacagtaaatattggttggataaaggaatagatttattaatgaataaattctgtgaaaaaaatcattttttcccccttgatgtgtgcctgtgtggtgctttcttcagcacaggtcctaatcttttcaacacagcatacctccagtgcatgatgaccaaatctttaagagcctctggagggagacataatctccctacaaagataattttcaagtaaaatctaaataaaagatattctagggtttcccttctcccatacacacagtgtaaacaaacctctatttataggtcaagtagccttagctttagctctgactacacatgaacttggtctacccatccatgtctctggtcctcagtttcatcatcagttaaaggagaggggtagttgggtaatcagtgtgatcctttcagttataaacttcttggtactttctttcatagaagccacaataccttgtgcccaaaatgtcattattacctaagtatagaaagtttccctttattacaattccaattgctagcctcatgaggaagtcagactcgctgatatgaatgtttctctctagaactcaccttcttatggagtcaccttcatccctctgctcagcaaacatgtctctcctataagcaaattcaataaggaatttttcccctttattgttgacacagtatctctttacgatggtaagttgtgcatcttttcagcctgtcttcataaccatcatgtgatttcgtgcccagggcaatcagttgagacaatcaggtagggtttatggttggtgatatggtttggttgtgtccccactcaaatctggggatttaatttctataatccccacatgtcttgggagggacctggtgggaggtaattgaatcacgggggcagtcaccttcatgctgttctcatgatagtgagtgatttctcacgagatctgatggttttataaagggcttttccccctttttcttggtacttctccttgctgcgaccaggtgaaggacatgtttgcttcctcttctgctatgattaagtttcatgaggcctccccagcccttcagaaccgtgagtcaattaaatctctttcctttataaattacccagtcttcagtatgtctttattagcagggtgagaatggactaatacagctggtttatcattttgcaaaacaatctgttagataagcaacagatttatttgttgcttcgtcttgagtgtgttagcaagtggaaggtagaggtacctagtctccatattttctaaatcctggttctggaatctttaacatcattccatactgccctaggaacaggcagtgggacagctgtgagggtaaggagaactggggtccttgcttttgaagccatctcagcaatctgggaatgggcaatgaagtcacggcccaaataaggatgtatgtagatcacaagaagcccccaataacagctgaagatgacagcctccctcaactccagatctgccttgtagcctgaagacccctgatgatattgtcctaatggcctgggagctgggccacaaaaaggcccactggcctggatagttcctccaaacacagaagtagaaggaacatgggcttcagggtctgacaaagggctcaaatcccacctgtaccccttaatagctgtataaaatcaggcctggtcctcatctgtaaagtgaggaagacaccacccattaagggttttctgggagtattaagggaaatagcttacttgaagtggctagtatggtgctaggctttaattttcttttcccctaccttttagtgcctctctctcctctcccatgcggccctgtggctggtgacacacagcaagtgctgaatgtcaatcattgttattaagaaatttccagcctgggaaacataatgaaacctcatttctacaaaaattacaaaaattagccaggtgcagtggtgcatgcctgtagtccctgctactcaggaggctgaggtgagaggatcgcttgaacctgggaggtggaggttacagtgagccaagattgtgccactgcactccagcctgggtgacagagagagatcctgtctcaaaaccgaaaccaaagcaaaacaattgaaagaaagaaagaaagaaagaaagaaattgaaaggcccctgagggacaaggggatcaaggagccaataggaaaaggcatgctgcagaggggatcctacgatgtgaagacacaaagtgcatctttcttgaatgtgcctgtcattgcatgagtcccgaggctgacccagtatgtggccaacgggtctttgctggcagaaatacagaccagtctctctctagaaaggagccagctataaagaaaatagagggaaaagggaggtattttaaggatgattacaatgtattctttgctaaacagttgccaaaatggtctgcagttaccagcagttggaaacagtttgtggagtagccatgtaagaaaagaagtttttttgctaataagtttttaatcttggtcaaatgaacttagatttagctaatcaaaaataggcattggagttgaaaggggcagttaatttagtgagaattctacttctatggaattagatatcgatttcctccccttttgcacccgagaccactaagcctaaggatctctaaaccagcatcactcctcatctagtggcagctacgtgcatgagcacagcctctgaaagcatgctgtcagatgccgggtgtgaaactctggcacttgggattgataaggctggcaccaaaaggagcgtccaccactggtaagagtagttacccatgactgacccagggtttcc

SEQ ID NO: 6977 - DNA, 23909 bp, Homo sapiens
tctcctcgagtttttttagttcggctcacttcccagacctccacaccattagtccacgtgaattcagatagggtgcaccaaacatcagaaagagtgtgaacatgaccagcattatctgctgagagtaacacaggagtcttcagcacaaaatcgatggaaacataaactggattcaacaaatacatgggaaaacatgtctgggtttttctctgggaccacagcttattggtgatcctccatgaaagacacaaggcagatacaagcaccataactctagcaaatggcacacagtgccagacatcagtaaagtctagagaatttgagaatcaacagaggtcatagaatgagatcctgcagaacttgtttgggcacgtgtgtgtgtgtgtgtctgtgtgtgtgtgtgtgtctgtgtgtgtagagtcaatgatgtgagtgataaccttggacaaatagaaagggccaaacactatggatgccagctcaggtgtctggactttctctgtttctagggagtcatgaaagcacggagagctgtgtctcaggaaaggcagcgctaatggagatgggtcagatgggaactgaaagcagacagtgaggcgtggaggctcctgccacagcctgtgaaacagtgaatgaaatgcagcctcagtgaaagcagtggtgctgtggtgaagaggaggaggcagattctcatgctgtcggacaggatgcttgtccaggtggaagtggagagtgaaagagaggggtcaggtaactctgaagtttcttgcctgaataactgaaaggatgaaatacactttcagagaaaacaattgtggtgagtgctagtttgtgcagttacgagaattaattcacttcaagtaacaaacctgtacatggaccctcgaatctaaaataaaatttaaaattatttttaagaaagtaaaaacaaaaagaagtaattaattaaaaagttaaagattagatctatggatcattgggcaaactgtagacaaaacagcctagatgactgaaatttttgctttttggtccatcatgggggcatcagctggatacaaaccaaaacgtgctcacctataaccagctaataattcctccaaaaacacccttggctgataggtttggcttgagtggtcattgaagactgctaaattgtaggcttctaatataaggaggaatagaaaaaggtagcaattgctttaaaggtaaaggaggccatggatattttttcctggacagatcatattttgaaggactaaatgataaagccttagtaaggatggacttattccttcttttgttcatgccttttgcttttccatttgtttttagtttttaatttcttatggatcaggtatttatgtgttgattgtggattaatttttaaaataacgctattcccctcctttgaccctgaaagatcaattctgtctttcaaacaagaccacatccaattggaatactaagaaattttttctggtcatgtcggattcttacgtgcagtgtttttgttttgtgttgttttatttgagcatgatactaaaactaccctggaaatcactccctgaaaatagaacactctcgggaattacaggggtttataattaaaatatgttataagtgggtggcgaagtggccacattttgtcctcttaaatttgaatttcacttccatcatgagcccatatcattggggacttcagtctgtagttgagaaggaacagggctgtaatgtgtgaaaacacatttctctaaactgcattcactaaaagtaccactttctatcactaaaagcaagctagaacgcataatcgttgtcattggttatgtttcgaaactggccctatgtaaaacatgaatgaaattgcatttgcttgggaaaggtttttattgttatgtttaaacccataaatgagatttttaaaaaatgtatattacaactaatctaatgaatttttattgaataattttattctttctctctcttctctacggaatgtgggtttttgtttttcttgttctccaacacaaactgccagccatggcctaccaggatcttttcccaaacactgcatgtaacttcagataccatgtctattttcctcagtaccccagactgacatttcaacaagtacttctcatcatagctttttcagaagctctgaaaaagcatctgggggcatactgacattatcagatttttagggtggataatggaaataggacatttgctttaacccttcccaacaataaagcaagaaaccaacgaactgtcttcctacgtcaatcaagccgaattgattctgaaatttatctcttcacagtgtatgatgggtgagtgtggcaattcacaatcacaaatgctgttggaattcattgcaaacctcaatggcttgtgtgatctaggcctaatctggtggtccaatgccattggtcttcatgttccaaagggggattggcagcccatatggggttttcagggcactggacagccctgtctcacagaagagatctttctctgtgggatccatgcattcccacaattgttatgatcgtttcatagttcatattcagagccttctcatatatttcctacacaccgcacatgagtttattagaccttttcctgaggataggcggaagcagagaatattgggcaagaaggatggagagcagagtcttcaggcacagggtcctggagattagggacaaactttggcccctgacaattttgcataagttcagctctggcacaagtctaccatgttgaggttagccaatctgagttaaccgagaacacactgggagagaattactcgccttttgttatttctgaaacctgaactgcttttagaaataaaggctggaatgttccataggaactcggagcatggggcacgggcatggcacacactcggttgggctatttaaaaaccagtcccttggcttccctctgtgattctaaatacgtgaaatcacattaccctgcagcagccggtaactatttctataacattgtccagcatctgtgcttgccgtgactgggtccacccaacaaaaacaaagtggagatgtggtaattgattaggttaatcactccaggctttctgtgccacagctaatgtccatctagtgtctactgacactactcctggaattttaaggactgatctatgtaactagatctatgtaacttcctaggggaagggaggtgccttagcatatcaaaaggatgctttttaaaagagctatttattcatttaacaagtgaggaccagaaacacaatttatcactttctcagagacagcaaattcttatcctatggaaggatcccagcattagagactctgcccctttctgtgggaaagaatctatcttttttggatttgtttgatgtgctaactaacacttcccccagtcacaccactagccatcaatcaaacagataaaccccttaggaatatctagtcaattgctaatcatttgaagacatcagccagtagaagggcattagccaacatcattacataatgtcaaaacaactgatcaagtttgtgaatccaatgaaacagtcaaaccagtttaggaatttcatatacacaaaacaatagatgagtgacttttagctttttagcttgatataaaatttttaaaccctaccatttataaatgtgtaagcatttggcacaccctatgccaagtgttttatctacttaaaccttggaagtatgtgttctcacttccattttaaagataagaagactgaggcttagtgagatatactaatctgcacaagactacatgtttaggttctatgagtggcagggtgaggtttaaacacttgtctctccaacgtccactccatgctgtttgcctctgtgtatgtaacttcaaacagccaaaatggccaagtaaggcaagaaaataaaaaaataaaaaacaaacaagtgaaaggcctgggtcctgaatcatgcagttaagatagccaagactcagctgatccacaattgtctaattctgcccatatccgtccagctacaaaccaagtctgcgacctgatacctgagtcctgggagacctcttgacccccatgtgataccgctgtaaggactaggactccaattgccaaacattacacatcagaacaaattttatgtgttccattatgcctgtgaacagatctgatttcttagtcaaatattatttttttgaatattttcaggcatagactgagtatgtggttcccttgtggccaactcaaaacatatagcagagagtaatcctttgcactatcctatattaatattttctttccctccttgtaatggaactagttataaattagatgagattaaaaaacagtctcttgagaattaacattttaaggaattacctagaaagagctgaggtgttttttttccccacatggtaaatcatacagagtagcagcctgccccagatccccggagacaacatcttgagcgcatatgttatgctgggttctgtattgactaattcaaaaactccagggcaaaagaacccaagttcccaagttaaaaatgaaagtaaaatagtggaatggaattgggatcattgttgcaagattccaacaacttcataaatagccattaaagtagacagcatgacaggttaacagatttaccattgtaagaatcaacctgcactgttggtgtgaagtcgcaaacaaacccatctacctctcactttacggatattctgttttctcagaaatagaatcacatttgacaaaattaatattgagatcattttactagaaggcttatccaaatatatgccatattaaaaatagtcatgatataaatatttctcacaagagctgcagcgatggcgtgaataaaaaactcccttctgagatttcagtaaaaccagatctcacaaaggatctgaaagaaaacaaaaaagagaaaacaaacaaacagacacacacaaagagacacacacacacagaacaaaccttatgttaatccggtttagcataacagtgactattttgacactattttatgaagtacgatactattccttcccagatgaagtaagagaaatgaatcggctacaggtttctcatgataatgttcagggctgggggtatctaagcatgttcagtagcagctaaaaaaatcaaaaattctaaatgcagcaaatgttagcactgtcaaatggccaagcatgcaagaggaatctctctctccatgcccttctacaaatacatgcaaagccccaaatccaccggctggaatttttaaatcgtaaattagatatcaaaatgcttacgggccttacaatgagataacatcaggaggaacggtgcgtggaatggatctggcattctcacataaagcattatctttggtacaagtacacacggcagggcattttggcttcgctggtttcttcccctcagtcagcaaaagcgcagataagagacataggaaataagcaattcttttcaggggaatgcaggcatttcccatccttttgcttctttctgattccatgcagtcgagaaaatatccccaaccatgaacagggcttctggaattcagatggtgattgtcttgctctaagaacaggtcacataggagtccacccttttcctctgcctctgtatctctgctttttcaaaacagagacctgcagctgattcgtgagcttctcctcgctccagcaatgcactgctcgggggaagagacctgtgaggtactgtgagatgggagggatccaactgctggaggagagagccgacttgcatcaccacgaaaacactgagcacagaccagccttcgaaggcaaagtgaagtgatgtcacagaaaataaacagctttctgctttcaccgggaggccctttaattgttaccaaaaataggacggcattatgtcttattagtgagtgggtgggcgggtgggtgggagcagtcatcttgcataggatgtcggcaatctcagaaacctctgggagtctgcttttcatgtagcaaacaacctagtaagaaaaactagctttggagccagccccggctggaaaaaatgaagctaaatgaaactctctccacaatattgggctaaaaccttttgatgtttcttgctgagcctacctggctaatgccatcagtgaaagacaaatcagaacagatgaagaatgtgactttcaggggatgaatgtgagtacatacttttctgacacttattaactgtcatgaatgattgattttcctatccccctgggtyccccacgtaattcattctctccttccatgacaaggaagggaaacagaagtgcgggaccctctctgtgtataatccacctccctctcttctcccaccctcccttctttggcagtagcaccagaagcctggaaggaactccctgccagcaggaggcggccagctctagcttcctggggctttgaaaaaggcctggctcagccccgaggctgtgacatggtgggggaaatgctggactgagaaccagacacctggctttgagaacgcaggtctgctgtgaacttgctgaatctattctcctgtctgtaaaacggggatgatagtaaagacattctggaattaaatgaaaatgataggctatgttactcgtgtacttgatgtgagcggatgggcccttggaaaagaaaattcatttaaagaagcaatcaagagcccctggccttggggtgggatagtttagtccaagagagtaggaagacccttgggatggaggaagatgaggaaaacagacccccggttatctcactatggcgaaggcggccatccttcaagctggcacgaacagcctgggatatcagtccacgttcctttctcctctagcttcttagactgaaagtattaaaaggactgcttgagcaaaggcgattttgacataacctcattctgcatcagagctgaaagcattgccattctaccctttcgctcatgtagctggccccatgctaacttcaatcccttgttcagttctctgtaaactctttgcgggggacagtgccattcacgtgcattctcacatttgataactgtctgtttaccccagaagattgcaaggtccacgaggttagagaccccgctagggaacccagggcctgtgtagcattgtgcatgtagtgggcaacctggatggctatgccagcaacagcagagtgtacagtccattcatggtcatgcccagccaaataaacttacagttgcaccttgcagttctaataaagagatctaacctagtcaaggaagtcaggggccaattccctgaagtagcagtgattgagctgagttcagaggtaaggaggagttacagagagggttsgtgagaasactccaggtagagggaayggcatacataaagtctggctcatgatctgcagagcaatgggacacctctgtagaatcaggcaggggagtgatattaactggtttgtgtttcaaaaggaccagtaggttattatcactaagtcagtttttgtggggttgtaaatactgtgtgttgttttttacggaagggaaaaagaaaaactcttcgttgacaagaagtcatgattttaaagtgtattctacgaatgcttcactgtcaaggactctgtggaggagggaatggagggcagtgtttttagaaactgtgacctctgcgcaagcctcactttaaacagtaaaagtgtcacttaaaagttggctgcaagtcgggtttttgtaaattgaaccctgcttcaagtgcctagtggaaacttgctccgtaaaataattatgtggtaaaagttttatggaggattgtttttattcaaagtcaccctctaaatcaactgacttgtaaatgatgtgttctgtaactacaaaatgaagacatcgagaagattcagggacctcaaagatcctggattygatccctgcatattacagatggagaaaccgaggtacagagaggacacacagagaccaccactctgcatggggtaagccccatggcagaaacttggttacaatgactaatgtaatccatcaggctaagtcactccctgtgtttcactttcaaatgtttcaaatcatgaagattgcttgactagctgttggctttgtggtatgaagacacagcygaagaaagggtgagcggtctttttcttttgacttggtaaagctaggaaggcaaatgaatgaggggaagaaatcatatccatactattcactttgcagctgtatttatctggcagttcagtttgtcagttcaagggggaaaaggaccwttggggaggggaggggaggagaaactctaaggacaaattacaatgggcattytgaaaagacagtaactttttatttttctatggcatttaaaacccagacttgaattctttattcaattaaaaacacccactaaggtcagrcaaaatttaaccatgtaatgcaggatgctggyggcctttttgggaggagaaaccacttcctggctccagaattggatctraggagagactcggggagatgagggcaggtcgctgcattgaagtcttgagaggcctgaagaggaggccccattgctgataatgcttcccatcttactgctccaggaagccccagggagcacagagatgatgtaggaagcaggaggtggaagcttaggggtttccaccatcttggaggccttcagataaggtgtggccacccacttgtggatcacaatagggaccctggggagaggggcttggaaaggattaaagcagagttggaaggaggcccagggaagccaggaggcctagctgaggcaggctcaatgcccagtctgagctgtagaggagtagctgagctctgcactttgccagccatatgaccatgggccgatttacccttcmtaagtcacaattttctcctctgtaaaacgaggataataatagtatgtatcacatagagttgttgagaaaatgaaacatgataatgtatctaaaagtgcttattgtgcagtctgatacrtgtgaaagatttagtatcatcttcaccgtcatcaccatcattctcatcatggttgcaacaggacttgaattctgaacatgtgacttctgggacctgggaagcaaagctctcaaataaaaatgaggttagctgaagcgtatattcactctgggaagcaggcacttctgagcagtatgacacactgtggccttgtcaagggttccgccatgagaaggaaccaagctgcctcctggaaaaaaaaaaaaatctcaccagtttgggtgagagtaggagcacgcatgcttagcccaaggacaaggtctacaggtggagaagattaaggtggttgtgaatacaggatgaagacttttttcagcctactgcccttgaacacgtgtaagttagaagggagtaagaggaatctcttttgggatccctgtaaaaaagtgggacttctctctaatgtggtgggcaccattgcatggcatgcaggtgctataaggaactatgcacagtggtgacaccagaggctgctgaagaggtgagacaaacaatgctcccatccaggcctgggagtcagactaaagtcatggaatttttcaccagcagcagctcagccttggtggcccagcagcagtgacagccctgcagacatcaaaggcactgggaaaggatcccagcagggaggcagagcagaagagaaggaaaatgagggacaaggaatgatgtttgggagcacatgtacagtgttccctggacatcctcagaaagaccagaagggggttctcgtctgggggcttctggtggttctggaagagctgttgaaagcagagtgagaaaggaacagcatgtgcctggttatgatcccagttttcccctcaggctggtgtggcctaggaaacacacattgtacaagtaaacaaatcactattaggaggcttagaagatcaagcttggccttgcctccttttacaaacactcagacatgcaaactggtgtcattttaagcagctttctcaacagagcagggtttgcaaagctgcgtgtcagatatgatagtggatcgggacatcaatatcaatctagtgagtacaagtagaatttgaaaaataaatcatttcaaatacaaaattggagcatattgcaccagtaaggataactattgccttgtgaagcctttgtttccattctttgtgtgtgtatgaaggcacagctgtgatataaatcatgcttctttcagtttacaaccaaaaaaaaaaaaagaagagaaaagaaaaagaaagggaaaaaaaaactgcatgagaggatgctaaagatcctttcccaacccaggagtccaaaatggcagggaagtgatcttgactccaataaatttcacttactggttgaagttagcaattagacctgtcggaatattgtttctgttcttcactgactgtgtgaacttaggaaagttgattagcttctctgtgcctcatttgcaacaaggaagtaaaaataacaatactatctctgcattgttgatattaggattagtgatgatgtacatggaaagaatgttgcaaaaaaggcactggactactgatagttccactggaaataagtgggaaggggattgagggccaatctttaagattatttrgcagtagtgtgtcattaggactctttggtagcaagtgacagacactgactctgccaacataagtgtaaaaggaccttgttgccatggtgattgagtgactcacagaatccaaggaagggttgaccaagcaggatttagaatgaaggaacttgtgaaagcttgggaatctatgtggcaggagctaatggatgatgccctctggcaaattcagtccaacctgttcttatccttatgttcctccccaaaagatgagtatggtggactgatcttgggtcaggcacccctgcccattgccctgggaaagtggggcaccttgactggcaatctcaccaagagtgcacatggtgggagagaggtggttccacaaaagcaagttgggtactgctgtcagagcagagagaacaggctgggcaggtgaaatccagcgatgctcatttgggtaggagtgctgggctctgatagctaatatcattggcccttgcccctaactcaaccttatggttttaaagagaaatgaccagaagacaatttagacaaatagatatgaatactttctccaaggacagctaaactcgcatgttctaactgtggaatcaggggattttyaccttttatagtccatgagaatagaacttgggccaagaaaggggttgagaagtaataataatgaaagctgactcttataaaatgcgtattatgtgccagctgccattctaaagcactttacccatattaactcacttaatcctcataacaatcccatgggctagatagatattactattatttcccctatattagcagaaaaggaaacagagggtcaggaggttaagtcgtgtgcccagggtcctgtagctagtgaaaggtggtgctggkatcgaaattaggtgtcctggctctgatgtccacagcattagccactgctggacactgcctctctgatgggctgtgtggaatgagggataccgtgagctgcttcggagctggtagcacctcactggctgggcgctactattgtactacaattcccagcatgcaactgggctggctatcatcttaaccccttcttcaccaaaagttcctcactgtcttgggtaaaatcttttttattggcaaaatctgatctccctcatggataattatgcaattgaggcataaatgtagatataagtggcagcagataggggagagggtaagattctaagttaaagtaccctccacattttttagtatttgaaggaagacattggagattactatgggaaagattttttaacttagaaatgtgtactatgaaaacgtcgatggggatgttttaaagcacccattctcaaagttggctacactttcgaatcacctggggaattaaaaaaaatacttaaagtttgggtcacattcctagaggttctgatttaattggtctagggtatggctgttaaaagctccctatgaaattctaragagttccccatgggtataaaacaggaggcacagcttgtcatgcagtgggggcatatggggaagcatcagggctggtcaggggcccragggagcaaggggaaaatgcagacaagagcctttattgtgatttctgcaggaatggtaatgcaagacagggtaaacaggctcaggattggctcctttgaataagttcagtgaactttggggcacagggactgtccctagttgtctgttactggccctggggtgattagagtaggtggatggtggccccgagagacggcccaataaaggaagtgattgggggtatggatactggatcggttggtttgcataggaaaggtgsgcyctcccacgtgagtcatttactgtttctcggaattggctaaccctgggagtggcagtccctccagggtcatcagcacagccccaggtgtcaaagcatcaggatacagaaaatttaaaaacatgttgaatgtatccttccactcttcagcagaaagcagctgaccgggcttaaagagaactgggaagagcttgaagcctggggaaccatcccattaggaatggtggtctgcagggaaggaagcaggagggctagtgaaacaaggagaatttcagccatggctctatttagtttatcaagattccaaacctgtcacggaatgacacccaagcgaatgggaagaaaggcggcaagttctgcctttaaaagcctccttgtagagacctccgcactcccatgtttactgcagcactattcgcaataatcaagatatggaatcaagttagatgtccaacaacagatgaatagatagagaaaatgtagcatatacacaccatggaatactatttagccattaaaaaacagtgaaatcctgccattcatggcaacatggatgttggaactggaggacgttatgttaacggaaataagccaaaaacagagagttaaacaccacatgttctcattcatacgtggaagcttaaaaaagttgatctcataggagtaaaaagtagaacagaggatactagaggctgggaagggtagggggaggtggagggcatacagaaagttttgttaaaggacataaaattacaactagataggaggaataagttctagcgttctataccactgtagaatgacaatagttaacaataatagagtttcaaatagctagaaagaggatattgaatgttcccaacacaaagaaatgataaatatctgagatgatggatatgctgattaccctgatgtatcaaaacatcgctatgtgccccatgcatatgtacacttattatttgtcaattaaaaaataaatatttaagaaagcctccttgaaggcagtacccacaatttatttatctttttatgcccttgattaaatgatcattacctagcagaaacagttaaaatggtcttataaaagagaaaagttagtttagagatgtgggctggtactttgctcttaaaaaatagagtttttcttaatttttattaccaaagttaagtatgctgaatttatacatttctatacctgcctttaaactcaagcagaacctgaattaaccattgattggagtttattgcttatgtccccaagggaagcgcctcctctggctcatgctggtgggagaaaatgaaccagccctgctttctctccctggttcaattcccagcaaaggaaaaacaatgtaattcatgatgatgatgacaatgacaatgacgacaacaacaataaccaacctttaacacatccttataatgtgccagaccctgcggtaggtgcattagaataattacctcatttaattattgtaacatagtttggttaatttgcccccatttttcatatgagcaaactgaggcatggagaggctaggcagcttgcccaagaataggaggctgtgctggcttgaaagtgaggcattcagacattagtgtcacatgctcttaatcgctccacagcaccatctccttggatcggagtgatttcctggagcaaaggtaatctgatcttattcacacaggagcaggcaataactgcctgagtacagaactcctrtgaggcgattggtgttggaaccctgagtagtctagttacataaccagcataacccttggaaaagctgtcgcataagggaaggctgcctctgggactagaagaaagactatgccaagatctggttctgcaatagatgagctgtttgaccttgggctcaacgcttcacatttaggctctgattttcaaaggaagttcttgggctgggtaatctctggagatcctgtcatgtaagcagcccctgccagcactcctactggggagtgattaccataaagacaaggaaagtgttaagcaggttcttgcacctcccaaagtaagtagcaaatagctgtttgggtgtcctgaggagttctgaaaacactgggcctagttgcctcctgcttcatcttgcaccatatgcctgaagctagtgaatgaataaacatcactcgtggctatttctggatgctcaagaaactttgaaaaaaaaaaaagaattattatttttgaggagagtattatagaagacccaggggaagacagggtagggaggagagtgaggattctctttgttgtgatcctagaattcccattaggtggactggaaatgctagacttaccattgttggactggaaatgctaacatcctgaaactcttaggacctctgcatgaagaattgtcctgccccaaatgctcttagcacccccactgagaaggagtaaaagagtttctcacagtggaaacactgcgaacctctttatgcatttttctgaacatcagtcaataatccattaactcggggaagctgaatgctcttcatacaggaatccaaaataaattgacagatatcctctgggaagaactgtagaaaggctctgtgggcttgaacaaggcatttcatttccttgggcctcagtttctttatctttatagcactaacattctatagcttcctaatttctctccccagaaaggagaaataatttttaaacacagaggcttagaaagagtttgttttccaattcggggcatgctaggtacatgtactgcagttaaccaaaatgcacatggtaaagtttaagccaaaagaatgcagaatcaggccgggcatggtggctcatgcctgtaatcccagcactttgggaggctgaggtaggtggatcacaaggtcaggagatmgagaccatcctggctaacacagtgaaaccccgtctctactaaaaatacaaaaaattagctgggcatggtggcgggtgcctgtagttccagctactcaggaggctgaggcaggaaaatggcgtgaacccgggaggcggaggttgcagtaagctgagatcgtgccactgcactccagcctgggccagagagcgagactccatctcaaaaaaaaaaaaaaaaaagaaaaaaaaaagaatgcagaataaaattatcccagaatatttttaataaggtatgatcttaatgacttagcatttttttctggaaatatatttgaattttatcagacctaagcaccaaaaatttaggcaaggtcatggaaggccaccctttttactggctagacttgaatagaaatctactcaagaaaagaagtttgttagggaattaaaaaaaaaggataattctaagtcatgggcaaggtggaaataatctagccagaaaatatatttgggggtggtactaaggaaaagcagtggctctaagaggtattgccctagagyggggcatggttattggaatataaagttgaaaatatgattactcttctatcttcctcttcttctttatggctgaatcactcccaagatagttcttagcaggtttttatttatttatttatttatttatttttatttttgagacagagtctcactgtgtcaccgaggctggagtgcagtggtgtgatttcaactcactgcaacctccgcctcctgggttcaagcgattctcctgccttagcctcccgagtagctaggactacaggcctccaccaccatgcctggctaatatatatattatatatatatatagtatttttagtagagacggggtttcactatgttggccaggctggtctgcagttcctttttttttttttttaaagatacttcttcattctttcgaggaagctattaactgcttttgttttgttttagttttttggtttaagattctgaagttaagaggaaaatcatgcaactaatctgttcatgctttggaaacttgaacttcatgatgttggatttcagcctttttgcttttgtcttatccctttagaagggatctgttttgttttgtttggctttatactgtcgttctggaagaactcagagctttccattgctgcccgtgacttatggcctgtgttacacccattggtttctgtaggaatgatgacccaagaagctgggaatgtgaccgcagaaaatagcaaagcaatgaggaaactggttatgaccataggattagtgccctgagggtccagggcagaaatgggtgttaacagcagagaagcacaaggcttctgcaccagcctactgctggctcacattcaacactgcccctattgctcccagcagtgcagcaaagaagacaaaggaacccatgcttgctgggccccctgcaggccaggtgcttcccatacattgtctctgttgatcatttcacctgccgtgtgagcaaggcattatccccactgaagcttacagaggttagactcgtccaagacaatatattttggcttcaaactgacttctgtctgtttccaaaaatatttttcatgtgacttatttttgatgtatataaacttatagacagttcttgaattcttgtctatgtgaagcacatattgtgtgaagtatttgcatggggccaggygcggtggctcacacttgtaatccagcactttgagaggctgaggtgagcggatcacctgaggtcaggagttcgagaccagcctggccaacatgacaaaaccccgtctctactgaaaatacaaaaattagccaggtgtggtggcaggcgcctgttatcccagctactcaggaggccgaggcaggagaatcacttgaaaccgggaggcagaggctgcagtgagtcgagattgcattactgcactccagactgggtgacagagagagactctgtcaaaaaaaaaaaaaaaaaaaagtctgcatggtattgtttgcttatatgatgtttagaacaaggaaaygactgaggctgaccatgctctggctctggaggctctctggggatacctggaggagtctttgggtcacaccaaaacactaggatgcagcctaatgtgaagattacaactcaagtcttggctttgctwtttagcagctgagtgaccttgggcaagttttcattgtctctcagcctcagtttcctcatatatagcatggaaataatactagtgtttctcttacaggatcactgtgaaaagaacatgagatgccctttgcagggacatggatggagctggaagccattatcttcagcaaactaacacaggaacagaaaaccaaatactgcatgttctcacttataagtgggagctgaaccatgagaacatggacacagggaggggaacaacgcacactggggcctgtggagggcaggcggggggagggagagcatcaggataaatagctaatgcatgctgggcttaatacctaggtgatggattgataggtgcagcaaaccaccatggcacacatttacctatggagcaaacctgcacctcctgcacatttaccccagaacttaaaataaaataaaatttaaaaaggacacgagataatgtaagaaagtagttagcccatagaaagctgttactattccagtatgtatcctactacccacggtgccccttatataagagcgccctcctgaggctgtcagaataactggggcgaggcagggaatgagaggggacaccaggcctgaggagtgaggagaacagactagaatggcttcctgaccgaaactacacccgctcaaccccaggcctgtgtaataggcacttccactttagtgtgagggtaaatcccagaacactgaagaaacacagcccagagctggcatccttttggccatttcctgaagtggagctggatttcagagggctgtctcaaatgacagtgtcagcactaggagctgatggttaaagctctgcaagaaaacagcatccagcattttcttttgctactctcatgggccaacatgaaagtgcgtaatgatggacacaggctttgcttaagtggtgagtctatcatccaacctttgactataattatgttgctcagattagagctaagtaaacactggatttgttttttttttttttttactacgagcaaatgaattttatttcttactcagcatagttgtcccagtttgtttattcaacaaacgtttaagcgtgttctccatgcgtggtgcttgtggcactgggcattcagtagaaagctagaggccaggcgtggtggctcacgcctataatcccagcactttgggaggccgaggcaggtggatcgatcacctgaagtcggagttcaagaccagcctggccgatatcgtaaaaccccgtctctactaaaaatacaaaaattagctgggcatggtggcacatgcttgcaatcccagctacttgagaggctgaggcaggagaatcgcttgaacccgggaggcccaggttgcagtgagctgagatcgcgccattgcactccagcctgggaaacaagagcaagactgtctcaaaacaaaacaaacaaaacaaaacaaaacaaaacaataaaaaagaaagctaaacccacagagttcctgccttctagtggaggagatgagcaattaaacaagagaaaacaagtgcggtgagggtgatgtgcaggctggcggagcagcaacaacagcacagaatcctgactacggtttgaactaaacctaaagggccccgactctgccttgatctctccagaaagcctcccagggccctgacttccctgtgcatgtcaggtgaccacggtggtgggcagcttcccacctcagcctcttccctcagtgagatctgggaaacctcctccctcctttgcctctgaattctcacaaagaggaccaagggttttgaggcatagtttttaggaagaaaacagggaacaaggagaataataataaagaagaaaaaaagtacaagaagtaaaaggtatcttgccttactgggccttggttaggtgctgaacattgtgctaagaatctttcgatgtatattacaatgtgttgttcatttctctgaggttgatattgttgatatgtccatttttcccgataaggaaactgagggtaaagaggagaaagaaataggtcataaacttcaccaaaggcagagctattatttgaacccaagaaaatgtgaaagttaattgatcatttcttaagggcaattttattttgttttttgcaggggcagtagagggagacgttgttgttcccagaaaggggcctttagggagaataaagaaaggaatccttgataggggtgctaaatcctccagtacctggtagtgctggccacaggaggagctcaataactattgaataaggcagtgagggagggcatgaggaagggagtgaggggatgagtgtggcccctcccagcctaccaggacctgtatggcttttctctcatgaatcccagtcacgagccagctgcctgcatcctcttttcttccatcttgcagctgccaggcgtttagggtagcttggtggttggtttccaccactctcctcagtccttgaaatcctcattcttacaacactcgctgtacctgggacttggtctccatggcttttccagatgttactgccctggaagtcaatcccacaggaccattttattttaagggtcagagggctatagtagttcaagaccccggtggatgcctgaaaccatggataatactgaaccctatttaattgtgcttatatgggtattgatgatataatattgcaaaattactgcagacattataattacataaaaaaaatagtaagttgaagaataattccatgacagtaaatcagtctaaaataaattaaaatagaaaactccaaattaatggcagcaagtatatttaaaaaataagaatatgagtaaaaagacaagacctgacaaaggagagtttcaacactacagtttatgtatatattatactaagttttgattttttgttcgtttgtttttgagacagggtcttgctatgttgcccaggctggagtgcagtagctattcacaggcatgatggtagctgattgcagcctcaaactcctaggctcaagggatcctccagcctcagcctcctgagtagctgggaccagggcagcatactctttttgatctgataactgagacggctactaagtgactaacggattggtagcgtatacattgtggatacactggataaaaggattattcacatccgagggtggagtgggagggtgcaagatttcatcatgctactcagaatggtgcttaatttaaaacttacaaattatttattttttagaactttccatttaatatttttggacctcagttcaccgagggtaactgaaacttcaaaaagtgaaactgcagataacagggaactactgtatgacaaacagtaaatatgaggaagttgtagaggttatgaaaccttcccaaccactccacgaatgacctacttttagctctggctatcatatagtctccccagagtcagacgacagtcttgccacttgccacctgggtagtggtgatctttagcaggttacttaatctccctaaccatgtctgtaaaatggtccccatctcctcaggttggagtgagcattaaagatggttctgtatttgaaatctcttagtacaaagaaaatgctaaataaatgttgtcaaggactgaattttatccccccaaaattcatgttgaagccttaacctccaatgtgactatatttggcgatagcgcctttagaaagtaattaaggtcaaatgaggtaaaaaagggtggagccctaatgcagtaggatttctgtccttaggaaaaagggggcccggcgaggtggctcacacctgtaatcccagcactttgggatgccaaggcaagcagatggcttgagctcatgagttcgaggccagttgggcaacatagtgaaaccccatctctataaaaaatacaaaaattagcctggcatggtggtgtgcacctgtagtccagctacttgggaggctgaggtgggtggatggcttgagcctgggggtggcggagattgcagtgagccaagatgtgcctctgcactgcagcctgggcaacagagccagaccttgtctaaaaaaaaaaaaaaaaaaaaaaaaaaagaagaaagaaaagaaaagaaaaatggaagagacaccagaggtgcacatgcacagaggggaaaggccatgtggggacacagacagagagtgactgtctgcaagagacctcaggaaaaaccaaccctgccaacacgttgatcctggacttccagtctccagaacagtgagaaaatatatttctgttgtttatgccacccagtctgtgatatttcgttatggcgacctgagcagactaatacacatgttcagtctacttcctttgctttccttgttgtttgaacacatttgccaggcagtgtcagagcccctgtattgggaagtggtcagtgtgtgggttggtaagaagaatttaccaaaaacagtatagatttgaaaaaggaaagttttagaaagaaagaatgctgcaaaagggtgcagcggggcacctcagtgagagaggactgagcacacagtggtggattttccttaggagcatttatggaccttaaggcgggagcttaagggtaattttgaccatattagccaggtaggtcatgatacatgattacatctgtagacattttggtgccttactgtcagcaagggttgcacaatgagttttgacatgcatgcattctggaggtgtatagaaattctagttatgacatttttgaaagagatctagatgctgactttagatactagggaagtttaattacttctaaattcctcagataaggagtttttgtctctggagactgctcgatggtcaccaggtgattttcctctcctcatttgctccctgacaaatatcttggtcatatctttgaccctttatatttatattcccccatgttcatgtctacctgctgcctactggggtctcaagaaagggaaaatggtccagtgaagaggggtgatgagtctgtctggctacttcctcctgaaagggggctttgaggggataagttgcgtttttctcttttttgctctgtgtcataaaggaaatgaagggtcatgaaaaactcagtcacgaggggtggggactggattctatcaagaggccccgtataaatggaagttgctgttgcaggccagtattgagactgcatagtcatctgtaggtggaatcgttgtattctggaagatacaaacttaatgagagcattaaaaatgcagggagcaaatattaaaagaaaaatgacaaggaaaaaaggtccaaggaatgggagaagcccagtcttggttactttgggaaagtgtgtataaccatttggcttgtttgaaaatttactgggacattagtttccacttctccagacaacagattttgttgatgacagcacagactcctccttgttcaggtggaggtaatcaagaactcatctattatcaaaaaccatttctgctagtgagtataaagacttttctagtgctgatagacttgtgccagttttttctaagattatttaaaaggagatggtaagttcttgtagtgtgatttcacggtaagtaaaacctccccaaatagtgacagttgtgatagtttccacaactctggccacaataagtcctaggaccctttatcttctggaatggaattctgaattggaagttatactccagacagtgatttgggtgggagctattgttcctagagtacaatcatcagaacgaagggaattatcaaggtagaatagggccaaaacttgaaaagggtttaaataattattggcagagccacaaagtcataagagtccatgagggggcaggtattatagtgtgatgagcttatgaatgcataaaatatatgtagatatgaatctattttatcatatactagtgcaaaacatacacaaatctattatacaaagttaaaatttatcaaatcttacacaaacacttatggaccatacatggtgccatttgcagtcaacagaaatgcagccaagcatggtggcacatgcctgtggtcctagctgcttgggaggctgagacaggaggattgcttgaacccaggagttcaaggctacagtgagccatgatcgcaccactgcattccaccctaggcgacagaacgagaccctgtttcaaaacaaacaaacaacacccaaaaacataaagatgtggtattaagtcataattgcataaaatgaaccgtagtaatactatgctactgtaatagtcttgtagccaacttctgctgctattgcagtgagcccgaatgttgggagtattcacttaaaacaccgtgtgacactatcatctccatgtgagccgttcgcttctctagtaaattgcatatcgcagtaaaaatgatttcctgagattcgtgcgcattttttcatcatgtttagtacagtgctatcaaccttgaataacac

SEQ ID NO: 6978 - DNA, 32944 bp, Homo sapiens
caagtgggcaggaagagcccgtgagaagggccattgctgccctcaagcccacaaaccatgaggcacagccacttctaaccacattgcaggtttcggcctgccaaggactcccacctgaggggcgtgcacaggggctcagccccagccaggccctgttagccatgcccagagccttggctgcatcaaccctggggaaggagcgccttccaactcatctgttcagggaagtccctttttttctaacttatgtaaagctttgagtgtgctagctgtggcccggcctctgtatcttgtttaaagtagacacagtatgatccctgccctgggcccctagtgtgtgaacaacttataaacaggcagctgctcacttgagtcttgctcttattttccagcttctacttgggttcctatcttttggtggatagatgtgctatggacagtggagaagatcacagtgctgggcatgccagagcacttgccccttcccaggcatgtgttgctctctcgggccttcctacctttgcattgctgttcccttggtctgaatgcctatgccctgtctccctgggaactcttgggcctccttgaagaaggagccttgcaccaccatcagggtgcaaggtggtcttccccgtcaccccactctggcctggctgaggtggttactcagctatgaatgctcagggcagttgggtctggggatctgggaggggtctcaccttgacaggatgggaggaacagaggcaggagagagacttgaaatctttgcacgagggtgagcaacctttgcattctgctctataatatatcctaattttgcacagagataccctgaacctgcaaaggcatatgtctcagaactgataggtatagacagacagacagacagatacatacatacacagacagatggacagactctcacagggagatttggaggtcgagtaatgaaccagtaagcattttcatactaactttataacatttttccagaggaaaaataagaaaaccggctcacacctgtaatcctagcagtttgggaggctaaggcaagtggatcacttgaggtcaggagttagagaccagcctggtcaacatggcaaaaccccatctctactaaaaagatgggtctcgaacccagctacgcaggaggctgaggcaagaggaccacttcaacctgggaggcaggggttgcagtgagccaaggtcacgccactgcattccagcctgggcaacagagagagactctgtctcaaaaaaaagtgaaagaaagaaagagagagagagagaaagaaagaaagaaagaaagaaagaaagaaagaaagaaagaaagaaagagagaaagagagagagaaggagggagggagggagagaaagaaaagaaaagaaaagcatacacagagaaagtcccctgtgcccctctcccctcctgtttggttggaaatgtaaagaggtacagaagccacctgcaatgttggctttctctttagcttagaaacgagactgtccagatttacgcttggtaaatccttgtctcagtttctatggctttatctgagagtggaagaggtaaagaactaataccatgggcaataaatatgactttcacagtgatggatcagccaatgggtatctactgtccagtctccagggaatacgtgaagtctgtctaccctgaggatgccacacccagccctgtgtatgaaagggatttcacggctgtgcacatctggggcccaaacacaaagcggagcccagtgggttggttaaaggggtcacagaggttgcagtgaaacatctctgagaaaaaatggtaacatttttggcttttgccactagatgtgaccccacgacagggttaaaaataagaagtaaagtcttgtgaggtctcaagagcacaggatttctcagcctcagtactatcaacattttgggctggacaattctttgttgtggggaatgtcctgtgcattgtaggatgttagcagcagcgtccctggcctctacacactggatgtcagtagcaatctcccagttgtgacaaccaaaaatggctccagacatgacaaaatgtccgagggtgggggttgcagcaaaacctcccccagttaagatgcactgctctagcggttcagagcaaagactccggagtcagactgtctcggttcaaatcccaatgtttgcaacttgtaggggaattgaatgagttaacaaacacaaaggaaggatggccatatactttatcctccaaaccagggcaatttgagaatgaaaaaggttctaataataatttcataaactggtgctggccatggtggctcatacctataatcacagcactttgggaggccaaggtgggaggattgcttgagatcaagagttcaatacctgtctgggcaacatagcgagacctcacctcacaaaaaataaaaaaaattatctgggcatggtggtatgcacctgtagtcccagctactcatgaggctgaggcaggaggatcacttgggcccaggacttcaagactgcagtgagctatgcccatgccactgtacccaacttgggtgacagagtgggaccttgtctccaataataataataataataatatcataactgggactgtcagcaagcagagttgtgtccataatccatatacagtgttgaccacagagtctgacccacagtgtccactcagtgaccactgtgcgaaatgctttacattaaggaacttcatttaatcttccccaaaccctacgaggtcagtactatcactatcccctttcatatatgggaagactgaaactctaagaagctacagtaacttgcccaaggtcacacagtgagttgtcctgccagggctctggtccccaaaggctagtgcccacatgggctcgggtactgcagggaaatggcactactcaacacccatccggctctgcatgaactgctagctctactaggtaattcacagttccagcattagattcatgacattgtaccttacaaagctgagtgtttaggagttgctgtgataaaaagcaggaactgcatgaaaatcaacatggagcagtgctcaatatgattttgttttgaaaaactgtgcagagtacaacaagtgcacccagcccatcaggaagctattgttgttggttttttaaaaaaaattttttgagacagggtcttgctttgttgcccacattggagtataatgaccatagctcactgtagcctcgacctctcaggctcaagccatcctcccactttagccttccaggaagctgggactatataggtacaagcccccatgcccagctattttttttttttttttttttttgtagagataggatctggttatgttgcccaggctagttttgaactcctgggatcaagtgatcctccagcctcagcctcccaaagtgctgggattacaggggtgagccattgcacttagcctcactatggttatttaagaatgaaacaacaagccgggtgagtgtaatcccagcagtttgggaggctgaggtgggtggatcatttgaggtcaggagtttgagaccagcctgaccaacatggtgaaaccccatctgtactaaattataaaaattagctgggtgtggtggtgggtgcctgtaatctcagctactcgggaggctgaggcaggagaatcgcttgaacccaggaggcagaggttgcagtgagctgagatggcaccactgcactccagcatgggcgacagagtgagactccctctcaaaaattaaaaaaaaaaaaaatgaaacaataaaatttttaccccaatttatatgtattattattttccaagatagttactaagttgttaggacataaagtcttattaagttgtttggacccaactacttaataaatgaaacgtttctgtttggtttttctttttgcctaggggtgccatgaaggtgcagtgaatggagaaagtttatgagcctctgcactcaacattttgccattggtagaacccaggaggttaatgttggagaaggccttttagtgcaaagagcccaccctggttgtacattctagggaaacctctctgtgtctatctcatcacatcagcctgtgatgtaatcaatctctctccgtctctgtctgtgcttttccctcttactttctctctctctctctctctctctctctctcacacacacacacatacatatacctatagtttcctttccctcacacaaacactaatatcccctgaccctaatcagacagttgccaaaaccccatttgtctgagttccctttatttcaattttttgccctttttcaactgtttcaggaagcaaaccagttctgtttttcaacttgaacctagtcaatgttcaagctgagcatctacttctcaggttagaagtcacatcatcagctcagacctgtttgataccgtgaaaagcagacacacaaatggaccccctccccagacagtacttcagactctggcgcaaccagcctgaagtactcaggtttctttctttctttctttctttttaagatggtgtctcgctgtgtggcccaggatggagcgcagtggcctgatctcggctcaccgcaacctccacctcccggtttcaagcaattctcctgcctcagccttccaagtagctgggattacaggtacctgccaccatgcccagctaatttttgtatttttagtagagacggggtttcaccacgttggccatggctggtctggagctcccgacctcaagtgatccacccgccttggcctcccaaagtgctgagattacaagcatgagccactgtgcccagtcagtgcttagatttcttaagacccaaccttaagaaagacaattagaagacagagtgggcaactgggagaggcctggtaatatggcagagggaagagggggtgaaggtgtgggtggcaggagggtggctggttggggaagtggccactggatcttaggccacaggcatacttttccatctccagcttcctcatttacagaaaacgagactgcagtggtgtgatggaaatgtgtgggacggggacaggtgactggctttcattactaaccagaggacagcttagacaagtcactctggctgggcctcagtttccttatctctaacgggactggattgcccagtgctcctcaaactgtggcacctggggcacattcatagcttgtgtgtgaatctgccagccttgaaatatctgtcttccttggatggcaagtttattaaaaattttggaaggactcactctttttataagaaagcatttatgtcattgttcagaatgcaaaatgtatatgcattttagttacaataactaatatttgataacatttaacgagtaattactgtgtgccaagtgtgcaaaactctaggtgagcctcacaataacctaatggggtattattattcccattttatagattaaaaatctggggtagagggagtagataatccacctaaagacctgttattaagtagtgataaaagatctccactccctctctcccccacaaaaaatatggactcattacaagttgttttaggatctacctccagacccatggagtttctttagtaaagcctgaacgacacaggccaaaataatctccaaaggccagctctgacccttttaaatcaattttagctaaatccgttcacaaaaggcttcgcacatccagtgtccctgaaaaataaaggaggttgggcaggccctgcgggggctcgaggaattcgctaagtgagttttctggcttctggatacactttcaaagggccagagggcacgaggcttccgccttggccgccacctccccggccagctgcggtgttcgcggccagtgttgccgggcacttcctggttcccgcgcgccccgggtgcagctccctgcacccagtgctggcgctcctcagaagggagggggccagaggcgagatgtcgcaaccgcctccctccctctttccccgccttggcactcagtcgcctcccagatgagcactctctcagaccgctgcgggccgccaggcgccgggaatgtcccctgaatgcgcgcgggcagcgggcgacgcgcccttgcgcagcctggagcaagccaaccgcacccgctttcccttcttctccgacgtcaagggcgaccaccggctggtgctggccgcggtggagacaaccgtgctggtgctcatctttgcagtgtcgctgctgggcaacgtgtgcgccctggtgctggtggcgcgccgacgacgccgcggcgcgactgcctgcctggtactcaacctcttctgcgcggacctgctcttcatcagcgctatccctctggtgctggccgtgcgctggactgaggcctggctgctgggccccgttgcctgccacctgctcttctacgtgatgaccctgagcggcagcgtcaccatcctcacgctggccgcggtcagcctggagcgcatggtgtgcatcgtgcacctgcagcgcggcgtgcggggtcctgggcggcgggcgcgggcagtgctgctggcgctcatctggggctattcggcggtcgccgctctgcctctctgcgtcttcttccgagtcgtcccgcaacggctccccggcgccgaccaggtgagcgcccctctgtgtgtgccgggcaggtgtcctgcgcaggctgggaagcggggccccgacggaagctgggatgaggatgatcaagaacaacaatagccatttattgcacttaatcgttgtgccaaatcttgtgcccatggctgtgaagtttaatctcttaaatctcactacaacgctgtgcacacgccctcctaaatgatgtaagtggagtcccccaaattcttgcaaaatgcaatgactgttgcgaggttaattaacgagtagtttaggagcgagacggaactttgggggtgcagggtggccaaacactttgtattgaatcatgattcctcgccaggtgctacaatactgttattatcacacccatttcacagatgagaaccagaggcacaccgaagtgtataataacttgcccagagtattttatccgtaattcgaggaggagatgggctccttccagaagtttacccgtaattcaaggaggagttgggctcctgtccagggttgggttatggtcctgctttgaaagcgcgcggacaggcatgtgagacccggggaccccagatgcaatgctgtctttaggggacttgtgacagaattcccttccggggtcttcagttttttcagctgcaaaacggaaggattacactagaccttcgaggtgtcctgggcgcctgaaatgtgcagattacagaggctggaccgacgagctctgttttacatagcgggtcaatagttgtcattattagctcataggggtgggagtgaccatgatcggaataaggttctgcggatagtgcaggacattggctctgttcccctcaagtcccgcggtccggaatcccgagctcgggtctttttctcttgccgctttgcccggtggttgcagggttcgtgcgccgggatccacacggaagagggaatctagacgcggagtcacggtggaggacagtggccgccgtctggctgtcttcccagtgtgtttggttctccatgcctcgcggagagagatagagaaaggacttaggtctgtgcgctgggggctcagcctccaggagcttctgcccgtggctgggttcttggcctccccttccctgccggggtcactggttttccggcctggaaccccctacccttaagctccctctccacctaggagtgaatatggggcgccctgagtaatcgtggcacaaacaggaatcacggtcccaaagagggaccttcgaagtggtcagagaggggagtagggagggagaaatgacatgtcaccaggggaaggcttggttatggagatgcacacagcccaccagggacaccccctgactgtgtgaccctccagagcctgagacagagaggtggagcttctctgggggttttcccagaccagtctctcacacagcccttttattgggggtaggatggatggagtctgcctcctgtatcctgtgcgagatttttttttttaaacataaatcaaacttaaacacttgtttctaatgcttgtgtggaatacattgtggggtgtttgtttgtttatgagcttgaatgactaataggcaggagccccatcaagcctgtggcacttgatcaaataacatgcaagcttgtggccatgtccactcaagtggggcccagagaagccaggattagctgagctggtgggtgccatttatgggcagaccaagggctctggcttagtggacaggcttgttcttagcccacacacacctgagaatcaaggtgggccacgcagatgcctctaaaagcawggatcaggagggggctgggcttctgccatcagtttctttgatttttttaaaagttattctctcagtgagtcacagtacttctatatttctcacagaacttgaggtatttcacctcattttctttcttacaggagaaaatgatgttcagggaatgaaagaccagatagaatgtatcttgaaggtatcttaagttttcagatgtgtattttgtgcctctcccttttttcagtgatttcaagtataaccctaattaattggcaaatgacattaaaaaataagactcttgtcacttcccagccagagcccagactaaaattgtgtgctgacagggacacaggtgactgtttgggtgagaaggccttggcataggcaggggccttccatgtcttggccacttagtaccgcaccactgttagggaatctgggtgtggttagagccctctgtggtgcttccagagtggccacagttgtgctgtaaggtgcttccgtggaggtctgtgttgtgatggctgggcacacagacctcctttgttttaatgttgaaacacttccttggttttaagcagcttcggagagggatttgggcaaagccactgggagagaatgaggctgcagtgtgcactgggggccaggtgagttagttacccacaggagccctactcactgaaattagtagaggtgaggtgggaaagcttgaaattaaaaaaaaaaaaaaatccctgggcatgctggctcacacctgtaattccagcactttgggaggctgaggtgggcggatcacttgaggtcaggaattggagacaagcctggccaacgtggtgaaaccccatctctactaaaaatacaaaaattagctgggtgtggtggcatgcacctgtagtcccagctacaagggaggctgaggcaggagaattgcttgaacccaggaggtggaggttgcagtgagctgagatgataccactgcactccagcctggccagcaaagcaagactcaatctcaaaaaaaaaaaattttttttaaattaaaaaaaatgggacaatcctttctggctctccatcttctttgtcttctttcctacctgtctgccacatccacctcatctctctctctctctgtctctgtctctctcacacacacacacacacacacactttcacacctacctgcccaggaacccaacaaacagaaaaaacccaatttcctaagggttgttgcctgaatacatagaaaacatccaatattataggttcagcagttgaagaaataagttgaaaagaatgagagacagaaaaaaacaaagggggagtgtagtcattaaaaaaaaaaaagcaacaggaggatctggtctagactgactgagtctcacatttaaaattagcaaaggcttgttttctcaatccccatattcccagctttctgcttgtggattctgtctgccccatcccacttagagactaaatatggaggtttgggatgggggatattttcctaacccaaaccacacgctgagagaatcaaccaagcctaagcagatactggctccctcccctcaaggagcgctggccaaggaaactgccccttagagcttctgccgacccaagagccttcctgaaacagaaactcaatctcttgtccatgtgggctgtgggtgcccagtagttcatggtaatcagactctaaaacttcactgaagagaagatgaggtgataaatatcctagaaatgtgagacaacttggtatttggagtgggctttggagtcaaacattctgtttaaatcccatctctgccattcgggagcttcatgacagaatccaagctgtctaacctctcaatacctcactttcctcttctgcaaaatgggcatgattacagtatcaaccaaccttaccggatcatcatgggcactcatgttcagtaaatgggccaacacctggcacatacacagttaagcacataagaattgctagctattattagtttccttatctttgaacatagacattttaaacattcttcaaacagtataattcttctgattgctgtaaaataacagactgccattttaagagggmgaacacatcctagcaacgttgacatctcagccaggtcagctcaccctgcttcaacaggattccagcctgtgtgtgctgtggacctggctgggcagtgacccacatcggcaggtggagaagactgtctatcctggccagaatgtgctgcccattcattctgcaaacatttactaagcacccttcccctcttgcccctgccacaaatcacgtaaatccacctccttctcttcaaggagaagcacacagatggtcctagattctggcctaatttggtcctcacagtcaccccaccccatattcttttgtttattctaaaagaggaaatccctaaggtcacagaattgcaagagatggaaccagaatttagccccactcttttgggtccctctggataccgtcacccttgggtttatactcccttgcggcacttgatcccactgccccaccctaccctaatttaataccaggctagtcatgtgaacgttcatgtgtctctgctgagtgtggattgtctgaggaaacaaacacagtttgcttgcttttgttatgattagagaatacttttgaaatataagaaaggaagcatctcttgcattaatattttctctcttttttgctgggaagctgatagaagatgaaatatccaactaggactcctaggttcttaaaataatcttgaagtcttccatgttgatggcagaggtgagacacaggaacaaggatctaccaagggtctccagaggtactgcaggaagaatcatcagagagactgataggcaaacagctggaacaaacagctagaacttatttgcaaacaggcagtgtttgcaaataagtcaggcagtgtggggagggtcagcatttccacagtgcctgtggacagatgtccccatcctcaaggggagtctccttagaaaagtcatttggcaattttgtcctgagcacctaatgtgtattaggcagaattctaggtgctgggatgctggctggaaaaaggcaggcttggtccccacccttagtaacacacttcagtggggactccagacagggaaggggatgattgcacaagctttggagagctgtggaaaggtctctgctgggtgtggggagtccaggaagctactgggagatggcagtgtccccactgagtgtgaagatgagaggaagtaaaccaggcaaggggatggagacgaggaggacattgtaggcagaggagagtccacatggaggccaaaggagcagtgagtgctgttctgaaacttgcaaggggttctccaccacacatgtgtagagcctgaggttcagtgggggcaaaagacggtgctggaagcgttggcagaggagagggagaaggaccagagtcatcctggtaggaagtttagacttaatggtgatggcctggtcttggtaagggttgggggtaggccagtgaaaatgcaataggtggataagtcaatggctatgaaggaggaatttagagatcccttctgagtggggaggaggaggtgggcagaaggccagtgctcaggtttctggcagcttggagaatggtggccctgtgccctgattcagggagtgcaggaatcaggtggaaccatttgaggatgggaccttcaaagcttaatgcgcctatgaggcctcctgctgagatgtcctcatggctattgggcaagtctggggttcaggaaagcatgcagctgaaaagagtagattggagctttacctgcaaaaggagccgtggaaatgagtgagatggccagggagaagtggagactgggatgaggcagaacacatttgggggatccaagtcacacttatcccttcactgtgagtggcctcccaatttcatcccacaattctgctctgacagctgagctccagcctccctatgcccctggccgcggtccttccaggcatagcagaaacaaccccccctgggtggctctaccctctctggtcctctgaagctctctgggcacttccagctgcttgtcctgtcctgaagtgtcctagcgcttctctgcctccctccctcctggaggaaagggccagcgccttgctcttcctcactgtggcttcgctgtggtcagccaccacgtctggagtcgggtggttgagcaaatgaattaaagaagactattgttgactctgccaattctgcttctgtaactcagtaacaaggcaggcctgccacttttgttttccaagttccctttttaaaatcaggggacatttcacatgtgcagaaaaagtacagagaatataataggactcacatccccaccttccagacttgacatgctgcctaactcctctacatgtcacagcctgcgggagaatacctagaatcaaaacgacttaagccaaatggattttcccacagaaaccaagttatgacaccaacttggatctctgtgggcatggcacctgttattttattttttaatgagaccagacagtgcatttagtcaacaataccatacaaaaccttctaaagagcatgtcaatccatcattcaggcccccaagccagttgcactgcctctcagttcatgtgtgggggtgccaggcagagttcttatcttacttccttatcacacttcctgccctgagcaagagccacaaatcaaaaggagaacgagcgtctttattaaagtcacggaatttgggagctgcctgggacaggttcattgtttctgttgaaaaatagctggtaaagttggcagaactatcatggtggtctgtgtttcatgtttgatcatcatttcacttataaatgaacttttttcttttataaaagtaatataggcacatcatggaaaattaggaaattcagataagccacaagaataaaaacaatttgagagtcctgcctagaaatagacacttcactttctggattgtatccttccatgtttttttctgtgcatgcgagcacgtgagtgtatgtgagagagaaagtgtgtgtgtgcgtgtgtgtgttggatggccatatactcattcacacatatacattctcttcaacacactgggatcatagaagcacatggtttagggacctgcttttttctttcactcctactgtagagagaacaccttgctctatcattataccctccacaaaagtcttgctaaccctggagagattttggcagacattctggaaaaggcttttggaaagagttgggggtcttaagaaaagcttctgtgtgtcctctgtttttctactctcccttaaaatttttccatcacaagaataggaatgagagaccaagtcacattcagggctggaatccatttcttccgattgatgcttcagcatacctgctcatatgtattgctactgctgtcttggaatgaggggtccatagtgggcagaggcctgagtacaaaaggaggtggtgcgggttttctggagagcagtagtagcctcactgccagtaatcagaagatccttgaaagaaacaggtttctggccgggcatggtggctcacgcctgtaatcccatcactttgtgaggccaaggcgggcggatcacaaggtcaggagatcgagaccattctggctaacatggtgaaaccccgtctctactaaaaatacaaaaaaaaaaaattagctggtcatggtggcgtgctcctgtggtcccagctactcgggaggctgaggcgaggcaggagaatcgcttgaacctgggaggcggaggttgcagtgagccgagatcgcgccaccgcactccagactggcaacaaagtgagactctgtctcaaagaaaaaaaacaaaacaaaacaggtttctttccagtcaccaaaatgtggaaggatttaatgaacttccccctaccatgtgttcacaccagcccagtcttgattcactgctaaaaattctctgcttttgcctagtagagcgttcaatgaatattggtcaagtgaatgaatgaatgaatggtacttcagatgatcatgctactcctagacattggttaagatgccttggcccttcaaaatcaataacgtggtctttttacacagcacgtgctcttaaaaataatctattctatatgtgtgtgttagggccacttgttttctagacagttttgtttctgtagtcaagtgggcataggaagtttatatgtgggaagttagtatatacagacacacagatatatgtctgttttcattggcctatttattcattggatgaaattgttgcagaagctatttgtaactattcagtaaggtctccatatgttgcagttcttgcagttagtgttaaacatttggatcaatacaacatagtgatagcagcaagatcacaaaccttcacattcttctgccatattccattggttttacatcttgaactgtctgtgagtggaggctgatctttgccttggggctctagatggccaggttgatgcagctcgacacactttagacacctgagcacccccagcatgaatacttaatgctttagcaaagaccctgtgtccttcagcttacacagttgtgactacagggaaacctcgttcctgttttgatatgtttgttatgtagcatgtcctttccgatctctgtaacctttcaggggtcagttttctcctttgtaaaatggcaggcttggaagagaaggctcgaaagccctttgcatgtcagcccagggaagtggaaagaccacacctaggaaccgactctagctcttaccaccctgtaagcctgaggctcagttgctgtccctggagaacagaaaacataatcatggctattctgagggtcaggggcaagtgctttgcaagtgggattgtggtgggcagtgggagggattctggggttcactgtcatgctagttgtgtaactgggcaatgcaaccgtgtaagtgtcaggaaaccctcaataagactgagccagaggccaataagaagccagcatttacatgatgttcttttcctttttgtaactaggaaatttcgatttgcacactgatttggcccaccattcctggagagatctcgtgggatgtctcttttgttactttgaacttcttggtgccaggactggtcattgtgatcagttactccaaaattttacaggtatgttttctgcaagtgctgccactgaacttcacccaggcttggggttatttctgctagaatcttagaatttggggtcggagaacacctaagagttcacgccagctcaatcttgattcactgcccaggtctacaacactgaggaaggagaggatttttttagaagttatatctttgtgattatgtttktgctcatcactaaagtaatactaggtcattacaaaaaattaaattaaaatgaaagcagacacataaatgtaaataacacagaaactgaaaacttactctaccttcttaacaattcaagatgtattttttcaggttatttttcttataagcttatgtatatgtcatgtatactgtgtgtgtatttgatgaaccatatgaaattgcaggttaaaatggtcaaatggttatctgacactgttcaatgttcttttcagatatgagataatactctctgctctgtaactccttttttcacttaacattatatcttaacatctttccacatcattcctatatctctaactcattatttttagtggctacagatatgacttcatttattttatggtcttttaggctgtgtccattgtttccccatcrcaaacactgcagtactggagaatgtatactttttaaaacattttattgaagtattatatacatatataaaaagcacactgagcataggtgtaggctcaaactgagtgcattcatgaaagcagctcccaggtcaagaaatggaatattaccagaagtccctcctattatcttccagtygctactccacccacccccagggaatgcccatttcaaatgtgcactgaaacaggaaatgatctctacctttaaaacaaatatgtacagggacataaaaaggacgagtcagcctgttttatatctcgtaaggtagcccatttgtgagtaagttgcctgcccaggcaaacagcatgggtgcatccatgtttatgcccattttagaaggtttaatgcaaagcccttgaatcctcgtggaggtttatagttgttgaatcttggttttatagcatctcatgtgtgggtcatctggcaagtaggcacttgaagtggtgccctgtagggcctgctcactctctggtcacttttatggccctttctttgcagctaagggtctgtaaccttcttagacgctcagaacccatagccaggccaacctccatccaggtctgctaatccctgggtcctgtgggagatggcccctccatgtcactcattagactcttgcycacccaatgaccactaaagtgacacccagcctgaggcttgttcaagtgcaggaggcagattcaggcctggagttaaggtctggacagtgcttgcgatgggaccaggcatatgatagtgctatgtaagtgttagctattatcattaagttaaaaggaaagaggtgagagaaaaaggaagataaatgtagaacttatttaacaaatatttacatagtgttgaccatatgccaggaactgactctttaattctgataagaattacagatgaagaaacccaggcacagggaggttaagtaacttacccaaggtaacacagcttgtaagtggcaatcaggatttaaattcaggcagtctgaccctagagtcccaatgcattaattcctcagacatgtgttaagggcctgctctgtgcgaagtgcttgggggaagggaggtgggctaaaaaccgagcaagacacattctctatccagaagaagctttgacataaaaggggaagagggaggagacagacaagggtgctgatatcgaaaggagagaaactgaacacaaggtggaatgatactgagactttgcaaacactttgcaaactgttaaatgctacacaaacgtaagggacgaataaggggtataagaaagaagagcaggccaggtgtggtagctcacgcctgtaatcctagcactttgggagggtgagaccagtggatcacctgaggtcaggaattcaaggccagcctcgccaacatggtgaaagcccgtctctactaataatacaaaaatcagccgggcgtagtggtgggcgtctgtaatcccagctactgtggaggctgaggcaggagaatcacttgaacccaggaagaggaggttgcagtaagccgagatcgtgccactgcactccagcctgggcaacaaagtgagattccctctcaaaaaaaaaaaaaaaaaaaaaaaaacgagaaaaacaaaaggccatgaagacagacacagagacttgacagtgttattttaataatctgggtttgagtcttgaatctgccacttacttgctgtgtggccttggccagcttagttaccatctctgggcctcagtttcctcatctgcaaaatagcaaacataatgccagcagtacagagttgttgtgaggcatgtaggagatgctactgatgggacagagagagccatgcctgcctgtagcaggtgatgaataaattatgacggtcgtgatttgttaggcaaggctgctcttccgacccctgtctcagagcatgctgggaaaaggtgctgctaagatttgcaagaggataaacaacagcccagatttggagcacatcaagaacaaggaattgatgctagagcagggctggctggaaggggcggcagcatttgacctccttcctggaggtctcactcctgagttccttaggcgccaagagggctctggtctgccccttttcactcgtacctcacgcttctcagctgcctgctgaggaaggaatgattttccacccacccccatctttttctcaaggccagggtccacctggaaaaattctgagacctgaggagttggggcagctgtccttttagccacccacctctaaacagcagtttactctcgaagcaccttgtgtctaaacccacagccggccttcacttctccccattacagacctcggaacacctcctggatgcaagagctgtcgtgactcacagtgaggtaaaagggcactctgagtaacagagtaacagagcaaatatgtaatttacattccatcaccaccctcaccttaaggccctgtgtggtctggccccgctgccgttctcaccttcatatttcaccctcccttgtgtccacattggccttgaggctgtactgcgcactggccaccatactgctgccccagggcctttgcacctgccacttgttctccttgatctctcttctccagatttctgcatgggtcacttccccacttcatttagtttttactcaaaaagctcttcaccaaaaagtcttcccatcaatctccaattccttatcctgatttatttctcttcaaacacttactacacctgtcatattcaatttatgacagtcatctgtcttgcccactacaatgcaagctccatgagagcagaggttttggtttgttcactgctatattcctatgcctagatcagagcctggctcattcattgtaggtgctcaataaatatttgttgaatgaatgaggcatgagccttggatcacattgaaaggggtctacagggtcgtctcttcttggacagtgggaaaatcactggacaaagagtcctaagacagaagttctaatccaggctttatcactgtgtgaccttgggcaagtcacttaagtaatgtgaacctcagtttcgcaggagccaaatatgcctcagtggattaacacaataaaatgaaagagcagatatgataatgttttaaaaatcacaattttaatccaaatatcacttaaaaattactttccacgttattagcaaaatccactgttgcccatttcccaggaggactatgacatttgtcctcacttggtaccatgagtttgccaggctgataatttggaagcagacaagctataccaggtggatggagtgtgcaagcagggcctcagtttgcatctcctcccctgtgaagatatacgtaactcagagatactgagtcagcttttctgtccaagctttttctgtgaagmttggttttacataactctgtaaaatcaattgaacatcaatgttaattaggcataataacagacaattcacaaattgtttgacaccatgggatacaaacactacagcaccaccagtcccacttctcacctgtcactagttcctgtaacccaggtctcatctccaggcttgagaagtgtctctttttcacatcaccctggtcttctattgctctaaagcagtgtgtctcctagaatgctctgtagagtgccatggcaatgttaggtgttagaaagggtttgggaaatgctgggataggctagattggattctttgctgcaggacttctcaggacctttattatgccaatatactttgaggatctcccacacagtaatagaataggtatcattgctaaacgtgactacagaacccccttttctccacagagcatctctctgcactggtgctccaagaaatgcctttttggaaaccctgctctaaagtctccaccctccttcctggttctgacctgggcaagaattcagagcaggcttcgccctggctctttccctactgcccacccttcaggggctgcttcatgtgcttggagcagtggccttattcatccttctgccctccctgcttcctctttccttgtgactcaaacatgccatacatcttcaatattttttccaatcaacagttttcccaagggaataacctcccagcgacttctaagtgccttcggatcaggctgtcaccactgtttggggcttgcttgacgtcatcgcccagcaactgttgccatgacaactgagatgcctctacccttttgtaacagtggatgtttattgakccccctctcattgcccacatatgcaccagaatggaagagcagcgtgggtggagctgccttgcttattgctgtgtgtccagcacctatgagtgcttagcacatagcaggggcatataaatatttgtcgaataagtgagtctatggcttgcagatggaaaaccctcagcctgcctcagggctaaactgagaaacaaaatctgtttccgctgaacatgagggtgttagacagtgaacacaaagccctttctccacgcctgacctgcattccccagctttgggggcctgcatgctggtcgtggaagggtaggtggaatctctggaaagatggaattttctgtccagtgattctagaagggaggctgttgattgaccaagcagctcccagaggagactcaaccttcagggttgagtcccaactttgtcagtgggaacatcctctacccatccccacatgttggcagcagcggtctgctggcatggggtggcagaagggtgtgaggtagggtggagactaccccacggtcttcagaagctcatgtgggtgtggaggcagtgagtctcaaaaaggtctgtcctcaaaggactgaggggaactccagactgagtctgttgtcctagatgagcagctgcgacacttcagtgggcaagaatcacccggggagtttaggaaacttgcagatttctgggcctcacccagccccacacaatccgaatgtctgaaggggccccccagcatttgcatgtcatcatgtactcggtggccgtggaccacattccccagatgctgtccacctctgctgaggtgctgtgcctcaccggagaagacactggcacctggcatggggtacactcccctacttgactgtgaggctcaagcaaatcacttctcttctcagggcctcttagttccaaaactgcggcaaccacagaacctatcccagaggcttgttctgtggattaggattaatcctcaaaagttaattgagcatttagtttaatctaaaagcacatcaagcattctgcccagtgcagaagacatttgaaatcctggatcaatgttaattatctttgacatctagcatggggagaggaggaggagaggagccacatttgattataaagcccccttttcttcctcgcaccctaccagtggtgggaactgtggagagaaggagatagtagcatctctcagtgctaaaaaagatccaggccaggtgcggtggctcacacctgtaattccagtactttgggaggccaaggcaggcagatcacctgaggtcgggaggtcaagaccagcctgaccaacatggagaaaccccgtctctactaaaaattcacaattagccaggtgtagtggtgcatgcctgtaatcccagctactcaggaggctgagacaggagaattgcttaaacctgggaggtggaggttgcggtgagccgagatcacactattgcactccagcctgggcaacaagagcgaaactccatctcaaaaaaaaaaaaaaaaaaaaatccatccacttaagcacttggtccatgagtgagcccactttgtctgtcacccgcagccattgtcaggtacctgctagggctctgggtcacagaagacacaggcatgccttgcttcagctcccatcccccaaggaacctgtagtctggtgggggtctgtgttagtctgttctcacactgctttaaagaactgcctgagactgggcaatttatacagaaaagagctttagttgactcrgttccacatggctggggaggcctcaggaaacttgcaatcatggcagaaggagaagcaaggaccttctttgcatggtggcaggagagagaagagagtgagcaggaggagggaaaactgtcttataaaaccatcagatctcatgagaactcattcactatcacaagaacagcgtgggggaaactgcccccatgatccaaacacctcccacctggatcctccctccacacgtggggattacgggaattacaattcgagatgagatttggttagggatacagatccaaaccatatccgggtcagaggtaagagggacgcctgggccgggcgcggtggctcaagtctgtaatcctagcactttgggaggccaaggcgggtggatcacgaggtcaggagttcgagaccatcctggctaacacggtgaaaccccgtctctactaaaaatacaaaaaaaaaaaaaaaaaaaattagccgggcgtgatggcgggcgcctgtagtcccagctactcaggagtctgaggcaggagaatggggtgaacccaggaggtggagcttgcagtgagccgagatggcgccactgcacttcagcctgggtgacagagcgagactccgcttcaaaaaaaaaaaaaaaagtaggacgcctggacatctaccacatagtgtatgtggcaactgtcgcatgagtgcctgaaacaaaatgctgcaagatgccaagcgggagatgaaccaggaatccttctcagagttcctggcattagagtttggagttaaagcctgggcagaaggattcccatgggcagagatagtagagagtgggaaagaactagtttatgataaagacaatgggctggcgtcaggctgccaagttggcagtccacctcggcagcttcttagctgagtactggtgggcaagttttgtaagctctttgagcctcagcttcctcatctgtaaaatggggatcatcacagtacatatgtcacagaattgttgggagaatttaaaaaggtaaactaagtgataggtaagggcctggcacatagtaggtgctccataaatgtgagccttcatcaacatcactcatcaaaaagtatttttgcgacactacaccagggaccctgggtacattgtcgcccttcttaggatggtgtgggcagcaagagggatgaagctgctgtcagaatcagcccttgtgggtcccccagcctgtgcttaggcctagagcgatatccttactcagaggcggtaccaattcctctgcagcccacccacctgacaccctgcccaactgatattctcttagatctaacagccaaggcagcttccttagattaaccaggtttcaccggaacacaagttctagttttgattctacataatgacttccagacttggatgtgccaatatggcctctggcgtttgagcccgaggtggtgccctgtgtatcctgagcaaccttcaccctgcagagccattgaggggargggasagctgaatagtgtggccatcccttttgagacttttgtaatttgtctcatctttaatcccactgagctagattttcagagatgggggctctgaccctgtattatcagtggagtgaccttcaacaagtttcttaaatttcttgaaattcaatttcctcatctgggaagtgggaacaatgatagtacaaatctagagtaggtatgaagattaaatgtgacgactgagaagtaaatgtgcggcacagtgccggccacacggaagccctcagtaaagctagagatctgtatgactatgaggctgttcactcagcatctgttgccctggtctccaccatcaacaggtggacctaaactcctgcacagagcaagcagccacattgaatcataaaacaaacaactatcctttaattagctagttacaagtttttgtttttttttttgagacagggcctcactgtgtcacccaggctagagtgcagtggcgcaatctcggctcattgcaacctccacctcctgggatcaagcgattctcatgcctcagcctcctgagtagttgggattacaggtgcccaccaccataccctgctcagttttttgtatttttagtagagacagggtttcaccatgttgccagggttgtctcgaacccctgacctcaggcgatctgcccgcctcagcctcccaaagcgctgagattccaggcatgagccactgcgcccagcctagttacaagtattctaacgggaatattttcagccattctgatcttgcagttaaatttacctgaactgtgaatgatgttaattaccttccattactccccctcttgagattcaggagtcttgggggacacctgtaggatctcctgaaagaagagtccagaatccccttctaagcccacataaccagggctgccttcattgcctgccatgcctctgcttcactgccagccctgctcattaatacaaaatattagaggtcccagcagctccactggtaggaatttattctactgacatgctcacctaggtgtgcaaggatacgcatgaggaggcttattcccccagttgccacctctcaacaggggacataaatgtaaaatggtcattttccacaaatatcaccagcagtgctctgacaagctcctctttcttgctggggcaggggcacctttaatgacacctatgtctgatttacagagctttccagtcattttttgattattttacaatgtcaatctcatagtcagttcaaagcttcccctgcccaaggcgtaggatgtgggtttgtggtgctggagctgggaggaggacagagaaggaggatgggctgccctggcagtggtctggtctcccacaaggacaaggaacttgcatgattgcccatatgaggtggttgcccccttctgttggtcattgcctctgatttccctgtgtctggtgatggtgccaacaggccctgttgatgaggggatcattcccaagcagcacccactccaacccatgggcaggcccttcccacacccactcccaccaggtatgggcagacccttcccacactcagcttcattttcaggttggctcctgacagaagctgccccagcaaatgagcagcctctgatcacatcatctttccttaacccctgactcaggggcctgtaggcaagactaggatccattttctcccgctcctgcaaaaggaaaggaacctagggtggggtccagtgctcccttctgcctggcctgccacactggtatgccatctcccactcaacaacctgtaggggagtgatatggtttggctgtgtccccacccaaatctcatcttgaattgtagttcccataatccccataatcttgaattgtagttcccataatgtcacgggaggaacccggtgggaggtaattgaatcatggggatggtttcccacaggctactctygtaatagtaagttctcatgaaatctgatggttttataagggtctcccccttcgcttggttctcattcttctccttcctgccaccrtgtggagaaaggaaacattttcttccccttctgccatgattgtaagtttcctgaggcctccccagccccrcagaactatgagtcaattaaacctcttttctttataaattatccagtcttgggtatgtccttatagcagcatgagaacggaataatatagggagagaggggaagagtatgcacactgctatttcagctgctacctccccaaacaaggccaaagaaataaaatactcctcaataggggctagataaattgcaaccaccatttayagaagataacaagaatgaagtgccttctctgtgcagatatggcccgagcaccatgatatactgctaggtgaaaaaggagcaaggcccggagtgtggtgcgtggtgtgggcccatctgtgtaccaggtaaaagagcagatgcctgcaatcccacgccaggaatattgtgtgtggcagtggtgcatttccagaaagccatatgggaaaatactcacgttagtcacctcccagggtggaaatagagggtagagaaggccagatgttcttcatttgttccccatcagtatagcattgtttgagtttgaaccctaagcacattgtgcttgcaaacaattaaagagacatctcttttaaaaaaataacagggaagatgtccctcttgtagaccacccaattcagkcttttcacttcccctcataackctgtttagaaggtaggtgattttctgctttatttctcaggagtscagccggggtcccatttctccagcacatcctaagctcgggcacacaaagtcccagaggcacacagcttcagtgscttggggatagcagattccaactcttgggcccctaactcaaaatccccaacaaccctcrgtcacctgtggctccagtcctgttttggttttccacagatcacaaaggcatcaaggaagaggctcacggtaagcctggcctactcggagagccaccagatccgcgtgtcccagcaggacttccggctcttccgcaccctcttcctcctcatggtctccttcttcatcatgtggagccccatcatcatcaccatcctcctcatcctgatccagaacttcaagcaagacctggtcatctggccgtccctcttcttctgggtggtggccttcacatttgctaattcagccctaaaccccatcctctacaacatgacactgtgcaggaatgagtggaagaaaattttttgctgcttctggttcccagaaaagggagccattttaacagacacatctgtcaaaagaaatgacttgtcgattatttctggctaatttttctttatagccgagtttctcacacctggcgagctgtggcatgcttttaaacagagttcatttccagtaccctccatcagtgcaccctgctttaagaaaatgaacctatgcaaatagacatccacagcgtcggtaaattaaggggtgatcaccaagtttcataatattttccctttataaaaggatttgttggccaggtgcagtggttcatgcctgtaatcccagcagtttgggaggctgaggtgggtggatcacctgaggtcaggagttcgagaccaacctgaccaacatggtgagacccccgtctctactaaaaataaaaaaaaaaattagctgggagtggtggtgggcacctgtaatcctagctacttgggaggctgaaccaggagaatctcttgaacctgggaggcagaggttgcagtgagccgagatcgtgccattgcactccaaccagggcaacaagagtgaaactccatcttaaaaaaaaaaaaaaaaagatttgttatgggttccttttaaatgtgaacttttttagtgtgtttgtaatatgatcaaatttaataaatatttatttatgactgttcagcaatcacatctcctacatataaagccacaccatagtggtttctgaagtgagtcttagaaccgattcaggacgcagatttctcctctgaagggtcacagccaccctgtgccctaccttggactcgcaagggtttaggatcattcgttgatgtcaagagcaattgaagaatttctaaggaacagttaaagatgacttacttttttttttttttcatttataaaaatgctatggacccttttaagagaatcggcatcatgaaatgagagagaaagtaggatggctctgaaatgtttgagagtgagttcaggagtggtttactcctgacgcatccagcagagatgcctcttaagcaccagccatggcagacagtgtcctttgtgctaggaatacagtggtgaaccagacagccatggccctctctcagggaacttaccttcgagtcaggggcagaaaaactaaataaaagtcaataaactatatctatatacagatacctatatatttgagatgagggtcttgctccaatgcccaggctggagtgcaacggcacaatcacggctccctgaagcctcaaatgccttggctcaagcaatcctcccgcctcagcctcccaagtagctgggattacaggcgtgagccgccacgcctggctacaagtcaataaatagtatagcatcacagagcgaataagcactgtgaagaaaatgggacgggggctatggtagtgatgggaatttagatcagatggggaggggcctaaggagacctttctgaggagtgacaaattggatcaaaaggtaagcgacaagaaagggccacctgtgtgaatgggggaagggacacagaagagatgttagtgcaaggaggctgacacgcttgaagggagagtggcgtaagccgactattgatggagcctcctctgcactaggcactgcctttaatgctgagatgaggggtacccggctggggcctgtcagttgaggccagagaaattgcagggttagatcacatagggcctaggagtttattctgttctccaagcccctggaggttggcaactggaggctgacgtgacctgatgaatgtgtgcaaagattaccctggctgctgggcagggaatagactctgaggagcatgagtgaaaatggagaccagttgggcagctgctgaagtgtgacatggggatgggaccttggaggtgagtggcattagggagggattgtgagaaatgacttgtaaatataccttgggaaggtaaaacaaagatgatttattgatgggaaggatggaattgatagaatgtgagggaaagggagaactcaaggggaatactctgattttttagcctgtcattggttggatggtgaagcaggcaacaaaaatgggggggcctgggcaaagattaggggggggggagccaagagtttcatttggagctcatcagtttgaaatctcagtgagacttccaaattgaataggcagttggatgcagagatgtggagcttgggcctggagatgcacattgtttggagatataaatggtgtttatagacctatggttttataatacatcccttggagagatagagagaaaccagagccaaagaccgaacccagggtcactccaccacttggaggctgggccagtggctggaatgcacagcagcacggggcctggtgtatagtaggtgttcaacaaatctttgttgctgaggaaatcagcaccagcagtagtgactgcttatgcagtttctggagcagcttgcttctgaagtcagattcatggatatcacaagctcgaagacaaacgaacagagatgttttgctcactttagttaatagatttgatcaattaaacctgtttttggaagtgatgtgtggctatcttattgaagcggcattgctgtctggggtaaataaccggggtttgtcatcttgcgccaagaggattaaggacacggacatatgtgggtgggttaaggaacagaatgtttaataggcagaagaaaggagagaggagagcagctctctctctcgtgagacagaggcatctgaaaagggaaaagtggtggaccacagcgtattttataggcaggcttgaggaggtggtgtctgatttacatagggctcacagattggtttgaccaggtgtgacgtttacgtagtgcacgagaaaggctggccaccccacccaaatctgattatgcaaatggactttccacttggccatcttgtcttctccttactgcactcatagctggcaaaaagagaagacggagccgccattttgaacatgcttagtcttaggtagtacattccaatggacacaactgctggcattcacccatgcaagcttccaacttgcttgtctatgtctgcagcacgattttacagctgctttttgttagaaaaggatttaggggctgcttttcattaaaaggaaaatcttaccaaggacttccataccctcactatctgcccgagtaatttctttttaactcctatatcattatggttctctgaggttgtcaaactgaagctgcggagcaaggctctgacagcctgtggttccgtgagagaggaaggcaaagctctcccatgcacatcacctgtctcctctgtctttggtggagaacactagcatggggcccccgggagcctcccacggtccctggatattccaacacccaggcggagatctgtgaccctttcctcactcccagtgcatttcatagacatcagcctggcatcaccggtttcacagctccccagagctctaagggacattgcctaattgaatcctcactgcagcccatcaggcaaggactattttcccttatctcccaagaaaagagtgaggctcagataagccttgtaaccagccccaaatccacagctaatatatatctgaagcagatttgcacttacaccaagaccctctggtaccaaagccttgctgcttttttcaagatgagaaatggaggcccctgggaacgcctggaaaactgaggcaagtggccttgcacccatacactagggttcccacgtgctgctaatgatgcaggatgctggtgctctgtcccagcccctgcaactcaccccctacccagcccctccctgcattccgggtagggggtgctctgatctttcctatagaatgagattccagagccccatcttcgaatttccccagaggcctccctcctccccatcaacattttgcctacacctgaaagaggtgagctgcatgctagagacaataaagggctaaggagtgtttcctagagctcactttgtcccctgtggctcagcctctcaaatccagcactggtgagctgccagcccgcccacctcactcacaggcctagggctgactgaggacttgggctcactggactgacctgtctactcacttcctcttttggcaccagtgctttggccaggctggtaggtaaggcttccctaagttaaagaggaaacttccttttcaggaagttgggagaagccagtatttaataatggagattaggcactagaacaggccaaaggtcagaaagagccacgtgctcctggtataaagaagcgcaccccacccatccgtctgcagcacagacataaacacaaatgaaaactaaaatcacaggacacgggtgactatagtttaatgaatcagagtctggaatcttaagccccagaaactttcaggaaaggcaagcagattcactgacccccacgtgtatctttatgtgtaatgaaggttttatgggaactgagggaagatggggagagaagggcaaattaaactcctaagataaatagagctgaagactgagagctaatcagaagttctcagatgaaactagattcttgatattgctacaaaaggtttctttctgatctgccatcgcagtaacctggaaaatacaaaacaaagccattaacgacagaaagtggacccagtttttatgtagataatgaacatcatgatggccttagagctggcttcattcaaatgcttcttaattcaaatgcatcacagcagattgcaacccttacggatacaggtggctgtaattcataaacaccttcaaggctgtttctgaaacccactgaattttctctggacgtaatgggggtggagagaatatgacttgctggatgaacagggcttcctttgatttctcttaagtctgccttattgcatttcaaagtgtcggaggccaccctcagctttcaggaagtgggagccaaggcagcctgacctgggacacactggtgatggttttataaagtgcttctatgtctcatgtcatgtgtcaccagatggtgtggcacaagggacttcagagtcacaaaactctaggtttgcatccaactcagctacctattaaagatttagggcaactttcttcctcattgtcagcctctgttttctcatctgtacaatgtgcataatctgcttcctacggtgccctgctgtggtggaatccttgctggccctacatttaattttgaagggtgaagcttcaaaatcaatttgattttggtctaagttcccatctgtttggtgtagtgggtcagttcgtgaccaacagaaatgctccattttgtttgattattattattattatttttttgaggcagaatcttgctctgttgcccaggctggaatgcagtggtgcaacctcaactcactgcagcctccgcctcccgggctcaagtaattctcctgcctcaacctcgtgagcagctgggattacaggcgcatgccaccacgcctggctaatttttgtatttttagtagagatggggttttgccatgttggccaggccaatcttgaactcctgacctcatgtgatcagcccacctcggcctccaaaagtgctgggatttcaggtgtgagccaccatgcctggcccattttgtttctctacattttagcattactgtatttggattttgaaacccagtatcccatagcaatgagtgagtgtccactcaaactaaatggagctctttcctgcacaatgttcctggctttaaaatcaagatcagacaagggtaatatctcctaaaagatcctatggttgttccagagaatctcaaaacccccaactgaggaaacccagctagacaatgtcatggctatttggtttcatatagaaaaaagaaggtgcgttgaaatcattctctttggagcttactacattgatgccccctgtggagtttttacgtcaatggccacatgaactgcccacctctttactgggctgctcaatcccaaacaatcttaattcagtcacaatggttttttggggcagtgtagccaggggtgaccacagaaatggcccgaggaagcagaataaaaagaaaagagagcccacggcagtgttagtgccagtgaactgg

SEQ ID NO: 6979 - DNA, 51301 bp, Homo sapiens
cacttatatctacatttatgcctcaattgcataattatccatgagggagatcagattttgccaataaaaaagattttacccaagacagtgaggaacttttggtgaagaaggggttaagatgatagccagcccagttgcatgctgggaattgtagtacaatagtagcgcccagccagtgaggtgctaccagctccgaagcagctcacggtatccctcattccacacagcccatcagagaggcagtgtccagcagtggctaatgctgtggacatcagagccaggacacctaatttcgatcccagcaccacctttcactagctacaggaccctgggcacacgacttaacctcctgaccctctgtttccttttctgctaatataggggaaataatagtaatatctatctagcccatgggattgttatgaggattaagtgagttaatatgggtaaagtgctttagaatggcagctggcacataatacgcattttataagagtcagctttcattattattacttctcaacccctttcttggcccaagttctattctcatggactataaaaggtgaaaatcccctgattccacagttagaacatgcgagtttagctgtccttggagaaagtattcatatctatttgtctaaattgtcttctggtcatttctctttaaaaccataaggttgagttaggggcaagggccaatgatattagctatcagagcccagcactcctacccaaatgagcatcgctggatttcacctgcccagcctgttctctctgctctgacagcagtacccaacttgcttttgtggaaccacctctctcccaccatgtgcactcttggtgagattgccagtcaaggtgccccactttcccagggcaatgggcaggggtgcctgacccaagatcagtccaccatactcatcttttggggaggaacataaggataagaacaggttggactgaatttgccagagggcatcatccattagctcctgccacatagattcccaagctttcacaagttccttcattctaaatcctgcttggtcaacccttccttggattctgtgagtcactcaatcaccatggcaacaaggtccttttacacttatgttggcagagtcagtgtctgtcacttgctaccaaagagtcctaatgacacactactgctaaataatcttaaagattggccctcaatccccttcccacttatttccagtggaactatcagtagtccagtgccttttttgcaacattctttccatgtacatcatcactaatcctaatatcaacaatgcagagatagtattgttatttttacttccttgttgcaaatgaggcacagagaagctaatcaactttcctaagttcacacagtcagtgaagaacagaaacaatattccgacaggtctaattgctaacttcaaccagtaagtgaaatttattggagtcaagatcacttccctgccattttggactcctgggttgggaaaggatctttagcatcctctcatgcagtttttttttccctttctttttcttttctcttctttttttttttttggttgtaaactgaaagaagcatgatttatatcacagctgtgccttcatacacacacaaagaatggaaacaaaggcttcacaaggcaatagttatccttactggtgcaatatgctccaattttgtatttgaaatgatttatttttcaaattctacttgtactcactagattgatattgatgtcccgatccactatcatatctgacacgcagctttgcaaaccctgctctgttgagaaagctgcttaaaatgacaccagtttgcatgtctgagtgtttgtaaaaggaggcaaggccaagcttgatcttctaagcctcctaatagtgatttgtttacttgtacaatgtgtgtttcctaggccacaccagcctgaggggaaaactgggatcataaccaggcacatgctgttcctttctcactctgctttcaacagctcttccagaaccaccagaagcccccagacgagaacccccttctggtctttctgaggatgtccagggaacactgtacatgtgctcccaaacatcattccttgtccctcattttccttctcttctgctctgcctccctgctgggatcctttcccagtgcctttgatgtctgcagggctgtcactgctgctgggccaccaaggctgagctgctgctggtgaaaaattccatgactttagtctgactcccaggcctggatgggagcattgtttgtctcacctcttcagcagcctctggtgtcaccactgtgcatagttccttatagcacctgcatgccatgcaatggtgcccaccacattagagagaagtcccacttttttacagggatcccaaaagagattcctcttactcccttctaacttacacgtgttcaagggcagtaggctgaaaaaagtcttcatcctgtattcacaaccaccttaatcttctccacctgtagaccttgtccttgggctaagcatgcgtgctcctactctcacccaaactggtgagatttttttttttttccaggaggcagcttggttccttctcatggcggaacccttgacaaggccacagtgtgtcatactgctcagaagtgcctgcttcccagagtgaatatacgcttcagctaacctcatttttatttgagagctttgcttcccaggtcccagaagtcacatgttcagaattcaagtcctgttgcaaccatgatgagaatgatggtgatgacggtgaagatgatactaaatctttcacacgtatcagactgcacaataagcacttttagatacattatcatgtttcattttctcaacaactctatgtgatacatactattattatcctcgttttacagaggagaaaattgtgacttaggaagggtaaatcggcccatggtcatatggctggcaaagtgcagagctcagctactcctctacagctcagactgggcattgagcctgcctcagctaggcctcctggcttccctgggcctccttccaactctgctttaatcctttccaagcccctctccccagggtccctattgtgatccacaagtgggtggccacaccttatctgaaggcctccaagatggtggaaacccctaagcttccacctcctgcttcctacatcatctctgtgctccctggggcttcctggagcagtaagatgggaagcattatcagcaatggggcctcctcttcaggcctctcaagacttcaatgcagcgacctgccctcatctccccgagtctctcctcagatccaattctggagccaggaagtggtttctcctcccaaaaaggccgccagcatcctgcattacatggttaaattttgcctgaccttagtgggtgtttttaattgaataaagaattcaagtctgggttttaaatgccatagaaaaataaaaagttactgtcttttcagaatgcccattgtaatttgtccttagagtttctcctcccctcccctccccaatggtccttttcccccttgaactgacaaactgaactgccagataaatacagctgcaaagtgaatagtatggatatgatttcttcccctcattcatttgccttcctagctttaccaagtcaaaagaaaaagaccgctcaccctttcttcggctgtgtcttcataccacaaagccaacagctagtcaagcaatcttcatgatttgaaacatttgaaagtgaaacacagggagtgacttagcctgatggattacattagtcattgtaaccaagtttctgccatggggcttaccccatgcagagtggtggtctctgtgtgtcctctctgtacctcggtttctccatctgtaatatgcagggatcaaatccaggatctttgaggtccctgaatcttctcgatgtcttcattttgtagttacagaacacatcatttacaagtcagttgatttagagggtgactttgaataaaaacaatcctccataaaacttttaccacataattattttacggagcaagtttccactaggcacttgaagcagggttcaatttacaaaaacccgacttgcagccaacttttaagtgacacttttactgtttaaagtgaggcttgcgcagaggtcacagtttctaaaaacactgccctccattccctcctccacagagtccttgacagtgaagcattcgtagaatacactttaaaatcatgacttcttgtcaacgaagagtttttctttttcccttccgtaaaaaacaacacacagtatttacaaccccacaaaaactgacttagtgataataacctactggtccttttgaaacacaaaccagttaatatcactcccctgcctgattctacagaggtgtcccattgctctgcagatcatgagccagactttatgtatgccgttccctctacctggagtgttctcacgaaccctctctgtaactcctccttacctctgaactcagctcaatcactgctacttcagggaattggcccctgacttccttgactaggttagatctctttattagaactgcaaggtgcaactgtaagtttatttggctgggcatgaccatgaatggactgtacactctgctgttgctggcatagccatccaggttgcccactacatgcacaatgctacacaggccctgggttccctagcggggtctctaacctcgtggaccttgcaatcttctggggtaaacagacagttatcaaatgtgagaatgcacgtgaatggcactgtcccccgcaaagagtttacagagaactgaacaagggattgaagttagcatggggccagctacatgagcgaaagggtagaatggcaatgctttcagctctgatgcagaatgaggttatgtcaaaatcgcctttgctcaagcagtccttttaatactttcagtctaagaagctagaggagaaaggaacgtggactgatatcccaggctgttcgtgccagcttgaaggatggccgccttcgccatagtgagataaccgggggtctgttttcctcatcttcctccatcccaagggtcttcctactctcttggactaaactatcccaccccaaggccaggggctcttgattgcttctttaaatgaattttcttttccaagggcccatccgctcacatcaagtacacgagtaacatagcctatcattttcatttaattccagaatgtctttactatcatccccgttttacagacaggagaatagattcagcaagttcacagcagacctgcgttctcaaagccaggtgtctggttctcagtccagcatttcccccaccatgtcacagcctcggggctgagccaggcctttttcaaagccccaggaagctagagctggccgcctcctgctggcagggagttccttccaggcttctggtgctactgccaaagaagggagggtgggagaagagagggaggtggattatacacagagagggtcccgcacttctgtttcccttccttgtcatggaaggagagaatgaattacgtgggggacccagggggataggaaaatcaatcattcatgacagttaataagtgtcagaaaagtatgtactcacattcatcccctgaaagtcacattcttcatctgttctgatttgtctttcactgatggcattagccaggtaggctcagcaagaaacatcaaaaggttttagcccaatattgtggagagagtttcatttagcttcattttttccagccggggctggctccaaagctagtttttcttactaggttgtttgctacatgaaaagcagactcccagaggtttctgagattgccgacatcctatgcaagatgactgctcccacccacccgcccacccactcactaataagacataatgccgtcctatttttggtaacaattaaagggcctcccggtgaaagcagaaagctgtttattttctgtgacatcacttcactttgccttcgaaggctggtctgtgctcagtgttttcgtggtgatgcaagtcggctctctcctccagcagttggatccctcccatctcacagtacctcacaggtctcttcccccgagcagtgcattgctggagcgaggagaagctcacgaatcagctgcaggtctctgttttgaaaaagcagagatacagaggcagaggaaaagggtggactcctatgtgacctgttcttagagcaagacaatcaccatctgaattccagaagccctgttcatggttggggatattttctcgactgcatggaatcagaaagaagcaaaaggatgggaaatgcctgcattcccctgaaaagaattgcttatttcctatgtctcttatctgcgcttttgctgactgaggggaagaaaccagcgaagccaaaatgccctgccgtgygtacttgtaccaaagataatgctttatgtgagaatgccagatccattccacgcaccgttcctcctgatgttatctcattgtaaggcccgtaagcattttgatatctaatttacgatttaaaaattccagccggtggatttggggctttgcatgtatttgtagaagggcatggagagagagattcctcttgcatgcttggccatttgacagtgctaacatttgctgcatttagaatttttgatttttttagctgctactgaacatgcttagatacccccagccctgaacattatcatgagaaacctgtagccgattcatttctcttacttcatctgggaaggaatagtatcgtacttcataaaatagtgtcaaaatagtcactgttatgctaaaccggattaacataaggtttgttctgtgtgtgtgtgtctctttgtgtgtgtctgtttgtttgttttctcttttttgttttctttcagatcctttgtgagatctggttttactgaaatctcagaagggagttttttattcacgccatcgctgcagctcttgtgagaaatatttatatcatgactatttttaatatggcatatatttggataagccttctagtaaaatgatctcaatattaattttgtcaaatgtgattctatttctgagaaaacagaatatccgtaaagtgagaggtagatgggtttgtttgcgacttcacaccaacagtgcaggttgattcttacaatggtaaatctgttaacctgtcatgctgtctactttaatggctatttatgaagttgttggaatcttgcaacaatgatcccaattccattccactattttactttcatttttaacttgggaacttgggttcttttgccctggagtttttgaattagtcaatacagaacccagcataacatatgcgctcaagatgttgtctccggggatctggggcaggctgctactctgtatgatttaccatgtggggaaaaaaaacacctcagctctttctaggtaattccttaaaatgttaattctcaagagactgttttttaatctcatctaatttataactagttccattacaaggagggaaagaaaatattaatataggatagtgcaaaggattactctctgctatatgttttgagttggccacaagggaaccacatactcagtctatgcctgaaaatattcaaaaaaataatatttgactaagaaatcagatctgttcacaggcataatggaacacataaaatttgttctgatgtgtaatgtttggcaattggagtcctagtccttacagcggtatcacatgggggtcaagaggtctcccaggactcaggtatcaggtcgcagacttggtttgtagctggacggatatgggcagaattagacaattgtggatcagctgagtcttggctatcttaactgcatgattcaggacccaggcctttcacttgtttgttttttatttttttattttcttgccttacttggccattttggctgtttgaagttacatacacagaggcaaacagcmtggagtggacgttggagagacaagtgtttaaacctcaccctgccactcatagaacctaaacatgtagtcttgtgcagattagtatatctcactaagcctcagtcttcttatctttaaaatggaagtgagaacacatacttccaaggtttaagtagataaaacacttggcatagggtgtgccaaatgcttacacatttataaatggtagggtttaaaaattttatatcaagctaaaaagctaaaagtcactcatctattgttttgtgtatatgaaattcctaaactggtttgactgtttcattggattcacaaacttgatcagttgttttgacattatgtaatgatgttggctaatgcccttctactggctgatgtcttcaaatgattagcaattgactagatattcctaaggggtttatctgtttgattgatggctagtggtgtgactgggggragtgttagttagcacatcaaacaaatccaaaaaagatagattctttcccacagaaaggggcagagtctctaatgctgggatccttccataggataagaatttgctgtctctgagaaagtgataaattgtgtttctggtsctcacttgttaaatgaataaatagctcttttaaaaagcatccttttgatatgctaaggcacctcccttcccctaggaagttacatagatctagttacatagatcagtccttaaaattccaggagtagtgtcagtagacactagatggacattagctgtggcacagaaagcctggagtgattaacctaatcaattaccacatctccactttgtttttgttgggtggacccagtcacggcaagcacagatgctggacaatgttatagaaatagttaccggctgctgcagggtaatgtgatttcacgtatttagaatcacagagggaagccaagggactggtttttaaatagcccaaccgagtgtgtgccatgcccgtgccccatgctccgagttcctatggaacattccagcctttatttctaaaagcagttcaggtttcagaaataacaaaaggcgagtaattctctcccagtgtgttctcggttaactcagattggctaacctcaacatggtagacttgtgccagagctgaacttatgcaaaattgtcaggggccaaagtttgtccctaatctccaggaccctgtgcctgaagactctgctctccatccttcttgcccaatattctctgcttccgcctatcctcaggaaaaggtctaataaactcatgtgcggtgtgtaggaaatatatgagaaggctctgaatatgaactatgaaacgatcataacaattgtgggaatgcatggatcccacagagaaagatctcttctgtgagacagggctgtccagtgccctgaaaaccccatatgggctgccaatccccctttggaacatgaagaccaatggcattggaccaccagattaggcctagatcacacaagccattgaggtttgcaatgaattccaacagcatttgtgattgtgaattgccacactcacccatcatacactgtgaagagataaatttcagaatcaattcggcttgattgacgtaggaagacagttcgttggtttcttgctttattgttgggaagggttaaagcaaatgtcctatttccatyatccaccctaaaaatctgataatgtcagtatgcccccagatgctttttcagagcttctgaaaaagctatgatgagaagtacttgttgaaatgtcagtctggggtactgaggaaaatagacatggtatctgaagttacatgcagtgtttgggaaaagatcctggtaggccatggctggcagtttgtgttggagaacaagaaaaacaaaaacccacattccgtagagaagagagagaaagaataaaattattcaataaaaattcattagattagttgtaatatacattttttaaaaatctcatttatgggtttaaacataacaataaaaacctttcccaagcaaatgcaatttcattcatgttttacatagggccagtttcgaaacataaccaatgacaacgattatgcgttctagcttgcttttagtgatagaaagtggtacttttagtgaatgcagtttagagaaatgtgttttcacacattacagccctgttccttctcaactacagactgaagtccccaatgatatgggctcatgatggaagtgaaattcaaatttaagaggacaaaatgtggccacttcgccacccacttataacatattttaattataaacccctgtaattcccgagagtgttctattttcagggagtgatttccagggtagttttagtatcatgctcaaataaaacaacacaaaacaaaaacactgcacgtaagaatccgacatgaccagaaaaaatttcttagtattccaattggatgtggtcttgtttgaaagacagaattgatctttcagggtcaaaggaggggaatagcgttattttaaaaattaatccacaatcaacacataaatacctgatccataagaaattaaaaactaaaaacaaatggaaaagcaaaaggcatgaacaaaagaaggaataagtccatccttactaaggctttatcatttagtccttcaaaatatgatctgtccaggaaaaaatatccatggcctcctttacctttaaagcaattgctacctttttctattcctccttatattagaagcctacaatttagcagtcttcaatgaccactcaagccaaacctatcagccaagggtgtttttggaggaattattagctggttataggtgagcacgttttggtttgtatccagctgatgcccccatgatggaccaaaaagcaaaaatttcagtcatctaggctgttttgtctacagtttgcccaatgatccatagatctaatctttaactttttaattaattacttctttttgtttttactttcttaaaaataattttaaattttattttagattcgagggtccatgtacaggtttgttacttgaagtgaattaattctcgtaactgcacaaactagcactcaccacaattgttttctctgaaagtgtatttcatcctttcagttattcaggcaagaaacttcagagttacctgacccctctctttcactctccacttccacctggacaagcatcctgtccgacagcatgagaatctgcctcctcctcttcaccacagcaccactgctttcactgaggctgcatttcattcactgtttcacaggctgtggcaggagcctccacgcctcactgtctgctttcagttcccatctgacccatctccattagcgctgcctttcctgagacacagctctccgtgctttcatgactccctagaaacagagaaagtccagacacctgagctggcatccatagtgtttggccctttctatttgtccaaggttatcactcacatcattgactctacacacacagacacacacacacacacagacacacacacacacacgtgcccaaacaagttctgcaggatctcattctatgacctctgttgattctcaaattctctagactttactgatgtctggcactgtgtgccatttgctagagttatggtgcttgtatctgccttgtgtctttcatggaggatcaccaataagctgtggtcccagagaaaaacccagacatgttttcccatgtatttgttgaatccagtttatgtttccatcgattttgtgctgaagactcctgtgttactctcagcagataatgctggtcatgttcacactctttctgatgtttggtgcaccctatctgaattcacgtggactaatggtgtggaggtctgggaagtgagccgaactaaaaaaactcgaggagatatttgctcatgaagttgtgaattcaaacttcctcagcagagatttccagcataccagatttcaaaggcaaagcatctaagcctttccttagacccaccgctcgaatctcttgtgtcscacgctgacttcacatttggtctccttggtttttagtcagactgcagaggccgactagtctgtcctgggaagggtaagatgctcctttatccagcctgaccggacatccagagggaaatgttagttaagcattattaatatgaaaagaaaaatcaataacacaaagataatttcctttttgatttaagtactgcttwgccaaaataagtatttatttattgtatagttgcaagcagcaacaaaatgaaaacaaaagcctcccattttagcagacatgttttgaggctctactgggtagcaggtacaatgttgggctttgtgaaggacacaaagatgagtgacacgctgtcacttttcaccctgatatggcagctccaagctggtagtgattcttgatatggtaaattatactttgcctgtatttgaatgcattagtttcatttaaaaaattatttttatgtaagtagagatgaggtcttgctatgttgcccacgctggtctcgaactcctggcctcaaacaatcctcccacctcacccttccaaagtgctgggattatgggtatgtgcctggcctccttaaatgtattataaggtagtcttgataagcattctcattttgttcaaaatgagattcagttgattagtgatgatggtgatgcttgctggttgttgatcctgtggctaatacgggctacagaatgtctgcaagggctttacagcatcagctgtaatatcaaaacagctgaccctggtgagctggcaatgaggcagacaacacagacttgtgggcagataagcatgggttcaaatccccactctgcttcttcctagttgtatgatttggggcaagcttaatcaagtcttgatatctatatctacaaaatgaggaagaaccgtagtacctattgcacagaattacagtaaggattaagtaaaacaatgcatgaaaaatgctttgcaaggttcctgtaactcaatacacattagctttattacagtatctgaaaatcactttaattggaactaccataacatcagattagtgtctgattgtataatctgggtttgccgataatctcagctttaaacattttgtggttctacacacagttccccagcagaacttgctgagaaatcttttctttaaatacttcttacaggaaacatgaactatttacctttcaaaaaaaagtcataaccctctcctttcttcctcatgaataaaatgactggcaccacgttttgtaaaacatgccagattttgtttaaataattaatattggcagtcttcagatgagtggttctatggtagcatagaaagaggcctaaactagaaatcaggaaacatgggtttgaaactcagtttggccactattgggctgcgtgatccaatagtttgggtaggtcacaaaactacctaatagtttgggtaggtcacaaaatatcactggacctcagcttttattgcataaaatattagaggtagattaaactgtggttctgaaactcaaatgctagtggggtttggggcggtaagaccaatgaaggaagcagttgagtataagacaataaggagtagtggtgactgaggtaaaccagagaagacatgtcttacctaaaaatcctctgctccaactgactattgctgatgggawtgtggtacatgcacatggagccctatcttcctcatttttaggggaaggtggaattctggaagtagatttttaaacaggataaagaccaaacaaatataagttggcattttgagacccttgcattcaattacatctaaggtctcctcctatcttaaaattctgttgtattctacaaacagttacgttaatataatatagaaatggcatggttaaagaaatggacaacgatggcttggcgcggtggctcacgcctgtaatcccagcactttgggaggccgaggagggtagatcacgaggtcaggagatggagaacatcctggctaatacggtgaaaccccgtctctactaaaaatacacaaaattagccatgcgtggtggcgggcgcctgtagtcccagctactcgggaggctgaggcaggagaatggcgtgaacccaggaggcggagcttgcagtgagccgagatcgcgccactgcactccagcctgggcgacagagtaagcctccgtctcaaaaaaaaaaaaaaaaaaaagaaatggacaaagattattgaatcagttctaacaaaccaatacattaggttgttcattgaaagaaactcataatatgaaactggctgttataaggttattaatacaataattgtagttcccaatctcccaaacaggtccaaagggaccttaccaggctctccctgtggtggttgatgataaaatgatgtttcagtatccctctcatggagcaaggattggaaaaaaattgttaggcccatttttatatagcaagatggcaggtgcttgcatgtgtaaaatgtgatcaaaaggcaataaatctttaaaaatacaaactagaatgtatacatacaaataactcttgacttcacagagggccatagattttgcccaactgtgcttccatggctaaagatttctggaccctcctttgagaattgtyttcattgccagtttacaagccacgcaataaaaccaggcaaggttttattagagacattagttatttttgtattgcttggtgctaagcattttatagatctctttttttttttttttttttttttttgagacggagtctcgctctgtcccccaggctggagtgcagtggcgcgatctcggctcactgcaagctccgcctcccgggttcacgccattctcctgcctcagcctcccgagtagctgggactacaggcgcccgccaccacgcccggctaatttttttgtatttttttagtagagacggggtttcaccgtgttagccaggatggtctcgatttactgacctcgtgatcctcccgcctcggcctcccgaagtgctgggattacaggcgtgagccaccacgcccggcctatagatctcatttttaatgtcatcatcatggtaaccttttgaggtagatataattatctccattttgcaaatgaagcgctgagtcctaaaagataacctcctcaatgtcacgcccctattaagtagcagagttggagtttaaacccatgtcctcacttttaaccacttctgtctacttcctcctgaacatgaatcatcatgcttcactttgcatagttttgttcccaaaatcaaatcccctctcaaagggtcaacctttgccattaacaagagttttcaggagaatgtgccctaattcctggagacaatgactgaaaggagtttcaaaagccctttgaaagagtggccgcattgctggcaagagcagctagtttccctaggttgcaactctcatttatatgtgtaagctctgatctccttgcttaaacaaaaatagagagaaagaaaagaaaaaagcaaaagaaaaaggccttatttactttaaagttacaccttagactactgttgtctaaacttgtgtcctgtggagcagttgacctgaaagaagagttctgtgctcaaataaatttgggaaactgcacgttctatccctgcttggttatttacaatgaagttaccttggcatagaaacatctctgaaattattcaaaattgtttcacttttcttaacatcccatagaatattggttctatggaacatacagtactttggaaatatatgcatgtgataattcatcttatttttagcttaactatttgtaccccacctcattctagagaggttggatagcaaaggatacgcaggtggaaagaatctcatcctagtggatacattaaacggtctgtctccatataaggagcaactcaagaccattttgttagtgtggattcgttgatgtgacctctgggagtcaggctcctcagtaggctctctacctggtcaagcaatttagcacacaccccttctttagggacctcccagtagatctccatctttgggaggaaggagatgacttcttgcagctcattcaacaggaaaaggcttctgagtgtgtaaatatacactgtcactgtttttatttggagcagatttcatcacagctattttctaaatggctaaacaagcatttccctgggtatgttccatggaatattcattttgtaggaagctcaatgataaaagagtcgcattgtcaatgagaccaggaaactgtatatttaattccattttgaagagtctcaatttacttaaggatagaaaaggcacagttaagaaccctgattaacttctttaacccacttttcctaaatgtatctgccagtttttgtgtacataaacctctcaaccctttgaagatcgtgcgttccagggaatacactctgggaaattctgggcaagactgttgcaggtttgcagcagatactaggcagagctgatactaaaaagagggagctggcttcctcatggccactcaccagtcctggggaagtcggggagggagagaggaagcctgagcctggaatcccagctctgccacttacaagcttcaaatcacttcacctccctcaccttggttttctttatctcttacgtggagaatataaaacctacatcttagtgttcatttgaggattaaaatcagatgtcaagctgttgaagatgaggcctggcatggagtagacccttctccttgatgttccaggaccggggagatccagggtgattttataaacacatggggagggtgggctgctgactagctgtgccaattcctagaaaggaagagtttccactgctctgggatgagagataatcccaggaggattgaggattaccaaaagggggttaccactccaaaaggagagggtccatgctcraatgtttgctagtgtgcatgtcaaggacatccctgcaaatctgaaatccacatcctaaatcctagccccaccactgacaaaagatgtgaccttggttaagtcacttaacctctgccagcctcagtctcctcatctgtaaaaagaggagttggactacgtatctctctggagtacccccaaccctcagattagtgtggaaccaaattaaggttattccaatcaatccaggttgaagagttggtaatctaattaaggatcagctgaattttcaaggttgagagtcaaaaagaactgtcaaataatgtacttgtgtgtgatgcttccaattttaatgcttttctgtgttaggagcatatttttaaatattcaaatgtgaattattcacatggcacatgcacttataatgtgtgcatttaactaaagtgaatcatcagcctattattaattatcatttaaccagccctattcttttggataaaggagagtgttagtaaaaaccaaagggtttggatcatttaagcaaagccagctctaagcaatttggcaagcccctccagctgtccctccatatcttccaacagctataacctgtgcatcctgtgctctttcatttacatatacatatacatatgcaaataaacccatgttcacttgggagtgtgcacactcatgtttgtacacactgtccgtgtcctacctaatatcctagatgtccatcaaagtcttcttggggcaggtgacatcctcacgggacctgagtttccttagcagttaaacacgtgttcttttcctagatctaagtaagagctcttccagctctgacatttgatgtctgtgctctttacttagctattccttggcagaagcattggagacatgctcatacacattatctcacataattcttaaaatcatccaggaagtctttttgcatcctcaatcctattttaacagatgatgaaacagatttacctacttgatgtgtaaacatacaataataactggcagttacaagcttagaaacctgattctctattctgaatccaatcaattcattctccaagtgacaaccaggcactggctactcacttttcccttcttaatcagagtggtttttgtggagttgggaatcatctggaagagcctcctagatcatctcccctccatagccaggaaaatctgctctaggctgaaacatgggatgtaggccactcatgggccagatacaattctaatggcaatcaagatattataggtgactggagagagtctgaagaagtacatgtcattagagccagggtgcctggcacgggaccaaatgagcagtctagtttgagacaatgggaagttttcttagcaggagtcacccttcccccaaccattcagccatctgcagaccagcctccccgctccccagattccacatgcctactctttcatgaatgaaggctacagtgctataagcatagactcacacatctttagagctacaaaagacctcacaaatgatctagtctagtctcctcgctttacaacatagagaaaagtggtatgctctaggacacagaaggtatggtcaaatttatattaggcttcctgattcactcttcagtgtgctgcttccctggcctctgaagaggcgaggccccagggcaggaaagcacctcagtggcccaccagacttagcaccaacacatgagcctgcccagtcctttygctcttatgcattcccgtctctggcctctcacccggtatttgggcagccttacccttgaccccttgtagctatatcctcattcttagatcctctgcttcttcatttacttctctgttgctggccctggttccctctgaactctgagctccatgttaaccctgttgcctacttttccgttccttttgaagtaaattctgtgtgtcctacctctccgttcaaccaggaaccccctaatagctttatgaccttggtgtgaaagtgtcacttagtcatgacccgtccctacagacagcagaatctggaggaattagagcttaatgttagcattttacaggtcacatcctctgatcccagagcaatattaataatgaaattatgaaagcttttttttaaaaaaaacaattacaggcaattttaagaatattattctaaattcccattgaaatcaaatacgcaattttaaaagatgagtacagagcaaaacttactggatgcattacacaaagtaaagttccatttctaaatactttcattttttaatcagaaagaataaaagtatattattgagcactaaacttaataagtatcctaaggaaatcaggagaaaagcaataaagaaaagataaaataataaattagaaaacagtgggaataaaaaaataaatcgaagatttgatccttggaaaatgccaaaaaaaaatgtgccagacatttgaaggatatcacatactcaaataggggagattctgttaattctgttaattattcaacagaaagccttgggtaaatttgggtaaatatttagaaaatatcaaggctgtgtcttacctcacatcatacataaaagtaagtcccaaatgtattgaagagttaaatattaaaaagaaaatgttaaggggaagatgtaggcaatatttccttgatctcaagrcaggaaaggatatttaaagaatgaaatcatgtcttttgcagcaacatggatgggttggaggmcattatcttgagtaaaataactcagaaagtcaaataccgcatgttttcacttataagtgggggctaaataatatgtactcatggacataaagtgtggaatgatagacatgggagactgagaagggtgggggtgtaggaggaagggagggatgatgcaatacttaacgagtgcattgcacactattcgggtgatggttacaccaaaagcccagacttcaccactacacaatatatccatgtaacaaaactacacttgcaccccctaaatttataatttttttaaaaaaggattaaaggcaggccaggcgcgctggctcatgcctgtaatcccagcacttgggaggccgaggagggtggatcacgtgaggtcgggagttcgagaccagcctgaccaacatggtgaaaccccgtgtctactaaaaatacaaaaattagccggcacagtggcacatgcctgtaatcccrgctactcagaaggctgaggcaggagaatctcttgaacccgggaggcggaggtggtggtgagccgagatcgtgccatggcactccagcctgggcaacaagagtgaaactttgtttcaaaaaaaaaaaaaaagattaaacgcaaagaaataatacataataggagttgatgtattttgttaaatacaaatttaaacttctatatgttaaaaatcattaatgaaaaggcaaattggtaatcagtaggaaaaaacttttagcatcaaaagaaataggaaaagatgaagtaatatccttaataaataaaaagtgcttagaaagcaacaaaaggggtcaaaggacatgatttcatagagaaataaaaatgataattttaaatgttggtgaggatatggtcagataggcatttccttactcagagttggacatgtaatttggtacaagtcagcagtaaagaactagagatttaaaaaccttctataatctaataatggtacttttagaaatctatcctaagtctatcataaggaaataagtagagataggaaaaatatttatatataaggatggttataatcatgtttataatagtaaacattggaatcgwtaatttaaaaagttacatcatgatatatccataatacaaaacttactcatctatggaaactatatttttgaaaaattgattgtcatgagaaattgttcatgatataataagcaaatgaaaagaaggatacacaatgatataatattacatcaattttataaatacatatgtgtatatatcatatatgcattatgcttatgcatatcagtgtctttgggtagtatgattatggtgcacttcattttcttctttaagctttygtgttttccagaatttctacaatgagcatatattatttataaacagaattcaccaaagtgtattcaaggctgggtacggtggctcatgcctgtaatctcagcactttgggaggccgaggcggttggaccacttgagtccaggagttcaagaccagcctgggcagcatggtgaaactccatctctataaaaaaaaaaatacaaaaattagccaggcttggtgttgcgctcccgtggtcccagctacttgggaagttgaggtgggaggattgctggagccagggaggcggaggttgcagtaagccaagatcgcgccactgcactccagcctgtgtgacagagcgagactttgtcaaaaaaagaaacaaaaaaaaaaaaactggaaaaacctcacaaagcgtgttcaaaattttcaaactttctacttgaaaaacacagattgatattatctggatgtgattttaagactgcttactctaattaattcctctaagaaaggcattattgtttaattacatttcttaaatccgtatgagctgagtggtgttattatggctgctcgccagaacgtggttattatgccattatgtgacctgggacctgtgctgagaggccacccagtgtgtggaaaagggtactgaaccaggggtcttgggccttgcgacctcaaggaaagtgtttggtagccttctgggcctcagtttcctcttctgtcaaatagatcttacctgctttactactttcacagaattgtctaaagaccaaataagaaaatccaggcaggagtctatgacatgtaggctattatgaagccaaagatcattattcaaagaataagctagtacctgcctggaattcatagttcatataaatgatttttctaaatctccctcttggtaaggaaacatactcccgtggttgcagaagaaaaaagcctcccctstcctcccacagccccttttcttactgaattaataagtgcacagycctttggggagggtgtagacagatcaggcacacccctgtgtccacctccaccaaaattctaggggaaaatgcctggcttcttaggaaaatgcttccctaaaaaaagaggagaaacctcaagtgttcccatggaactggggcagagggcaaattccgcacaacctctgcacaaacccacgggctggctgcttggcaggcctacagggtccagatctctgatctgtggctcagagtaacgaggtcatttggatggtacattggtttcataaacccctccatgatgctgctgctgttgtgaggatagttgtcacttccaactcatattattgcagactctaggctacacgtagttatagggacaagaaagtccacagctcctccactccccacaccaacggctccaggcagacttgctgcaaggagcagagaccccttggtcaccacaggtaaaggggacagtgttttgactgacttggcaagcttaccatgtgcaaccctggctgcatatgagtctcctagggagctttttagtaacccaggtgacaccccacgtttagaatttaaccagaatctccaggagtgggaaccaagtatcagtatttttaaagctgtctgggtgattccaagagcaagcaggattcagaagcattggctcaggtttcaacacagatctaggtatctctcccacaccagtcttcaaaaaacttatcttggtgggttttccaccacaattctacactctcctaagcattctttgcacgtaattttacctaccatggatccaattcaaccctaagkcatcctttatcctttagcttctctaccggctggctccatttctcagtctgccaattccagatccccaagaagggtgtcgtcttagcccaactcacctttttaaaccaggctacttgggccatgggatgctggttgatttagagactggctactctgtggaaagggacagaggttgtgcagtgtagaacacggccaccctggtctgccccagttctgttttttgtgtaggtggggtgggttgggcacggtttcccttaacagagactgtggaatactttaacatatctggttcaataacaaattataataatgaaatcaaacatatttagaggaatccatacaaattaagggtcagagtttcatcctctgtatagaatatgatgtaggagtctttttaagtatacgtaggataataaaatggatagcccactcaactatctttagaatgtatgtataattttatacatctttttccatagaaactacaattgaatttagcattgagagattatggtattcattattatcttagccagagggtgtttttttagcttttataagaaacttttaaattgaagtataatatacataaagaaaaagtgcacgttataaatgtacatctcaatgactttttacaaagtgaatacccttgtaaccagcacccaggtcaagaaactcaatattatcattaccccaaaagatgccccttgtgttctcttccaattactccttgcctccaagggtaaccactctcctgattctagcagcatagattagtttttgtactttatataagtacagtcatataggatgtactttattgtgttttggctcctttccttgaatattcatccttagttttgcatatgcatttgtagttctcaccagaggttttagtccttgaaatgtagttcaacaaacattattcagccaggaactgtgcccggggctggggacaccaaaacaaataagggmaaattcctgctgtaagaaatatttaatccagtagtctcgtaatgatcagaatttagtgtaaggtgaattcctctttgtccaacaaatatttattcagtgtccactagaggacaggcgctgtatcacaggtgctagggataagaaatgaacaagcagacaaaaaatctagcagaaatcctctcttttcttcccgtgacgtgcatgggcaagttctgcccactaatattcatttcccactatgtcctgcatctgatttaacataaagggaagtagcaatggaarytatttcttctggcaacttggaatatgagaagtccctggtccttgggccatttttcaaatcagtgagtgtgggaggtataatatttgtgtgtaccaatttcttccttattccattctctccactgctgatgctgcctatactgaatgcaatgaaagtctggaacctaaggaagcctttgggtgttagcttaccttggagtcaagctgagcagtcttcttgttttccagagccatgaagtgagaagagacacaattgccaaagctgtgatggaaatcatacagctttgaatttgttttagtaacatggaattctaacatgtgtcactgttcattagtactggcttttcagagcctcgtgaattacttgggtacaaatccatgacattagaggcatgagggattagaagacaatccaacaccactctaggattgatagtttaggaagaaatgcaagaaatcatctcattttgtttggttggttcattcctaccccccattctccacatttttatgaaaaattttaagtatatataaatgtagacaaaatagtaaaattcactcttatgtatccatctttcagcttcaaaaatcatcaactcatgccaattcttctctaaccccttgttgtccccctcctctgattatttgaagcaatcccagatgacaaataaattactcataaatgttcasaaagtgagatctcctagttttaattcctgtagttcacaggttcagcggtgaattcactaagctagttagtggtacttatatttaatccctggcttcagaagtaaaagtgataagctttactaacagaattactattattattattacattatgacataatataatatattcttgtactgtttggcctaaaactacctcttttaagcctctcattcagttctccaaggagttcaacagggtgtgggatggctgattgatgttctttttcatcagtaatttctaaaccaaatccttgtggattttgaaattgcaaatatatttgtccaagtaaaagcttcaactatttggtaataaaatgggtctaagactcttcccaaacctcatgtttcccattttcagtctgtgtgcaaaggaggaggttggctgttgttcatggagccagtgtcaactgcctgtctgttacgagatgtcacagcacaaccaggcatgcagcttacttttttttaggtttcccaggctcaaaaccgcaaagtaccattgtttttgccagttagaacactccagaggtttctagaacaagcagaaaagattgttagtgcctttgtcatgaaaatatgtaaaatgttgctttggctgctttggctatcatagctgctctgattgtatctcaaaatgtcacccrgggtatgtggcagtcattgtgaggaatcgggcaccaggcaccccttgatgagcctttgatgaggagatgattaggagtaaaaaaatgctgcatagattatctgcataactaacactgtagcagacagccatgcagacatttttctgtatacaactcccactcatttttctgagagataaaagcagccaagattgacaatctgtcagtttcaccattttcattgtgtactttttctgggcaggttattcacatcgaactcctttgatgtgatcagtgatgatgcttttattggtcttccacatctagagtatttgtaagtaaaaaagcttttttaaaacatgatgattcaggacaagtactctcaagttcctgtaactgtttgacaaaaaatattataacttattgcagattcatagaaaacaacaacatcaagtcaatttcaagacatactttccggggactaaagtcattaattcacttgtaagtatgaatgttgctattactttttaagcttgctaatggacartgcagtttgatcacctgtggttaatgcacctactttatgagtgtcyataaaaatttaagaaacccaaatgacttctctccatgcacacttgccatctttccctgtcatctgtcagagggtgttcaataaattgattactattaatatttttatccaaaaccaaccacaattagaaaagcaatctaatgcagggaaattgtgtgcctgaaataacttcttttattatctacatcattacttgcttcatggatcattatgagttgactgtataatttgatatcagctttttttccctctataagccctcactttatatacatttaaacataatatagccacaggcgatgtcttcatagtacctgatcaacttgtttatcagtgaaatatttaattactcaatggatgattacagctaacagcagttgttcttaacagggaacaattttgtctcccagggaacatttggcaatatctagagacatgtttggttgtcacaactggggatgtaaatggcatctagtgggtgaaaggcagggattcttctactgcttaggacagcccttcacgaccaagaattatccagcctaaagtggcatcgtgggcaggttgagaaaccctgaacaacaggacccaaacaatttgtttcttctagcctccctcaccctctacagacaaacacattcacacacacacacacacacacacacaggcacacatgtgcatacacacacacactcacacacacactctcacatacacacagattattttaaggaaactagaagagcatggaaagaaaaggcactaacatttacatcacttttcatctaatcctctcaataatcctgccaaacaggcacaataatccctgtttcagaaatgaggaaacagtcttggaggggatatatgcctcgtgagctgattagttacggaattatgagaacatctacttaattgttgaattgcagtgactcttcatcctttcaacagctatttctcaatctacctaatatgtatcttatcagttctagatayagatgcaagagatccaagtgtcatagtcattctgtcagctttaacctgttctctcatcatacttcattcccagctctgctctaggccctaggatgcagcagggaacaaaggagacaaaaatgcctgtccttggactgagcctgatttccagtgtgtccacgcggttgtcactctgcctccaccaggcccctttctctcctgttgcttgttttgtagcaaagagaagctaatagccagatatattttacaaaatcatgcctttcaaggcttctgtatagagttattgtaataaaaaaacagtgtttgcaatactactcttcatgtcaatgacatgatatgatgcaaagatggctgtttacagaatgaatgctatgcaattttatcacagagctcaacactgccaaacctcatttttcagacaacaaataaacaaaagaaacaaatatatggaaggagaaatggaaattcatgacctcaacttgaaatccactagattcacatacatcccaatccacatggcctctgtccagtgcttagcatcatgagagctgtagggaggatgcacagcccaattcatccagctgtgtctcctctccagcctaaaagcctgtggtttctctcaggctccatgcacagaacaggaaaaaatgtttccctgtcttggaaggaaggagggaaggaaagaaagaaggaaggaaggaaggagggagggagcgagggagggagggaggggaggggaggggaaaggagggaaggaagggaggaaagaggaaaggagggagggagaaagaaaaagaggaaggaagatgagagaggaagggaagggggagaaaggagggaaggggaagaggaaaaagggaaagaaaaagtctgtttgacatcctagtgtaggacacccattttgtttactggagcctatgatgtgtatcaaatgaaatgggaatttaaatatgggtcttaatgatgccctttctttagcagtatggagcctgtaagagagagagactgatacagaacacgcttaacattcagaaaatttcaggttcgaggaacaccaagggcagccttcaaagagaggcatgactcttaacaggcagtgaaagagaagtcccacctctctgagctggtgctggaggtaggaaggtgttatgagggaacaggggttaaggctgtggctaaatgaatatgacccttaggtctcttgtatctttagctaacacttattaggttgactgatacggcattgccaatgttaggctgttttttatctacaaaaatggcaatgccatatggttcatcttaaacagtttctaagatgtgacacatgctttacaaggagtagggcctacaaagatgagtaagatctagtcccaccttagagaagctcaggctagcaagagaaattggacaaatattttctcactgagtgcctttgtccccaagttatgttctcctttcaaattatgctattcttcatggtacaattccttccttccatccttcattctttccttcctttcttccttccttccttcttttattccttccttctttcctttctgtctttcaaggagagatggagtagggaggatctgaaacccaaatttccctctgccggctcagtaagtcaggttcattttccattatttatggcgtattaataaatctggcatttgtctgagccattagtttcctttttaagacattaggcttcaaagtgcacttttctccacctcagatcaatccttcccaatcaaggcaaacattcaagctgtgaggaattagtacctcaccctctaacctgcatgcattgcaggaagaggttacaaagctttctcatattcttgacttcatcatagtctcctgacgaccccgtgaaagagacagggcagtagcactaggttcatagatgaacgagcaagtggaggtataccatgagttgaagctgctccccagttactaagtggtaaagccagacagctcccaccgtctttgatgagacgtccagtgctacgtccactgtgccagttaccgcaggaccagatagcttttattgagctggctggatccttccatgggacatgatttgaggagaaaatatgactagagaagaaagaaaagatcctgaaaacaggaaacctaccctcatatttcatctcaaaatgcagatagttgggattagacgtatactttcaggtccagctggttcccactctggcctaacattaaagccactcccttacctgcgcctttatataaatttagttcacgcctaagaaacaatgcactttctcaccttcttatacagagatgtcagtagatttctcttctaagagacatttacagataacttaaaagttattataggccgggcgtggtggctcacacctgtaatcccagcactttgggaagccaaggagggcagatcactaggtcrggagatcgagaccatcctggctaacatggtgaaaccccatctctactaaaaaatacaaaaaattagccgggcgtggtggtgggcgcctgtagtcccagctactctggaggctgaggcaggagaatggcatgaacccgggaggcggagcttgcagtgagccgagatcacgccattgcactccagcctaggtgaaagagcaagactccgtctctaagaagtaaataaataaataaataaataaatawtaaaaaagttattatatatacctggctatcaggcgagatcctcccctcccctgcaaattaacccttaaaaccctgcaaattaacccttaaaaagggagagagacttcttaaagttaagtcctttcaaagcctgtcaaatgytgggattctcaattactttrttttgaatcattgttctaatgttatgcatgtttcactttaatgtttgaatggtttgtatattttagtaatcttttgtatatttgaatttttctgatgaatatatgttattttggtaatcaggaaaacatgaataaaaaattagtttatgaataaaaaattaatttatggccaatgatgacaaaatcttcaaacattatgtattggcttctagtaatacctatgagtctttagtaatgattgctttgtgtgccattaagtgtcactgtggctaaggcccagtggagccagcattgtttgcatgcatatatataaatatttggagaaaattatcatcaatctatatgtattgtagagtatccaatggttgctcagcactgagggggtacaaaggactatataacagtccccaaactcaggatgcttgygtgttcccaatcagttgcacaggatgtctttgttttagccttcacattgccttatatgtaaagaggtagtgcaatgtagcagctaagagggtgatctctgccaccagactgcctgggttcaactgtctctctgccagctcaataggacaagtttattttccattatttactacttattaataaatctggcatctatctgagccattagtttcctttttaagactttaggcttcaaagtgcacttttctccacctcagatcagttcctcggctttgcaccttaacagctgtggaatttggggcaggccatttagcttcactatgctacagactgggcatgtaaaatggggttataataataatctcttaaaatgggatggggaataacaaggcatttaagagtattagtgcccaaggttgtcttgagattaagtcagttaataaatgcaaagtgcttagaacagggcctggtatgtagtaagcaccactgtataactaaaactcactgcccaacctccattagtcctggatcagaattctaaatgctatagtgtatataccatttaaacattttctgtgaaatttaagtaactacaaagtgctcagaacagggcctggtatgtagtaagcaccactgtgtaggaaaaaactaaaactcactgcataacctccattagtcctgaatcagaatgctaaatgctacagtgtatatcccctttaaacactttctatgaaattaaagtaactgcacttgcaccgccgcaggttcagagagacacaaacccaagctgagaatctgcattgcaggggggctggtgcaccccagatggctgtgggcgatgctttcttagcagcagagcccggtggcactgaaacaaacgcggtgtttgagccagtctggtctgccttagagagaagactttccagtgggttccacagtcayaatcggaggttttcttgggtaaatgatgaaaacaccaaagggcaggaaatggtcatcatttctgtgaagaaggaatggccgtctgcctttgagaacacttgaccttactcagccagtttcaaggtaactagacattcagctgcgcaatatctcagttgttttaaagaatgtttctggccaggtgcggtggctcacgcctgtaatcccagcactttgggaggccgaggtgggcggatcacaaggtcaggagatcgagaccatcctggctaacamggtgaaaccccatctctactaaaaatacaaaaaattagctgggcgtggtggcgggcgcctgtagtcccagctactcgggaggctgaggcgggagaatggcgtgaacctgggaggyggagcttgcagtgagccgagatcgcgccactgcactccagcttgggtgacagagcgagactccgtctccaataaataaataagtaaataaataaataaaagaatgtttcttaggtgaactttgaaccaggacctagagaatggtgcttagttgaaggcaactttaaagagcctccacgttgccttgggatttctaccacagtggggctgtggggagggagggtccttcctgaggtgggggtccacaccagctggtggggactgcactagtcactcacagggctttgagctttctcccccagtgccttggcacagggggcctcaaaggagcatcctctgctcttttctttgcctagatatgtacgcgtcctctcgtctactccagcctgcctcattcattcattcatttaaaagtatctattaggctgtgtgcggtggctcatgcttgtaatcccagcactttgggaggccaaggcgggcggatcacttgaggtcaggagttcaagaccagcctggccaacatggtgaaaccccatctctactaaaaacacaaaaattagccgggcatggtggcgtatgcccgtaatcccagctacttaagaggctgaggcaggagaattgctcgaaccagggaggcggaagttgcagtgagccgagatagcgccactgcattccagcctgggtgacagagtgagactccatctcaaaataaataaatacataaataaataaaagtatctattgagggcttactttgtgccaggcactatgctagcactacagataatggaaagagaaccatccttctagtactcattgcagaattatcctagaaataaaagaacattgattaaatgtttcctcaagtctctcattgactgtgtcttcacccctctcccaatcggctccaccccaccccagtcagatattctagtgccacctagtgtgacctccatgccctggaaaagcctgttgtcaaactcactgacccctaagtacgtggcctaaagtatcacctatcctagtgtcatctattaattttaaagatgaagccatagcctctcagtgaaaatgacaaagctgtgatttaagagcaagaataggacttggagatcattctgacccagtgatcattcactttatagaaaagggaatagcctgagctcaaactcagatatccacttccctgtccacgtcacccctgtactctgtggctgagttctgggccctaaagtgagtctgactggcaaggggtccactttggccaacacaggagcctggtactccttaaaccaaaacatgtagaaagtctttttcctgacaactctggtggctacctgggactccttgcctctctgtccttcataatttttcttcctcctattcctaagaattaagaattcttatatctagtattaaaattcagctctgcttaacagctcttggctaacagatctttgcagaggaaggagggtcccctactgcagttcagggtgacactctctcaagtcgtgacactctctctagtcatgacactctagaggaaagagaaggactagacactctgtgggccaggatccataacatgatgttccagaatcacttgcttttgatgggctctgtattaatggctggaagaaaacatgactaaatcttaacagtggttacttctgctatgataattattatttctctccttttttaaaaaaataatttttgcactttccaacttttcttgaagtgaagaaataattattattccatatatatgtgcatatgtagtgtgtgtatatgtgtgtgtgtgtatcaataaaagtaaaagatgggacttttaagaataccaatgcataggattatccctactaagagaggcagaaagaatagatgatctcagcttcctgaagcaaatattttaaagtgtttagatatttaatatcactgtttaatgacaataacaacaaagaaaaagattagttttgtggtcttaacacataaggtttaaaaattcacctgcagatacagtttttcctggaatccattacaaagatatgtatataaaaatattagtagctacatgtgttaattctcacaataagtgaaattcatatcctttactcagttttgcagatgtcaaaacagaaacccagagaggtgaaattaactcggctaaggacacattcctaagagtgatgacgttcaaatttattccctggtggatttggacgaagttggcacttaaaccactatactcccctaagtgatgcaggaaagaatagctacaaccagttttaaaaatacttagcacgtatagcaattagagcttctgttgaggaaaagttaataataatattattatatcattactctgtgaagctgggagtgggatgaagacagaactgggaaaattttatccaccaccacatggcacacaaaagggtgggcacacaccacacccaactaatttttgtatttttcgcagacagaggattttgccttgttgtccaggctggtctcaaactcctgacctcaggtgatccgcccacctctgcctcccaaagtgctgggattacgggcgtgagccaccatgccctggcaacctgttacattttttgcagagtaattctcaggctctgtcagcattgctttcctaagtcgttctctgcccaaatccctctgcctgctttctttttatccaaatgtaacctgtcactggagcctcccagagacttagggaagctgtctgaactccagctccctagccttggatgtctggaagcctcactctcatttctgaatcttacttcctcttgagtctgcttctcttagtgaatccaggcagccttctcatgcccatcactcaccaaacctagacatgaagcttcatcctctctcctctaagagcagttcattgtgggcaaggatttcattgaatttttggtagcggagcatcagagggttgacactgggttcagcgaatccacccaccatttctccctctggctcccctgcctcccccaccctctgattcccaaggcaaaagcctgtcacaagaggttctcaggaaatttaatgcctcattccacagcccatcgggccagcctgtccttctcagccccatctcacaattctggtgaattagaagccctccatcttgtcatgcaaaaatactgcctctccattctggaagccccatagctccgagtctgcagctctgttttgccatctgttctgtggttagcttgcacgtggatcatgtgaggcctaaagctctactcctttgggcaggaagtagaacttccagattcactcattatttaaaagaatcccacagggtacagtggctcacacctgtaatcccagcacattgggaggaagaggcatgaggatagcttgagcccaagagttcaagaccagcctgagcaacatagcaagaccctgtctctacaaataaaaaagacttagttgggcatggtgggacacacctgtggtcccagctactggagaggctgagcccagaggatcacttgagccagggacgttgaggctgcattaagctgtaattgcaccactatatttcagcctgggcaacaaagtgagaccctgtctcaaaaaaaaaaaaaaaaaagaattccccttggacagtaagacaagcatggtgccttctcctgtatagcccctattggcagtagtaattcaggatttgactgcttaatcattgcatgcccactgtcctgtgactcagcctcctctaaatttatgctctgcagccagttgcagtttttaccagcttcagaggaagggacatccacttagaagttagtatgataactttaagccacattgtgccagaaaataaactgagacacataacatgggagtgactctggactggtccaagacatcagaaaatctcttcattcaaacaccagtcagtaagatgaattatggagacattctcttgaatagtcttccttagcagcattttattaattttgctgtatgtggacagccatagcagttcattcatgtggtctgtttctaaacgttgtttcttggacaacatacgtacagaagctgttctcttctgacaccagccactctactgagagtagttcagacrcctgcaccatccttgattatctcatttccttttttcaataatcttatgagataaggtattattatcttcacttaaaaatgaaacaactgaatttccaagaagatacattaccaaagtcacacagccagtaaatgctggagtcaggattcaaacatagctcagaatcactccaaaagccatgctctttgtcacaattggaccgccattgacaatggaacattctgactcagttcctattcttgcattccaaggttcattgagaaccgttttccaaactagcagtaattactaaaacctagaaaaacaacataactaacttaaaaataagttctaaagatcatgaatgtttgcacttgagaaaccttatatttaattagtggaggtagaagacatagacttttgagaatgttttaaagggaagttgagagaattttcaagggtttagaggctaatggtatgggctctttagttttagtttagttttttatttttattgtggaaaaaaaaacacctctaagaaaagtttataacgtgtatatatatggtgctggttaaaaatagaaaattacactacytggtgaccttccccagtcatacagcattagcactgtgctatgtctatatttgtgtactagggacacatttccctttccttgacaktatcaggacaattttttactcattaacctttattagaatcattctagtgatttacggaagaacaaatagaaagggaaagggaaaaacattcctgtgatcacggaaaagaaccagaagaaggagaaagagggggatgattaaagagaatagatggataggtttttataagaaaacttttttctgaggtggaatgaatggtgctagaaaggaaaaggaggcgtgggctttagaaaggagaaaggatgtactggggaagagatagagctactggcactgtgggttggaggtttggttgctctccggagcaagcgaggaggaagcaggcagaaggggcagcccaggcaagaggagggggcgcattttggagatggacactcaccagtttggttagtcatcatttgggagatatcccctagattgagcgtctgagagtgtgaatctctcgtgttctgttctaaatggaaagatcaatgcccaggaatcattgttgtttttaaccaacataaagtgttgtttaaatattgagtgcacctgtaatcccagcactttgggaggccgaggcgggtggatcactgaagctcaggagttcaagaccagcctggccaacatggtgaaaccctgtctctactaaaaatacaacaattagccgggtatggtggcgggcacatgtaatcccagctacggcaggctaaggcaggaaaatcacttgaacccgggaggcagaggtttcagtgagctgaggtcacaccacttcaatccagcctgggtgacagagcgagacttttgtctcaagaaataaaagtaaataaatatggagtgggtgttgaagtggacaggttaggaactgaaaggacaatagcaggaatctgagtagtagttcagaagaaaaaaaaaggaccacaagtcttttagtaggctggaaatgacaaaagagactcatcactaagctttatcattaaatgcctttgtttaatttatcactacagtttacatcacctttttttttttttttttccaggagccttgcaaacaacaatctccagacactcccaaaagatattttcaaaggcctggattctttaacaaatgtgtaagaggacctaagaaatcactgaacaattaattaatttgcwstcattaacaaggaagcctggtattgattattataatttttaattggcttttaaaktaaaattaggatttttaaatctaaattttaactggccaaaaatttaaatttacatggactaacatttgagtcttctatggtatttatcattgggaattctgaatacatggcacccaggcattcctttgacaaagtgtgtgtcaatacggcagggagcgatgataaaggactttgacggggtgggaagagacccggctagaaatttcaaaatcccttttttctcatgaggtccaggaaatagggctacaaaggaaaaacataaaggagtctgggaaactgacagaataaagatgaaaggttacatccttgggttggtcaatcaacagagaaatggagcaggaagtgggggaagggagaaaagtttgccttttttctcattagactgaacaacaactctaagcttaatccccaggaatttggcttaagccccaggaagggaatgaacttaattatttttgaccctttttcaaacaaaagagctttcaaactttgacttttaagcctccgagtgaaagatctttgcaaggaatttgtatattttgctgtaagcaaagcaagtaatatatgcctaaacctctcaaaagcaattcagcttcattatttgccttccagaacattagaaaggtatttaaatgtcataaggtggaagacaggaacaaatgaaaggatatatgaaaacaaaagcttttttaaaaaattattcaggtacttgtctgtagaatatatattcaaaacaacttttctccaataacaaacaaaaagaaaatctgagtcaagtactttcttccaagcccagtatttaacttcaaatcagtagcctaatgaaaaactttctttgttccttgcagtatttccccagcccctcctccatgtctattacctcaattcctgaatgatatggtttaattccaggagaatgcccaaatcaggattcttccaagagagtcctggacagaccatagttatcctctctggtttacagtagcctgaaaggttgccactcattagtgtgggtcagagttctcttgggagactaggtcagttctgggagtgtcttggaagttagaacacactccatgggtgacgtgggatgtagctcattgggggtcctttaccccatttttgtgtcagtctataccctacactagtgaaagacaaaacaaaaaaatattgaaattggctcagtctctcatgggaatcccaagatgggtttagccttttggacctactctaatatgcccaaatcaagaattatcttagaagtacaaggatccatgccaacttgccttttagtggatttcttggctttcttgaaagtatcctctaaaaaacatttttaaatgtttgggcgtttaaaaattatttatgtgtggtgtgaagagtaggcagcacctatcttaagaattctgtgtgaccaggaaaggaggtggaattcctgaacagaagcaatgcaaatacacagagaacttggtgagttggggtcatatgtggatatgtaaatggtctatgctgtataacttattacaggcatgagcgattgtatgcctgtgttaactctgctgtgtcaaagtcatttcctatttaaactgaatttgtagaccacggaagaggatcaggattaattatgtctgtgaggaagaagaaaagcaaatagctcacttgattaaatacattayaataatcactacattctgtcctttagacctgtgctgtccaatagggtagccaccagaccttatggtcactgagcacctaaaatgtgctcctagtacaactgagagactgaattttaaattttacttaattttttaacagttaaatttaaatttaaaagctgattctcagctcaattattggaaaatgttaagtacgcttggaataatttgggtatatacacctatttttttcaattatgaattttatgwcatctaaatatagatcacctatttctggtaaaatttagcatctgaattgagatatattgtaggtataaaayacacactggacttcaaagacttagtataaaaaaggaatgtaaaatatctcaataatgtttatattgatgatgtgtcaaaatgataatcttttgtatgtattgggttaaataaaacatattattaaaatgaattatacctgcttctttttacttttttaatgtggctatagaaaattttaaattacaattacggttcatatactgtttctattgacagcacagccctagactaagccgctttggaattcaagagggagtaagtgatgaggttccattgactgggtagtcttcaagtgtgcatggtgctaactctctgagcccaaagtgaatgagtggtcagtcaggttccaggcaggttatagggcaggatgcaacgccgggtaaggtcattctgcacatgttaattgttgatgtagaactctttcctgcgtgggtagggcccttgtacagcaaaagcagctgaagtttgtctttcagggacctgaggggtaattcatttaattgtgactgtaaactgaaatggctagtggaatggcttggccacaccaatgcaactgttgaagacatctactgcgaaggccccccagaatacaagaagcgcaaaatcaatagtctctcctcgaaggatttygattgcatcattacaggtaatgtactcatcatcattccacctcaaaaaattaaaataagggctacctttttttttcatgtgcaggaactgatattttttatatcttaaaaactagctgagcaacttaattttaaaaaaattatgaaccattgacaatgcttcatgtgtttaaaagtaaaatggccattttactattctctgaaataaatgtatttcttgtgaatatttaagatctagccaaggaaagaggtattagctcacagttacttatyatttcctatttttgcagaatttgcaaaktctcaagacctgccttatcaatcattgtccatagacactttttcttatttgaatgatgagtatgtagtcatcgctcagccttttactggaaaatgcattttccttgaatgggaccatgtggaaaagaccttccggaattatgacaacattacaggtatgaaaagcctaatgatattttgagtggtaatttaaactgcttcagccaagggcaacaaggaaagatgagtggtataggggaatgctttagcatttgaattccaactctaccatttgttaagtgacctgggattgttctctaagccataatttccccacttgtaaaacgggaataatattaatacttaactcacaaggttgttaataagatcatgtgaacacatattcaagaaacttagcatagggtctagtataatacataaacagtaaatatttgattatttttcttcaaataaaagtattggatggtgaatcatgagttctagtccaggttctgccacagtctatttgggcaagctgctcatactcactgacacccctcaacccctttttcttaactataaaataagaaggttattttagatcaataagtctcaaatttgttacacaaacgtgtcttctacaaaatgttaatgtatgccttgtaatgaaaaggattttgtggtccaataaattcatgaaccatatcttggtcttgtaggttcataatacagacatctgtggatctgagaagtcctgcagtgaggaaatttttccaatatttttcacccttaatttggccatggaatttaattctttcttttcttttcttttttctttttttttcttttttttttttttttgagacagagtctcgctctgtcacccaggctggagtgcagtggcacaatctcagctcactgcaacctccaactcccgggttcaagcaattcttctgcctcagcctcccaagcagctgggactacaggtgcgtgccaccatgtccagctaatttttgtatttttagtacagacagggtttcaccatattggcaaagctggtattgaactcctgacctcatgatccgcccaccttggcctctcaaagtgctgccattacaagcgtgagccaccgcacccggccggaatctaattctttctatgaaaacttttacttatctggatctctcttttttttttttttttttttgagatggagtcttgctctgttacccaggctggagtgcagtggcgtgatctggggtcaatgcaacctcagcctcctgggttcaagcgattcttgtccttcagcctcccaagtagctgggactacaggcatgtgccaccacgccctcataattttttgtatttttagtagagatggggtttcaccaagttggtcaggctggtttcgaattcctggcctcaagtgatccacccgccttggcctcccaaagttctgggattacaagagtaaaccaccttgcctgggcttacttagctgatctcttaagtttctttcccattttaataatttttaaaattataagtcataagttagaacatagggctccctctacaatttttaatatcagttttagcttctaatacctttaaatctgctctcaagagcactcacacctccccataaaaggtaaccctttagacaaggcatggagggtcatgatagattttgctggtagccatcaccctcattgctcaaaggaccaagacaggtctggggcttgcttgaggctggggttgcttaaataaagggatcccttccaaactgagacccttttggaatcctcctttcttttagaatcctcctctctgaaggaagaaggtcatgcttccttaggcccccataagttttccagtggactatagcagggttttgtgcggtcgaaaccaggcttttcttacttgtgtatggttcatcaatttctttgaatgactctttagatgagcacttacaagagaaataaatcatacatctgcaaactttctgagggcatctcagagctcatcttgtctaggatgatgtcttagtcccttcctgctgctgtaacaaaaaataccttgactgcgtaatttataagaacagaaatttatttctcatagttctggaggctgggaactccatgatcaaggcaccaggagatttagggtctggtgagggctcactctctgcttcaaagacggtgccttctctgtgtcctaacatggcagaarggcaaaaaaagatctaacagactcgctcaagcccttttgcaagggcacaaattccattcatgagtgtggagtcctcatgatctaatcacctcctagacaccccacttcttaatactattacactggggattaagctacaacataaattttggagggacagaaacattccaaccatagcagatgacaaatatatgccccatactcagtcattatcccttccttcactctagacaggcaccactaatctatcatgggaatctttcatgtagagtgcagacacggccacagaatccttctcaacacagttccccagacaatcacacgcaatgagccaatcagtattggtacatgtgttggaatctggtggccatccttaatctagtctaaagtctcattgtacagaaaagaaaactgagcctcagagaagttaaatgattttcttaagatcatacaatcagtttagccctgaaaagagtcagaaataaaactattttgcctatggatgaagccaattagtagaaagaattaatgtagaactttctgccccgcactagcgctgtagtcagaagaggcctaaagcccagatttgttcagctgtctctggattttctagagccaaactcctgcaagatcagaatctactgataaatgtcaaactcttccccaaaggataccaagctaggccactgacagatcccacatcattttctgtgattttccaaaataactttcaggagcagtgcccatggctgcacccttctttcgatttttttaaagattccttttccttctcttcactcctgccaccagtgacctaaagctccagaaaagtgacaagtggcatctcctttctttgcaggggaaaggcaaattattctagagcaggaagcagttcagacttagagcaaaacaattacagtagagccatgggctacccagaccacaacgctagcctttggttatctaagatcttagataaaccaaatttgaagtcctggaatagctaacttgtccccagcttgggttaaaagcatagagatgctggtaggcctggctttgaatccccaactctgccttctgctaccagaacagcctctctgagcttcagtttactcatgtggaaaaaggataatatttatctcttaagattgttgggaaaattaatgaggtaaattgagaaagcacataatagatgctcagtaaacagtagttttcattagaattatgattaactcatttgtgtcagggaaactaatgctttctttctgcaagaagtaagaggagaacactcgggccatagctgtgtgtcctgaacgtctagcgcaggctagatatgacattaacaactcaattgttggcaacaaggccccacgaggcacaaaggcacggaactttaggacactgctgccattgggctttggagaccagccttgcctaatcaaccaaggagatctcttgtttcaggctgatttgggtggaagttgtatggccccagcccgcatgtttacatgctccaaaagaggatggccacacaactaatctctcctttgtcttttcccaggcacatccactgtagtatgcaagcctatagtcattgaaactcagctctatgttattgtggcccagctgtttggtggctctcacatctataagcgagacagttttgcaaataaattcataaaaatccaggatattgaaattctcaaaatccgaaaacccaatgacattgaaacattcaagattgaaaacaactggtactttgttgttgctgacagttcaaaagctggttttactaccatttacaaatggaacggaaacggattctactcccatcaatccttacacgcgtggtacagggacactgatgtggmatatctagaaatagtcagaacacctcagacactcagaacgcctcatttaattctgtctagtagttcccagcgtcctgtaatttatcagtggaacaaagcaacacaattattcactaaccaaactgacattcctaacatggaggatgtgtacgcagtgaagcacttctcagtgaaaggggacgtgtacatttgcttgacaagattcattggtgattccaaagtcatgaaatggggaggctcctcgttccaggatattcagaggatgccatcgygaggatccatggtgttccagcctcttcaaataaataattaccaatatgcaattcttggaagtgattactcctttactcaagtgtataactgggatgcagagaaagccaaatttgtgaaatttcaggaattaaatgttcaggcaccaagatcattcacacatgtgtccattaataagcgtaattttctttttgcttccagttttaagggaaatacacagatttacaaacatgtcatagttgacttaagcgcatgagacaccaaattctgtggctgccatcagaaattttctacagtacatgacccggatgaactcaatgcatgatgactcttcttatcacacttgcaaatgaatgcctttcaaacattgagactgctagaaccaagcactaccagtatctccatccttaactgtccagtccagtgatgtgggaagttaccttttataagacaaaatttaattgtgtaactgttctttgcagtgaagatgtgtaaataagcgtttaatggtatctgttactccaaaaagaaatattaatatgtacttttccatttatttattcatgtgtacagaaacaactgccaaataaaatgtttacattttctttcatatcccagaggtaattatttacaggagctgtttcattcttgttgttggtatgttgaagaaatagttttatataatagtattgtatttggatcaaggatttacgatgtgaagaatgagtgaagataaaattatgggtaatatgatattgattacccattgattatgaccaggtttatctgtggctggatcagctgattttgaacattcaaaggtatttccaaaggtcatggcctttagggataatttgaggtgaaatggtgacaaattaaaagaaaggtagagaaatttgcctactacaagaagactgatttgaaattaaggacagcaagacccatcctttcctgactgataagcccagctaaaatcatcactcagacaatttctaggagaaagtaaaatcaagaattaggatctcaataccctatttagggtctttctaaacatctgacagctgatagagattgtaaccttacagtgcttgcctcaaatgtacctgtcatgaaggcctcttaatctgaccaaggatgcttcacttctagataccaattttgatttgttatttacctgctgcagaatgcccaaaaggctcatatttgattttctaaatttctgcttctagatcacatgggtcattagcacaatgccggtgatagagtaggctctcaaaaaatgcttttaaagaagcacgtgtcctcctgttataatataataaactttctgaggccttttgacctaattattgcctacctactaagaatggggtattgtatagcaggggtgggggactgaggcagaatagggcatgaaccttgccctctgaggccttagaagactaactggggtgttagaacacaaaaaacctacagagcaagcagtgagtgccaagtaccttctaaagattccagattataagtatcctgggagtatcaagatgactttctggaagtctaggttcttgtttgcacttaaagggaagatgtaattttaaagggggatcacggcagagaagatattcctggcacgaactggttctgtgtgctgccttcacggagggggtcagagcttgctcctgctcattgtttgctggactattttgccatataagtgtggtcggggagggcagacagcagctgctggcacacagtgcatatctggaagacttgaggcatcaaaggtacacacatacttacatagtttctgggaagcaactccctggggagttatgcacaggaaccagattcccatatggggaagatattaactctgacatcaggattatgggagagaagaatacctcactcccgaactggcctttgaatgtcttatttttttcagttcccttttcctgtaagcagcatcatatgctactggagaacacctgctctgtacagactagggtgaactccaactctgccatgtactagccttgtccataggccagttgcttagcccctctgagcctcagtttctttccctgtaaagagggacaataatacctacttccaaagataatggaaggattgagacagtacatgcaaggcagattttatttcccaaatataaccacaacaatatctgccatcgcatgtgctctgtgacagcctctcccccatcccatcaagaggcagtacctagttcacctactcttaaacgtgaattagtttatgacttgcttgtaagaatgtggtgggaataatatagttgatttctgaggctaggtcataaaaatgatgaagtttctctcctatcttgtaaactgggacacttgattttggagctgtgagcagacaccttcaaaagtcctactagcctgaggccactgttctgtgatgaagcccagcccccatggagaaaccacacataggtgctttggtcaacagacccagacaaggccatcctcagccaccggttctgtgagtgaagatgcctctgggtgatcccagccccagctcacaagtcactaccagacttcagatcttcccagcagaggccccagacattgcagagcagagacaagccatccccactgtgtcctgtccaaaggcctgacccacggactctatgagcataataaaatggcttaaattgttttaaatggctaagtttttgggtgatttgttacacaacagcagtagaatacttaacatggaactggcacaactgagcccttaccaagtgatagttattgccaacaggcaccctacactcagaatagtgcatactttgggatcatgctctaccttattatcttaatgtaactctccatcatttcattttttagagaataactccttttttccttttttaattttgagatggagtcttgctcagtcacccaggctagagcgaagtggcgccatctggactcactgcaacctccgcctcccaggttcaagcaattctcctgcctcagcctcccaagtagctgggattacaggcacctgccaccatacctggcttttttttttttttttttttttttttggatttttactagagatggggtttgccatgttgatgaggctggtcttgaactcccgacctcaggtgatccgctgccttggccccccaaagtgctgggattacaggcataagccaccgcacccggctgagaatagctccttttaaaaaatacgttatcaatgttttttctgccaggcattgtgctgaattcaggaatgcagagattaaaagacccagattctgctctatttgtttttattttttaattttagggtcctgctgtgttgcccaggctgtaatgtcgtggtgcaatcatagctcactacagccttaaactcctgggctaagtggtcgtcctgcataactgagattgcaggcatgtaccaccacagtcaactaattttttaaatttttgtagagacagggtcttgctatgttgcccaggtaaatctcaactcctggcctcaagaaattctcctaccttagcctcccaaagagttgggattacaggcatgagccaaagcacccagccagcccttcttgttttcagaaaagcactgactgttgaagctagcaaattgactctaatttaccttaaagctggagacccagaggtgtatgtgaagcgagctagctgaattaggaccatcttccatcctgacactcagcctagtcctttctccatcatgtggtgccacttttcaaacattcactatctgattagaacttggcatgtagatgggaagattgatgaggggtaaagagaagaccaagaaaattaattcaagaaagactgaggaggaggacacgggtagggttcacctttgcaggaactgactagccttttctgagagttgtcccctctccatgtacccttcatctgccctattctatttaactctgtctcctctgcagccacagaaggttgcacctgtaatgtgttcccagtgttcacctgaaatgaactccaggtgtttgtcctagatgctgggctgagctcagcctgagccaagctgcacgtagggagcactggtctttgaatgggagttcaaagagaaagaactttaagagagttctgtctcctggatatttggaattaggacagcaaaggctgagccaatttgccacaggcacaggatctgtaaggagatgagcctaaatcaggctccttagaggcagagggattgattgagggagtgctccgaggctacacctgaagggagtgagaggagcaacatggaacaggggaagatgctatgcaaagacaggaaaaggcagcctgcacctgatcctagggggctgtccagagtgtgaattgtaccacagagtgtgtcctgccttgaggcaaggaggatggacttttgcatgcccccacccatctgacagtcattggctaaggcatgtggggcaaaaccttttgggcatctccaggagagaagcttccagttggtaaaggatagtcctccagagaagggtacacatatgagctgttattaactgacacccacagcagctgcaagatgaggacatcagcccagtaaaggcatcggggtgagataccaacagcatataccacagtgatggtgactggggagctgaaggcaccatctgggggcagccatcatggtccatgtgccggaagagctgaggaaactggtcagaaaatgagaagagaatgacatgagagctcagaaaggagcagaggtgagaaactacgcagtttgagggagagcaggagagagaatagagagaggaaagaagagagaaaaagggtgagaaaaagagggaggaaaagagggaacaagggagagcaaaaaggaagaggaagtgaggagggagggatagtgagaggaagatggggaggtacagtgttcctcgttgagttacctggtaaccagactctgagaagttactgtacagacattaattcaggagtcctcttgaggtcatcacctgggaaggagaaaatggaaataggattgggtggagggaggcactgaactgtgacaaaattccaataaaagcctcaggcaacctggtagctgctctaacttgagacaactgagctgggatgtcccttctcagttgtctcaagttagatcaaggggaccaggtctttatatgtatacagcctccatgctggttagcattggattcagctccctgcccttgaattcctcaagggatgatatggtttggctgtgtccccacccaaatctcatcttgaattgtaactcccacaattcccacgtgttgtgggagggaccacgtgggaggtaattgaatcatgggggagggtctttcccatgctgtttctcctgatagtgaataaacctcacgagatctgatggtttttataaaggacagttcccctgcacaagctctctcttgcctgatgccatataagatgccccttgctctaacgccataattgtgaggcctccccagccatgtgaaactgtgagtccattaaatctctgtttctttataaattacccagtctcaggtatgtctttattagcagtataaaagcagactaatacaagggacttctataaccttctaacaacaacccatgcacacacacattttgttttgtttcaggttagtttgaatggatttctgtacttgtcacaaaattatctccaactaattcagaaggtttaggcataatttactgtaatgtagatatgatggtaagtactaggtatttccatcctttttctttccacagttcagactgtataatttctattgctctatcttcaagttcattttcaatgtcaaatgtcttcaaaatgtactattatttcaatcagattaatgcttctaaacttttatgtaaaaattccaatgtatgaaaatttttgaaccatcaaaattttataatttccagtgtattttggaccaatatattgtgaaccaatctttttggaaattaaaaaggaattactagaaaaacgatcacacacttggttgatgtggtaatgtctcaagttctgtacttatcccaaactgattccaaactctccctggactggcattggtcccaggaccacatctatatgtaactgaaacaactacagctcaactcactcaactcggctcttatcattacatatcaatcataatgtgggatataaggcattttaatatgatttctatcaacagcatcagggcctccagggacaacacatttcaagaagacctaaaatggccctagaaagtcctgaaggtggagttcaagatctggcctgttttttcgcccactcctgcatcctctaccttgcccacactccagttacccacacaatttgccaatctctattcatctaagcactgacatgcttccgtgcttcagtggctccaaccacccagaatgccctttccctgcttttctagcttttgaaatcttagtccttctcaaccaactagttaggtgtgatttctccttcctctgggtttcttggccccttgctttgtaccatgagcaaggctcatgtttcacttgaccttgcattatggttagctgtcaatatatccatctgtccc

SEQ ID NO: 6980 - DNA, 12132 bp, Homo sapiens
gcttttatggtataatctgatatttaaaacttctacttattattattatatttttcacattttatcttctcttccaataaattttagttttcattttcattttgatttgtaatcacagttgtaacaattatttaaacctaatagatcttagggttcattgccagatctttattaccatggacatctcctgttgttgaattccttgttttgattaatgtcttaattacaaatatgaaaaatttaacacctgtttaatcttcttgaacaacgtattctgctttatcgcactttgcactttgtttcttttaatatgaatgacaacttggccctgctgttgggttttgcagaggagacatcagatatcagcttgatttttctctttttttttcatagataatctgatatcttctgtttggatgctgataattcttcaccatgaaattaaaatatatgtatgtatgtgtatatatatatgtgtgtgtgtgtgtgtgtgtatgtgtgtgtgtgtatatatatatatatatatacatgcctactgagcattttgactttcagacttgggtctgtcttctgtgttaagaaacttttttttgttttcgtcttttcagttaggtttattctgaattggctgcctgtcctctatatctgtcatctttttgtataatctgtcttagacctcacagtatttctgcttctgtatttttttcctcttcattttgagagtgctttctaaatgtgcccttcataacacatcttgtttcagaaataagttctcttgacttttactgcagacatagaatagatggtttctccaagttcaattatcacaatatcacacgagttgtttactgagcacagactgtcctctgtgcactgtgctaagcactttgtgtgcattacctcagaacaactccaaggggcatgtgctttgtttgtcctcattatatagattggggaaacgcatgtccagagggttgagccctactcagcctcatctgggtactgactgggggccaggactcaggtccagccagtttcacagcagagcctgtgctcttggccatgatgataatggcactttcccacccagtccttttttttttcaaatttatttattttgagtgctgcattctctaccttttatagttaagaatgttttcaaggtctggtgggaggttttcgtgttttgcatccatgaatgcagtcagtgtttgcctgtaaatagggagggtcaattctcttgggctcctctgctgtgcacctcattgcccatagaatgctactctcggatcttgcactagagcactggatgatgaagtgaagccttgcagagacctgtgagtctgggtgagtgagctggaaccatgaatagttccagaaggggaacttaatcctgtgatatttcttctctgtgtttggtaaagccactgcaccttgtgccaactgtttgcatctggcttgctgtttaacctggccaacatgccaggtacaaactgtgcttggacttgtcctccttcctggagctgccacctgctgtgtcagggacaagcccctgccctggccagttttcttctggatgtatctgccatgtgattcccagggcttctcagagctgctgctgctgctgaacactgctgtgatccatagtgaccagggagtcccggtgcctgatacttggctcacctccctgttcagccctactgatgtaggcagctctgatgtgaggttcttcaagggcctcactccttgtttcacaaccatcctgccgcttctcagggagcaaagctgcccaaggggcctccctgccttctctttttctgcataactgatttttttttttcagattcctttaggtttttggcacattgatggcacctgttcctagtttgctgagctgtggcaggttttccaggcatactggatttgttttgattttgaagcaggaatctgggcaggagggcattgcatgcctgagctcttgttgccatggtatttgtaaatggacaaatgtaaatgaagccagtggcagcatccttctccctccactgcccatgctcctgagtgtgggaattgggggacaagtcactacttcttcctgacttctcctttactcacctgcaagttagccacatcttccactttctcccttattccccacctcaaatacaaagtcctaggagaagaggactgggagcactggatttgatattgaattggagaagaccattacaacctcagattctaagattctgtgatagcatctgtcctggtgatctaagtcgggttaaactcagctctcttttaggagatcaagaggttttataatataggttgggtcccctgccagttcttcttacatatcacacagtcttagtttggggacacagtttttggaagcctgtctgcgggggttctggaactcaggggtggatgcaagaaagcagcattggttctttgtcacgaggtgagagcaacagtgtcaggaatagactctgtgagctcacccaccctcaaggggcatcgacttccagtgcatcactttcaagttcatctgtgtctggccataggcttggtcacatgctgaggtttagtgcatgaaccatcatgtctactgaggtacctgacactccagaggcattcaatatgttatgcaaatggccttcatgcccaggctaattagggagtccccattggactttgattattcataaaagacagttgataataaagccctggctgcttttgaaaattcatcaagtaagaatgcagggtttttccagtgggagctcagacaaaaagccagtggaaggacacaataggatcagtgctgaactcccatggttagttcgctctctgagatgcatgcacagacctctgcagaggccttgggcaacactggtccttttgttcgcctgggtccttttgtttgcctggtcagcagagtagagggtggtgtcctagtgaggacaaaggattcaggaagagcaaggtagtgtgggtaggggctggtaaggatggcgagtgggaagacaatgagcagagctttggagagcagagtttgaagtacttgtgggacaccaggtgaagacagccaggtgacagcaggagccaggtgtcctcaggctcttgctagtgctgtgtcctggtcaacacacttaatctagctgaacttcagttaccttacctgtatgtaaaatgaggatgttcatagctccctcacagtgatgttgagaaatcaagtaggtaaacaaacatggtatatagctttgggggcccactggtctgacagggcgctcaacctgtcctctttttttttttttttttttttttttttgagacagtgtctcgctctgtcacccaggctgcagtgcagtggcgcaatcttggctcactgcaagctttgcctcccgggttcacgccattctcctgcctcagtctcccaagtagatgggactacaggcgcccgccaccacacctggctaatttttttgtatttttagtagagacggggtttcaccatgttagccagtatggtctcgatctcctgaccttgtgatatgcccatctcggcctcccaaagtgctgggattacaggcgtgagccaccgtgcccggccctgtcctctctttcttgaatggtgctccttctagagcattccttgtaacatgcatgaggtggtctcttatcttgaagacccgcacctggtgaggagggtgacagacaggattctgttgtcaaggaggtggtaggaatggagtccagggtgctgctaagggagggccaggctgtatggtcaggtgggcacagctgcatggaggatgcttcaggggctctggagaagaaatgagtgacagagctttcaaggaccaccttctaggggtggggcttccaggcctccaaggagggctctgtgtctttatcagaccgatggctgcccagaacctttggcagaggggctcagcctgccttggtgccagtgagcttccacacaggaagacttcctgaggctggtggctttccatgagcaactacagggaggaaccgcgggggtactggtggctcagtagcctctgcttcctctgagggaatggaggggtcagtccctggtgtgggggtctcttccctgtcctctgctcatcatgaggctggctttcctcttttgcccaccccttgggctgggaccagagcacagccagtcaccagtatggtggcccagcacggcaggctgtgcctgtctgtgtacacgccagctccatgaggtggaagctttggcaatgggctcccagggagcttccccgcaggcttctcaggggaatgtgttgggagtagatgcatggagagttcgttttttctccctttcatgaatgagaaaacgggcagagaaatcacggcactcattggccgatgtttctgttggtgcagattaccaagggtgctgaagtcaaaaggagtgagccacagtcagccctctgggtggttgactgccactggggcctttagaccaggaaggtgtcgtgaccgaggtggacctggtggtgagatgcaaggtgtggcagcctgatgcggaggtagcagaagggagacaggccaagtcagggcagccggcaaggggcccatcacagagcagtgcaggcgggaggccacaaaggcctgggctggggtaacgtgggggctggaaccgggaagctccttcacacattgagcctacttcttgggactctgttccagtatattagtaatgttaggaatttcagtttggctttttaaaaagctgtttttcctttgaggaactcaaatattattggttgaattgtgtctccccaacagataatgaagtcctagccctccgtacctgtgaatgtgaccttatttggaaataaggtctttgcagatgatcaagttaagatgagatcattagcgtgggctctaacccaaaataactggtgtcatatttataaaaaggggaactttggacacagagacagacatgcacacagggagaatgcctataaagatgaaggcagagattgcggtgatgaatctgtaagccaaggaaggacaagaaaactaggagagaggcctggaacacatgtgccctcacagccctcagaaggaactgaccccaacgacatctccatgtcagacttctggcctccagacctgtgagacaatgcatttctattatttaatccaactcagtttttgatactttatgatggcagccccagcagacgaattcaccaagcttcccggatcccatttcttcactctctggaaaactgctccctctggtgtctgagaatcacacgtatgacctccctgaggggctcagggttggcaaggcctccccatctgggtggtgaaaggtgctctctgggctgcaaagaatccagacagctctgtgagcagcggctgccaattcactgacattgactgactctggggactctacccttttcatccccatgtgcccgtttgtccagcccctgcagaaacccctgtggggtctggcagtaagcgaggctgctgttccagggaatgtgtgtgctgaggctagccaggcagctgggctagcctcctcctgcacagtccttcttaggaatgtcctaagtacctattcagccctggcctgaagcaaaggaggcactgggtaatgaggactgggaccccattgctcatggtccaattggcgaaatgccagactaagcacagatcacttttcaaagtcaaaggcaacgtggtgagtttctttggcattaaaagtcctctcccatggttatcccattctgagtagccagttgtgtatttattcacccagccctgtgttgcggttattgtcttttgagtgtttgattctatcccctttatatgactcatcagcccccagaaagcaaaggccctgtcttgttcagcctggcacaggggcagccgaaattcccacagggctcacctccttcgcctctgcctgagatgtcttatcagcgtcactctcattctgcaggggaggaaaccaagactccagggtggagtgattggctgtatgtttcacctgcagccamgcgaggcccagaagtcttccagtgctttggaggttcacaagaaatatggtgactcaactggaaccacattagaggtcagcatttaacaggtcccctcaattttcccacaagggccagtcttgtgtcctcggctatgaccatgagccactggggaaagagatgctctcttccctgcagctgcacggctccccgtgctgggttggccacacactccccacccagtgcacctccgttgattgattgacgtggtgttaaacatgtggccttttgcaggcaactctaggagggtgatgagctttgcaaatctgcccagtgcctaaaactgaaccacacacataattcactcacacgcactcgctcagttgggcttgcattctcactgccatcctgcctccaactcacgcttgacgcctcacagttctggacttctcttctaccacacagcagtgcctgccctggctggccagtactacattcctgacctttgggttttgggtccctgggggcagcttgctgccatccgaaccaccaggccctggccctcagcgaggcttctccaagtgttctgctgccttacttctgctttcgaagcaccatgcctgtcctggggtggagtcagaagtcagaagaagaggctgattagccggggtgcccttggaggggccagggtctcctgatctgcagccagggctctgcatttaggaagccttgtcagaagcctgcaattggcattgaatctgtttagagtgctcaacctagtgccaggaactgtgggaaatctgaagacatgatcagtttccagagagtcaagacaaccagcagaggattcaggttaataaacttagacttgtgttcagctacctggttcaaatccccattcactggctttgaccacaggagaatgatttcacttctctaagcttaatttctttgtaaaatttcacaaggtattatgagcattaaatatgataatacatgcagaatgctttagtacattgcataacacattgtaggcactaatacatcttaccttacaatactctggcctctcctctccactcccatacaagcgaggactcttagacagtgcctgtcatgtgccagacatctgtaaagggatcatataagcattaactcatttaatctttacaggaactcagggaaagactgaggcacagactgaggaacttgtccatggttccaaggtgcagaaccagggttagacctagaccgtgaggctcttgcatctgtagtcttgcttagagcactacttgcaaagaagccttgggtaacttccctatacctccatttcatcatctcgaaaatctagatgatgatgataccagctaggatcctcaggaaagttccctgaacttcattaagggcttagaatgatgcctggtgcatcctcagtacagagtaaatgcagtggcttcaataagaaatacaagtacacaggtggccaacaattcaagctattagatgcagaaggccaaggaggtgatccagctctttcattatggggaatcagagcatgcagatcagcaggggctgggttatgagagatgaggagtgggctgatccaaatgagaggtcagcttgagcagaggggaggatgtgggaaggcagagagtgtggaagccatgtgttgggagcagggtctgagaacatcaggttggggacagcccacgagggaccttcattagcagtgtggattttcacctgcactctgtcggcaagcactgaaggttgtcattagcacactggctgtcacagaccagaggggcttcccattcagtcaaatcttgctgcccatccccagtgaacggagcagtaggcagtgaggcgggaccggcagggcgtacaagatgctcgcccattccctccatttgaattgggcttgggacatcccaaggggctgctgcctgggccctgaacacatctaagggctatgggtttatggtctttcagctgctgtttatgtcacaaatgcctgtcacagaaggggcattaaaaataaccgaatggctaataccatttctcaaaataactacttgcaaagtgctttgctggggcgaatggctactaaaattagactccctggtggtatatgtagggtgtgtgtgtgtgtgtgtgtgtgtgtatgacttctaaacccatttccccccagggtgaggcccacagtttgcacccttttgttctgtggccccttctgtcatagctgggtgtcccagaacagtgttcacccagtcaccccaagatgccctctttcatcctgcagtcctcagcaaattggagccactgccctacattgccctgttgtcctgctctaaggagcagaattttgaagaatcttggagggcggggtggcctcattgtagcagtggcctaattccttggtgtgccaggtaataatagcacgccgtggggggaatctcactcagcatgctgtccgaggggaaactgggccatggaacaatgtggcagccccactcaaggtgacctagtaactgagggcacggacacacgattttccaggccccagttccagatccaggctctagaactcttcagtggtctcctgggccagtcctttgggccaccaggcaaccaggtcactcaaatccaatcaactctccatccactaataatacaaaaggaaatgtgggatcttaagagcaagttaagaaaacaaagtgaatcagcactgtgggggattttggattcaggacaaacaaaacctgagagccagcgttggttttcttttagataatgacttgcacggaaagaggtggacctcagtgtctccatctttgaaatgggggaacactgagttatttagcaaccatttattgagggagtgcctgatgtgggcctggctcctacagtagggctgattagggctcctacagtaggccctggagttacaaagagtggttcaaggtaaaagcaaggtcaagatacatttacaagccagtgtgttgtctgtacgtggcagccctataaggactggggttctgtgtggtcctagagatttcggtcctggagatgaaagactgtgagtatttacctggaatggaggcccagggaggaatgaatttccctactcctgtgagagctgtatgtaaatagactgtttctgtgttggaaagagcacaggcagagtctgtgactttaggcaaactgcctaatttcttttcaactgctaaatgtgaataagcacagcaccaacctcctaggtctattgtgaagattaaatgacataacctagtgtggtcttagcgtgttgtaggcactctacacactctatcgttagtagtagtcatattaatattaaactagcaaaaactgtttgcccaagaagttccagtaaatcattcccttcaatcagggtgatgataattttattttttagtattattaagtcattgctgtctgtaaggccatcaaagagctggagccacttgctggaatcaggctaggtcaatttctgaatgctggaatgaggttgaggggagtgaggtagaggatacatttttaaaaagtttacatgtaatcaaaccctggtcattcacatctcctgttagattcattatgggagttggatatttaagaggaatctttgccacaaattcatgtgtaaacccaataattctcgactgttaaaagtggtgggagccctagatattaggatatagggtcatttaaccccgtggttctcaaccaggcatgattttgcctcccatgagacattggcaaattggggtgggtgctgctggcatccggtgcgtagcggccagggacactgctcatcttataatacacaggataaccctcctcaataaagagtaatctggaccaaaatgtcaacagtgccggggttgagaaactctgtcctaacctgaagatgagacaactgaccaccaggaagggggagtgacttgctgaggttaggcagcacagctgcaccagagctgggatccaaagtttgaatcaattgaccagaggccagaggccagacagaaccttgatactgtcatctcacctgtgaagtaaattatcaacctcacccatgtgaatgaggccttactctatagtattttcaaggctctttctcttgtgatattaagctctgctttggaaaaaccaggttttcctattctgggcttgctgatagagtaaggatggtagattcagcaaatgaaaataaggttgtccaggccaggcgcggtggctcacgcctgtaatcccagcactttgggaggctgaggcaggcggatcacctgaggtcaggagttcgaggtcaacctggtcaatgtggtgaaaccctgtctctactaaaaatacaaacaaaattagccgggtatggtagcgggtgcctgtaattccagctaccagggagactaaggcaggagaattgcttgaacctgggaggcagaggttgcagtcagccaagatcgtgccactccactccagcctgggcgacaagagtgagactccatctcaaaaaaaataaataaataataaaaaataaataaataaaaagaaaataaggttgtccagttacatttgaatttcagataagcaagataggtttttggtttttagtttttagtttaagtatgccctatgcaatatttgagacatacttatgctaaaaaattatttcttgtttattctgaatttcaaatgtaactggcaccctatcttttgtctgtcagccctgtgagctctacccatcgccctgagatcacaggtaggccctggggtcatctacccctgtctgaggctcctgcaacccttatgaccccctctgcctagagggggaagatgggaaggggcaggtgggccttgagtggagcaggcattcctagctcctggcctgtgggtgcctgggaagagccggctagccacactgggctaaagggcctgtaagttgagaggttggccaaactgtccctttttataacaggagaatggtttaaatgaagtgtcagcaggtgacctatggccctggaaaaccaagtctggagaagttgtggcaactttgcccctgattggggaacagagtgtcctctgcacttctactggtttccagagaacatggctgccctggctgaggagcacttggacatggtaccttccagggctgaggtgctgtctcctcgtcacccctgggctctgggcctgccccaggggccagagttgggcggttgttcctaatacagggggaaatgatgggcagggctgtgcacccacagagctgctgctgagccggcagctcagcctttttgtttagaagaggcctagatgtggagcctatcaacagatcagaaggggatgctggctcagctgctccctcaccttgccttatcccacacccctttcacctttgcttccttaccagcccagacaccaggctccaaaccagtcagtgctcagggtccggcagccaatggcacaaggtgggtggcccactgccctgccccattccctccgcctcccaatccatggtccaggctgttgctcccaggtgtcaggatgccatcccccttccccagagcagcttcctgctaggaaatctcatcctcacagctcctcctaaagggcagtcagctggccacagccacaacttggtggcctttcttcctgttggctcagaacagcctttgagggtctttgggagtaactgcttagggactcaccatgttgtctgccatcttgtcgacatcgttgggccacctaatgaccagggctggctccacctggcctttgctgcatgggtgcttattaataggcatatattgaatgaatatatgcctatattcacagagttgaggacagttaacccatattgcagaaggtgtctgatgataaaggctgaatgaagtcattggttctcaaacttgagtgggcattagcatcacctggatggccttgttaaaacgcacagtaccagcccaacctggggactcctgactttgtagttctggggtagggacaactttgcatttcttacacatccccaggtgatgttgcaggtccagggccatctctgaggaccactggctta

SEQ ID NO: 6981 - DNA, 44851 bp, Homo sapiens
gaatggataaaatgattgtaatgatcgtcctttcaatcttttccaccacagagatgctaacaggcctttcttggttttgcctcctttaggggaatgtgaccctgaaggagctgaatgctcgccccatggaagtgttcatgtgcagtgtgctcaagaggcaaggttacggcgagggtttccgctggctctcccagtatattgactgatgtttggacggtgaaaataaaagagttttacttctctggactgatcctattcacagcttcctcatgaacttttctaatagaacaaggaaagctctccaaccatgtctggcgttgagaagccaagagtctctgtcaactctctcattgcccagtggtgacatgtgctcttctccacactgttgggaggtaatgctgccccacgtgctggtgcaggtcagtatcctgggacttggaagctggcaggatttgccgggtaaagctgtatgccatcatggggcacctgaaaagaaaaacacgtctcaccactgtggttgattcaaaagaaagtgattctattttttaaagaaagcgttgttaatgtaattggtatccctcctaactttttgagttcacaatttacttggtccagagttttctattcttttttttttttaaactaatgaatgacatttagatacttcataaaattatgaacagatatggaggccagagctcatttgggtaaacttactcctgctgagttagcaggttggtgagagaagctcccctgagctcacctgtctctctgactgccttggagtaggtggcataaccttgtgcacagagaactagaaaaggggcagaaccccggccttgcagttgtggcaggtttccactgtggtaagctaggttcattcctcatcaaggaatgtgtagcagattgttcactgtggaggagttaattatagaatgggttattgttgttattcttactcatgaagttacagattttagccagtctttgcttttatacttttgtgaaatttaatttctctctatagcaccttcctttttcgttttcagttatcaaaagtgactttgacctcataaaagagttgagaacatctctcgtgtcacatactgcaggtgcatcagttacttttgcacagattctagggggacatttttctgaataggaagacaggacaaagttaacagcttaagggctcttaattctgtgagttgaggacttaaaagtattgtagcatttgtttggatccatgaaaaatgtattcagtgggctttaaaatttccatttgcagaatttggtctctcaggctgtttgggagctcttttttttacattttttctcctttgacacctattttattggtgtttaaagtaaaggttaacatctgtagcttttccaggtttttttttttttttttttttttttggtatgaaattgtctttctccattgcagaaataagctagggaaacactaacccaaaaactttctgtagagctgttcctttggaggcagcatcacttattggcagtaaagactcagtataaaagcaccggcatccctacttgggtgatggggattaattttatagcattccattttcctagtgccacatgtgaaattggattttgatgatcttaatctatattctacccttataataaaagatcaaaagatatatctcctatgaacagattggagataggagatgaaaagttgggaggatgtctttattctaatgtgagggtagggaaaatgtggataacattactggggtgaaggaggcattgttctttagttggagttctcatttttattctccagtactgacttgtggggaaagcatactttttcactgccaggtactgaatgcagaggctcagtgaagtatatatgtgggaagtgcatgcatttcgtttattagcaaacatagctggattaagacaaagttgttggtttggaaaggggttaaagccttaagtgaacaaatctagctaacagtgaatgaactaggtaatataacttgcatatttttaatttcctttggttaaaggtcccccatacttctctgttcggagacatgagaagtatgattacttcagtgttagttttcttaattttttttttcccctatttgtcccttgtcactttgttgcaagctagaaatctgtgggttatacatagggcagctctttgtgaaagtggtttattccactggagaaaggggattgaaaatcagttagaaccaatgtatttcttgccccacggaacactattcctataagatagctgaaagaagctgctgtgaggagctcagctccaaacacaggatcagcaccttgtataggaattcccatgaattatgacttctcattctgttttatcagagtgcatatatgtcctacttcaggaaaagtaaaacagtcatttacgaaagaaagtcaatctgtatcctaagcattttaataaaaagttaaaacaaatacgctatttccttttttttttttcattggtttgttctgagctctgagtttgaacaatgccgtttatttggggaggcaaccaaaagttccctgcatagaggaagagacatttagggtgcgtgtgagatacttgaattttgccaccaggagggggaaaaaggctggggtactagaagtaatagatttagtactacttgagagatttggaacatgctgtggacccagggttgttggtcatctctgcaacaggatggggatggcagatgtttgagcaaaatctatattaacatgctagcaaggactagttctagtttagctgtgtttcactcattttacacagaattagaattggccaggtgtggtggctcacgctgtaatcctagcactttgggaggctgaggtgggtggattgtctgagctcaggagtttgagaccagcctggggaacagggtgaaaccccatcactactaaaatacaaaaaaattagctgggcattgtggtacatggagtagctcccagctactctggaggctgaggcggagaatcgcttgaactaggaggtggagattgaagtgagccgagatcatgccactgtactcctgcctgggtgacagagcaagactctctctagctcaaaaaaaaaaaaaaaaaaaaaaaaaaatcaattaaatgctacatttggcaaaatgagaaagaaagaatttcctttactaggcttgtaggaagcctgcttttacaaaaacccaaatgagatcataaaactaaagtactgggacaaacagtgggaaacagtgcaatgggttcttttcaaccaagtattaaagtattggagatattgccgggcgcggtggctcacgtctgtaatcctagcgctttgggaggccaaggcgggcgggtcatgaggtcaggagttcaaggccagcctgaccaacatggcagagctccgtctctactaaaaatacaaaaattagccaggcacggtgggacgcacctttaatcccagctactcaggaggctgaagcaggagaatcgcttgaatcggggaagcggaggttgcagtgagccgagatcgcgccactgcactccagcctgggtgactcccatctcaaaaaaaataaaaagtactggaggtgtcctgttgtccttgttactgtgaaaggatgccatgggttgtatgggcaaatgagttggttttgtttgaggcagagtggaaaataagattaggctcagtccatgagcctagcactcaacagatcttactttggcgttctggctgtgacttgggacttctttttaccatggtctgctgtaaacacagaaaaacccaatgcctaacagttcatgctggagtcttgagcgttgagggagaatcactggactcgagagagaaagtttgtttgtttgtttgtttgtttgttttttgagttggtctcactctgtcgcccaggctggagtgcagtggtatgaacataggtcactgcagccttgacctcctgggcttaagtgatcctcccatctcagcctcccaagtagcttgggaccacagggttgcaccaccgtgctcagctagttttcaaaatttttgtagagttaaggtctcatcatgttgcccaggctggtctcaaactcctgggctcaggaaattctcctacctcagcctcccaacgtgctgggattccaagtgtgagcccctgtgctccaccaagagaaaaactctttgattgctaggaagttgggataaagaaattgtgctgtgatcaagccaccttctgtgtcatagaaccaaaagaagaccgcctgctatggcaagatggcctaattttattcctgcctcatactatcatggataatcgttttcctttctctagcaggtttgtgtcactgggagtactgggagcattatcctgtgttgtgctggggttataccaagcagtgttaactttatttaaagaattcaggcagaaagattagagaatttaagtagcaattgtatatggtaagcaatacagtaaccttaataaaaattaatgatggccgggtacggtggctcacgcctgtaatcccagcactttgggaggccgaggcgggcggatcacaaggtcaggagatcgagaccatcctggctaacacggtgaaaccccgtctctactaaaaatacaaaaaattagctgggcgtggtggcaggcgcctgtagtcccagcgactggggaggctgaggcaggagaatagcgtgaacccaggaggcggagtttgcagtgagcggagatcgcaccattgcactccagcctgggcgacagagcgagactccgtctcaaaaaaataaataaataaataaaaaataatgtgtattttatcaattcagtgataaagcagacctttgtaaactgtctagcttgtggtgactgattgagggtatcatgaagctccgcgcccccccactccccgacatactcgttcatcctcctctgtcctaaagcgtacttctttggaaaagtagagcagtttatgttagtgtacactagagatggtaaactatgccttgtgggtcaaatcgggcctgctgcctgtgtttgtatggcctgtgagcaaagaaaggtttttacatatttaaatggttggaaaaaatatttaaagaatgctatttttggacacaaaaaattgtatgaaattaaaatttcaatgtctgtatctttttattgggacacagccaccgccattcctttagcttttgtatgcaacagctgcagagttgactatttgagacacgttgtatggtccccccaaactggaactgtttccattctggccttctacagaaagtatttggaccctggcctagataaatcctggctggtggttatgttatgtgaaatgtgcacactgtaaaatataggcctgtatgattaaaatttttgatttcagctactgttcatagtcgatttaaagggcaatttaatttacagcaaatccagtttctcggagatttgtgttggggctttggcagcaaaaaaaaatcctaggagtaatcttgagagttccatgccccctagtggattgctatagggtttacttttaaattttcaaaacactgaattggccaaggatttccttggtccatattatcccaagggtcagaggctgaaggtcgcctagacctgggcagatgctcacaggtactgtcgtggcctgggcaaatctaggcacgtcagcgctcatttctattccctttcccacattccagcaaacgagactaggcttgaagggacccaccctcctctcctctgattcctcgtgacgccgcactcctcttactctccccggggctcatccgggggaatggggcagattatgtcccaccggttggacaaactaacgagggcggggaaaggaaaaaaaaaatcagaataggaagccaatcagagctcggtacaagcccagccaatcgggtcgggtcaattggggcttagccaatcgggctcgatgaggaagacgtgagtcagagcttgcgcctctcgcttccagctgtgggtggcgctaggcagcttcagccggaccgggtaggggtcctcgctcgctagcttgctgtttctcggagaagctcccgagtgtccggcctagaggccatgagaaggcagtgggggtctgccatgagggcggccgagcaggcgggctgcatggtgarcgcctcccgggccggacagcccgaggcgggcccgtggagctgcagcggggtaatcctgagccgtagcccgggcctggtgctttgccacgggggcatcttcgtccccttcctgcgagctggcagcgaagtcctgrccgcggccggcgccgtcttcctgcctggcgacagttgcagggacgacctgcgcctgcacgtgcagtgggccccaacggccgcgggtcccgggggcggcgcggagcggggccgcccagggctgtgcacgccccagtgcgcgagcctcgagcccggcccacctgccccgtcccgcgggcgtcccctgcagccccggcttcctgctgagctgctgctgctgctgagctgcccggccttctgggcccacttcgcgcgcctcttcggggacgaggcagcggaacagtggcgcttctcgagcgcggcgcgggatgacgaagtgtcggaggacgaggaggcggatcaactgagagcgctgggctggtttgcgctgctgggcgtgcggctaggccaggaggaggtggaggaggagcgcgggccagccatggcggtgtcgcctctcggggccgtgcccaagggcgcgccattgctggtctgcggctcccctttcggcgccttctgccccgacatctttctcaacacgctgagctgcggggtgctcagcaacgtggccggcccactgctgcttaccgacgcacgctgcctkcccggcaccgagggcggcggcgtgttcaccgcgcggcccgcgggggcgctggtggcgctggtggtggcgccgctctgttggaaggccggcgaatgggtgggcttcacgctgctctgcgccgccgccccccttttccgcgccgcccgcgacgcgcttcaccgcctgccgcacagcaccgctgccctggccgcccttctgccgccagaggtgggcgtcccgtggggtctgcccctccgagactccgggcccctgtgggcagccgcggcagtgttggtggagtgcggcaccgtatggggctccggagtggctgtggcaccccgccttgtagtgacctgtcggcacgtgtcccctcgggaagcagccagggtcctggtgcgctccaccacccccaagtaagcccgcagggctgacgccacttcatccctttccaggtctcagatctgggtccagccctaatactcttgagtattgtgcaggcctttcttgtgtcacgcggatgctttgggcgtgtagtgggtagagacctggaaccctcccctcatcctttatacccagaacccctgtggggagaatctggggcaaggtgtcaagctcgaagcagctctggatttgggtactgtgggacaccctgaatccggaacagggcatctttgagctcccctcaaaggctgagtttcttctgggcagcttcactgtctgatagccctgcacgccatacccctcggttctctggccctttgaacagagattccctaaccctgctgcttctcctctgaaagtgataaggtcccagaggcccaggatggtgctctcctggggtaaggagatgggtatgttaattttatccatcttttagtgcttagccagagcttcccgtctgagtgaaacgtgagtttctacgtaatcagaaggtaggggggtggcccacgcagctgtacatggttcagcccagccttgcagcccaggcttttccaaatctcttcctgaatccccaagcttagccaggtgtgggtaacactgcccagttttgccataggtgtccccactgtggcctataggacagccatgactttatagggaagactgatgatgaaggtttgcctatggtgtgtggcccccaccagattccttccactccccccacatgccccttgctcctaaggagactgccaggtctgttggaagctacccctgcagagtgtgtagtaggacgcccctgtctgatcccgggcaagtcacttaacctgtctaagctgcctcccygggagttgacgctgaatgtcgtggaacggagcctgtcacgtcgtgtgctacagaagtgttagcgtgtacgtaaatagggacccagaggagtgaaaccatgtcatatctgacccaccaactgacgggattgttgtgggtatcaacgaggcagtgaaggaaagtgttgtgtttgccttggctcctcccactttgtttggtgttgggaatgttactgagcgtctctgggcctcagttataccacctaaaatggagataatgccagtgcctagtttatagggtcgtgaagactaaataaagtgatgtccacaaarcactaacaccaaacctggcccacagtgctcactaagtgtcaggttgattattcaggtacaggaagctttagagaagtagcacagtttgtcaaccacctttggagataccacagaatggttacatgacttgcccagagttgcctgctggtcgattcagggctgatamccagatcttctgacttttactgtcactctcagctccttgatttctcccaagtactgaggagtcagaaagctagcctgtcatttgtttcccttgctcccaggagtgtggccatctggggccgtgtggtatttgccactcaggagacatgtccctatgacatagcagtggtgagcctggaggaggacctggatgatgtccccatccctgtgcccgcwgagcacttccatgaaggtaaaggacgaagggcgcagcctgaaggagggcccctctgagctagggtgggcctcaggaaggagaatcagtgttgggcattctcatgaagtcagggtagcattggtcaaggtccttggaggcctgcctccctttttgtgctggtggggcacatggagtgccctgggaaggataatgctgcacgccctttccccgagtgcctgcagcaatgtagtgtgaggatgctgggcctttggggttccttaacacttcaggctggtcagagaggcatgtggcactttcaaggctccaggggcacgatttgggtaaaaggctttgtgatgctgccacataagtactgatgttgcactccatggaggcagtgtgatacagtgatgaagggtccaggggctctggatgggcatctttcctmtgccacytattagtcccatgtccttggacaggctagttaactatcctctgcctcattttccacgtctttgaaatggggctaatgcatcctatttctgggtgttgtgagggctgggtgtgacgttgcctgtaaagcacttacccccataccctgcacttggaaaaggaaggtcatggctgcattatagccatcatcaccatttcttttcacraagagacttcttaggagttccaggaggagatgggtgtgaattccacaaacatttattgagcatgtaggtaggtgttaggaactcctaaaagtcactgccccgcctgtccagggaacaaggactagggaacagcctgttgctcagaagtggtcatgcagatacagtgctaggagctcagtggagttctcagcctcttccagccaggggacatggggaaggctctctggaggcaggagtatctgagcagaaacttgaagggtggagaggtttggaatgtttggagagggtagggatgggagttagggagtgtgagtcctgctgtaacacaggtgtccccagcttcaccctccttccttccctggcaggcgaggctgtgagtgtggtgggctttggcgtctttggccagtcttgcgggccctcggtgacctcaggcatcctttcggctgtggtgcaggtgaatggcacgcccgtaatgctgcagaccacgtgtgctgtgcacagcggctccagtgggggacccctcttctccaaccactcaggaaacctccttggtaaccagctstttggccccctcccgccctcccacttgccagaacctcagtcccaccccatgagtgcttgtggccagccccagtgcaccctctgtctgggaaaatggtgggcattatgagtgagctagcgaaggtttgcaggctgttctcctgatggtggagagggacggatgctggactgggaggaaagagatctgggctctggtcccttctctgctactaatctaatctggtttgatctgtgaaattgaggagttggattagtcaaagcgtcacagactcaaaagccaacagaggctggaaagataaagcaaatgaatgagaagacaacagggaggggaggggaggggtctaaactgaagcgcactcgactcagctgctgcagactgtggccatgaaggaggatgggcctaacgttggctggtattctaatattttcacaagacatgtaaagcttttttaaaaaaatacatgtggccgttaaatcgatcaatttttaaattttggtaacattcaggtttttaaaaaagtctgtttagctgtcaaaaagaaaaaaacatgagttcatctagaaacctccaactccagtccagtctaactctccttgtttcttctttctcctgtagtgaaaaaccttgctcttgttgtctacaatatgtttacttatctgttccatcctagtatacaagtaaaattgtatttgcataactttagtatatttcctctaaatatttagtacttacaaagaggaaatattggagccgtaagtaatatttagagccataagtctaggcctggtgtggtagctcgtgccagtaatcccaacacttccggaggctgaggcaagaggatcacttgaaatgggagttcgagaccagcctgggcaacatagtgagactctgcctctatttttatttaaaaaaattttttttaattaaaaaaaaaagaaaggaaaatactaagtctaccttggagaggcctggcagataccacctcagccaagtgatcaaggtgaacgtcagaagtactccatacagacatcagatagctgagacactgggaaggacacatggcttttatggtattcttcccaataatgtgtaaccttaaacaattaaaagtaatggcaaaacaattaaaagtaatgacaaaaaccgcattcatttttgcaccaacccaatagtcatgagaaaacattaggtaggcctcaattgagggtcattctctaaaatcactgacctgagccagacatggtggtatgtgcctgtagtcctggctctgcaggaatctgaagtgggaagatcacttgagcccaggagttcaaggctgcagtgaactatggtcaccattacactttagcctgtgtgacagagcgagacccatctcaaaaaaataaacagygtttatttaaaaaaaaaaaaaaaaaagccaggtatggtggctcgcacttgtaattctagcacttttggaggccagggcgggaggattgcttgagtctgggagttcaagaccaagctggacaaccatagtgaggccccatctctacaaaatattttagggaggctgaggcgggagaatcacttgagcccaggaggttgaggttgcagtgagctataatcccaccactgcactctagcatgggtgacagagcgagaccttgcctctaaaaaaacaaaaacaagaacaaaaaaaaaactgtaaataaataaaataacctgcacttttaaaaatgtcaaggccacgaaagataaggaaagactgaggaactgacccagattggaggagatttgggagatgcgacaactaaatggaatatggagtcctagactggatattggaactgaaaaaggacattagtggaaaaactagtgcaactcatgtcaatgagttctgtagttcacttaataacagtattctaccaaggtatatgttttggttttgataaatattttttggtgacattagatacgaacataaaggaaagctggtcaaagggtatatagaattctgcaatatttaggcaagamttctgtatgtctgaaattatctttaaaaaactacacacacatccatgcaccgagcaggccaaacaaaatatgtctgtgggtctgtcattcattcattcattcattcattcattcattcaacaagcctttgttgcrcgcctacttggcacaaggcactgtttcaggtactggggagactgcatgaacaaaacmtcaaagtcctgcccttatggagctgacactaggtcgagagaaagataacaagtgaaataagtgaactatctagtgtgttagattttgagagtgttaaggagaaaacgtaaagccaggaaagggtgtgggcagcaggtgttcatgtctagaagctcagcgtctgtcaccacgtggggtggtatccagccctaccaggccctgggggctccagggtggagatggtcctcctcccttctccagcctttctgccccctggctcayatcctcttttgctctctgactcctcaacaggcataatcaccagcaacacccgggacaataatacgggggccacctacccccacctgaacttcagcattcccatcacggtgctccagccggccctgcagcagtayagccagacccaagacctaggtggcctccgtgagctggmccgcgctgctgasccagtcagggtggtgtggcggttgcagcggcccctggcagaggccccgcggagcaagctctgaggctgtgttaccacctttggaaagaagagtgacctttttctgctgtaggaagtgatgttgaggtgacggtggcctcaggattcagggcccagcccctgcaggggcccaggctgcctctcatctccacccactgactgcagactgggctttgggctctggggcaaacttctcttcagccccatggatccttaacctggcagcccgttttggggtgctttcttgagcccccagttctctgtcccctagcactagactcagctgtattgtttttccttctggggagcccactccaactgcacagaagttctgggcctgacaggtagattccagctggaaggcaggcccgtgcctggttttgcgtctgttcccctgagggccatcgtcatcctggagcttcaatggggccttggctcctgtctgcctctcagtcagagtcagggctgacaaaggactcagcttccttagcatctcagcagaaaccttgctctgaagaccagagacagaagggacagaaacaggagtgcctcctgctgtgccaggcccatgggcagtgcaggcagatccctgaaggtcagcactcctgggtcttcatatgccaacaggggcgctcttgacactgtgccttcattttccagcccacagcctgggtctcagggatcttgaggggtagaacatgtctggttggggcttgggaataaacatgatctattgaaaaacctctgtatttatatatcaaattgtttctttttttcaggagttgaactgggaataggcaagtaccaggcaaagaaacacaccctttccttttttttttttttttttctttagagctgtggtcttgctctctcacccaggctggagtgcagtgttgcgatcacagctcactgcagcctcaaactcctgggctccaggagacctcctgcctcagcctcctgaatagctgggactacagtcgcgcaccaccacgcctggctaattttttatttttgtagaaatggggtattgctttgttgcccgtgctggcttcagccttctggtttcaagcagtcctcctgcctcagcttcccaaagtgctgggattacaggtgtgagccactgtgcccaacccagaaatacaccctttctgtgctgttttctcagcagggtgtgagctcacgggatacrgtcctgccagactggccctcatagctggtcatgtgccagtcagagctgggtggggcttgcaggtcccggaaggtggtggtcttgacctggcagcagatgcttaaagaatgcctaaggtgggtggcagttggggagttcaagggtgaatgaggccagggcarcccccaggagctgaggccaactctttgagtcaggactgtgccgtgtgcccagggccttgcatgtgtgggccctcgagtgatttctactggcaggctgaaagccctgtgaggggcggctgtgggcggaggccacgcaggaagagtgcttaggagtaacttgtttctaacacctgtgtgctgagtgccaatgctgggtgtggtgttatgatatatattggttttcatccagcattcctgactcgtaactctcatagtccttgttccagtctttgttagaatactgggtatgttagggcttgggacaggcctctgacctctgggtatcctttcactaatgttcgcccacctttttcacartgggtcctaaagaccttcccatgagagggtctcaatcctaggggaaggaatgttgatgtcatgaaccttccataaaaacccaagaggacagggttcagagagcttctggatagctgaacacctggcacttcctggagtgtggcgtgcccagggagggcacggaagctctgcactccttccccttccctcattccttgctctatgtgcatctcttcatctgtatcctttgcgatatcctttataataaaccggtaaacataagtaagtgtgtctctgagctctgtgatccactctagcaaattaattgaacccaaaaaggaggtcgtgggaactcaacttgaagccagttggtcagaagttctggaggcctagacttgtgcctggtgtggttgaggggggcagtcttggagactgaaccctcaacctgtggggtctgacaatgtctctgggtagatagtgttggaactgaattagaggacamccggctgatgtccactgcttttggtggggaaaccccacacacatttggtcactgaagtcttctgtgttgatgattgtgatggcatgagagtagagggaaaacacgatttgaggagagtttttcctaaaacayggggcaatcacagaacactcctgggatggttgttcctccctttacagattaggaatgggtccagaggtcatggctagtttaagagaagttctacagtaagttaatggtagcagaatcctagatctgaggtctgactttgctgtgagagggagttgyggtgggcggggaggagggtttattcttgcacgtgtgggtactgatatggtttgggtgtgtccccacccaaattttatcttgaattgtaactcccacaattcccacgtgtcatgggaggaacttgttgggaggtaattgaatcgtggggctgggtctttcctgtgctgttcttgtgaccgtaataagtctcactgatctgatggttttaaaagtgggagtttccctgcaccagccctctctttctttgcttgccgccatccatgtaagacgtgatctgctcctccttgccttccgccatgattgggaggcctccctagccatgtggaactgtaagtccattaatyctctttttcatcccagtctcaggtatgtctttatcagcagcrtgaaaacggactaatacaggcatcaaggcacccacaggctactctggggagactgatgtgtcagcccattagtgcaataagcagggaagctctgtccagggaagagtatgtctgggggcccagaaggggtgggttaggtaaggcttcaaggtgattcaggctctgaaccatgaaaagagagttcagagtttaccaagtggactggaaacagagtgttccaggctgagagtggcaggagctgggacaaggaagtgtggcacagcttccttgtggagagaaaattggaaaagtgcaagacaggcccagggaccagttacagtggcttggtgagagagaagatggctgaggcaggactggtggtggtgagatcaagtgacaacacaggaggtagaactgatgagctccctaatttgagaccaggtgctgtatctcacgcatgtaatcccagcactttgggaggcttgaacccaggagtttgagaccagcctaggcaacatagcaagaccctgtttcttcaaacacacacacacacacacacacacacacacacacacacacaaattagccaggtatggtggtgcacacctgtggtcccagctacttgggaggctgaggcaggaggatggcttgagcatgggagttcgaggctgcagtgagctatgatcatgccactgcactccagcctgggtgacagagggagaccctgtttctaaaaaagaaaaacaaagatctaatttgggaccatgagtggcactcacttgccatgtcctgttagcctggtccctggatgcctgtgtgaagggagacagcctcataaaccagtccactggcctggaactcatgccctagcaagaagtgcacttctgttgtatttgagccattacatttggaatctattggtcattgcagcagaacttaccttcattaatatagcctctccctagctgggaacactataccaaaycatgtgttgggggagagaggaagaaacgaggatattcctctcttctttgaagcttacaaatttcgttggaactacgtatggaaaaggagaacatttaycaggctcttcagatctaagagttgcctgttcttcragtgggcatactgcctctgtttctctgggctcctgagatgacccagtaccttggagctcctccagccctgggagccagcagaaaagccacctgttgtctgtaaggaagtacccacaggcctggctgagctcattacagcagagagccagcaacgcttcctcctcttagattccgtcatgttagacaatctgcctgctctccccactaaccgtcaaagttccatggaatgaacttgccactttttcaggatcctaaccaccgcactttcctgctacctctggcacttggaatttcagagacaaaascccttttttaggcagcgagccctgattttcagttccaaagctatgggcactgctgagtgggaccagaggagtggtgtgcagtgagctacctggaggggttgcatgagaccatgtcccctctcctggatggaggtgtcttctggttgccaagaaagtattgagtgataatcagaaaaattccttgattttcatggtttgttgctttgtagcaggtcttaaggaaaaaaaaaaagtttttcatggtttgggacaggtccttagagatgggccacaccagccctggcacacctgagcccagtgttgggccacctcacacctctctcgcctctcttccagctttatctttgtcctgctctttctggagtcctttccttgcatcctgccagctggcatccccttcatccttgcacgcctaccttctacacaaagccttccatgaccwtcccaagcctcagggctgattccktgcagtgggcaggctgtagcctctctgttcacctctctgtgtcacatcttactgggtacatgcccagtaaattccccacaactgagattctgctttgcctgagcagtgccctctggctccttagggatgatgcttgctgaggggtttcctggctttaaggtcatggttcaggctgggctcagtggctcacacctgtaatcccagcactttgggaggccgaggtgggcagatcacttgaggccaggagtttgagactagcctggccaacatggtgaaaccccgtttctactatagccgggtgtggtggcaggtgcctgtaattccagctgcttgggaggctgaggcatgagaatcgcttgagcctggaaggtggaggcttcagtgagccgagagcatgccactgcactccagcctaagcgacagagccagattcgtccccctaccccccaaaaaggggtcatggttcagacctccattgtaggcccacccccttgctttactagctgagggaccttgcctaaattctttagcctctaggagcctaaatttccttatctgcaaaatggagattaataaaacttaccttgcaggacctttgtgaaaaaaacaaaaacaaacaaaaaaacttgagaagtcattcaaagcacttagttcgtgatcaataaatattagcttattgtttttctaagacgatgagtaggatttttcatcaaaaataartcattctggttgccttgggcaaaataatctgcaatataaaatatctataataaatggctgctgtgtattcattgctactgtgtgccaggcaccatgttaaaacactttataaaaatgatctcattgaggcctttccacaactctttttttctttttttagagatggagtttcgctcttgttgcccaggctggagtgcaatggcatgacctccgctcactgcaacctctgccttcctggttcaagtgaatctcctgcctcagcctcctgagtagttgggactacaggcatgtgccaccatgccaggctaattttttgtagagacagtgttttaccatgtttgccaggctggtctcgaactcctgacctcaggtgatccacccacctcggcctcccaaagtgctcggattacagacgtgagccaccgtgcctggcccttatccacaactcttaaagtaggtgctaatatttgcagtaagtagatggagatggcttatctttcgctgagttagcttggtctgatttgagctggcaatacactgccttccaggtcattgtcctgcctgtgggtctttgcacatccagaccacacttccttcctctttacctaaatctacctctttctcatccttggagagaagtatttgcacccttcctttgccctcagtctttcttttttattttttcatttcatttcatttattattattattattattattwtttttttgagacagaatctcacagtcacctaggctggagtgcagtggaatgatcatggttcactgtagcctcaaactcctgggctcaagcaatcctcccacctcagcttcccgagaagctgggactacaggtgtgcaccaacaagcccggctaatttttgtaggtctcgctatgttgcccaggctggtctccaactcctgggctcaaacgatcctcccgccttggcctccctaagtgctgggactgtaggcatgagccaccgtgcctggccatgcccaatctttcttactgcagttggtgatacatggtttttgttttctctatacatgtattttttggtggtgtgtttaatatctgtcttttcccagactgtcgcctccgtgaaagcaggaaccttgtcagttttctctccaagttatccctccaacgcctagcacagtgcctggcaaatgtaggagctcaacagggtttgcggaattattatgtgtatgtctgaaggaaggatgttggcagtgcgcccaacgtgtgaggggaaccccactctccaaggttccagtggctttaaaggtgtcctcgagaaaatcagagcaacagggggatgcttgttttccttccttccttctctctctctctctctctctctctctctctctctctctctctctctctctctctctcttttttgctttaaagtatgctgaaaggacactttaaaccaagtctgaatggctcggcaggactggggcgcgggtgctggcaggagccggagaggcgacatctggccatgggagcatttgtttcaaagttcaaggccgttcgctcagggtcaaggttagtccggcgggccgttcggagaccagccccagcgtgccaggaccgtttccggggcctggccggggcgttgccgcggggtcggggaccagcacgagtgctgagtcacgccccgcccgggagcgcctcgggtcagtaactcgggaagacgaccaagcgggagcgggagcgggagcgggagccggagcgagagcgcgcgggcgcggccgacaggtgagatcgcgccgccaggcgggctctcgagaccccgggcgccccgggcgggaccgggacccggaagaggggcgagcggattagaggcctggctcacgccgcgtctggcgtggggaggtcggtgcgcgcagttgtggcgctgcgaggagagggatactcgactcaggcccgcccctctctgtctcccccaaaaaacgcaacagggagatgtgctcctggccgagggcaaagaaaactccaccctcctggtttggcccctaaatccctgctaagttttcctaaggaagatgggcttaggccgggaagggcgaaccggggaagagggaacacggggcgggtgtaacccggatcttgcgaggaccgtccgagggtccgctgggtagaagcggccggtccggacagaagcaggtgtgagaggaaagggagaaacctcagtctctaagaggaaagaaactggagtcaacccagtgcccataggctcgggggagctggggggtgcagcactaggaagtctgcttctcccttcccgaagccctgggtgctgcagggacaaagaccagcggtgagtaaactaactctgatgggacgcgtgcagtccacctggaactgaattagtggcctatattggggctctccttccaacaccacctgatcaacacaccctacctttccctacaaggagagtctttttgaccctggaatttaaggtgaggatggggagtggtgaggtctcttgggggctgatgatcctgtaggaggacaggcatagggcagagagtcagatatagtttgggatgggacttgcaggtttctggactgtgcacctgtgttcaaaagcctgtatcaggttccagtgtgcgtgcatgcacctgccagagagccccgggatctcagatcacacctgccctcaccccagcacctagagaggagttctccaaggagcacagtgtgtcaccaagaagagggcactgagccccagccagggtgggctgggcaggcttagcactacctagcccagaagtgatgggctgggcaggccggtggactccagggccagcctgacttttgtctggtggccaaatgaagccagcgtccaggtacaggtggtgggcagaccatggggaccacaaaactggctctgaggaggatggacaaattgcttggcctaggttttctgtgcgggagtgaatatgacatccagatgaacctgtctgccccagagctgccctcccctggggataaaaggaggctgcctcccttagactttgagtcccttttcagaaactggtcttttgggggttctgttcttcaagtagtccctgaggggctggccatggagtgtcccaggaagggaggccgcccaaccgtctccatcctgctgtgtcccgcaggtggaggaaacctccatggtgctgtgagtcgtgctgtagtggccttcttatccgggacggccactctgggaatgtggctctccagaggctgatgttgaaacctaccctttgtgtgagccatgacgactcaaaaagcatcgtgttttatttgtaatatttgtgaagcaatactggagcaactctgggatgacattcttgctttgatcagagcccacacggttcctgctgtgtgtcttctgaggcacaacctctgaacagctttggcataaatgtaacttcctggtttttcagtagtcctatgggctgcttattgtggaataatacccttgagatcagggtggatgctcttggcagagaaaacaggattgactgagcaaatttttgtgtaaatcagattgtgtgtgtgtgtgtctgtgtgtatgtgtgttgtggcagggagcaaaggtaaagttactgaggggttccyggrcaatcagggtttgttccgctctcttaggccttcttttaagctaacattcttgaacctagacagacatagttaagattctctgtgattcccactggggctttggtgttcagttcaaaatcagatggtggatttagcagttcctcaaaaagttaaacttcaagttaccatatgacccagcaattccatacctaaatatatactaaagaggactgaagactggttcacacaaaaacctgtacacaaatgttcatagtggcgttattcacatagtcaaaaggtggaaacaacccaagtgcccgtcagctgatgagtggataaacaaaatgtggtctattcatacaccagtaatggactgtttttcagccaggaaaaggaatgaagcactgataacatgctacaactcggatgaaccttgaaaacatgatgatcagtggaagacgtcgcaaacaaaaagccacatagtgtataattccatctacatgaattgtctagaacagacaaatctatagagacagaaagaacattagtagctacccagggctagggtaggtggggtacaggatttattttgggggtgatggaagtgttctggaattagatagttgtgatggttgcacaacctggtgaatacactaaaacccactgaacttacatctttttttgaaatttaaattaaaaaaaatttttttttgagacagagtcttgctctggcgcccaggctagagtgcagtggcatgatcatgcctcactgcaacctcgacctcctaggctcaagcgatcctcccacctcagcctcctgatatcagggaccacaggcatgtgccaccatgcctggctaatttttgtattttttgtagagatggggtttcaccatattgcccaggctggtctggaactccggagctcaagcaatctgcctgcattggcctcccaaagtgttgggattagaggtgtgagtcagcctacatctcattttttttttttaaaagatggggtctcatctaggctggagtgcagtggtgcaatcatagctcactgtgaacttacatcttaagtggtaaattgtatatgtgaattctattttgattaaaaaattagatggtaagcggtctgtcctattattaaagacattatttctgcaaaaatgacatatgcttgtttgaaaaaaattcaaacaatacaaaagcttaaggaagaaaatgaaaacattatctatgaccactattagcactttggttcagacagcaggtttgatgtgttgagaattgaacttgggcaagttgttgaacttttttccaaaataaggagaaaaaactcataccttaaatcgaagatatgggcaaaagtgcaacagatgctaactgctgtaatcattacctgtatatgtgtatacataccgaggtggatgtgtcttattggccataaatgggattagatctttcatgtggttctgtggcctgactttttgggactgggcaaactaatctgcaacatatattttatatatatatatataaaacgtggctgctgtgtattcattgctactgtgtgccaggcaccatgctaaaatgctttacgtaaatgatctcattgaatcttttctacagctcgaaatcacagtggcttacccctgtaattccagtgcttcgggaggctaaggcaggaggatcccttgaggggctaggagttcaagatcagcctaggcaacatagtgagaccctcatctctacaaaaaaaaaaaaaaaaattagccagctcaggagttcaaggttataatgagttatgatcatgccactgcattctggcctgggtgatagagcaagaccctgtccctaagaaaattaaaaataagtaaataaataaataaatattgcctgactttttcttttcttttttttacttttgagacagggtctcacattgttgcccaggccgaagtgcagtggtatgaagcactgatccatgctacaacttggatgaaccttgaaaacatgttttgtgtaaatcagattgtgtatgtgtgtctttgtgtgtgtgtgttgtgggagggagcaaaggtaaagttactcactgcagcctcaaactcctgggctcaagcagtcctcctgcctttgcctcctgaagtgctaggattataggcaggagccaccacacccagcccttgcctgactttttcatggacagactttttgtataaaaacgtcattcacaggctgggcacagtggctcgcacctataatcccagcactttgggaggtcgaggcaggccgatcacttgaggtcaggagttcgagaccagcctggccgacacggcgaaaccctgactctactaaaaatacaaaaaacaattagccgggcatgatggcacatgcctgtagttccagctacctgggaggctgaggcaggagaattgcttgaactcaggaggcagatgttgcagtcagtgagctgaaattgagccactgtactccagcctgtgcaatagagtgagactccatctcaaaaacaaaacaaaacatcactcaccctttaaaaacaactggctacacagtactgcattgtatgggtttataatattttatcctgtagcctctcattggtggcagtttccattgattgatggagtgtcacacaggtggaggtttgcacagcactactgctatgttagaacatacaactgggcatccactaattccatacgtgcattttcatctcctacagggtgtgtggctggaaatgcagctccatggcttaagcccttgctttaggtgtctggccaagtagatcatggccaagcagaggggagttcactgttttctggggccaggcaagaaccgacactggcagagccaaagagagtcggcatgtccaagagtattgggcaaggggctgccaaagaggcagggtgaaatctgctggagagtcactggcctccctattccacaagtaagcgtggcaggggtcagtagaggagagagaagagagagagagcagattgcaggagaggcctcaggcagcctgaagaggaaaagtgcctcccctccctggccctgctctggtctgggtgtcccctcaggccccaggcccttcacagggaaccccagataagcaatttgccttccttgggtgaggcaagagtttgccctttcggggaagcaggttgatgatactaggggcctgggggtcaagggcttggctcctttggtcaactcattgcccctgaggtccactctggggtcactagactttctttccctggaggaaaccccatgaagggcccggagcaggcttgtatgtccacctgattgtcaaagctgccctggcatggcaggctgtctgtctgtcggcccctgtcacctgtcctctaagcctctccaccttctgccacaggtgccctgaactctacctgcctcctcccttcctgccactgggcctctggcccaagttgtttcctctgctaggaaggccccctgatctcagctctttttcagggctctaggctgtcctttttgagtgtccctgggtgctccagtgtgacctgacgcacagtggactcccctgtccctatccccggccagctgcgtagcccctctcaggggccatgcccagctaacttggaagtggggctttctgggtgttttcttgacctcatccctggctgacagccccaagggtaagacccagcacagagggttgcacgctgccaggggctggtgaaacacacgccacccacggcctgcctcatcactgcctacattctcaggccctgcgcagctcctggtgtgcactgctacctctggctgggcctgtgggccctcctgggtcctggtccctaggagacattcccttctggcccagttggcagattcagcctgaggtacgcttgggattagctctagacaacccttctgagggcttagaggagccagggtggccctgcctgccggggggttgtcttgggtcctaatcwctacgagggctcagcctcctcatctgtgaaatgggtatgttcaagcctcaatgctttggggaccatttgacccacgagaaacaactttaaattccctccaatccattgtgtcagtgccctccgtccgctctactgtccgcccccaggggagaagttaggcagtgggcatttgaacaccaatgggaacagtgcccggagttctaaccaaaagctgccccataagtgtgggatgatttggggaccgtcttggggaaccaccaccatgtcttggaaaccagtgtgtacgaggacagctcaggatattatagctggttgggccttatagtcccctcccattatagggggtaaattgaggcctagagagggaaggggttgtgccccagacccgcaaagawgatcagggcagtgcagtggccttccagcggcctgagggtcccagatgagctggaacacacttccttatgaggctgttcagtggcttgatgtctatccttcaaggttgacctcagagtctacttcctccttcgctgacacccgctccagtcccccttcctgaagcccacagcagctgttgagcctctggggctgctttctgtatagtgtgagttttgtttctttttctcagcatctccccccagcagcctggcttatttctgcctctctttagggctcagcacaggccaggaggagggttgattgcttgtcacctctcagggtctcagctgcagtcaagagtgcccctcaatgggctgtgcggctcctcccacaccagcagccctctgcctgcctgaggcccacactgcaagcatcctaatttggggttctgctgggctggaggcaaggcctctggtgcagccccaggccagcccctgggccctcctctgtctggggcagactctgggatgcacaggtaaccctgtttaccagccttccaggctggcttggggagcccaggcaactttgctgctgtagggcccaaggctgttgagttggataaaaggcaactttatacaaatataaaaatataaatttatttaatgtgtgtatacacaggagccttcagaaggaagacccgacccccaaaagaggtacagaagcttatataccatcttgaggtcatacaaagaaatggggactgggtgcagtggttcatgcctgtaatcccagcactttgggaggttgaggtgggaggatcacttgagcccaggagtttgagaccagcctgggcaacaaaaggagacccccatctctaccaatatttattatttttattgttttatttttttgagatggggtctcactctgtggcccaggctggtgtgcagtggcatagttacggctcactgcagccttgacctccctggctcaagtgatcctcccacctcggcctcccaattagcggggcctataggtgcccatcaccacgcctggcttttttttttttttttttttttttttttttttttgtagagacagagtctctctatgttacccaggctggtctggaactcctgggctcaaaagatcctccttcctcagcctcccaaagtgctgggattacaggcgtgagctgctacacccagccccatctctacaagtaattaaaaaattagccaggcattgtagcatatggttgtggcccctccttcctactccatgatcacagtcttagttcacaccacatttgtcttagtctgttttctgctgctacagcagaatactacagactaggtaattataatgaacagaaatgtattggctcatggttctggaggctgggaagtccaagatcaagggcccagtgtctggtgagggccttcatgctgagtcatcccatggtggaaggcaaaagagagagcgagagagaggaagagcttgaacttgcagcctcaaagcccttttataattggtattaatccattcatgagggtggagaccgtatgacccaaacacctccgattaggccccacctcttaacactgttcctttttgggagacatattcaaaccctagaagcagaattttgcaggattcttgtcgtaacctgctaattgacctccttagacctggaccttaagttggtgacctgtgagctgggctgaatctggttgcggtgtttgtttagtgcagtgcttaaagaatgttttttgttgttcctttagatgtggcctatgcttgctggttccccacaggtgtgcccactgtttcttgttattgcaccttttcccagcttctcacatcattgacattgcccacctggttctttgactttgtaaggtctgcccttataagggcagggaccatatctgcctgtctgaccacaggatacacaacacagagcatgtcaaaaagcaggagttcaattcatatatgttgttgagtgaacattattcccctcttcaaaagtcttttttttcctcctgccccactgcaatctctcccaaaagtctttgatggaatatatcaagtaaaaaacaaatgtgcagaacactttgtttaatgggtgcaaaaaataatcgtgattatagttgcataaacwatctctggaaggagtcatccaaacttgttacgtaacagtggatgcctctggagaagggaacttggtgtttggggaatgggctggaagtgggatacccccttgttccttctgaatttaattcaaattttataaaattggagtttcattaatcaaagatttacctcatctaaaaaggtcaattcatgatcgaggcctctctcactgtgggtcctcccagccctcccagcctccctgactctgatatgctctcctctttcttcccagcagtgcctgatttgagatggkgtcccaggtctcggtggaatcgggagctctgcacgtggtgattgtgggtgggggctttggcgggatcgcagcagccagccagctgcaggccctgaacgtccccttcatgctggtggacatgaaggactccttccaccacaatgtggctgctctccgagcctccgtggagacaggtaatgtgctcccgtctggggctgtctctgtgaggggggtcttgtctctgctctggggcttgattttagggctgggggtggttttctccatttagggccaagtgcctgcattccactgtcagacaagttctggagaagctcaaggtctttggtcttaagtagccaccacartgagaccctagaagtaaaagcttgagcttttctgacggtctgaggcccagattggcattttaggaagtaggggtaccccaggcatacctaatggcccgacgctttggtcaagggcacccctgttggtttgcagctygtgaaaggttctgagtcactctggcttcccgtgggcagcctggctctgccctatgacctcttctgtgtcccttccccagggttcgccaaaaagacattcatttcttactcggtgactttcaaggacaacttccggcaggggctagtagtggggatagacctgaagaaccagatggtgctgctgcagggtggcgaggtgagtgagggccagcccggctgccagctggctcaagggccctctgcagggcctgggcgggatcctccagggtcaagagagagctaggctgggggcggtggctcacacctgtaatctcagcactgtgggaggccaaggcgggcggatcacctgaggtcaggagtttgagaccagcctgcccaacatggcaaaaccctgtctctactgaaaatacaaaaattagctgggtgtggtggtgggcgcatgtaatctcagctactcaggaggctggagaattgcttgaattcggaggtggaagttccagtaagctgagattgcaccactgcactccagtctgggtgacagacagagactccatctcaaaaaataaaaataaaaaaaagagaatgctgtctgtgagccccaagccctgcctggtgctgggcagatagcggattcctcataaacaaaggcttgaccacagcaaccacaagaatatggtggcagatatttcttgtgtaattcctgcatgccaggccctgtttgtagcctttacgtaagtctcatgaatgtttaccgtgcctctatggcgaaggtggtataacttcattttacagagaagctaaagggttaaatggcttgcttaagatcccacagctggtaagagactgaactaggatttgaacccatgcaattttagcccagagcccatgctctaaaagccagcgtcccagacaactcccaggcctggccagccctcggctctgtctagaacaaaaaggcacacgcatggtcccacatcccccggatcgggacgtcactggggcagaggtttcccttcactcatttgtgtgttcccccacctcacatgtgcatcatggagcctggaacacacctgccatgacttcagctccatcgataagctgccaccagctctggatgagtgtcatgtccagcccagccccatttggtgtttgaagctaagggggcgttgacaaaaggaaacacaattcctttccttgatgagttgtgatttcgtgtgacccagcccttcttgaattaatggggccagatagtttcctggttggaaagattactgagtgtcccctggtcctgcagtctccagccatgcgtttcagagccctggaagattccatgagggcatcttggaggttcaggggaaagtaggggctgagtggagtccaggccctccagcccctcccattggagcagctctgtttttgtcaactttatatatttaggctccaaacaagatttccttttctttgtttacaatttttttaattaaaaaaaaatttttttaattgtttttgagatggagtttcgctcttgttgcccaggctggagtgcaatggcatggtctcgggtcaccacaacctctgcctcccaggttcaagcgatcctcctgccccagcctcctgagtagttgggattacaggcgcatggcaccacgcccagctaatttttgtatttttagtagagatgggattttgccatgttgatcaggttggtttcaaactcctgacctcaggtgatccgcccgccttggtctcccaaagtgctgggattacaggtgtgagccactgtgcccggcctaaaattttttttatttttaatttaaaaaaattaaattattttttaataaaatatttaataaaaattaaattattttattatttatttttaatttaaaaattaaattaatatggggtcttggtatgttgctcagtgcagtggctgttcacagatgtgatgccactactgatcagtctttctttctttccctttcttttcttcctggcggaggcaggaggagggttcttctaaaacacccgggaggttctgagctaactcccgtgggcagtgtcctatcctgcagccctgcctcctgcttccaggcacccctcccactgccatgctgggtggctccagttgcccccacattctccacgcggaggtaaactctacttccttaggtctttccccaggttctagtgccatcctttgggckaaccagtgtggtggtttcaccccytcccatgggggctgcctcgggtgcctagaggggcctctttgcctggtttgtcccggctggcaggccgggagtaggatgcagaggcctaggcctgccctgccctgccctaccctcatctttttttttttttttttttttttttttttggtttctctcaggccctgcccttctctcatcttatcctggccacgggcagcactgggcccttcccgggcaagtttaatgaggtttccagccagcaggccgctatccaggcctatgaggacayggtgaggcaggtgagctgtgcactgaaggcatggggcagtgtgggcagatggaaggacagccttggsgatgcctaggcctgcagctgggaggccacggggktactcagagctgctggctgtagccatagagttggagagtcactaggaagagactttcctgggaagagaccttgaacttgctgctggagccaggatgtgagcaccctaaacctgctcatgttgcccttggtatgtctctgactttcctctcctggggcttttcacgggtcccttccactcctgttttcataaggctctgttttgtagagcaggcttagatccacaatcttccacagcaattctgcgaggtgggtgggaggaagcacgtttggactcaaaatgtggaaagggttctctgccctcctttggcccagggagccacaccacaggctgaaccagcagacagaggtggatgtgtaggtgtgtttcatatgtccctgtttcacatgtcctcttctccaggtccagcgctcacggttcatcgtggtggtgggaggaggctcggctggagtggagatggcagcagagattaaaacagaatatcctgagaaagaggtgagccaggctgccttgccttggagctctaagtggttggcttttttctgcattatcttaggaacatcaggartttgctcagggcagagaagtctggagctctattcacataaactgggagtgtgtatttctgttttgtgccaaggtgtgattctataggggatttttcctgcagagctgggatcctgctgcacctgaccttacggagctgctcagggtgtgtcctttctcaaggaaaggtcctgccctctgctccaacttggaggatcaagcccaggggcaataccttgcaaaagcggaacttctgtgtcaccttcagaattcaggcctttgtgatacaaatgtatatttgattacctcttgctggcaaccagtatttgattacctcttgctggcaaccagcttggacaaagacaccttcagttgttgctttggtctctgcctgatatggtagcccctgctctgagcagccccatggtggtggggagcctgcagcagagccctttctgcccacgctgggcaatgactgaacagcactgccttctgcccatgggtgggaacggggaggggacatcagcctgccctgttgctttctcatgctcaaaagacagagatcctaccgggcaacctagcgagaaagaggaaatcctggcaccctgtccaggcttggcaagggctgagtgagaaacgtccttacaggtcctctaggcgagagcttgcttgcggttgaagccagatcggcttctgagagccatgtggggcctctgaatggatctttcttcctcagggaaaggcaggttggttttgaaaagaaaaatcaatagaggataacttaattatatggctgttctctgacaaattgttggaaattatgatgagtgattgatctagttacattcattcattttgatgtatgagggttctatagggaaaaaccaaactgtttttctccctactcactccacacttctgggataagatgtgtgggtttttcccccactgaccaattctctgacaccagctgggtgtcctacggttcaattcaattctgacactacctggcgttagcgcagaccccacaggtcaagggctcagtcccacgatcctgccccgacttcaaacaccagttgcaagtccataggtccccagcttacccacgcttctgtcccacttggctacaagatagagattctcatgactctctccttgggttaaataatttgctagagcagctgatggaagccagggagacagtttacttgctgttgctgatttatgacgaaggatgttttaaaggataaaaatgaacattcagatgaaggggcacatagggcgtggtctagaagggtcctgagcacaggggcttctgtccccatggagttggggtgcatcactgtcctggcatgtggacatgttcaccaacctggaagctctctgaaccctgtactttagggatttttatggaggcttcatcaggtaggcaaggttgattatgacctcaatctccagccccctctcgtcactggagctgaaagttccagacttctaagctggcttggtctctctggtgaccagcgatcatccaggagcccatcaggagtagcttcattagaacaaaagatgctcccatcacccgggaacatccaaggagttaggagctctatgtcagaccctcccatcactcaggacattacaaagatctcaggagctctgtatcaagaaccggcaatgaggaccaaatattagaacaaatgattcttagtaccccaatttacaagggttttaagagctctgcatcaggaactgggggcagagaccaatatatacttttcttcttatttcacaggggtcagaccagtctgaagtagtaaaaaagttcaagtaactcagtaaaatatccacatgtttaggatttgtagacagtaagggtagtagcagccaccctttattaaggacttaatatgtgctgagttacatgctttgtacgtatttttttgctcatcattacaaaattcctatgagtggggctattgtgcccatgttaatgagcctttgggaggtgtccaagtgagtatcagagatgggatttcaacccaggcaatttgataccaaagcccaggctttgaacatgattgcaacatgaggtgcccgggacgcttccctgtgttgtcccagacagcaagtagacatgcctggaagcactaattttaaacaagctttaatgttgacatcagtctgattgactgttggaatgcccatggcttgtataattataagtgcccaaggatgcttgaagataattttccaggtggccctaggtgaggtgtaggttgtgacatgttggcatattggtagtcctctggcctgggtgtggcaggagggtactraaagagtcctagtctagaacatgtgggcttaagcccagctcaccactaattggtcctggcattggacagattacttctctggagcttcagtttcctcatctgtaacctggaggtatgagtggaggtggacgttcgtgcaatgattgtgtttgaagacttgggggctccttctcaggccctgtggtcrttttgtcctcaggtcactctcattcactcccaagtggccctggctgacaaggagctcctgccctccgtccggcaggaagtgaaggagatcctcctccggaagggcgtgcagctgctgctgagtacgtgcaccctcacctccctccctgccctgccctggcctggtgagatgtggcttggaggcttggtgactgcttccagcaggagggtggctatggtccaccccaggctctctcttttccactgtgtcctggggtggagcatgaagcgctcagaagaggccgtgaacatcaaagcccatctgagccttgtccagctggaagttgtgcccgtccctgggcagggaagagggcctggtacttacgggatttccatgtcctggttattgctttggatgcagtgcagatggtgggatgcctgtctgctgaatgatttttcttgagtgcatctgaaggatttgccccaaataggatgtctctgtggttgagggaataggtttattggtttatgttttgagagtggtgaggagtgtggccttcttgtagagcaggggacgagacccacccagcaaatgctggaaagtgaggttctcttccagcgctgtggcccctacacttcactgcatggggccccagccccctcactgtttgcgggagggtgaggcacctgtcctgtgaagggcccgcatggctgcctcagcctccttttggtaactggctgtggagtgctgccgtcactgtcactttaggcagtgagtgtagcgagctggcttctctttctctggctttcccctttgtcgtggtgcacttggagcgctcgtcctgcctagttaggatggcacggctggcactcataagaggcgcgtctgagatcttccattaaacagcttttctgagaacttcttgggaaacagcctcgcttccctccaggggcttcttggaacttttctccagagggacccctcggggccagatgtccagatcagctttgtggggcatagagtggactgagggaggggcatggtgggaagacagggtgcagccattgcccagttgggccccagaggtccaggccctcyccagggttagccttggcytggggtccaggcttgatggggtccctgtccccaccagcctcctggtcatgaacccccttctaggtgagcgggtgagcaatctggaggagctgcctctcaatgagtatcgagagtacatcaaagtgcagacggacaaaggcacagaggtggccaccaacctggtgattctctgcaccggcatcaagatcaacagctccgcctaccgcaaagcrtttggtgagcaggtgcccagccgggcttcccctgtgcctccttgctctccagtaccctctgaatgccctgcagtgcttgcccccaggagtccacaccttgctgccttccccctttcttcccaacagctcagactttaaattcagtgagggtccacccttgctgagcwmtcctcagctgtgaccatggctcggccccaggtggccaaggtgaccagaatcttctgaaattagggccgccccctagtggtaagagatgggaacaggcgtcagagagatgacaaaggttggtggtgtttctttccccctcacctgaggacagaggaaattcagggtcaggccttcctctcttggcaggcgtgctgccgcccccaaacccagatcaaaacatttggtctcttgagcttggattgactggggagtggggttggtaacatggcctcgtttcttaaagctcagtatttgcgtatttagctggctggaggtggcagaggtggactgatgtgtgtttaagcctccatttgtgagcaggagactcagtggccaggcctggtggttgctttgtgtcctcaattccctgtcatttactcccaaatgcccttccctgacaaggagctcctgccttgtgtccagcaggaagtaatgatccaatcccaggaaaaggaagccagtccaggctgtgtgtagcagtgggattgagggcttataatggacagagatcccagaatttaataccaaattgtcctaatgttgtattttcaaatacaagtttttaaaagtccctttaaaaaagcagtttgccatttattaaagctctgcatttatttttaatgcttcagttttgttttttatttttattttttgagacagagtcttgctctgtcatccaggctggagtgcagtggcgtgatcttggctcactgcaacctccacctcctgggttcaagcgactcttgtgcctcagcctcccgaatagctgggattacggctgtatgccactaagcccggctaatttttctatttttagtagagatgggtttcaccatattggtcagactggtcttgagctcctggcctcaagtgatctggccgcctcggcctcccaaagagttgggattacaggcatgagccaccacacctggcctgcatttatttttaaaatctcacttacattcraaagtcaattcaagactcagctgatcattgtaacttgttgagagttatgtacatttctaaaaggaggcttgttggtattttgacccatttccactctggcatcagcaaccttgcctctgcaggaagagttgtgaggtagagacttcakgggggaatacattaggtgggagggtggcctctagagcaggcacctccagggggtggtcatgcctcaggagggtgacctgaccagcacctattgaccagtgtctagagctcgccctctcctcctcctggtggccacttaacacagcagctcagtgtcttggtttcggtgtcatttcttctggcagagagcagactrgccagcagtggtgctctgagagtgaacgagcacctccaggtggagggccacagcaacgtctacgccattggtgactgtgccracgtgaggacgcccaagatggcctatcttgccggcctccacgccaacatygccgtggccaacatcgtcaactctgtgaagcagcggcctctccaggcctayaagccgggtaagagaggccccatgtgctttgcagttttaatagagtttggggttaaacatggggaagcctttttgggctatcccatacctggccactagaacaaactctccaagctggtgatggaaacatccccttagagctctttaaaaataggctgggcgcggtggctcacacctgtaaccccagcactttgggaggccgaggcgggcagatcacctgaggtcgggagttcgagaccagcctgaccaacatggagaaaccccgtctctactaaaaatacaaaattagccaggtgtggtggtgcatgcctgtaatcccagctactcgggaggttgaggcaggagaatggcttgaacccaggaggtggaggttgcagcgagccaagatcacaccattgcactccagcctgggcaacaagagcaaaactctgtctcaaaaaaacaaacaaaaaaaaatcagggtctcacccaccttcctaaagcgatttcacatttccggccctgagtctgaaggcctcgggaaggatcggcactctgggaggtgcagccccaggyggttcagtgaggttctggttgtttctgtgtctctgcttgcaggtgcactgacgttcctcctgtccatggggagaaatgayggtgtgggccaaatcagtggcttctatgtgggccggctcatggttcggctgaccaagagccgggacctgttcgtctctacgagctggaaaaccatgaggcagtctccaccttgatggagaggccaggcgggagaactaccgcagcaggtgggcgtacggactgcttggcgcatggcacccgcctggcaagtgctagaactaatgctattcttctggaataagatgccaatgatgtggtggctagaaatgcaacttgtataaaacaaaaatgggagagagagaggtattaaacaaataccccccttagaggatactttctgggtttggaaggtgtgcttgctgtggtactgggtgagcggctcatgtgtgctggctgcatggtgctggggaggccacagccagcccttcctctgcacctgcctcctctgggatgtgcatgtgtgtgtacgtgcttgtggtcatgacgcgtgccatttagagctctcagagcagggcagattgctgggctctggtggccagtgtctgtctgtgagggcaggaaggagagctgcacattgagaacaaaggagggacctgaggtggagagaggcccagcaccccaaatctctgccatcacacggtcggggagcccatacattctgcaacaaccagggacttcacaggagccttgttttcaatttgctaacaggtgcataatccctgtgctccttaagcctcatggccttcctacatttccactttatttgtttgtttgtttatttatttttgagacagtctcgccctgtcacccaggctggagtgcagtggcacgatctcagctcactgcaacctacgccttctgggttcacgtgattctcttgccttagcctcccaagtagctgggactacaggcacgtgccaccatgcctggctaatttttgtattttttaaatagagacggggtttcactgtgttggccaggctggtctcgaacacctgacctcaggtgatccattcgtcttggcctctcgaagtgctgggattccaggcgtgagccactgcggccagcacatttccacttttagatcctactccataccacaggtttcatttaagaagaaagagctagataaatgtgctcttctggttaccccaccctgacagagtgcatttttacacggctagcaggggttgagactgcagcctggcctgccagccattggaggtgtttaaggaagggcagataatgtgactctttgcggggtgccatctgcttacccattagcgagcagagggggtttctgcgggtgacccccagcatatttctaggttacttatgggcagatttgtaagtgacaaaactccagctgatgctgggaatggggagagggcccttgagggactttgtggttttgtgcttctggtttcctggccaaccccagggtcacttgtctggaggcccagctgggcactaatgtctgccaccgactatgttacagtgtataaatgattcctctatttgggagagatcttccaatccagaggagcccctcttggactgcctgggttaaatctgcatagcagaagtggttgatgagttcatctgaagaaattcaggccccacctccccaccctgcccctccctgctcccttttgatggtggcctctgggtactcgggcagagtccttgggacaccagcctctctggggttctcaggccatcccgttggggctgtcgcccaggcctaagtgagtcgtgtgcctctattggaggatggctgttcccctggtggttgcatccaagtatctgtctttctttatggaccacgaagggaagcccaccttcctggaggcaggaccttcggcctaagaaacacaggccctggtgctatctgacctggggtccagcgaggtgggaatcccagtgtgtgagcgacaggccttcttctattgacttacaatattctagaaggacctacgtgtggggacacagttttccaaactgaggaaaatgttgcaataaaagaatatgttgtaagaaagacactggatcttttatttttttcctttcattttctttttcttaaaaaaacaaaatgaaaccaaaaaaaagcctgaatcaaaacctttttaggagtagttacagatattatagggatgggggcggggggcactaaaacaaaagagaaaagcaccagtgagatgtctttcccattttcttctctccgccacggaacacgcacaccaacagagcccaggccactttttgccctcttcccttggaaaaaggaggaacagaagatttaagaattttgaaaggatttttttcttgtgtgaatgtgtgtaaaagtcaatgctataaatctaaaacgaggtctgtttttttaaaaaagttctaaaacaacaggaggaaaacacatggaaagaaacccctcgcggagacctgcttccttacagatggaggctcttttggaggagagtgtgaagggcagagggctccctgcgccggcaggacctgcccggccaccctccactcccctgccatcacccctcctctctccttttaaaaagcaaaaccccactcttgggactcgggtcgtcctccgatccctgctggaaagtgcggcggctacttggcgtcgagcttggccatctcctgcacgtagatgccgatgctctcgctgtcgaagagcaggaagtacacgttcttcagcgaggacgcgctcgagtcatcaaagtgggctgagatggctttgagggtcacctgggccgcagtctgtttgggaaagcagtttctgtgccaaagcaaaagaagagccgatgtcattttggtccctgggacccatgggagcatgaagtgcctttgtttttactgggtggggccttgctgtgtgcagggctagtccatgcatgatctcctttgaccctagccaaagggacagcctgggggtggcaggtggggcatgttgcccccactttataggtgtcacactgactcggagaggcacaatgatttaatttgattaaattaatttatttgttttgggatggagtctctctctgttgcccaggctggagtgcagtggcgcgatctcagctcactgcaacctccacctcccgggttcaagcgattctcctgcctcagcatcccaagcagctgggactacaagtgcgcaccatcatgcctggctaatttttgtatttttagtagagacggggtttcaccatgttggctaggctggtcttgaactcctgacctcaggtgatccgcctgcctcggcctcccaaagtgctgggattacaggtgtgagccaccgtgccctgccaagcacaatgattttagtcaaggtcacagggctggccaagtgaagagtgccctgtattttattttttattatactttttttaaattagtttttttttcagaggcaaagtcttgctccatcactcaggctagagtgcagtggtgtgatcatagctcactgcagcttcaaacctctgggctcaagctatctgtcttctgcctcagcctcctcagtagctgggactaaaggcgtgtgcctataaaaaaatttttttttttaaattttttgtagagatgggtcttgttatgttgcccaggctggtctcgaactcctggcctcaaatgatcctcctgcctcagcctcctaaagcttttggatttacaggcgtgagccaccgtgccagctccctatatttgattctatgtcacctgaccaagtcaagcttggctttaaaaatgctagccattcagcattaaaaatacctggtcttcaaacaagcaaacagaagttttattagctccctccaaactggtttatatactaacccaattgcttagtaaagggcaaaaatgtatgctccaaacctgtcttcgtaagtccttttttatgcacttaatatttcataggcacaggcccatgtaatttcagcattgtgactccgggcatggcggggttaatgaaagtttgttaaaggccccaggttccagggagctactgatagtgccatccaccaggctgggccacagcaccagcttccagggacacagccagaatggtcgttaggggtcagccacagagacccctggagcaggtccaggaggggcctgttaataggaattcttcccaatcgcatgtattccagcacagaacagcactgccgtggttccaccgacgaaagaatgcatctcacagcatctctgggcctggaatgctgagactcaatgctgcttgcctaggttgatgtgtgattacagcaggaacctaggtctcattattttcctcttgggcttcccaggacacagctataaaccatagctatattataaaggacagctctcaaggtgagagggtgttcaaaattaaagcaatagattggctaggggcatgaagggaaaggatatgttttatgtgacagcagatatcctcattatgtatctgaaacaatgcccagctgggatctgtgacaatccagtcattgcccagtctccttttcagcaatcactcggggacagattttcacttctctgggtgtattcatcaaagcctcgaactcctggctctgcagtctcccagagcagcaacggaattctctggggattctggagccagaggtcggagatggggggcctgagattctgcattctgacatcggtcactgctgcctatggaccacactttgagtagcaaggccttcgagcctggcgttttctgatcatgtgtcctggacatggacagctggtgggaatatggactttgaacctggaaggctctcaaaaaataacacaccagctggcctctgcctcccgctcctcccctgggctagccttcctcctggggctttaacatcaaggaggcactggggctggccccagccggggaagacctgctgcctaggagccagtgggctcgcttccccatggtttctgaaggatgaaaaccgggtttcctgccctgtcatctggtcagcatacttggctgtgctggcagcccttggcaacacccagatcagatgtaagtgggggagcagctgatttccagggaaaaagccggaggaatcaactcaggggaactgcatcttacctgccgctggggaaaggcgggaacgcgacggactttagcttcttgtcctccgccgctgacaggcagtttttgatggtctcttcaagctgttcttcacatttgtcggagccccactgagggatgtgacagtggatgacaaatttggctgcgagtccactggattggctgacggcggctgggacataggagagaaaatgccgtgggttatttcctaaggtttcctaggttatagcctaacctcatcaggtacctgttagatctggagataaggcagtgatagagacgttggctgggcagcatcctgtgctcctgatgtggactatgtttaacgagagcaagagctgggctgtattgctttgcacagttagcacaagctttgggtagaagcgtttaatgctgctctgatgcgccattttcatatggtctgccaagtagtccctgggttgggctacctcctcacaatggttcctagttaaagggacacatcagatcctctctggtggctgtggcaggtaaagtaatggcatcccaaaacatccacgtcctcctccctgaaacctgtgggtgttcccgtacatggcaaaaaggactttgcagatgtgattaagtgaaggctcttgagatggggagatgatcctggactgtctgggtgagcctgggacctgataagagggaggcaagaaggtcaaaggcaggagaaggccgtgggatgaaggagacagagattggaacgatgcagccaggagccaaggaatgttgcagcttagaagctggaaaaggcaaggaagggatccttccctgagcctccagaaggaaccagccctgccaacacctggatcttagactcttaaaactcattgtggacttctggcctccagaactgtaagaagacaaatttgtgttgtctgaagccacgaactttgtggtaatttgttacagtagccacaggaaatgaatacagtggcttttatttttatttttttatttttagtttttttttgagacagagtctttttctgtcgcccaggctggagtgcagtggtgcgatctcagctcgctgcaacctccacctcctgggttcaagtgattctagtgcctcagcctctcgagtagctgggattacaggcatgtgctaatttttaaaatttttttatagagatgaggttttgctatgttgcccagactggtcttgaactccagggctcaagtgatcctcttgcctcaggcacccaaagtgctgggattacaggcgtgagccatcacacctggcctactgtggcttttaaaaaatagctgtgcctgggccccacagagtcagggtactgaccacccagaggtcctgactcagtaggtctggtgcaggggcttatgcttatgtgattttagg

SEQ ID NO: 6982 - DNA, 13904 bp, Homo sapiens
tcatactgtcccaaaacaattactcaaagatcactcattgctggtcactctaatagatatgatgatgatgaaaatgtttgagatattgcaagaattgccaaaatgtgacacagagacactaagtaagcatatgctcttgaaaaaatggtcccagtagacttgctcagtgcagggttgccataaaccttcaatttgtaaataaaaaaaaaagcaatatatgcaaagcacaataaagtgaagtgcaacaaaatgaggtctgcctgtatttgatatgtgtgacacctgggaaatcatcaagatggtaaatgtggccgggtgcggtggctcacgcctgtaatcctagcactttggaaggctgaggtgggcagatcacttgaggtcaggagttcaagaccagcctggccaacatggtgaagccccatctctactaaaaatacaaatattagccaggtgtgatggccggcacctgtaatcccagctactcaggaggctgaggcaagagaatcacctgaactgggaggcagaggttgcagtgagccaagatcataccactgcactccagcctgggtaatagtaaacacactcatcactcttgatgttttcttgtgcctgtttgtaatccttttctgcacacccaatcccagtccccattgttctgttttctctcactgtaagtttgtttgtatttattagagtttaacataaatggaatcatacagcatacacccttttgtctgacttttttcactcagcataattttttaaaaatatatccctggtattgagtgcaccaatagtgcaaaaatagttcatttttttgatgagtagtattccattatatggatgtactacaatttgttgattcattcacctgttgaatatccaggttgcttccagtcttcgcctattataaagctaatatgaacatttgtgcattaatttttgtaaaatcatatatttctttattttacctagaatcaaaatggctgggtcatatggttggagtatgcttacttttcattcaaatttgttagattttttaaaaagctttattgaggtataattgacatacagtaggctgacatgtttaaagtctacaatttaataagttttggcaaatgtacacagccataaaattatcacctaaatcaggataataagcatattcatcaacctcacaagttttcttggtcccctgcctcccactcttccatgcagtcatacttccccagacaacccctgatctgctttctatccctatatgttagtttgtatagaactttatataatcatgcagtatgaacactttctgtctgacatctttttcactcagcataattatcttgagatttacccatgtcgttgcatctgtcaatagtttgtttctttttattcccatatagtattccattgtatagatgtatcacaatgtgttaatcctttcacctgttgatgaacatcagggttgcttccagtctttggctattacaaataaagctgctatcaacattcatgaccagcttttgtatttgtatattcctttacttaagagtagaatgggccaggtgtggtggctcacgcctataatcccagtactttgggaggccaaggcagtagtattgcttgagcacatgagttccagaccaacctgggctacatctcaaaaaaaaaagaaaaaagttatagccatcctagtgagcatgaagtggtttcttattttaattttgatctacatttccttaatgactaaatgtattgcacagcttttcttgtgcttattggctatttgcttattttctttagaagaatgtctgttcaagttctttgttcactttttagttgagttgtttgtctttttgtgttgcattgtaagagttctttatatattctggatagtaggccctggtcagatatatgatttttgaatattttatcccattctgtaggtagtcttttcactttcttaataatatcctttgatgcacaaaagtttttaattttgatgaagtctagtttatcttttttgtttgttgcttgtgcttttggtatcatatctaagaatacattgtcaaatccaagattataaaaatttacacctatgttttctactaaaagttttatggttttagctctcatgttaaggtcatttatttgagttaacttcattatttgggatgacataggggtccaaattcattcttttgcatgtgaatactcagttggcccagcaccatttattgaaaagactgttctctccccattgaatggccgtgaccactaatgtatgggtttgtttctggactctgaattctattccattggcctatgtgtcttatctgtccttataccaaaacgacactcttgattattgtagctttgtagtaagttttgaaattgggaagtgtgtgtactctttgttcttcttgaagattattttggatattcagggccccttggtatttttgatgattttgaggattagcttttctagttttacaagataaaaaatgccattgggattttaatagagattgcattgaatttatagattgctttaggtagtatttatatcttaacagtattaagtctttcaattcataaatatggaatgttttcccattaatttatgtctctttatttcagcaatttttctagtttgcagtgtaccagtctttttatctgcctagttaaatttaaccctaggtacttttttcttttggatgctattgtaaatggaactgttttcataattttatttttggattatttattgctggtttatagaaatatagctaatttttgtctgttgttcttgaatactgctgaatttattagctctagtagtttttggggattctttgggatttttaacatatgagattatgtcacttgcaaatagaaatgattttatttcattcttttccatttggatgttttatttatttttacttattttggatgcattttttaatgttttaaataagtttgctaagagttttcaatcaagaagagtaatgctagcctcatagaatgagttgagaaatattcccttctcttcaatttttttgggaggctttgtgtagaattgattatttcttgcttacatgtttgatcaaagagaacagtacagccacttgggcctatatgaagaatttttaactacaactccaatttctttaataactataggaggctattcaggttatctatttcttcttcagtgacctttgttggtgtagttcaaggaatttttcagtttacctaagttgccaaatttattggaataaagttgtctataatatttctttattatccttttaatatcagtagactctgtagatatgtcccctctctcctcctaatattggcaaattgtgttttctctccagtttttctggtctatctgcctaggtagaggtttgttaacttaatctttttaatggattaactttggtttcattggttgtctctgttgtttttctgtgttctctttcattgaattccacttttatctttattatctcccttcctctattgactttagatttgttccttttttttttttttttttttcagtttagtttcctgaaacgtttcaggtggaagctgaggtaattaatttgagacttttgttcttttcaaacatggccatttctaacatagccattaaaaaatttttccctaagtactgctttagtggcatccacaaattctgataccttgtgttttaattttcatccagttcaaaaaactttctaatttatttttgggattttttaaatttagagattatttatttcaggatcttttaagaggtctgttattgatttataatttgatttcatagtgctctgaaaacatgatttatatgatttgaatgcttttaaatttattgagacttgttttatggcccagaatacatctatattaataaatgttgcatgtgcccttgagaagaatgtatactctattgtcattgagtggaatgttctataaatatcaatcagttaaagttggttggtagtgttgttcaagcctactgtattcttgctgattttctacaaaattgaagagaagggaatatttctctactcattctatgaggccagcattactcttcttgaatgaaaactcttagcaaacttattatttaaaacattaaaaatgcatccaaaatttaaaaaatcaattttagcactatttgttctatcagttcttgagagagggatattgaaatctctataattgcggatgtgtccatttattcatgcagttctatcagtttttgcttcatgtattttgaagctatgttataagggcatatatgtttaaatttttatgtcctcttaggattaattcatccctttattatgaaatgatattctttgtccttggtaatattatttgctttaaaatctacattgatgttaatataggcactccagctttctttgactagcgttggcatagcatatctttttttccagttatttccttgtaacccacttgtatcttcatctttaaagtgtgtttcttacaggcagcatagagttgagtcttgcttttttatccaatctggtcatctctgttttttaattgaggtgtttagaccatttacgtttaacataattactgatatagtcaggtttaaatgtatcatattgttatttattttctgtttgtcctatttgttgtttgttctccctttcccccttttctgccttcttttggaataatcgaattttttatgaatccattttatctcctttgttggcttattagtcattactttctgttttgttattttagtgattgctttagggtttatacacatcacagtctaacttcaagtgatagtataccaattcacatataataaaagaactttacaaaagcgtatttccatttttccctattggcctttatgctactgttggaatgcattttacttgtacatatgttataatctgcacaatacattgtctttatttttgttcagttaatgttttaatgttttcaataataagaaaataatttcatacatttaccccagtagttaccatttcagtgctttcaatttgtttaaattcagatttttatgttatcatttcccttcttcctggacttcccttcacattttttatactgcaagcctcctaatgatgaattatttcagcctttatatatctaaaaagtctttaaattgccttcatttttaaaagacatttttgctgaatatagaattttgaatgagagtattttttcagtactttaaatatagtttgcttgtttgtttgtttgttttgagatggagtctcactctatcgcccaggctggagtgcagtggcgctatctcggctcactgcaacctctgcctcccaggttcaagccattctcctgcctcagcctcccaagtagctgggactacaggcttgcaccaccatgcccggctaatttttgtatttttgtagagacagggtttcaccatgttgggcaagctggtctcaaacccctgatctcaggaaatccaccacctcagcctcccaaagtgctgggattacagttgtgagccaccacacccaacccttaaatatattgttttactttttcttgcttgcattttttttctgatgagaaatcaatatctctgtttcttgtcttttttctgtatgcaataggtcttttcttcctctggctacttttaagatttgttttctttattgctggttttgaacaattgagttatgacatgccttggtgtacttttctttgtgtatcttgtgccgagattcattgaactgcttggatctctgggattatagttttaggtttataaaattgttagcattattacttcagatattttttatttctccctctctcacttcagggactcctattacttatatactaggctacttgaaattgtccacagtgtactggtgctctttctgagttttaaattatgttctaactctttgtttatgttgttagttacagttgccatgcctttaagtgmactaatcttttcttgtacaatatttaatctgctcttactcccatccagtgttgttgctgtttttttgagacattgtagttttcatctttaaaatttcactttaggtcttctttatatcttttatatctctccctaacttyttgaaaatatagtgataataactgctttwattactttctctgccaattctaacatctgtgtcagttctaggcctgttttgattgattgactttcttctcattattgatcatgttttccttcctctttgtatgcctggtaaactttgattgactgccaaacatcgcaaattttaccttgttgkttcctgaatatctttgtattcctatgaatcttgagctttgttctgggatacagttaaattttttgggaacaactttcttctaagtctttcatgattttttaggtgggtttggagcagtgctcagtgtagarctagtaattagtgtagagctaattattcctcacactgaggcaagacattcctgagtactctacccaatgccctgtaaattataagtttttccagtatggctggaggtaacargcactttttctgaatctcygatgtattttaatggttctttctctggcctcaggtagtttcagcacacacatgtgttaatcgacactcttgaatacttgagggagacagtatatattgccctttggcttagcagacaaaagcaaaaccactcactattgaaaacggggtggcagaagtgattaaataaagaagtttctaaaatgttaactgcttctctataagtgatgaaattataggcagttttaatattttctatattttctaaaatgtctacaataaatatgtatcatattcactatttagaaaaacacaatgttgttaaacacagtgttgttatttttgttttcattttgggtttgtttttgtttttgttttagcttggatttgctttcacatccaggctataggtttagtttgtcctcagttttggaaagggcagtctttactaaaaaaattagagcttctttattaagtgaaaacagacttaagatttggtaatacagtatttggtaatagctggggctattaggatagtatccagtaattctggggaggtggctgtgtttaccttcactccttttccaacttctgcagcaactctacctgtcccccttccccagatagtttttgccacttcatttttaatagcaggtgcttttgctcttgtttgctaagccaaagggcaatgcagaattatcatgcttctgcaatggaaatacagccaaatctttgctcacacgtagagagccaacgacatactctagaaacagaaagccagacaggtgtgagctgaattaacatggtttcaaatgttgtttgaatgaaggtctcggctgtggaggaataagaatcatacatttggtcctttgttttcttgggttattataggtgtccttttccataactactgaataatctgaaggtctttccagagataaacagtgttttccaattgaggcagttcttttcagaaatttatgaggaacaaactgagttctgttcacttttattaggcaaacaatttacattttcttatgaaaatgaagtctgcaaacaagattactttattaaatcaccaccttctcagctgttctcctctgtggtaagtatttgctgtgatttaacaagcctcccaccagcctcatgagcatttttaaaaatcatttcttttcctctgagatttaactaagacataaaatctttttatttttcagacctcttggaaaaagcggtttttcatcctgtcaaaggctggggaaaagagctttagtctttcctattataaagaccatcatcaccgaggttccattgaaattgatcagtgtgtatccaagcaggaaaacttttataacaacaaatactataaagtcaaacagtaacaagttgcatgcaaattgaaatttacataattgaccaaaggaacctgcttcaagctgattataatatttgtgactgaataggagctaaaatagtgagcactttgagttaaaagatagttgaatatttgtttcatattgtatgtcatacttgataagtctttaattaacaggcattcagttaaggagtttgattcacataatttgtggatgagagggagcagatgaaattgtcattttataaagtcaagatagagttttaaaaaatatttagatcagctttttttggtcttctctttaataaattgtgcaccccaaaattgaaaaacataatttgtggaatcaagaatccaattaaaatagaaatttttgaatcttaggctaaacaaaataatttcaattaattaaccagatcaaaaaatccaaacttatcttctaaaattattggacaatcttggaaacatggatccagcacatctaaagttttattccatttgaatcccaatataaaatattagttttctatttctgtatttaccttggtttaatactttgtgtctatatctaatagaaattccagtgtagaagttggcataagtagccaggaaaagatgcaatctgtgcagaagatgtttaaatgccaccctgatgaggtcatgtccatcagaaccactaacagggaatacttcctcattggccacgacaggtgagagaagtaagataacacagaatatctactgcatgcaaaacaaaaacaaaccaaaaaacaaaacattttataccaataaacatgttctgaacccacgctacaaacctcaaatgccatcttggcaatcttagttatttttaaaaatatcttgaaaagttactgagctagtttcctagggctgctataacaaagaacctcatcctggataactttgaacaacagaaatttattgtctcactgttccaggggctaggagtccgaaattaaggtatgggtagagccatgctctctctgaagactccaaggaaagatttgttccaggggcctctcctaactattggtagttcccttggcttgaggcaacataactccagtcttcacatggcgttctccctgtgtgcatagctctgtgtccaaatttcccctttttataagaacatcagtaatattggatttggagccctctctattccagtatgacctcatcttgaccaattacatctgcaacaaccctctttccaaataaggtcacattctgaagtattgggatacggaactgaaacatacaaattcattgtatttttgcggggagggtacatttcaaccgataacagtcaccatcaccccagaagcattccatgtaaaagaacccaatacaaaaacatctacacaagctacatatattagggaggaactaggcttgcccccaaagtagtctgcagtttttaagaggggcttctggtcctagcaaaggtgcctagtggactcttcatggatgattatctgcttgagggagaggcaaagcgggtgtgggagagactgtgcagaggaggcggacaatgccaaagccaacatatgaaaaaccctgatctgtttcagattgaccaaagcttccttttaagttgtcctgtgagtccatagaaaagatgtgattatacaaattcactcaagcacattcttcatcaacacatgcactccctaagggaaggcccacctgcatagttacacaaaaatgacactgacaggttagggggcttgcttgagaacacaaaggaaatcaatgtcaaagccgaaagccccaaaccctgtgattactactattattttctacttttcttccctttctctgagctttccttgcagaggtggctgagcattaattctagtgtgcaaatgtggaggtggcgaggccatttaagctacttaggaaaaattcttatttcgctggtacctgctctcaccaccattctaacattcataaaagaatccttctctggttcaaaaggcactattgttgccacatgccaactgaaagtttattcctgtcaacagggagaagattaaagactgggtctccttcatgtcatcatttcgccaggatataaaagcaacacagcagaacacagaggtgactccatatcactaataaaataacagggcacctgaacacaaccctctttcaatagaaaacaatggtagctttcctttgcctccttagtaactggctttaatacaaggaataaataaatgagaaaatgtacatccttattactttttatgattaacagaaaaaaattcttttgtgttttgtgagagagctaaagtacagacacttcagatttttattattgtgttagagggaagaaaagttaactgtgacatttttaagtagtagctagaatatagtattttccatcattgttattcaaggtgcatgacaagctcccttttgaatgactaagtctagggcagtttctataaaaatgttttacatgtatcttgcatttttaatataatgtatctttcatgtacatgcttagcagttttaagttttaaacttatttcaaaagggcctctgctaatgttcctttctcagggcagacctttatagatggaactttggtccctaggtatctttttttgacatgttttctaggttgttccatgcttacagcaaaagccaaagagaaggagaaatcaaggcatgtcttcaagtagactgaagtgattagagcaaagggaactggggtggagggtgtcagaaagagacacagttgaggagacaagttgagggaaacgctggtcatctctgagggtcaggctaaatgtcctcaagggtttggaaacaggagagagacaagttcggctcttgtcttggtgaaataatgctggcaggccagcggcatgaatgttagattgctatgggaaaagacaggaggcaaggagcccggtagagaggctgccgtttcattccagacagagatcaactgtgccctgactgattcctttttttgtgagcaggaggaactctcattgggtaataaaagaaccctcttctactccagccctctccttggcccttccagcacatcagaggctgttggctccagctcaccaagaaatggtctccaagacaaggtaatggggctcacttctttctcaggacaccacacctgggaggcagctaatgcctaaaaatcttaccaattagcaattgaatttaaccatgcccaccttcctcaaagcccgatgcactataagaaagattcttagccctgatgtttatcccataccacagatgagcctcactgagggcttgccctgaatacctctcagtgtattcattcattttagatgctcttgatatgctttgggtatgctagggtaagacccctttgctaaaccaaaacctagctggcaacttgcttcctttctttcacacagagggcacagatccctctgccaaaagatttcccagacactacctgatttctgcccattctgtctgtactcctcaggcaaaggctgagtttcttgttaatctcttccctttaccctgatcaatctcgcttctcattcattatagctgtctatcacttcttcctcatttctaatgaaatccatttgaagacataaaatataatgtacctgcctcttgaaagcgacttgtaattggaccttcagctttcttggatttgcaatgttcccaacttgggatattagtcataaacatgctgagtggttttgttctctggcacggatactattttgtctcttagagacttatccattgactttaccctgtccatgtataccaagcacatctaatgagtcctagtcccttgttttatctagttggtagctctccaactattttgaaagctttttgtagcatatcaaattcaccatgccaaacacctcacctcagttcttcatttagcgagtagaaacggtggtatgcagcagttaggaagcttcacccttgtctgtaagtgcctcttgcttttcactcatgatatctccctccccctagagataacattattggtcactttgccttttcacactatagatccagtgatttttaaaccagctcgagttaacagtactgtttgccttgctgggtggtgttgttgttggttaaattaagtgggctgcctttacccccaactcagcatgatccggctccatgagcttggaacttaaaacatggacagaacttaaacacacctgtattttaaaacttgactttttttctagagaacattcagggtcttttccaaaccccctgctctgaggcattgttcttggaatttttctgccatgcaaagaagctactttagtagaatattctgtatctatggggaaggggaggcaatagtggttgaatctagatcacctggaaacccataattcatactatcatatgatcaacacaaccaaattccattgctgtggaaacaatagaagtgtgtgaacagaacacaaaagaaaaatatggagcaggaacaggaaaggtgcaacgccttgattctgggttaattacattcttagatggcactggatgattacaggaaaaagatgagggtagcaactccagagcttagtgacttagaatgctacccacagggctggtcatggtggctcatgcttgtaatctcagcactttgggaggctgaggcgggtggatcacgaggtcaggagtttgagaccagcctggccaatatggtgaaaccccatctctactaaaaaatatacaaaaattagctatgcatggtgatgcgcgcctgtattcccagctactcaggaggctgaggcaggagaatcacttgaacccaggaggtggaggttgctgtgagccgagatcgcgccactgcactccagcctgggggacagagtgagactctgtctcaaaaaaaaaaaaaaaaaaaaagaataccacccacaggagaaaaccacttgttctgagtgactgttccaaacggtagagaaaaaaagcctgagtgatgtgcttatatgttttcatcctcagtggtgacccagactcaagaggcaagttcaagttgtgtgagcttctggatgtaatcttggaagaccctctggtcttttttaacccaactaatttattacggcttttctagaatgcatgtgatttaattctatctcttgcaaagaaaaagcaaagcatttttatctcttttcttcagcatttaatggaacaaagttctccaggatttaggcaaactcacctacaagatttatcagaagccactcaagatgtgaaggaagagaatcattatcttactcctcgaagtgttcttttagaggtaaccccttcttgtccattcatcatttgtttctttaacaaatatttactgaaaccctgccatgcacttttcgtgcaatattaggctatggtcagtgggaacacagaagtaaatcaaatacagatgacgtgctcatggtgctgacacttgactaggagacagctgtaatacaagacagagggttctatgctgaagagagatgcttataaaataccaggggtgcatgagctatgggaggaggagatgactttcaaacaaaagatcaggaagatttcagggacgagatgacattaggccatacatgatgagtaaaatttggatgtgggggattgccttgaggagtctttctgcattcttagcagaaagaataatatgagccaaggtccttgggtgatcagttgtgtgctgtgtatcgatcagtctattgatcagtaggaagcccttactgaatgccttctgagcactagtcactgtactgtactgggcatggtggctaaagtaatgagcctgacatcaccctgctgtcagagtgcatagtcttgtcagttaccacaggataacgctgcacaaaagacgtggtccgtgtgctctggaagcaatagaaaaagaacagattttctctatcaga

SEQ ID NO: 6983 - DNA, 15619 bp, Homo sapiens
gtgaggttgaatgataatagaggaatgattgttcatgcaatgcctgttatgttcttagttcagaactggtatactgccacttctgtccatattctatctgccaaagcaagtctcatggccaaacccaagtttgacggggcaagtaaggacacttctcccctggaggtgatggtagagcaaggaatatgtgctgaacagtgatttaatctgcattgcccaggattacacagctaggcaaatttagatggctctgagatttggaccacacagttgggatccacggttaaaagtccttaccatcctcctatactgcaccttgattacatttatgctaattcataggcactcacacacaccatctctctatgcattagccatattggtagttacccatcctcactaacacacacactacactcataacccactgtgccctcagtgaattctaatatttattctctgggtgctattctgcctagagacaatcatttgatttttcgataaatgctagagtttgagacaatgcccaagagaacattgctcatttgctttcagaatgtcaggctggagggatccaagagacctcattacactctgtgctgtctggcacattcacctctgtcccatgcagcagcctttgtgattcttaccaaaacctacctgggttcttgagggtgtctcggagccttcctggttgctcatcaagttacttcaaaggaaaattgctgtttgctttttcttggagctaggaaaccactgagatgttgtctctgtgcactggggaaagtgaatgttcccagcagaaggctcaatttgttccttatttataaagccgatctctggcatgaggagcatccagggtacctgtgccaagtcctttgggtaacaactgaagaaattttgggacagcaagtgatccaagaaaattgttttgctagtattatgcaagagactccaagtatttgtaagtattatgtcatgtgatttattagacataagccagtgtgatgcagtgcttcttactcccctcacatttacaaaagaccttacaacatatttcactcagttttctcacatttgatattcatgacaacccactatggaggctgggctgtttgattttacagaagaagaccaaagaggtgaatgatttatacaaggaagtgatgaattctctttcagaatctagttctttgacaactttctcatcaggctgatggtctttattcagtatccatccctgcaatgtggtctacagaaggttcactatagaaatcaactttttaaaaatcactgaaacctgggatcagaaccatgagagcacccatgcacatgagcatggaatttccattcttggatatcttctgccaccacctggagggtgcacctgactataacttgtggaccatagacattggtaagagaggctgttttgttgtaagatgacaaagacactgtgtacattgggagccagcaaacttttttcctgtaaagaaaggcaaatagtaaatattttaggctctgttgctactacttaactctgctgatgggatgcaaaagcagccatagacaatatgtaaattagtgggtatggatgtcttccaataagacactttttacaaaaacaggtgacaggctgggtttgaccctgagattgtagtttgtttaccccttatgaaaatttagaaagatatttctggtgagttttggagacccaagactcaattctgactctttgataaatgagagtgatagacacccccaaaattaggacaaatgtaaatgcagtagatgaaagcagtcatctgttgaagtgatcaggatgttgcctttaaatgatggtctgaaccaatcatgatgggacagttattgacctaaagacaagtaacatttagccagttttattgagtcttgtttgaagaaaaatcaggaacttaaaagcaagaaatctgtagtatttatctgatgttaacagagacagaaagagagagagagaattcaatcttgccaatgatccaatggtttattgggacctattttcatggtctggatggaaaggcctctgatatggtttgactgtgtccccacccaaatctcaccttgaattgtaataacccccatgaatcaagggtggggccaggtggagatcattgaatcacgggggcagtttcccccatactgttctcgtggtaatgaataagtcgcatgagatttgatggttttataaatggaagtacccctgcacaaatccttttgcctgatgtcatgtaagacatgccttcgctcctccttgccttctgccatgattgtgaggtctgcccagccatgtggaactgtgagtccactaaacctctttttctttataaattacccagtcttgggtatgtgtttaccagcagtgtgaaaatggactaatacagcctccaagatgataagcctcccaaaactcatctgtcaaccttcctttgtgtatcctgtcttccctggtttgcccttgtagagaagaatcatcctggattacgctcatgaatattcaagtcatgggaagaaacacattcttattgtaaaaaataaaatgatgtctggcttaccttagtcttttagtatgtgagtctgatgagtatgagttagtccctgaaaattgaatgccctctgagtatcctggcaaaagaatttctggccttccaatgctgaagaccaatttgggccatggcgaggctgcagcatagctggccttggaagcctggtttgtaggttggttggaatcatagcatcttcatgatgtcttttgatgactgcaacatggttttattcctcatgattaagcagagaatatgtccaaggtcacttgcccattgaagttgctgggtacaaaaaggcaaatacagaaattgtgctctggaaagtggatgtgggctatcaaacctaggctatcaatcgagggattcagtgagcagtttgtctagaggacaagagctggaaatttttgtcttaattatcatataatctaacaaaggcaaaaatcaacatacaagtacctgagcatatttattcacaagggcattgtagttaggataggttagatttatgcttaggcaaccattcccaaatttccatggcttaacacggaaaaatgtattcctgttccacagactctacttaagtttgggaaatacagaaggagggagggctctgcttcactaatttactcaaggacatggctgggaagactccaccatttggaatgtcagtggttgccacaacaaggaaaaagataaattggaagatcatgttagggcttttcaaacctcatttcttgtaacatttcattagctagatcaagagtcttgtagcccacctatttcaaggaggcttggaaaggtcttttgtgtctctgccacaggcatacctaagagcgtgggtagctgaggcagcatctcagacatgctggcagcagacgatgggggtgggaaagagtcctagcttcagagaaacggagtacagcgtgtctgctccctgataggatgccctgttctctgtctgaggtagcccagtgttttactaatattgggaaggtgagtggcattttccaattgaatagataggacactctcctattaagattctattaagacaagccagggagctgcctccctgcagccatttatatctaagcatttcacaaacacagagtaattcctcccccatgactctgtctctatggagaattttaagaccctagttctgaaaagcatcctgcaagagggaagatgggttgtaatatttccagaccctcttgccattgttgttagggtctcttgagtttagggactacactgaaccacaggttgtttaacataaataacttgacccatgctaacttcaattatcctggtctcctgcctcaatttccaagagagccactccctctgttcatatgccaaataaggaaaccagagaatgagggggtcaggaaaggagtggggggcagtagagaagtggcctagatgattctagagatagcatgccagtgggtgtgcttcacaagcttcccgcaaacttcttgaaagttggatggagctggattcatttgaaaaggctggcatgagatggacagagaggaaattgtgggggaatggaggactcttaagatctttatcctttggggtaaggggagagaaaggaatccactagtggtttggaatagtcatgaattaaatcacatatttccatgaaacaagcctgacaaagccttagcaaagctggtaggggactctggagtgataattgctcatcagagttttcccccatcagggcaaactggccaggccctcaccaccctcagtcactgaatgtgggatgtggctgctttgggaaggacgtgacctcatgcaagcactccttgcagctgagcatccacttataccttgaagggggatctaggaagcacatagccatatgtatgacaaactttgtgccgatagctctctctttgttttggatttttacctttagacaaacccagtggtccccccaggttttagagttagactgtttggaaactcctgcaaatatttctggcttggatggaaagcctggagtgtaatcagcttagctggtgacccatttcccccctcactggttagctaagcggattttctttgctgaggccttttgtagggtacaatgtatatcatgagtcttaaaggaactcatggaatttcaatattcaactggaagtgccctagttaatagagatgtagacttttcggatcttaaagagtttgtcagtgggaggaggattaatgggcaccaactgtgtgctaggtgttgtatttaacataatctcaaacttttctaaaaatatggctggatgcaatggcttgcacctgtaatcccagttacttgggaggctgagaagtttgagaccagcctgggcaacagagtgagaccctgtctctgaaaaaatacaaaaattaaaaaataatgagaaataaattcctggaaacactatgaggtatttgttaatattctcatgatacagaaaagactcacagagattaaattacattccaaagatctcaagattcagaagcacaaacaagagagaagactccttgggacagggtctataataggtttgcccttgaccctgttcctttcattgggcaagagtatagcttaaagcaaatgaccagtaaatatttgtggaataaatgaagagtgaaagagcaagcatataaaattgtatacatctctttttaaaatgtaggttgcccattttgatgaagtgaaatgcacagtattaaggaaaggttgtgaagtccaagaaaacaatcttttggtttaatcagaaaataccatcttgtatttgaaactggtgacccaagctgcagaagcagctgtcttgatgcagtaggagcatgactacaccacccgtggtgttgggaagagaacaaatgataggaatgaacacagaattactttgttactcatcacctattttcactttgagaaaatgattggaaattctaggtttcaggaatcaactgcaaatgatgaagcattagatggattctggccacatcccctgaacagtggtgctcagaatagcactgcctgcttgtttctcagacttctgtttaagactctaagaaatgtagaatctgtatggaattggacatctgacttggagtttgcttttcagactcaagaattacacaaatgttgaatttcctgaccctagttaagagacattgatcccccttcgtgtgttctgactgaacttgtggtctgggctgtaacagacctcagagctcccatgggctttcctgctgctgtgtgacttacatcatcatggattaccaataataggatttgccactcggaagctggggcgatacttattcaaaactcacaacgtattttcttacagagaaatatggcttcagtttttcattacttcctgttagttctggtctttctggatacacacgcagctcagcctttctgtctgccaggatrcacttgctcagaggagagttttggcaggtgcgctctgctggccagatgttagagggttatggggaatgggttttctttggggatgatgtggagtggaagcaggcttagaattggcaggaaatcagcaaaactctatgagactcattctagttgggactgaactttgctgaactgtgcatttttaccaaaatgagtctaactcttttatttcaatgaataataatatttttattctgattcacatgtctaatgccaggatcagcctgaccccacttttcagtcccctgttgtttatcttaaagctgttctggtttcttgtacaggactctgcagtgcacatctgtctccttgggaaagatccctgggaacctttctgaagagttcaagcaagtgagaattgaaaattcacccttatttgagatgccccaagggtctttcatcaacatgagcaccttggaatacctctggctcaattttaacaatatcagtgtgatccacctaggagccctggaacacctgccagaactgagggagctgagactggaggggaacaagctctgctcagtaccatggacagcgttccgtgccacccctctcctgagggtcttggatctcaaacgcaacaagattgatgcactccctgagctggctcttcaattcttggtcagcctgacctaccttgacctatcctccaataggcttacagttgtatccaagagtgtcttcctgaactggccagcctaccagaaatgccggcagcctgactgtggggctgagattctctccagcctggtggtggccctgcatgacaacccctgggtatgtgactgtcgcctaagggggcttgtccagtttgtcaagtccattaccctcccagtcatcctggtgaattcctacctgatatgtcagggccctctgtccaaggcagggcagctttttcatgaaactgagcttagtgcttgcatgaagccacagatctcaacccccagtgccaatatcaccatccgggcaggacagaatgtgaccctgcgatgcttggcacaggccagcccctcaccatccattgcatggacttatcccctgagtatgtggagagaatttgatggtaagccacatgcaccctctcagtgtatctggagggaatggagaggtctgtagcaaacccatcctcattagagagattcaaagctgggtcagtcacgaagggtgggtgcaagtaagattgggatagccctgaattatgctcactagaacagaaaagatttcaaggtagtgttccactattggcattattttaaatgtttgcatacagatctctttgcatacagaacatatacacatatataaacacatatttcagggctaatttaatatcttatgcaaatattataaaattttatatgagcagatatagtctttgggaatcttctagatgcaaaacactggactatgtattttagaattctagaattttttactaggattgattttagagatgatctattagttatttccttaacttgcctgagcagaatcacctggggtgcttgtttgaaataacactgacataaaattgttcagaccttattggcttgaatttgtaatactgggacccagggaaaggaagtgacctctgtgggccctggggctggaattcaaacctgcctcttccttcctggaaccctctgctctgttttcatacctcagctgggattacctttaatgctactctgtagggttgggcatatcacaaagccggggatggcctccctgggggtatcccaaagctgaaaagaaaaatcttcgtacattcctcgtgtcctgtcttctgttctctgtctagaagacaactaggaatagctgggtaaaacttgggaaatatagtcatttgcccaggtatttgttatacattatgacaaaactctggatggtttaaaaatacccaattaactgaattttcacattctgtattgttttgataataccttattggtttggcattcaatatcaatgaaagaaaattataggatttattgttgtagcctctttgaaaaccaagaaatgcatacaggtgttgtctttcgtggtgttctataatcactgtttggcaacgtgttatataatctctcagtaaaaatrtaagcattgaacacttactttcaaactaatgaggtaggtgattgcttatcatcccattttattgacaagaaaattgtcaagagaatttaagcaacttgcccagtaccacactggataggagctccattagggatagcagcccaggcatgtggctccaggctctgaggaactgtgcatctggaaggtaagaaggcacttcctgaagctcataatatcgtacaatcacatagttgcaagaactctcctgaaagccatggctcagcaaggcgaaggtggtttggtgggtgcagttagtgaagttgaaagagtatggtcttcatagattgaagagccaggtcccatatcaattgttgcttctgaacaactctcactacgggcaagttgatggattgctccaatcctcaatatcctatgtgtaaagatcagttatttatcttacaggattgctgggaggcaaacacctgacaccaggtacgaggttcataagaggttaccaccatcttctaacaacaacaataacaaaaaacaaagcaaaacaaaacaaaactggcattgctagacactttccagcagtctatcagataaatgcacagctgttttgtttttctttccacccagtgttgacatcttctactggagaagacactgctctgtcagagctggccatacctgctgcccacctggtagacagtggtaattacacctgcatggcctccaactccattggcaagagcaaccttgtaatctctctccatgtccagcctgcccaggccctacatgcacctgattctctttccatcccctcggagggcaatgcctacattgacctgcgggttgtcaagcagacagtgcatgggattttgctggagtggcttgcagtggctgacacctctaaggaggagtggttcaccctctacattgcatcggatgaagccttcaggaaggaggtggttcacattggccccggaatcaatacttatgctgtggatgacctccttcctggcacaaaatatgaggcctgcctcagcctagagggccagcctccacaccagggccagtgtgtagcttttgtaacaggcagagatgctggtgggctagaggcacgtgagcacctcctgcatgtcacagtggtcctgtgtgtggtgctgcttgcagtgcctgtgggcgcctatgcctgggcagcccagggcccctgcagctgcagcaagtgggtcctgcgcggctgtcttcatcgcaggaaagcccccagctgcmcccctgcagccccgcagtccaaggatggctcctttagagaacatccagctgtctgtgatgacggtgaagggcacatagacactgagggggacaaggagaaaggaggaacggaagacaacagctgaacaacccaggccatggggtggaaacggcttgggcttcaagcctctgaaaccaaccctctgcagcagctccatccatttatccagcaagtatatattgagcacccactgtgttccaagcactgaacttgacacagggggttcaagagtaaaaagggaaacagagtctttatcttcatgataaaggggacatagtcattatcttcgtaaagttaaagtcaatgaagatttgtccatcaaattaatcattttattatacatggtgattagaaatcactaaatattactctttgcatatacttagcctataacatttacatgcttatacgtaatgtctacgtataatattttacatatattatcctgtaaacgaaggtagacttctacccactttttataggtgaaaaactgcagcctggacagttcaatgatacacccagagtccacatctggcaggaggcagaagccccattcaaaagaggttccagttccatcgtttccttgaatgcctgttttgcggtattcttgtgtctttcattgtttataaagtgtgaccctctctcttcatgacaaactcctaatgagatcacataaatgtgatgttccaaagagctgcccatcagggtgatgagagctgttgggtaatgtgagtctctttttgtaggtgtctgttcccctgtgagcacagcccttggtgctgctgggcaggctggagccatcagcaccaaggaagagtaggggattggctgcagccctgggtctggcagagagcagactctgcagggccatacccagaaggaagagcacccatacgtccgctgctttcccctagtcaatgtctaaagccctcctatgaaatccatgagaggtggtcatttcctcttagccggacccatgtggaatggaggggccccaagaatcccaacatcagctcatcatcccactgaacagcccttctaggggagaccattcccaggatttaattcacatctgtctccctgccgtttccctcactggccacatgcaaacctttctaagagtgtaaacatgaactagactcattgtgacatctccacacgtttcctccttcccaccttttttacccattcctaatcatccttttaggcctctctcaagtgtgtacattacgtcttccacagagctttccttgacttcacacctctggggaaaaggacagtatgcacattgtgtccattggttgtgagacatttgcaggcaaagactgaccttcctcacggtggccactgcactcgtctaatacctggattgtgttcataatcaatgttagttaacaataaattttaaaaaattgaagatggctctcattttcagactaattgtccgctcatttcttcagattctactcatttgttttcttctgggcattagaaaaaaaaactctaaattaaaaaaaaaattgggacaggggtcactatgttgcctgggctggtcccaaactcctggcctcaagctatcctcccatctcaaagtctcccaagtactgggattacacctggcaaaaataacttttaaatgaaaatttttagtcacgccaaaagtagagagaatctcattcctcctcttctgtcaccttcagcaagttttaacatttcccaagcttatttcatcttgtccttgccctcaacatttttttttaactggagtgttttaaaacaaatacaaagcttcacaccaatttacctgtaaatgttttagtttgaggtctaacagatgaagttttaaaaaacataaacacaatgttattaccactcctaagagcagatattttaaaattagatggacatatatatatatttagatatgcacatgtgtaaaacacacacatacatgtaatgtagtagataatttattaatgtggaatttcctatgataaatttttgaagaaaagtggttggagcaagaaaagaacttgtacttcttgtggcctctctgtacttccttccatagcatcaagggggattgatatggtttggctatgtccccgcccaaatctcatcttcaatcttagtttccataatccccacatgtcatgggagggacccaataggaggtaattgaatcatgggggtagtttctcccatgccattctcatgatagtgagtaagttctcaaaagatctgatggttttataaggggcttcccccttcactcagctctcattcttctctctcctgtcgccatgtgaagaaggacatgtttgcttccccttccaccctgagtcctccccagtcatgcagaactgtgagtcaattaaacctgtttcctctataaattacccagtctcgggtatctttattagcagcatgagaacgaactaatacagtggtctacggatcttgagggtgtcaccatcatgaaatagcctgggctaccatgaaggtgagagtggatgttcagaccttcatgccaagcaaaagaagcttggtggtgcacatgagacagaggggtcaggatgagagaagggctgtggaagagcagcaagcagtgcaggggagagccaggagcatgttggtgggtagggaagtattcagttgcttctgtaaacatagaaatttagggagagggaaaatggtctagggaggatttctgagaatctgatactttttaagatgcttgggctgccccttgaaaaactctagagtacagattcacattactcagattgaataaggcaatttcgcagtggggatgcaagaatagaccctggctggaatgtggtttcttgggcttaaattttggttttcttactgactttgttgtaccagggaagttactatttttcatgtaccttagtcttctcacctataaaatagaataataatagtaccttagtgttctcacctgtaaaatggggataataacagtccttacctcatagggttattctggtaattatacgaggctttttttttaacatacaaagttctcagaacaatacctggcacatagtaaaccctcagtaaatgtcacaataataaatgttaccatcatttcaggcatctacatcagtttgtgctttctttgaatgtgactcagcacatagggccatttggaatatcagatcttattaagactacatatgtgtgtatacttataaatatatatatgtaataacatgatatctgggctaatatccttcacatgttctgtttaattcatgttgaaaagatgctacagtttccgatatagttgtcatgcccttgagaagcttatttatttagagtttagaccatacaagtttaaggcaaatgcctttgattgaggagacatttgtaagcagggctacttgcttttaaaatgaagactccctaggcccaggcgattagcaattaaagagaggaatgttgttctttttcttttcttctttccttctatcttgttagagacatacacctaacacctagaagagagcctggcacagaagatatactccaaacttgtcaccctaggaatggctgagtaaattattgagaaatgaataaataaccgaacctcattcaggcctcaaaaggggtacatgtgcacgattttataacatcaaaccgatgtccccaacatcagcctgttgctactctgctttattgatcaaatgatggtcgcttaagccatgaccgcctcattctggaaactaggcccttcagagaacccctccctaggttgtttgtgagtttcctaaggggtcctccatgtggcacatgccagtctcctgcctcattcctcatgtggcatcttctccattctccctctccatcccttggtggccaaggccttgaagactgtcaggatgtgccactgcctgtcaacagatgccaacacccctggcaggtggactggccttggattccctcaacgccttcagtccctaaaaatagaatcaccgaaatccttagagaagcagagcatggtggctccttcccagctctgatcacacttttctagcaggattctgagggacagctgcttgaggacagagtgccacaagttcttagagacctctcattgttcctaactcccctggaatgtcaacgcccaaatgcaggctgccggctacacaggccacagatgctgtggcatctgccctgtcctccactcccctctggatccactctcttctctttttctagcatgaagtaaaagcttctggacctacaggtgggtggaaacatcctggggggtgaggatgcatggagggggtcctctctttcaggacatggtgttctagtatgtgggccacagtcacggcaagtgtctactgagcttgtgtaagtagatacaaagccggtgctaggcactttacatatattagatcttttcatcctctctgcaaccatactttgcaccctgtgttaatgaggaaagtgaggcccagagagacttgacctcttgcccaaagtcacaattaatggcagaaccagaattcagacctagggctgtcaaactgtaaaggactttgttatttcatgtgattggaagatctgagctcagccgcaggaggaaaatgactctgcagagtatttggtgtcacatccatttattgtccatgaggctacagctccattctcagggccaggaatgggcaagcctgcccagtgtgccattcctgcctcccagctctttccctggaggcctaccatggtgccagcctggagctctgcctgtcctactgggaccgagcagacagccccttggcccaccattcgtaacacagggacttggctggcctcaccccactggcggggtctcctccagtgctgacaacacttgccggtgccttaagtttggctgcaccctcctcctctttcctagtgtggctcatgctggctaccgggcacttccccatccatggccagtttgcaagattggctctgccttggtccaagttcctggggttgtccaagagaccaccctcggtcccggatccacttgcaagcccaagcttccagcctagaggtctttaggacgcctgtctgagagacgacagtgcttcccaagctttcatgcccaccctaggcctcccaattcctgcccttgccgggctgcactggtagggtgggagagtgggcaattaattctagctccaggttccattcctctccatgcagccctgcctgggcttgtcctgtttgggagaaaagtccagtagacaaggcctgcaaatgtcctgctgttcaagatatctgcatggcaatttggacaaaaattttcagccttctttagagtcacatctgggggtcgaagaatggatccacctgctgaagcagccaggaggcaagttgagcttcactgtgtgtcagaaagactggtctccacaggtcagcaaacataaatgaaagcagggagcaggggatcagcatggcctttgggtaacagactttattttccatttacaaaagaggttgattgcatgcaagctgtaaggatgctgtattccctgtggagggcaagcatgatccagcacagtcctctcctgaaacacaggctggaaagtacttatttgctcagtctgggctcctggattgctcgagtccacctcttgcttaatactgttcacgttggggactgtagaaaccccagcaaggattctgcacactggcacatctcagtaacacctccaaacacagactcagaaatcaggaaagccacaaatgcatacaatctctttaaatgaaatcaccaatgtattctagaggggttgttagtaagtagagccaaatgcaaagaactgttctacttttctctctctgtgcacacatgtagatttcctgatagcaggttccttaaagcagggcacaacctatttgtattaaccccagaggccttgtatgacttctgtcctggggaaggttgtcacaagctgataagggctgccctggctagacaagatctttgctaccaacctgctgtgtggcctcaagcaaagcattccctccttgagaactcattttcttcatcttggcaaattaaagacttggagctctggttctctctgacggtagctggccaggacggtagcggggatggagtgagggaagaacaga

SEQ ID NO: 6984 - DNA, 14529 bp, Homo sapiens
  misc_feature (1)...(14529): n = A,T,C or G, or insertion/deletion polymorphism (see Tables 1-2)
gaaaagaatgaacaatatttttgttgtttgtttctttaaagaacatgggtctaaaagtctttaccaatctccattaccgaaaaccagaagtatgtgtgatggagagaaggctgccactccctaagccgctttatctggaaacagaaaattatggtccaatgcatagtgttccgtctagaattgcatgtaggtaatcttacatttttttgttgggggatgaccaaaccgctttgtggaatttagtgtatttgggataaatgatgcaattttggaattttatgtgtgaattatgccatgtttttggctacaattagacatcctatagttggataaagcagaataagacagactagacatgcttttggctataacaagaaattagcttcagatgtgagatgtagtttatttttattgataaaatacaatgtcagaaatacaatcatgcttcacttagtgatggagaatttgttctgaaaaatgcattgttaggtgatattgttgtgcgaacatcatagagtgtacttacgcaaacctagatgctgtagcctgcaacacacctatgctatgtggtacagcccatttttcctaggctacaaacctccgcagcatgtgactatactgaatactgtaggcagttgtaccacgatgataactatttgtgtatctaatcattgctaaacatggaaaaggcacagtgaacatgtggtatacaagataaaaaaaagttatacttttatatagagcacttcccatgaatggagcttgcaaggttaaaagttactctgagtgagtcagggtacaaatatattttctttgtttacattcttattctataagctttttcctatttttaaattttctttaacttttatacttttttgtttaaaacgaagatgcaaacacacacattaatctaggcctatacaaggtcaggatcatcaatatcactgtcttctacctccacatcttgtaccgctgaaagttcttctggggcaataacatgcatggagctgtcatcatctatgatagcaatgccttcttctggaacatctcctgaaggacctgcctgaagctgttttgcagttaatttttttgataagtaagaacagtacactctaaacagtaaacagtatagtatagtaagcacaaaaaccggtaacatagtcatcattatcaagtattatgtactgtacaaaattgtgtctgctatatttttataggactggcagtgcagtaggtttgtttacaccagcattaccacaaacccatgaccaatgcattgcactacaacgttatgatggctttgatgtcaataagtggtaggaatttttcagctccattctaactttatgggaccactgtagtctaagtggtctgtcattgatcacagtgtcattatgtggtacctgactgtgtaggggaacaggcaatgtatggtgatacaggaaaacagtcatagtaagtgactgtgatacaggaaagtgaggtgttttatggagaccttacaccctgataatatatagactataatttgcagagtccaaggtctgaataaggtacttcttcctttttttttttagctagtggaatcagaggggagaatgctgactatgtagaacaggctataattcaaacagtaagaacaaacttcccagagacatggatgtgggacctcgtcagtgtcgagtgagttttaaccattttctctcctatgtgtctttatttctattttctttttctttcttcaggtttattcctgggtatataaaacagtaccatatttgtaaaatatgtatcattgatttgcatgtacttatcatacattttattttatttttttctctagcattgttttcccttcaccaagagtttctcttctattcattttatgcagacagatttaacctgccccaattaaaaaaaaatgtggcgtttaaagaaaaatgacctttctatactcaaattttataaaaatccagctctcattatttttatctaatgccccatccaaacaatataactcacttttgagcttcagtcaatacttttctgcttgctctgcacttaattttaagttcttggttcagacaaagaatgtgttttaccgataacctcttcttccagttcctcaggctctgccaatctttcgttcctcattcctgatacgataacccaatgggaggcaagtggcttttgtgtgaatggcgacgttggatttggcatttcctctacaaccactctagaagtctcccaacctttctttattgaaattgcctcacccttttcggttgttcaaaatgaacaatttgatttgattgtcaatgccttcagctacctgaatacatgtgtagaggtgagttgttctgtttgatctggaggcaaaaatctaacaaagctaaaatatttcttaatatttccatattctctttatcctcaagtgcaaaatgctactataaaggtataagacttaggtccatattcctcaaacaaatacaattgctttcattcacagtgacagtttaaacagtgtattgagcatggtgtttcatagtgatgtgtgttccagtgctatcctcattgccatgattgttttcttagatttctgttcaagtggaggagtctcagaattatgaagcaaatattaatacctggaaaatcaatggcagtgaggttattcaagctggagggaggaaaacaaacatctggactattatacctaagaaattgggtaagcagctatctgtctacaccagtcactcatggaaaaaccagcccatatttattgtctccatttactttccttaaattgtctatacaaacgtgattttctccctcacatttttaaaattcttattgtaaattctccattagaaattctaatctatagtaatctaatttctggttgttaatgctgtgtagatcaaaaccaccattcatttttacaagagcataatgtaattaaaatacaatataaatgctaactggcatgacctatcatggactatatgtttggcatatgccatatcccaaatgaaggccatgctatcattaatgccaccttaattatttgacttctcgctgggtccttcacctaccatcatgaacccaggccaccttcaagaaaattgctgctccatcacaatgaccaatgagggaattgtcaggtttgtaaatttactagatgtgccatggggataccaaaatcactaaatgattggattgagataaaaaactgagaatattgtcttagtgcctatgctatctgcaagatggaaaaataaacttgtctcctattgaaatattgaaaatacatggaatggaaaaagtttaaaattctagtaaacaaggaatgctagatacgatgtgcgtgacacttttaatcactacttttaaaaaatggccattcaaatgttctttaatgtactatattcattgtattattttaacagcaaataatatatctatgagattattttagctcagttgtgatgctgttctcagactatttttctattagatttgaagtttctcaatatttctactgcacaagatcttcaaaatcctaccttggcaattgagacagaatactgtaccaacttgtatagttttatgacattaagtcgaagacacagttttaagagtgaaatagcaagcttcctgagacagagaaacactaaaacacaacaacaacaacaacaacaaaaagaacaatatattggttatgtatattggtatatagtcacgtaaataataataaccttaaaagaatgattgttttcaatcctgtaattttcacaagcaaggaaactggagatcagttctaattacataatgtgaaatcaggaagtttaaaaacaatggattccttgctaggacattatttcaatccagtgcctatctactatatcatattttactatgcttgcttgattttgggaagttaggagccctagttcgctgacattattagcctatattgtcataagtaacctttataaacaatcaatatcaagaaattgactcagacaactttgtaaaatgttacttttcctaaaatttcttaagttttaattaagtaaatttatcatttaatgtaaggaatcatgaaaatcatggaacaggtgaaatggaagataccacattatacctaggaaggagaagaaataagttattttgttctaagcattaacttaatgatagaatttggttaatccaattcaagacatggttcacagactctagtcatttctcattacagaagggaccaatgatcaatttaatttatatttgggaatgtcttccaggtaaagtgaatatcactgtagttgctgagtccaaacaaagcagtgcttgcccaaatgaaggaatggagcagcaaaagctaaactggaaagacactgtggtcaaaagcttcttagtagaggtatggatatgcaaacagtcaagcttttcctgaaaagaaacagacatctaagaggttttgtattaaaagatcttctcattgaagagacttaattagttgacaacatttacttttgacacaagacatgccattttaaatgaattaaaacagcataaagttcatcctttctttaattaatacctcacccaggatagtaaaacttaacatttgaaatagacttgacaattttttgtttgtttctgagtcaagatgtttcctgtacacctatttctcttccttctctttttccgattctcaaattcaagagacaaatctacttgtcctacactcccgtgcagttcccgtcatcctcaacaagaatcagcacttgtcagaggaacactcttgatttgcctcttggcaatccctgctccacaaagcacttttagttgtttactggagatgctatacaggatcagaggagctgagagtgtcccacagtgacatcaagataatgcctgtccaagctacagaacgcagaggctaaaatgggtaccggtgatgtcccgtgccttccagatatgaacaaaaggggaagatgagttggatcttctctcagggataaacttgcaccagccatgcttgagtgagctggtgcttaatcacttttccttcatggacagaggatctagactcattcttctgtgcttgtttgtgttattctttgacagcctgaaggtattgaaaaggaaaggacccagagtttccttatctgtacagaaggtaagaggatcttttagggagtcaaattagtcctaaataaaattcaccaaaagaatcagttcatgtcctctccttccacatgagtccatgtgccctgtgatttcactttaaataactcatggaggattcttgtgtttcatgctttatctttatggtataagtttatccatcaaaaagaatattcaggaggtggtttttagttcactttctgaggctggtctgctcctatctatttttttttccatcatgtgtattcttagctcctcttatgatatggttgtcacacaatattggacaatgagatattaggattgaggcccaatagcacataatataatcttggcttttgtactcttaggagaaaataacccatagatacatcactgcccctgcccctcagtctccggttttatggccatgaggggtattattttacctggttgatggtgatctgattatactccttcatctgagtcttcaagctttaccttttgtgtgtgttgttttatgtgttacagtcagtgtagtttttacattttttcatacataaatagttcaggcactaaaccagtgaagaacgggggccacaatctaacacacagatttatatgccattttctgaatgtactattatcctaaactgggtcaaaactccaaattcatctcctctaataaacaacttgtaaaataaaaataagtaatggaatcttatttccaatatgtttatcccccaaatctgctgatataaagaagccatcacattttttaaatcagtattttcattctaggtgccaaagcctccaagcagggagttttggacttgccaaatgatgtaghagaagggtcagccagaggctttttcactgttgtgggtaagttgawyaaattttgtgtttcactatgatttgaaaatcttggttgaggtggtctttaaaaatccttaaaataayagaatrgagagatyttcctaagctatcaattggagggaattattgwtcagatcatcctctakgtttcctgatgggatctaaagggattacagtaccgtttccggacctgtattcccaggaaaccttagcttgggtagatggtaactagtgttcagaaagcaagaggttctttataatcattaatctgaaatatgaaattcacctcttggagaatcgaattaacgttgcctgttaatgatgttgggagttttctcaataaaaggagaaatgtttgttgttgatacgaaaggcaaacttctttgtctgttattaacatgaacatctcttggaagggatggattacactttgtaattcataggrttgattgattaaaaaaaaaactagcaaacaagcaaacaaatgcattctcctaacttcctcctctctctagtaatgagattttcagaaatatttttcatagcagtttaacttcacccttcatggctgtctcttctttcaaattgcttcataaaactttctttgtttccaccatttagactcaattttaaatgttacctatttcactatgcctcttttgtctatagttattaatgctgagatggcaactataaacaatacagctttccgcttttcctgtttttaggggatattctaggacttgccatgcagaatctggttgttctccaaatgccctatggaggtggagagcagaatgctgccctactagcatctgatacttatgttctggactatctgaaatctactgagcaactgacagaggaagttcaatctaaggctttctttctcttatctaatggtgagaagawttaagtaatttctgcccataattkttgaaagcaattgttactcrtaccaagaygtcataagctgtttttatgcagtagtctggtgaaagaaaagtgaacctgaaccgaggaactctcagtcctagcgctgttttccgtctgacttcaaaatctgtgtggtcagctagcktcataatttacagctgcaaagttttcaagctatgcacttaatttttttttaatgtctggtattttgcaagctaccttgtttattgttgttattattgttgtttttgttaggagttgttgtcagtggttcatctatcarcgtctgtatttgtttgctcagctgtggtctgttgcagtgaagtgattggctttgtatacasaaagagggccaatgttgtgaamtgtgaggttaaggamaagtccaggagcataaaataatcttctttggtttttcttctcagaaagataacactgaaataaaatgaccttaggggaaatatactgaatagttagtaggtaccaatgacgaggcaattactgagccagacatatccatgtgtattatcttgtgatcaaaatcctataaagtaagagttattttttctcccttatgaatacagaacctgagtttcagaagttcaaatggaaatgatcatcctagtgatttgtgtctaacaccaatacctagggcttgcactgcactattctttctcttctaactttcttaggttaaaaaataatttcctacaatgttctattttaggttatcaaaggcaattatctttcaaaaactctgatggttcctatagtgtgttttggcagcagartcagaaaggaagcmtatggtgagacataaaaattttattttatataatataggaattacctgaggagggcttgcaaggaggtgaaggaggatagagttcagtggggatttagaagcaaagtgggtttcaaagtcaatttacrgaagagaaatagataaaactaaagatttagtgattccaattctaatgcaacaatgttccttcagtctcatgacgatttgcttagcagtctgatcccttcatgacagcccctakacatgcaccgctggttaactccaccgaagagggcacggcacgtcttactctgtgcttctcagagtcccatatagattcgggaaagtgaaattagaaggacccaaaatacctaattacatcatttctctctccatgtgcagataatctaatgggctatatacaacaggacctttgggtgcaaacatgctgaaaattacctactctaatttccacttattgctagtcataatattttcctgacccaaaggaaagggccactaacaataaagatggtttacagtagatgagttgaatgcatcctttactcaaagggaacartggtgatgaamctgtggaattgctgacattgtcacttcctctttatctaacttttgctttggtgatttgtattacagrctcagtgctcttacttttaagacaytggagagaatgaaaaaatwtgtattcattgatgaaaatgttcaaaaacagaccttaatctggctttcaagccaacagaaaacaagcggctgctttaagaatgatggccagcttttcaaccacgcctgggaggtgagagaggagaagcaccaggctttccttgttcctgggcattgcctgccttgccctgcctctggctttcctgatctggaatatgaatattcttcctgtgcctatgaaaccttctgaggcactgcagtcctgggcctgtggtgggttggtcagcagcaccattcctgctttgtgcatgtttaactacagcctggatgtgactccttctgagtctcttgtctgccttattcagtctctagtccttcccgagtcagtcctcttcagaaattaaactagaaatagaagggaggggagagaaagggaacctagaaaagaaactttcataaatttggagacagtcaatgtataaagggagggggctgtgagtgtatgaggaaggaaagtttattcctgtccatgaatggcaagaaagttctggggagaatatctagtaattcatattgtttcaatgaagcaagtttttctaagaccctctcaaggaaaaattcaaaggccaagcttgccccggggccaaagtacaaatgaggtgaagtatatccttggcaaaatccaacccttttcctgtccatatttacgtaaatccctcccttccaacttcctttctttgcagatacctgtccatctccagcccattttctatctcctttcccctcctttttttccctgtggttgctcaaaatctcctatcatggcattttagcatgctctgatggcccctgaaataccctgagcttttcttcagcatccttcctcataatcatcactcctgttcttgaaacccagaatgcatatctaatccacacactctgatatttaatttgcatgcaaattgtattcaaattgctttgtggtatttttaatgtattccaaacttattccttacaacaggaggaccctgatggagatgagctcttactccttcatagaaaaatcaaaaactttcccacgttctcttctaaaacatcttcacatctttcttcttattggattcattactggtgaatcattgctgattactgctacagtttgtctgatcttacctagtattttctctataattaaatatctgtgtgggtgggtgtctgtgtgtgttttgagttgagagaaataaaaatgcaagggaaaaatcaaagcttacactgcagaggaatggtgatcccacttgctgtaatttagatgtactgacagtcctcgtacctcatgttagtgtctaccatatgctgttatttccatcttaaacacttggtttctcagaagtatttcttttctgaagaagacaggagttgtcctttgcttaaatagataaaatgggaagcttcacaannnnnnnnnnnnnnnnnnnnacggtcctggaggaagaaaatgatattactttcaatatgacagaaggtggacacgcccccactgatattgtttctaattgcaaggtgggagaggaggatatgacacgcgatatcgcagggagtagaaacacccctgtgatactgttcttaatattcagggaggaagaggatgatattactcccaatacagatgggtgtacgccctctgtacactgagggtgtacacccgtctgtgaaacagttcataatctccggaggtctccagagggggagatgatattactcacaatatggtaaacaggctgtgagtccaccgtggatcctaagagccagggggggaagaggggctggctctcagtcaccacagcatggggggcctttatgttcaggttttgcccaagagtcagcttatttgcttctagtactagcagggtagttgctgccaaggccctccaacaggggggccatcttttagaaaccctgtctagttgtttagagacgtaggccactggcctcagccaggtccccacagtttgggttaaaagtccagctgccatcttttctctctctgaagcatacaatggaaaaggctttgtcacatcgggtagccccagggctggggctgccagaagtttttcctttaactcatgaaagccttcctgttgttgggatccccattggaaagctttccggtccccaccccctttgtgacctcatacaaaggcttggctaatactgcaaagtttggaatccacagtctacaaaaccccacagctcctaagaattctctaacctgccttctgcccttaggctccggtagattgcaaacgacctgctttctttctgatcccgggctgcgttcggacccctgtcgtatagaaaatcccaagtaaggtacctgccgtcggcagatctgagctttcttcttggacacctaatacccacagtcctccaggtgggtcctaaggatcttaggatccgcaatgggggtcttagccagtgggggaagaggggctggctctcagtccgtgcctcacggggggtgcctcccccgcctgcgatgggggtcctaagagccaggggggaaagaggggctttctctcagtctctgcctcgcggggggtgcatccccccactgcgatgggggtcctaagagtcagggggcgaagacgggctggctctcagtccccgcctcgcggggggggggcctcccccccgggatgggtgtcccaaaagccagtgggggaagaggggctgactctccgtccccgcctcgtggtgtgtacctccccccactgcgatggtggtcccaagagccaggggggaagtggggctggctctcagtccccgcctcgcatggggtgcctcctcctccctgcgatgggggccgaagagcgagaggtgaagaggggctggctctcagtccctgcctcacggggggtacctcccccgctgcgatggctgtcctaagacacgggggggaagaggagctggctctcagtacctgcctcgcgtggggtgccaagcgcctgcgatgggggtcctaagagccacggggggaagaggggcaggctctccgtccctgcctcgcggggggtgcctctccccgctgtgatgggggtcctaatagccagggggcgcagaggggctggctctcagtccccgcctcgtgtggggtgcctcccccccccgcaatgggggtcctaagagccaggggaggaagagaggctggctctcagtccctgcctcgcggggggtgcctccctcaccagcaatgggtgtcctaagagccagaggggaaggggggctggctccggtacattgcaaatgacctgctttttttctgatcccgagctgcgttcagacccctgtcggatagtaaatcccaagtaaggcaccttctgctggaagatctgagctttcttcttggacacctaaaacccacagtcctccaggtgggtgctaaggatcttagaatccgcggtgggggtcctcagccagagggggaagagggggctggctctcagtccccgcctcgtgggggatgcctccccccctgccatgggggtcctaagagccaggttgaaagaggggctggctctcagtcccagcctcgtagggggtgcctcaccccctgcgttgggtgtcttaatagccagcggggggagaggggctggctctcagtcccagccttctggggtgtgtctcaccctcctgcgatgggggtcctaatagccccggggggaaaggcgctggctctcagtccccgccccgtggggggtgcttccctcccgcgatgggggacctaagagccaggtggggaagaggggctgcctctcagtccccgcctcgcggggggtgcctcccccgcctgcgatgggggtcccaagagccggggggaaagaggggctttctctcagtctctgcctcgcggggggtgcatccctccactgcgatgggggttctaagagccagaggggaagaggggctggctctcagaacctggctcgcggggggtgcctcccgcccctgcgatgggggtcccaagagcccggggcagaagagttgctggctgtcagtccccgcctcgctgggggtgcctccccccatcgcgatgggggtcccaaaagccagtgggggaagaggggctgacactctgtccccgcctcgcggtnnnnnnnnnnnnnnnnnnnnnnnnnnnnnnnnnnnnnnnnnnnnnnnnnnnnnnnnnnnnnnnnnnnnnnnnnnnnnnnnnnnnnnnnnnnnnnnnnnnnnnnnnnnnnnnnnnnnnnnnnnnnnnnnnnnnnnnnnnnnnnnnnnnnnnnnnnnnnnnnnnnnnnnnnnnnnnnnnnnnnnnnnnnnnnnnnnnnnnnnnnnnnnnnnnnnnnnnnnnnnnnnnnnnnnnnnnnnnnnnnnnnnnnnnnnnnnnnnnnnnnnnnnnnnnnnnnnnnnnnnnnnnnnnnnnnnnnnnnnnnnnnnnnnnnnnnnnnnnnnnnnnnnnnnnnnnnnnnnnnnnnnnnnnnnnnnnnnnnnnnnnnnnnnnnnnnnnnnnnnnnnnnnnnnnnnnnnnnnnnnnnnnnnnnnnnnnnnnnnnnnnnnnnnnnnnnnnnnnnnnnnnnnnnnnnnnnnnnnnnnnnnnnnnnnnnnnnnnnnnnnnnnnnnnnnnnnnnnnnnnnnnnnnnnnnnnnnnnnnnnnnnnnnnnnnnnnnnnnnnnnnnnnnnnnnnnnnnnnnnnnnnnnnnnnnnnnnnnnnnnnnnnnnnnnnnnnnnnnnnnnnnnnnnnnnnnnnnnnnnnnnnnnnnnnnnnnnnnnnnnnnnnnnnnnnnnnnnnnnnnnnnnnnnnnnnnnnnnnnnnnnnnnnnnnnnnnnnnnnnnnnnnnnnnnnnnnnnnnnnnnnnnnnnnnnnnnnnnnnnnnnnnnnnnnnnnnnnnnnnnnnnnnnnnnnnnnnnnnnnnnnnnnnnnnnnnnnnnnnnnnnnnnnnnnnnnnnnnnnnnnnnnnnnnnnnnnnnnnnnnnnnnnnnnnnnnnnnnnnnnnnnnnnnnnnnnnnnnnnnnnnnnnnnnnnnnnnnnnnnnnnnnnnnnnnnnnnnnnnnnnnnnnnnnnnnnnnnnnnnnnnnnnnnnnnnnnnnnnnnnnnnnnnnnnnnnnnnnnnnnnnnnnnnnnnnnnnnnnnnnnnnnnnnnnnnnnnnnnnnnnnnnnnnnnnnnnnnnnnnnnnnnnnnnnnnnnnnnnnnnnnnnnnnnnnnnnnnnnnnnnnnnnnnnnnnnnnnnnnnnnnnnnnnnnnnnnnnnnnnnnnnnnnnnnnnnnnnnnnnnnnnnnnnnnnnnnnnnnnnnnnnnnnnnnnnnnnnnnnnnnnnnnnnnnnnnnnnnnnnnnnnnnnnnnnnnnnnnnnnnnnnnnnnnnnnnnnnnnnnnnnnnnnnnnnnnnnnnnnnnnnnnnnnnnnnnnnnnnnnnnnnnnnnnnnnnnnnnnnnnnnnnnnnnnnnnnnnnnnnnnnnnnnnnnnnnnnnnnnnnnnnnnnnnnnnnnnnnnnnnnnnnnnnnnnnnnnnnnnnnnnnnnnnnnnnnnnnnnnnnnnnnnnnnnnnnnnnnnnnnnnnnnnnnnnnnnnnnnnnnnnnnnnnnnnnnnnnnnnnnnnnnnnnnnnnnnnnnnnnnnnnnnnnnnnnnnnnnnnnnnnnnnnnnnnnnnnnnnnnnnnnnnnnnnnnnnnnnnnnnnnnnnnnnnnnnnnnnnnnnnnnnnnnnnnnnnnnnnnnnnnnnnnnnnnnnnnnnnnnnnnnnnnnnnnnnnnnnnnnnnnnnnnnnnnnnnnnnnnnnnnnnnnnnnnnnnnnnnnnnnnnnnnnnnnnnnnnnnnnnnnnnnnnnnnnnnnnnnnnnnnnnnnnnnnnnnnnnnnnnnnnnnnnnnnnnnnnnnnnnnnnnnnnnnnnnnnnnnnnnnnnnnnnnnnnnnnnnnnnnnnnnnnnnnnnnnnnnnnnnnnnnnnnnnnnnnnnnnnnnnnnnnnnnnnnnnnnnnnnnnnnnnnnnnnnnnnnnnnnnnnnnnnnnnnnnnnnnnnnnnnnnnnnnnnnnnnnnnnnnnnnnnnnnnnnnnnnnnnnnnnnnnn

SEQ ID NO: 6985 - DNA, 17739 bp, Homo sapiens
aggaattccctggtggctcatattgttggtagaatatgttgaaagtttcagcagtgattgcgaacccttctaccgcttcaccccgcccccaccacacccaaacttcatgcctctccccaaccaagtctgcatgactttttaaattactatttatattactacacatattattgtacacaggactaaagtggccccgcctagtttcaataacttgtgtctcgtaaaaagataaccttcttaaggagagaaaaccttgctaaactcaaaatctcccttgccttcagcagtatgcagaaagttctcacacttgtcctgaagagaaatggttggctgtgaacttttgtcagtgtacaaagaactagatcaaaagttaaatgtaggcagaagtcattgcaaatgcaattcccccgggggtgatgtaaaaattcattggtcttaagcctatgaatgcctcaaaaatagttatggggtgggatgtttactgggaaactggttcgcttcttttgtagggaaagtcaagtcatttaatacatgagggatttctgacttccccccacccaaagcttcgttatggccttcaaggccttttaacagagtgtgaacaacaactctttcagttttttcctggacacctacctggcacctcctacttgtatctttagatctcacctcccttatcaacccaggacccaacacttaagagttttcagcacccgttttgttcctattactagctaccaccatttacgtagcatccaccacatgccttgtactctctgtcatttcattcagacctcactcagcccggtgaggtgggcgcattactggccccattttctatagtggcttgctcgggtgaggtaactgttcaaatgccctttattcccagcaagaatcccctgaagggaatgcatataggaccaatcccactctttgctaaatttctgtattgcagagtgtgcatcggcatcatacattccctccctcagtctcaggaatcccgacacagtattgcagagtaaagtctaacagtttcaggtccactagacccctaaatgcagaaattgaatcttgttcatctttgtatcccccacagtgactggcaggagtaggggctcattcagtattataatatctggatggtactgaaaaagttacagcagcatttcagaggggaaagttccccttcatcaatctgcataagtagctctgaaaagaaataaagtggccccactgcagaagtagttctgaaaaaaacacaagaaacacctcaaaagccaccggtgctttagtaaagcacctccgcttctgccatctccccacaatgaggaagctccagtaccctgtccacatttctaaatggcactcatcggattcttaatgagttgcaggctttcccaacgggactgtgtgacagagccacgctcttgctcatctgcgtaatccccacactgaagtggagttgttcatgaaaacttactaaataatcaaatttcatcctctcaagcaggatatgcagtggtactttgctacaaatacatttaccactacgaatttctcacttcaagcgatctcctgcccaggtgtgtgctctcagaaaattacatctctttctgaattacgctggcaaaggtggacctgttttcccaaaaggaccgtcagcacacccagcacagaccacctggggagctgaagaaaacgacctccctccctcctccccgctgggattccccgggctgagagcgtgagtgagaagcgcaaggcagtttctatcatgggatgactctccgctgggaacttcagggaaaccacaaccatcattactcaggccagacagctgccagaaaagcagcctagcctaagaactgaagctgaaatagaggtgggaggctgtattccattactaagcgcgggagcactcactcccaagtttgtccacatttcaagaatgttaaaaccctgtggtagaaatccctgattatttataacttaaactaccgtgtaaaagcagaaacttgacaaatgaagacataaaaagaactggtgacaggtaggctagtactagaatacaaagcattcatcacactcctcttttgtgggtccttccaaacctccatccccattccctactggaaaaaaaaaaaaaaaaacaacttttacttctattacagacgcagctgattgaaagggaaaagggattctgctctgtgatgagttttcagtttctctcacgtacacaagcctgtaactttgcatcaataccgagtgtggtttgaaatagagaaggaaaacacaaagacatgcaagcgacacaacagacacgagatgcctccaagccagcagaaatccaggacaccgggttcaagacagtgtcccctactcgcgccttaatctccagcccaagtgacttcagagtaaaggttccaggagccccggaggccacgagtcatcagcccggacggtgaaacctacccctcccctgcgtcccacgtccggatgggagaatcccagcttcctacggcgcatcggggaacaacttcagagcagcacgcgagcagagcccccagcgctcccacgctcacgctcacgaccctcctcccaaccgcgcggcacaaggaggcacttacgcggagccaacctgacagctcccgccggggtggaaacccgcggtctcctcgcaccggcatttcggacacaggtcccgcgtaggcgcgcagctccggaccccgcttctgcttctgctcctgctcctactcctcctgggcaccaccggacagtgctctgacccgcagcccaaccgccggggtgccgacccgcggggacccacccctttgtccctcctcccgcggcggcggcggcgtcagcccgcccccgacccgagcgtggcgcctccgcgctggccgcccggcccgggaaactgtcaaattggccgctaccacccacgcgcctgccggggaagggctcgccggcgccgcgccttcgaggctcctgcggcgaaccgcgtcacgcgcgactcctggccgggggcgggaggcggcggcggcggcaggagaagcccaaggcccgagcggcccgcagcccccacgcctgcacccctccacccccgccagcccgatggttcgctccgcggcgtgcactggagcaagcaggtcccgctccgagcgcgcgcgctctgggaagtgctgcaagtttggagacctggagtgagctccgggcgctgctggcccgactgtccgcggtgtttccccggtgaggtcgcgggggcatcctgtaggaagactttttggcgaggttcgcagggcctcacacaggcagcttcagttctcctacgaagagtcgaactgggaaaacctcaaagttttaggtcctgtctagaggcctgcccggctaaccaacacatacacggccttgtaccccacatttctcagcccaacaactgcctacccgaattccgagggttataagatgttcgtattaaatattaaaacaggacttttcaggacaatatattccaggttatctctttggcacatttccaacaactccaataaagagattgaaactcctctcccatcatcagcttataaaaggttgccagtaggtcacaagtgcttatctgacaggattcatctaatgcaattcagtgtgcttattcctttcgaagtcctccatgtgcaaagaattgtgcagtgacgttaagtgtctttattttaagagcatataaattaatttggagaatccaaacaggtaccgattaaaaatataaccttgggtttgaaatcttaaaaaaccatcttgtaagagaatagttttgcctgccctgctcttcccttaattggaaagcaaaactcgtcctaggctcacaagtagaaggtaaaaggtgtggtctgtcccagaggagatgcagatgctgggctctctccctgaaaagttgcttcacttcctgcctgatcaaaacaagtctagaagtttcgtggaaaaacaagtccagtagatgcctctccagaagtgttatgcttctggactcctttggagtaactaagtccacacctctggataaaaagcactgtgagtaacgtttcccactttgcctcgagtctccggacttagacattttggttgtattcctgatgtaaggcattgctctcctgatctaagcacctatttataaaatgtttcccaaatctggccaggcacggtggctcatgcctgtaatcccagcactttgggaaggcaaggcaggagaatcacttgagcccacgagtttgagaccagtctgggcaacatagtgagaccccatctctattttttaaaaattgttttaatcaaaaaaaaggaaaaaaagataaaatatttcccaaattaggtggtgctgactaataaaaatgatagcacttgaaaggtggccacaccttaatgatgtgggcttagagccactaacatttaaaaaataatccagaatgtggcagttacatctactgactgatttccttttttctctctagagcggcactgttcaataagatgaccacttgccaccagtaagtgtttacatttacatgtaaattaactaaaattagaggaaatgacaaattcagttcttcagtcacacttgtctcatttcaagggctcagaagccacatgtggctaatagctaccctattggacagtgcaaatatagaatatttccatcaatgcagaaagttctgttggactgcactactcgaaatgatgaaatatttatagacaaactccattcttctggcacaacacctgacagatgataagcattcagtaaatggttgttagaaacacggttcagttgatatattagcttttttgctggtggcagtgtaaatcaatacaactctttggagaaacaatttattagtcatcttcttcacgtgtgggtttgcacattttgaccccactcctagaatgtgtttatccaaagaacttctactccgcagggcgcggtggctcatgcctgtaatcccagcactttgggaggtcgaggcggacagatcgcgaggtcaagaaatcaagaccatcctggccaacatggtgagaccccgtctctactaaaaataacaaaaattagctgggcgtggtggcgcacgcctgtagtcccagctgttcaggaggctgaggcaggagaatcgcttgaacccaagaggcggaggttacagtgagacgagattgcaccactgcactccagcctggtgacagagcgagattccgtctcaaaaaaaaaaaaaaaaaaaaaaaattcttctactcaacaggtacttactgaacacctctgtcaaccccttgataaaatactcaggatcctgccttaggaaactcagtctattgcagtagacaatcaacaagtaatgataaactgtgtaagcactgagattcctggcaggctcagagtggtctagcaggagagacttagggaaggctttccagagatggggttgcttatacattctaaaggagaggtcggaatgagtttttaagacacaaagaaggaaaaaagccttccaggtaaggggaataaataacacagagagaagtaaggaaggaagagacagcaggcttactcttgaggtgccagaaggtgaagttgcccaggcaagtataaagatggatttgacagttggtgggggacaggggttggtgggggaggagaatgttagtaagaatgacaagaccggccaaaaatgcatttttgtgggaatgcaggtgagagatgacgtggctatgaagttaggcagtgttagacaaaagggagccagattctagagaaactaaggaagtagatcagcaggctggatgactgcctgactagatatggggagacgcgagcgggaagtgagcctacgctgactctcaggtttctggcttacttaaaggagatgacggtggcttttatcaaaacagaacacaggagtgggagcagatcttgggaggagcttgaagaaagatgatgagtttagttacagactgattttcaagtgctatgggtcatccaggtgaagatgttcagtaatttaacaaatatgtatcaagtgtctcctatgtgctaggcactgatgagtatttgaggagagagatttgggagtgatttgggtatcatcaatgtatcataaaagttgaagtcttgggaggggacaatcccacattcagagacgtgatgtagattaagccaagagaggactaaggacaggactcatctctgggaatgccaatatttagggggcagacttgagttgccagaacagagaccaaagaggagctgccagaaaggaaagaaaacgcttctggaggagagtgtccaaaaagccaaggaaagaacaaacttcaggaaagagggagaggccaacaacatggaatttcgaggaggtcaattaaggtaagaactgatgatgttcattaagtggaggaccactgcttatcttggccagagcttttcaatggaaagatacgactggaggttagattacagtggatgactaggtatgaggcagcacttcactatatgcctgtatctaataatgaatgatggaaaccaccaatgtccaatgatggtgggctgggctattaaattacagtaaatcaacataattggcatagcagaccatcatttaaaattgtaataaggaagtctatacaacaaggagaatgataatgctataattatcaacaaaaaaacacaaattacatctaatgtatgatgatgacagtgataaaattataaaaaaaataaaaactggaaagtatgcaaaaaaatgacttcatgaaaagacaggcttgtgcatatatttttctttttaaatttagttattgtttgtgcaatggacaatttttttcaacttttcagtgtatattacaatatataaggtctctgaaataggttggtcagctaggtgcaggggctcatgcttgtaatcccagcactttgggaggctagacaggaggattgcttgagcctagggatttgagtccagcctggacaacatagtgagattctgtctctacaaaaactaataataaaataaaattacctgggcatggtagcatgtgcctgtagtcccagctactcgaggactgaggggagaggattgcttgagcccaggartttgaggctgcagtaagctatgactgcaccactatactgcagcctaggtgacagagagagacactgtctcaaaaaataagaaataagttggtcagaagaccttaatgagataaactaaatgccttttagtcatattttctcaagaatgtggagatcttaagaaacatatctgtgtgtgtgtatatatatatatgtatatatctgcaatatggttataaagtatcatcaactgggagcaaagaaaactaacactgaaaagtttacaagttcagccgggtacggtggctcacgcctgtaatcccaaaactttgggaggccgaggcggatggatcaactgagatcaggagttcsagaccaccctgactaacatggtgaaaccccgtctctactaaaaatacaaaaaaattagctggcatggtagcaggcgcctgtagtcccagctacttgggagactgaggcaggagaatcacttgaacttgggaggtgggggtttcagtaagccgagatcacgccactgcactccagcctgggcgacaagagtgaaactccatcccccccccaaaaaaaaaaaaaaagagaaaagtttacaggttcaccaaacaatttagttaacgtgtacactgtaaagtagactggaatcgtaactctcctttaacaaacctttcttgaatgcctaccatataccctggggtagctatacagaagataatgacaatttataaaagggagcctgctcacagtgtgttgaagacaacgatatgtaaacacattgtgacacgttaggagaattgctcaactacagagatgactaaagtgctgaggcagcagctaaaactccgccagaaggacctgatgttttttcagtaaaggccttgtgtcctcccccgtccccgcccccacttccaggtagcctcatctcctctcctggctccacccatcttcctcagtccaaacaccagttaacaataaccacccggttcacctgcaggcttcctcccacaataatcaccccactcaatggcccctgtgattacctccaggagagcggcatctaacgttctgcttcccccttatgctttcacttttagttattatatattactttcttttttctttttttttttwttttgagacagtttcgcgcttgttgctcaggctggattgcaatgtgcaatggcgccgtcttagctcactgcaacctctgcctcccaggttcaagcgattctcctgcctcagcctcctgagtagctgggactacaggcgcccaccaccacacctggctaatttttgtatttttagtagagatggggtttcaccgtgttggccaggatggtctcgatctcctgacctcaggtgatccacctgcctcagcctcccaaagcgctgggattacaggcatgagccaccgcgtcctgccctcatgatcactttcaaagtttgttaaagtcctcctcttttttcttttttgagggtgggggtaattaacttgtacacttcccagatcctaaatagcttcgacactgttttcagttgtacacagagctgcttctaatgccatatgccctctgacacccacccccaagaaataatagacctgtgaattgagatgctcctcattccaatacatgatggttctagaaatagagaacaaagctgactttatagcaatcatagatgtataaagattacaaagacagcaaagtattttcaagctatcttccagcacagaggaacacattctaaaccactctaagaactctcagacctcctccatcttttgggcaactgaagattcttgcttttcctttagaaacattcagtggatcactcataagtaattttcagactacctgtcttcaggattgttcccacatcttgatattatgtagaaagaacaaagctgctctaagttgccacttttcaattattttaggttggtgcaacagtaattgcggtttttgccattaaacccaacaygttggcatctacgtttctagtatctcaaagaacagaacaaattttcacgcagacattcttcttcttcttctttttttttttttttttgacagactctcgctctcttgcccaggctggagtgcagtggtgcaatcttggctcaccataacctctgcctcccaggtccaagcaattctcgtgccttagcctcccaagtagctgggattacaggcatgtgccaccatgcccggctaatttttgtatttttagtagaggtggagtttcaccacgttggccaagctggtcttgaactcctagcctcaattgatctgcytgcttcagcctcctggcctcccaaagtgctgggattacagacgtgagccaccacaccaggccaggtagacattcttctatttattaaagcaagtaacttaaggtgtaaggctatttacattgttccatagttactaaaaactattttcatttttgttaattttttagaccactgagttttgcaagaataaggtgctcattataaagcatctgaggagttcagaagagcaccaagaaatttaaaaactaaagtcctaatacctgtcttcgacattaggtgaacattccagacatatatacagacagaagaccacatggatgacttatcaagaaacgaaaaatgtttacaaaaatgagatccyactacagtattatttttatttatttatttttatttttatktttttgagacagtcttgctgttgcccaggctggggtgcagtggcatgatctaggctcactgcaacgtccgcctcctgagttcaagcaattatcctgcctcagcctcccaaactgggattacaaacatgtgccaccacgcccagctaatttttctggggttttttttttcgtagagacggggtttcaccatgttggccaggctggttttgaactcctgacctcaagtgattctcccgtcttggcctccgaaagtgctaggattatgggcgtgagccactgcacccagcctattttatttatttttcagaaaaagtctcactctggcccaggctggagtgcagtggcacaatcatagctcacagcagcctccaactcctgggctcaagcagtccttccacctcagcctcccaagtagctgggactacaggcccatgccaccaggcctggctaattttttaaaaaatatatttttaaggctgggcacggtggctcacgcctgtaatcccagcactttgggaggcagatcacttgaggccaggaattcaagaccagcctggccaacatggtgaaaccccgtctctactaaaaatacaaaacttagccaggaatggtggcgcatgcctgtaatcccagctactcagaaaaaaaaattatttttagtagagatgaggtcttgctatgttgcacaggctggcctcaaactcctggcttctagctatcctcctaccttggtctcccaaagtgctgtgattacaggcatgagccacggtgcctggccctgtgttgttttactgtttaaaactgttttactgtttactgtttaaaaacagtaaataaggttaggcagatggctcacgcctgtaatcccagcactttgggaggccaagatgggaggattgtttgagcccaggagttcaagaccagccttgggcaacatagcaagacctgatctctacaaaaaacagctaggcctggtggtacacacctgtagtcccagctacttgggaggctgaagcaagaggatggcttgagcctggaaagcagaggctgcctagccgagatcgtaccactgcactccagcctgggtgccagagcaagaccctgcctcaaaaaaaaataaaaaagaattagctgtgcaattcagagtcagctatggcctgaacggattaagaagctggggtgccctagactggtgtttggggagagtcctgggttggaaggagatgactgtagtctaggctgaccacatgcagactcctaggtgacttatagggctcatctgggtgtgctcaggctggtgggcagaggccacggtggtgctccgcctggggctgaggcagagcgtaaccctgatccactcctggaaagccaagaagcatcctatggcacacgttctagtttagacatacctgctggggagcgtgctttgcaacatggaggagggagcacttcttcctggcaggacaccctgggtcctcagaggcactccaaggtgctccaaagtatgacagcttttactattttactgctgtttacactgcagaatatatgaaagccacactctcttttcggggatagagaccccttgttagccctccactgagaagcagtggagaaactctgataaacaatgattgactaaatgcatattctgtgccaagagcttttcatatactatactaagtcattcaatgtagtgactatatagtcagtattcttgcccctgctttatacgtgaagaaactatgcttcagagaaagcagyttgcccatggtygtcctcaagcagatggaatccaaacccaccgggcatggtggccacacctgtaatcacagcactttgggagaccaaggtgagaggatcacatgagcccaggagttcaagaccagcctaggcaacataggaagaccctgtctctacaaaaaataaaaataataaaagtaaatgagctagcgtgatggcacacacctgaagtcccagctactccagaggctgagacagaagaatcacttgagtccaagaggttgaggctgcagtagccgtgattgtgccactgccctccagcctcagtgacagactgagaccctgtctcaaaaaaagaaagaatccagccaggcgccgtggctcaagcctgtaatcccagcactttgggaggccaaggcaggcggaacacttgaggccaagagttcaagaccagcctggccaatgtggtgacaccccgtctctactaaaaatataaaaattagccgggcgtaatgatgggcgcctgtaatcccagctactcgggaagctgaggcaggagaatcgcttgaacctgggaggcggagtttgcagtgagccaagatcgcaccactacactccagcctgagcaacagagcaagactccatctcaaaaaaaagaaaaaaaatccaggtccaggtctgtcagattcaaagcccattcacttcccggctttccggcccctctattctttgcctctacccagtaaaacaattgcatggggtgggaggagaggtgtggctgttattgttgctttccttttagcttcttttaacagaatgcaagacgatttttgctctcgcagcaactaaagtgagttttatccaagcaatgctggggaatcaagtttgtgaaactcttcctatgaaatattaaaaaggtcaatgccacaaatgcgatttgactccaacgagagaatccttgattcaaatgccgttctattgtctaactgagtttcagagctcccttcacccccaaaatactttaagaaaaacacttcagtaaacaaaaattttcactaaataaaaaggccctcctctcaggggctctaagagggaatataaggtgagcaaggcccaggggactgtccagtactctggggaaaccagagggccctctgcattcctgaattgctttaaaaaacttatcaccagaatcggctagctctaagaattcaggatcctcgatcaacacagattaaagttgaagagtatcttagattcacaaagaattttcggatctgaaagtggccttagaaaaaacctgcaagcaaatagctttccagggtagccatgcaaatttgcatgggcctctttaaacaaaggaaactggcctggaaaaggcacctccgggagatgttcaataaaaattgaaaacgtggctcataaaatttatggttctataagacagtgtcctaaatttctctgacgataggaatcaccagaggcacttgttaaaaccagtgtcctaggtcccttgctagagattccaattcagtgggtctgagaagggcgttgggatctgacagcgttcacatgcccccccaggtgattctcatcatgggagaggtttaggaaattctgctaaagggacatcattacaattctctgacacaagacagaaagattacaattttgaagtcaggtaaaacattttgaagtttaaaaaaataattatttgcagctgggcatggcagctcacgcacgcctgtaatcccagcactttgggagggctgaggtggatggatggcttgagctcagggatttgagttcagtctgggcaacatggtgaaaccccatctcaattttttttttttttggagacagggtctctcactcttttgcccaggctggagtgcactgatacaatctcaggtcactgcaaccattgcctcccaggctcaagtgatcctcccacctcagcctctcaagtaactgggaacataggcgtgcaccaccatgcccagctaatttttgtcttttgggtagagatggggtttcgccatgttacccaggctggtcttgaattcctgaactgaggcaatccacctgccttggcctcccaaagtgcagggattacaggcctgagccaccgcactcagctaaaaatgttttaaaataaagatactttttaaaaaataattatttgcaaaatgctgtgtatgtttttcagaagaaaagggtctggtcttacaattctttttatgttatttacatatgtttgtacaaacacacatttggatttcagtttttaatataagtgataattgtttattcactcaaactatgcagtaagtagatcaccaaaaagtggtaaagtacaactaaaatgtcaccatccagagccaactactgagcacctttccaggtatctctctgcacagacaagtaggtacatattgtacacaacttagacacctggggtatacacttgggatacaccaaatttgctcttttgcaacctatttctacataagaatagagtttgactatttgtttcatgaactagatctctatcatcatcttttctaactgcataatattccatttgtatgaatataccataattggctgaataaatactttcatttaaagttctccttcaaactagtatagaggacaatttaaaaatcagatgaatgaaactcctgattcatttagcatagataatgaggaaataagtagcttgtaagactcacgcagaattcataagatgtgttaagtgtaaacagtaagttgtaagacatgtaagataataacctgtaagatgttaaacagaatagaatattcctgtgttaaatatagattaaaagaatgaaacaaatgagagttttacttatacatacaaagaaatggaggaatgaaataaattttaaatcttacaatatttacttaatagtaaagttaataaatatttaacttataattgtattttatatataatatataatacaaaattatactttatgtatatatataatatataaaggcatatatattcatatataatatataaaaattatatttattatataatacaattttataaaaatataatttgtataattatatgctgttatttatttatttatttgagatggagtttttgctcttgtcacccagactggagtgccatggcatgatcttggttcactgcaacctctgcctcctgagttcaagcaattctgcctcaccctcccaagtagctggaattacaggcatgcaccaccacgccggctaattttgtattttttagtacagacagggttccaccatgttggccaggctggtctcaaattcctgacctcaggtgatccacccacctcggccttccaaagtgctaggattacaggcgtgagccaccacacccggtcaattatatattgtttatataatatataattatatataaagtatttttctagattatgatttacattgttaataatagacacttcataaatattaataatatataatagtgctcagctcatgttaccccaagattgacagctatgtcattcctaaattgatcacccataggtgacatccatcatgttcagttctggccccacatatactctgccccaaaatgtagataaaacacagatcaggccgggcgcagtggctcatgcctgtaatcccagcactttgggaggctgaagcggatggatcacgaagtcaggagttcgagacctgcctagccaagatggtgaaaccccatctctactaaaaatagaaaaattagctgggtgtggtggcgcatgcctgtagccccagctacttgggaggctgaggcaggagaatggcttgaacccaggaggcggaggttgcggtgagccaagatcatgccattgcactctagcctgggcaacaagagcgaaactccatcttaaacacacacacacacacacacacacacacatcactgatgacctacagctattggccaggcatactaccttgcatccctccgacacagcacgcatgtgctgacttcagatacttcccatccgttgaagccccttgttcaaccttaactttggtttttgtgaccacaccatcagcagggaaagctgacactgcaagcatagggttccagaagtgtggatctctcaccccatttgtatcctcacctacctgttagtctccatctgatatggtttggctgtgtccccacccaaatctcatcttgaattcccacaaggtatgggagggacccagtaggaggtaattgaatcaagggggcaagtctctcccatcctgttctcatgatagtgaataagtctcacgagatctgatggttttaaaaaagggagtttccctgcacaagctctcttctcttgtctgctgccatgtgagacgtgctttttaccttctgccatgattgtgaggcctccccagccatgtggaactgtgagtccaattaaacctctttcttttgtaaattgcccagccttgggtatgtctttatcagcagcatgaaaatagactaatacaccatctttttccccttgcttctcactatgttttcaagttgagtgaatcgtgtgattttaacacctggttttggtctctgagcttttctgtcccatgctctctgggagagcttgctggtaggccaggactacatccagctaaacttttccacattcctagagtagtgaaggaaagcaagcaaggtgtggagtcataatgaacaaaatcaggtttgtagaaggtacatcaaattctttgctaatctaggatctgaaggccaggttaaacacaagagtgaaatctttcatttaatttcaggaatgtagggagctttcagcttttcctacctccaaagtcataagctaagtttttgtttgtttctgttttttgtttttgtttttgttttttgctgagctctgtcactgagacatgatctaagtttttaaacaagtcaatccaggtttatttccaaaagattcagaagtccttcagatttacattgtaaacactaaatcacataagcagagtgtttttctattattttttccagagccaatcctagctattcttcccaatgacactttattttttacatatcttctcccttcttgatcgagttctgcctttgcttgaatcatccttcagttgctaaagtattttgatttcttgttctaagtcttgggaaagcatccctctttattgctatatatatatacacactctaggaaaaaaaaagaaacacacacacacatatatatatatatgtatatatttctttctttttttttttttttgagacagagtctccctctgttgcccaagctggagtgcagtggctcactgcaacctctgccacccgggttcaagtgattctcctgcctcagcctcccgagtagctgggactacaggcgcgttccaccacctggctaattttttgcatttttggtagagacggggtttcaccgtgttagccaggatggtctcgatctcctgacctcttgatatgcccaccttggcctcccaaagtgctgggattacaggcgtgagccactgtacccagccaactattaccatatttattctgctgagctacagctatcagaagagacaaatgtaactttaacaatttacaaagcctctttcaaagcgtattgacagagttaattattttaagtaaccagtcttaagatgtgaagtaaaaataattttatatatgcataaatgtttgattacttgtatatcaatattatatttcaaatatcaatatcaaacagcaataattataataaaaattgtatatattttttcaaacatcactattttatttttttggagacagggtctcactttgtcacccagactggagtacagtggcgtaatcttggctcattgcagtctggacctcctggtcgcaagtgatgttatcttcctgcctcagcacccccaagtagctgggattacaggcgcccgccaccacacccagctatttttttttctttttggtattttttgtagagacagagtttctccatgttgcccaggttggtctcgaactcctgagctcaagcaatctgcccacctcagcctcccaaagtgctgggattacaggtgtaaaccaccgtgcccggcatatttttttcaaatatcaaataattttgatg

SEQ ID NO: 6986 - DNA, 130030 bp, Homo sapiens
  misc_feature (1)...(130030): n = A,T,C or G, or insertion/deletion polymorphism (see Tables 1-2)
tcttggccctactgtaaacacttgaaaagtgaattaacatttatatattttaagttaaaatatatgtttaatatatatccacaggccaggcatggtggctcacacctgtaatcccagcacattgggaggccaaggtgggcagatcacttgaggtcaggagtttgagaccagccttgccaacatggtgaaaccccatctcaacttaaaaaatacaaaaattagctgggcgtggtggcacacccctgtagtcccggctacttgggaggctgaggcaggagaatcgcttgaaccctggaggcggaggttgcagtgagccgagattgggccactatattccagcctgggtgacagagtgagactccatctcaaaataaaattgtacacataaaattgtacgcgcgcacacacacacacacacacacacacacagatgatttttgtgacatcacattttgtcaacttttttgattaacctactaactgtcctgtaagaaagaaatattttcaaatacctccacttccaaacattagaactatggctggtgttgtaggtagagccatatgagtttctgttactgcaagagggtgaatcacagtatatttcttaaaggccgaaccatagaggatggattgtggttcccagtgtggtacacaaaagatagattgtggatgccagcatggtatgtggaggactaatcgtggctcacagagtagatttctttttattccacataatcaactctgttcttctttccagagcaacaggatgtggtagaaagaatcctagattctaatcagaaacagcctttctctatgtcagtgtgttcttggtaactaacctaacctcactgtgttcttgggaactaacctaaccttggcctagtttatttgaagttggcaatttcagtaatgtttttagatctaacatagccctcaatgaatattagttaaatggacctgaaaacactttggaaatcacaaaatattaaatcccatattttcatactgtgaatatattgtttgctcagttattgttacatctattttattatacaatgattagctataaatctgtgagctccatgagattccagatcttggctcattaatttttgtacagacacctgcacctagccaagtgtctaggttcttctcgtatatagaaggtattcagtagatacaatttatgtgaactaattagaaatcccctattttgaaccagacattttgatggtaaaacttattttgataggatataaaatattcgtatcattccagttttagatattgttatagaggtgtttttcttactttctcaaagtctactaaaaatatcaaagaagtcaaaaaagagggaaaatattgtcatctccaagaaagcaaggaagcctcacaactgcaatgatacaaattacgaagtccatatattaaatattgaaatagataatcaaacccactaagagatgttgactcagacattatcaataggtgcctttcccccaaaaatatttggtagtttttgattaaagagagcttagtttctgcgtgatacataagaaaagtagagaataaccatgtagaaatcccgcctgagactctagaatggtagggaagggaagcctcagagggactttctgccaacaacctcgttctattctctaccactttgtctttcagcccaggcagtctgtcaaagaaggtggaagaagtaggtggtacactgctgtagggaaacttgctgtgatccatgcaaactccttaaataaaacaaacaaacaaaaagaaacgagggaagaactactttcaatgttaagaaaataaaatatttggaaagaagatgtttgagttcgtaagctgaaatagtggctgccaacttcctcagtacatttccagctatccccttcctcttcccctccccattgtactacttggtcagttgctatctcattcaaagaggagtagcgatcagaaagggaacagtggataaactcatgcataaaactaccattttctgtttcacacatggagaggaaaacaagcaaataaatgacacaagtgtatatcacaacaaatacgtattctaaaaatagggttcagaaaggagacagatgaattcaaagaagagagtatacagcaataaaagcagtgaaaacagaacaagagttcagtaaaaaatgaaaatggaaatgaaaaaaatgacagaaataaaatagacactggaagcaacacaaatagaataaacttgattgaaaacaaagtcacaagcatagatactaggttggaaaaaaatctgacaaaatgaaatgtgtatgaacagtgtgaagtttttataatgaagaaagatacggaagacagggaaaagagagacaacatgtacgtaattggtgatcctaagaatagggaacagaaaaaaatgaatcaataaaaataaaaaataaaaagaagaaaattgttacaaagatttgaatcttcaaattgaagttcatactctgttctaggacaattttagatagaacaatgaatactgagagatactttaaactgtttcctgaactccaaggataaatattcaaccagatgaacatttatggaaaagataccagctacatgtaaggagaataaaggttggctttcaatttccacgtaatatgagaacccagagaagcaattactacacaattctgaaggaggggaagtatgactcaagttttattttcagtcaaatatagtatcaagagaaagacattctgaaacaaaacttagacaatatagaaccctggagctcttctttaaactcatgtgcatgcacatacatgatgagtcaacatcagtagctcaagaatggaggaactctgatttaagatggttagcatcaaatctatctatggataaaaaataacagctttagaaattagagaatagcatataaatggtataaactatgataatgaaagcatgttaatgaaaatgattaatatgtgacaaggtaatattggaagaggtatcagttaatttccctaactacatagcatggggttaatagctactacctaatgttgaaatagacagatgattctaacctcctaaagtttttccattttttacctcaactttggagtgcccttgtagaaaagaaaacatgttttgggtttaagaaacgtttacctgaatttcagtttttagttcaaattttctttagtcaaattaaaggaaaagaaaatataacatttaaatattaaaatgcatatataatttgatttcatttttttcaaaattaaggcttatgtatgtatacatctctctgaccatttttctaccttggtaaacatttagctatgtttggaatgatgtttacttggtggtagagatggctgttttttttctgataaatggaatttggatgacttaaagtgaaactttctgaaacttctctttattacttgaagtttttatataggacatatatcatctcaatgaaagaatagtcattcttttaaaaaattacagccttaccaccatctcttctttagaatttttttccattagctactaaagaaagtctttggcaaatacattataaattttggaattgaagtacaaaataaaagagatcataggaacagtatcttctccaatattttaatctaaaaactaattttgtctagaagaatatatttcaagaatgcatatgttacaaacaggcaccacctgggattcccagataaagatatttcttaagttatatagtccataatctcacaggttatacaattaggaagtatacagtagttaattaaagctgtaaatagaagccaagattcccttcaacaaaacagaatgacataaattacaatttttgtgtaaacctattaccactgctgcatcaattttataagggatctatgtaagtctactgtggttataaatttaagaaaatcacttgtacacctgtgaagcactaaagcatgcatggtgaagaatggtaggaaaagaaatactttttctagtgaaatgattagtgcacaatagtgatcgacttctacaatgaaccaaaatacaaactaatgttgattctttgctttaaggggaaaaaaggttattttttacactcccccttttgtctctgtccttcatcacttgtttttagagacaaattctctggagtgtttataaaacagcagtcctgggaaaccctgatttagtgggtttttagaccttggggctctggggtaccttttcacaccccaaatggcacactgggaaggctagatatcagagatcaatctacatccttgtgagagtgggcctgtatcttttctgtattcaccagtaatgactttaaaattcatgcaaatcagaagtgcacatttggaaaaaaacttccaggatattacatcagagtaactgtcaacctctttaaaggaaaattttgattatactgagctgctttacctgcctattaccttccttcaaattaattattcctcagatttaactgtatggtattaatacttttaatacttttgtatcaagaaaaggaagtaatctgtactcatagccatcaacaagtataactgtgcttttaggagtactgtgtttgccgaggtcatggtatagttcagtataaagtgttttaatgtgactttttgcacagcacgtgaatggactttgaaatagcattgcatgtctgagaattctgtctctttaaattgtctgctttgcttattggaaatgataacaatgattgtttgaagttattattaatttttttagttttaacaaatcctaataaaggaaaacatatctattaaaaactgaaataactactcactgaaataaacagcaaacattatagatatacaactttaattttgaatggtagagaattttattaaatgaagagaggcaacttaatagagtattaaggacagacaccagatgcatttgacagatctgaatttgagtcaggttcttacacccattagcatttttgactttagtcttttcacctaacttctctgagccttaatttctccatgtagaaaatgaaagatgatgtctttcctatctcatttaggattgctgtaatataataatatgtataacagtattgcttaaagaatattacctagtggccattgcagtgcataagaactggtaagatgccttacctggaaaatataagggaaaagtgttggtttttttaaaatcatgaaaagataagattgaaaatggcgtgtctttgctgctaattaatgattgctttatgttcatggagctgtaacatttttcccacctgcagaacatattatagtaagctctagttatattttctaggatcgcttttaataaaactttaacaaacactcgtgaattccaacaaaaatcttgatcattttacagaagtgtatatccaaaaccaccgtgaagctggaaatacatcaaagacgtgattacatttgtccaagttaagaggacaaccaatgagggcacaatggacagggttctttaggtatgttgggtataaattgtgataatttttatcttcgtagggttcctgaagacaagcaagtaggttttatgttttctaagatgaaaaagaacaatgatgctttttgaaataaagctttggagaaagtctgcagaataacaaaggttttcatcattctaaaatcataaaggcaaatatttataatttcctcacaattgtgagctataacaatttatattatatcaaataatttttaaatgaaaaatcaacctaaagggaaaaggggagaagatactatagagaggactgacctgtaggtgggcatctaggagatctggcaccgaggtggtggcatttctattttctctgggtttcagttctctacccatgaaatgaatgggttggactagatgatccctttcagctctgaaattccgtgaccttgtgacattcttcatactctgtgacataggaagtgcatcacacactgtagggttttccccttctgtcagtacagtgcactgcacagtggataagaatgtagactccagagccagagagagttgtgtttgacttgtatctacggagcttgtgatttttggcaagttaccataatttctttaagtttctgtttcctcatatattaaacctaaagataatgcctatagagttcttgaaatgacagaggaggtaatgttggtcaaaaccatggatgggtactcctggggctccatagtgggtttcaagggcaggtgtttatgaagccaggttctggggcctgatgatctgggactgaattccacctctgccacatgcaayctgtaggtccttgggcaaattacttcctcaagttctgcttccattttctcttctgtatgtatggttgatgataatacctacctcctagggttattatgaggattaaattagttcatacatataaagtgcttagaaaagtacctggtacatgtaagcactctatatatttgctatcgtcatcattatcatcatcattattaaagttrcacatagcctagggtgaaattctactaaaaattttagggaaaaaatactcatttatattatcaccaacatgtacatgttatggaatagaatgaaagtttccataaatattgacagtaaagttttaagtttaactccagaaagacaatgcagcactgtaaagcactttctggcttcctaattgcactctatgggtaaatttctgtttttttcactagcaattgtgtattctactgaatttgtaaccttctgaatagtttattattaaaaacagaacaggctagcttttttttttttttttttgagacagacttttgctctgccccaggctggagtgcagtggcacgatcttggctcactgcaacctccgtctgctgggttcaagcaattctcctgcctcagcctcccgagtagctgggactacagtcacataccaccacacccggctaatttatttatttattttttgtatttttagtagagacggggtttcaccgtgttagccaggatggtcttgaccccttgacttcgtgatccgtctgccttggcctcccaaagtgctgggattacaggcgtgagccaccgcgcctggcctatattgacatagttgacaaataatcttaatttcagtttaataatatgagattttatagatttatattgtagattctctattatattatagttgtctaagattcatggtaaatgtgtttttgaaaatgtcaattcaattgttaggtttagaagaaataatgttaaccataaaggagtataatttgacaaatatttaattagtatctacaaatatgtcaaactctgctgagaactgggcatacaaatatggatatgctcaaatcctttctgtggaggagttcagcatttggggtatggcaaacattgttggttggctgagtcgaaagctcttgctaacactcttctttcttgcmtggctatacaaaagcattggaaaattcctagcagctactgatatgtgagcagaaacttgctggaagtgatagtggtggtggcggtggtaaagatgcttctgttttcttattaaaagaggatgattgtagctagtgctccccccactcttcttcttgccttgagcacagatctaatacctacaggatagcagccatctggggactatgaggtgataagccaaaaataattggagagatattaggcatcattaagtcagcaatccaacattaggtgacactacttcctgactttttattttcaaaggtaaatgataaacccttttatattttaaaacatattttaaaacaattttaaaacattgttggattttctgttactgtatccaaagattattctaactaatgtgggaaggaggtatatttgcctacatacaattatgagacatgttagttgctataactataataataacttttctaaagaacaatatgtatttataaatgatatgtgtaatcttctgctttagtgcatatgcgtgtgtgtttatttttcttgtaatgccatagtactagttagagtatgataaataattctccaaaagcaagagtcacaatcttgaaggttctaaagagccctgactcagaaggaagagatatatagtaatggaaggacaagtttgaatccctaaagcctccaggacaggtagctgaagaagaatctatactagaatgacagggttcttgcttagatccaagtttcagaaccagagaatgccagagatgaagaggagtgaagaaggaagaagagacagtaygtacaaaccataacatagaaagtctctgatgcaaaaggatwtgtttttagccactcactccagatggagaggtgtgacctgggaaaargaaataagagatttggtgacagaggaatggagtaaaaaagtctagcaagagaaacaagagactgcaaactgctcctgttttttctctcaatctacaaccatcaaatagaaaggagactaaagagataataacacaacaaagagctgtataaaaaaatcacaagagaaatttcccaaaaaacattggaagattaggataaaaattacccattcgctcagggaaattatactagatatgatacggacaagcaaacaaacaaacaaacaaaaagcctgaaaaaatatctatgagaatcaaagtagaggttcaatgaaaaacagatgaaagaggttatgtatatcaggagagaaatgggagagaaacacgaaagctttcatagacaaaaatattagaagcaataacaacaagtggaataaatgtgactgaaaaccaagttagaaatatggagaaaagctttgaaaaaaatcccataawatttagttcaaatgcacaaaaacacaacatttattatgggaagatgaaagatgtggaaaagaaaaaaaagggatccaatataaatataatttgtattcttgaatattaaaatagtagaagataaattcctgaaataaagacttacatatgattttaatggcattctgtatcacggtaaggttaataaatattaaaaataatgaatacatgtatgtgtttattcagcatgaatatcaagtcacatggaagagagaaaaatgaggttagttttcccacaggtttattaaataccaaaatcctatagaattatgtgtaaaaattctgagtacaagaaagtatataccaaggttttatacccacccaagttatcttttaaatataaattcaaatgcacaaacattttcaagcccataagaagttacacaagatagtataaaccctcattaaggaaaattaaaacaagaaaacactgaaaaacaataaggtaaacaaagacttaaaaagattcttatgcactggggccttctgtcttattttgctgttttgaatcctgaggctaccacttgtgaatatgcctgagctagcctactggaggatgaaagactacatggagcagagatgtgctatcctagctggggcttctaaatccaacaagcttgtaagagccagacaaatgaatggggctatcctagaccatcaatccccttcaaaactggcagatgacttcagagatgagccagrccagccccgatgagaattgccttgctaactcacacaattatgaacaaatacattattgttcttataagtaaaaaaaaattgaatagccaccctgtaaaaacaaaacaaaacaaacaaaaaagctgtagtgaatttcagcctactaagaggtgaatcaagacaaacaattcaggtatggagggattccaactaaaaaactgaatataaatctttaatcaatgtaaattcagaacgaaaattaaaaaccatgagcactatggttattgaataaaatagaaactatgaatgaacaatgaaaaatataatatcaaattgatggaagttaggataaaacattaatacgttcatttcttcagcttttatagcaagtaatggtcccaactttttaaagcataagtttttcctgaactcatcaatattttattacacaatacattttggagtgttaagaaacatttatctctactgcaggataaagatgggcattaaaaaaaaacaagaaaaaagaaacatctcattttttagtaaattcattaatttcatttaaagttcttatactgtgattaattcaagtatagctatatttaatatggtacatatatttaatatagtgtgggtagcttgagtccattttaacaaaactgatcttcagttcctatccacattacctgttggcctttcttcctctgtagcttcctttgtatatatttttatcaaaatatctgaaataatggctattttgaggtgaatggtttttatgttatgtgtaacttttgagttacttgacaattttttgaactttttttttaaaaatactatttttattaatatattcagtatggaatagaacctttctactatacttatttgtaataaattatggattttaaaatggtgggwaatgttgagtggtctttgaaggctgtaacatttacagggaaacactggcaagggtttcagaaaaaagcctttaccttatgttttcaggttttcccttttactggatatcattttaagattttagattccaagtttgacctaattaaagtttcagtggcagttgaactgcctacagtgtgaaagtcctgcttgtcaaatattttatctcttattttagaaatgaaaaaaatcatgataagtatacatttaagggctattttatgttaaaaaaaaaaagtcagattgaagccaataaaaagttggtcaagggtaatttaaaaatcaagaaattattttaaagttagctactttaatttcaatatccaaatagtgggagaggaaaaagagccaatttgttaattccttggaaatacatggtgagtcacagtctaatttcagttcaatgtgttgatgctaaacaggaactgacacccaagaatttgaaggtaaaatctggtttaggagtcacagaggcataattgacaatgctcttgaacctacagtgaagaaccaataagcaatacataatttttaagactgtaagctgagtgtggtggctcacgcctgtaatcccagcactttgggaggctgagcagggtggatcatttgaggtcaggagttcaagaacagcctggccaacatggtgaaaccccatctgtactaaaaacacaaaaaaattagctggacgtggtggcacatgactgtaatcccagctacttgggaggcagaggtaggaggatgccttgaacccgggaagtagaggtgtcagtgagctgagattttgccactgcactccagcctgggcaacagagcgagactccatctcaaaagaaaaaaaaaatttaagactgtaattttgaggaaataaagagaacaaatrtatcaaacagaatttgaacattcaaagatatttattttaaatatttcaccattaaaatgtttacatcttatagtgtgctgatggcatcataattactcaagttttaaatgaatttaaatttttattacataatttgtaaactttataatacataattctgaatctcttaaataattgagacttctactttagcaggtagaggttgaagttataagagaatagaaaacatctgggggatttgtcccaggaaaaagctaagtttttggaaatagaagttgaataaactacaaagcaaatgaagataaaattactcttttcaagatgtagagtagtatatacatagcacagaaagagggagaaagagaaggggtggagggggatagattctagcttcgacttttgcaaagtttattagcaatttggtaagacagatactttaagaggcttaagcatacctctttatcacaccacttaatagttaagtggtgtgatgtagagaagagagtacagctttggaatcaggcagaagtaaacttaaatcctgactctgccacttcctgtctctgtgactttgtggcttcactttatgcaactcagcttccctgcaagaaacaggcacaggagttcttaccttgcaagatagttgcaaagttgtttgtaaagtacctggcactgtactgttcaacaggtggtagataattactgtaataatggaataatgagataagatgctgaataatttcaaaataaataatcaaaaaaatcatggagtaggttgggtgcgatggctcacgcttgtaatcccagcattttgggaggccaaggcaggcrggtcacctgagaacaggagtttgagaccagcctagccaacatggtgataccctgcctctactaaaaatagaaaaattagccaggcatagtggcatgcacctgtaatcccagttactcgggaggctgaggcaggagaatcacttgaacctgggaggcggaggttgcagtgagtcaaaatcataccattgcactccagcttgggcaacagctcaagactccgtctcaaaaaaaaaaaaaaaaaaaaaaaaaaaaaaaaaagatggagtaaaataaacaaaagcattacttttgcttttgcttgttacatttagagattaattgcgatttgagaccacatacctttttttccgattcatcagatatattcacctttgcctcctcttcccttatctattcctttcttcagcaataacactgggaagtcactagtctacaaagctccctcccatataaaacctatggcctatgtgatcacaggcacaatgaacaggtgaagaaagaaataattttgaattaggaaatacaatgaaggaaatgaactaggaaytgagatagagaatgtctgcttgggggaagtgatttagataaagtgtatttagatcaggtgttttctcccttcaattatgcctcttccacattgatgaggaggttggtaaagatgtgaaaattagtaaggggcagagttttaattaaaggtcatcattttctattgaacagcaccattgtctggctttggaaatcattttctttaaatggaataaataaaagcagtaaaatgtcaagaaaccactttttaatttattatccaggtaaaaaagcatttctctccattggaaaaaaaataatccataggaaaaggagcttgtaggaaaaacaccaatmccacattgtgtactatttcctgtttytgtgattatctctatgaaactaccttgagggtttggcgagtaaatagtaacaaattcagtcttactaattttgtccttttctttgggggtaatacagcctaacaacaaaatctgttcttaaaatactgcgttctactagagttatttcccttttggctggaggaagtggtggctttgtcagactgaacatacatagttgtatatgtttaaacaaagcatcagaaacaagaaacttgcagagttccccaaaccaggaaatattttataaagataatgaatagcaaataattgacatgatataagttaaaaaggcatttatcagtgagtatactagtcttttgaaagcagtatttgttagactaaggatttcaactacttgccaatgccatcagttatcttgacttattgtaggattagttctgtagtcctctattagaacggatcaaggttacaggcaataatgatggtttccactgaaaaaaaaagccacaaatatcttgtgtttcaaaatttctgtgatcagcattttttgagggaagaagcattatgggaagaaaaagctaacagagatgaagtatcagacaccatgccatggggctgtccttacatgtgtcatcattttaacagggaagcaagatacatttctctccttttctcatcctcatcattaccatttaattttttgattcacatgaatattgataggtggcttgtggcttttgtccatgttttgactttctttaaagacaggaagaaattttataaagagtcagacttttaaagcaaaaatctttctctgaaacttttttgtagaaatcaaaattcaggccttcttctcaattcaatgaccctgttaattaagtatttgtcactactcaaatacatggctgatacacagccatggctccacagccagatcttggcaggtggctttttttttttaacatcaaaatgcaggtaagttatttatgttaggtgagaaaactggtttgattcaatgtccacaaatattacctccactcaatatttgtaattgttgcttcagaatataagtcctttgagtacagaaattccagacctgatatagaacttactcatgcaataaraaacatgtgcaaggtatagtctcacagtttattctcttccgttttatgctgcactttggctgatgcattgcaaatgtatgttaaaatcaaccaccctctgctagagacaacacatgaatctattaacaaaattaacctctcaatttgtattgatttctccagttaactggccagaatctaactagtctctagaggaataggacctgggcagtcaaattctgcatgaagacagggacacccaaatatttgccactagttttatgttaataagactcacttgaaaaagtaatatgaaataggtttcatggttaagtaagttttgcaattgcgtgagttaaatgtagataaaatatttctttacttcaggacttataagagccttcagtatatgaatagattaggagaatcctaaggattgggaatatagtatgcaaagtttcccaaaagtattcgatcttggaacctctccgcactctgatttttttgagcaatatcccctaagactgaaatacttggaacatactatgggaaatattggtgtagggcttgaagactttgtacagtatgtgaagctctttttatgccaggaatagttcaagattactcagtattagggttaaagcagaagacaccaaagaaaggagattggccaaaatggtcaggaagtcatggacattaatttcgtttattccccaatattattagtcataagcataggcactgtgcctgaataattggggcagtctgattcagcaggcatcctggtarggaatgaagtcactgtggcgggatgcatagattatttcaatggaaaggggcattgtaattatgtttgagtgttgtagctaaaagactgcatatgtttgttagtggcctatgaacataaccatggcattataaatagtatcataattaccgtgaaagcaatactgcatctgatkaatgtattttattcggcagccacaagtcttacgaagagtatattttaggtaatgaaaacttgagccttggtatgtttagaataataatgatactaagtttttatcctttcctagtctagtttattaaaaaattgttttttatttatatgaagacattcataatcaaatacatgctaaataaaacctaattgtgtttatttaacccagcaattatatatgaaatatggccagtgactctggaattaaaaaaaaaattctgcttggtaacttagtactatattagcctgatttttggaaacaagttttataaacaagtaggcatcctgaaatacatggcccagtacccagctagccattagagccattaaacacagctctgagataatttacctgtgttcattgtgtcaaaggagtaatttagactgtcataaataaacattttcaaaggaattttttttctttttgttttctgctcctcaaccataaataccagttaaattaaagtagctcttatctatggcttggatttagattcaaccttgtagaaagcattacttttcctatcattaaaaattaaaacatttctcacttttacagaaagcctttcaatatgtatagaatgtaaacaatgatcctagatgacttgcactgctctgagaawtagtagttatttgaagttatttgtccactgagggctttggcaaaggcgagggcagtttgatatataagtagaatattatagataagaaataattacttattgttttgaaaaagcttcccattcgactctgtttaagagaatatgaggaaaattcaaaaaggggaaattagtgaattgaatccatttcaagtcagagagcttagagatcattgaatccaacgatctcatttttttaggtgaagaaactgagctcctaaaagttaataaagcttgagtatggtcagtcaaccagacggtgacctcctcggaacctaggtcttcggactctaagactcatacccatttctgcactctctgcttcctcaatgtctatttcccagccatggtgaagccctgactgaaagagaaatgcctggttgtagcaaatgtgttttaggaatgagcaagctccttggtaatgatgacaaggctaaacagaaagaaaaggaagagatacagtcagtagaaactggtgggtttcttttcctatagcacccttttttattacatgctttgagatagtgtgagtgtgccttttgtgtccttgatgtgtgcctgacaagatgtatgtaaatcacagttttgtaaattgcattatgaatacaattaggatccactaaagttgtcttgtggtaactttctttataaaattattctttttgagtattaaagactaaatttatctgttggtaattctacatagtaatgatatattataaggttttttaaaataattagaaagttttacttcaagctggtgaaaaattctatattcctctaaattttccacctgtctgtgccccccattcccatttccccatccttctgtcccccacccctgtcttcagctcctacttcacctttttggttttaggtaaatttccatgagtacctagcattctagaagtgaactcacagcccagattttatgattttattattagtttatttaatttttttytctttttttttcttttttttttttttagacagagtctcactctgtcgtcaggctggagtgcagtggctccatctcggctcactgcaacctccgagtccctggttcaagcgattctcctgcctcaccctcccgagtagctgggattacaggcacacaccaccacccctagctaatttttgtatttttagtagagacagggtttcatcatgttggccaggatggtctcgatctcctgacctcatgatccacccacctcggcctcccaaagtgctgggattacaggcatgagccactgcacctggcctatttaatttttatcgtcctttcttggactattccttcctattttctctctctactttcacattttattttttaaactcaacagaagagtttgaaagctgctgagtcagcccttggtcactttccagcctgttgttcatgagtaattgactttggctagacataccaaaattaaattctcagattgccttagcttttacagaattgcactggcattcttctctactcttcataatgcgctccccatagaattttattgtaattgtcaggtgtggggtgagggaggacttgtatttatactaattgactttacatcaagatttcttctattgaattcatatatctaattcagtttaattgaatgtaaagactcctgtaataggaggcagcagatctgactcctgtttcctgggtaaattatataagttcatggtttctttatagatacagaggttggaggaggtgattggtgtaatttttagcttgttgtaattttgtgattactgaactggccttaagcccaattaagtggaagaccttgtgtaagtaggtgttgtctctcatagaactaactaggtagcagtcaacatcatcacaataagtagatcggtttcatttctcctgcatttaaccttcttgtgccaattcgccatcaactttcgtcatcagctgtcttgtctattgggtcagcaagagtaagggcagccttttcttacctcaatcactcaccaattatttatgtaagaggagtttagaaatctattccaaatggttttacttctgcagcacttagtaatttatctaaagattcttgtaaatgtttctcttgagctcatatagcaatcttaaaagctgtcttcaggaaaccagatctagtcatctggaaggccctatatttttacaatagagccttccagagttgttagaaatatggagaaaatgctatcatgatcatttccatgtatactaaagyttcagtagttttaattgtgaaaaacagctatcccataaattgaagtgttagtaagacaaatggatgcattgtattaaagctgacagagcagtgactgggaaaatctagtcactgatctaaagccaacacaacaaatcagatgaccttcaatgacttttaattacaatttctgaatacattgctgttattaggaaaacattttaggaaaataagactagaattagtatacaaatcagaaaaattgatggtcaagtaatctgtcagtgatataaaattcaactaagataaattgataaaatacagtaaaattgccaattgttttttgcttaaagacttatgaaatgtacattattcatttctactttctatctaagttaaggcctatttcatcccaaactaaccctgatctagtttatgtttccggaagcaccatttataggttggcatttaataggatttcttttgtgacctaaaagggatgcatgctgtctgatcacctctatagttagaaaagagagacaatagtgattgaagctagaagaatggattttatggcataatcatgttctgatccatacaagatgacaacagcccagttttctgtgtaatacaaattgatgatcttaatttaattattagatgcttacctatccttgattatatatttttttcaggaatcccaagttttttcttgaaaatgttaggcagaaggcccatgataatttcagattccagtgtcgatttagcaatgcctatttttaattaattgatttacatttttattcagtcacaggtcttttaactgataccttttaatgcataaaatcatgtttaaattcttgaaataactgaagtcttaatgaaatatttgagtgcaaaccrtcaattgaaaatgataaataaaagtagtacaaatatctttaattttgaaatatgagggttttctgtgtttctatrgtgttccaattttattaacttttgccctgtcttccgttttctttataactaaaatagtaataaatacatttctaatttaattgtcttatatgcacagaagttctgagtgatactgaatttttggtgttgattgagatttgctttatgtatatgttcagttttaaagcttattatrtatttaagtgaatgtgtgttctctaattgtagggtccatggttttacatatagccattggaacaaacttcttagttgcrttatttgtatctccyacaatccactaatgccttctgctgcctgatgtatcagttataagaaaagtgcattgaaatctcccattattgttgatctgtgacaattgctctttctaatctcaattttactttgtatattctggacaatgttattwctcacatatgagtttggaattactatattttttgctgattccttctttattgttccrtagaaacttctttatttccaatgtgccttttttgcctctctacaagtgtctcactttcttctgttcattgtcattcttcatctttttattttcaacttttctgtgtcattgtattttatttgtgtgtcttgcaaaaagcataaaaatataatttgcaatatctgtcctttacttgcaaatttagtccctttgtatttattgggttattgatatattttgatttatgtctacattttattttgtgctatgcttttacattaactatgcttcttgtgctttaaaaaatattgttctatcttctattttgaattttattcctgcaactagtactaaaacaacagtgtatgctaagtaaacatagagtaaggaggcacttatttctgcttatagaaaaagaattgtagcactggagtatatgggaaggtagatgagacataaatctggtgagatatgcaaaggctgtgctaaaaygccgtgttaggaatttggtttgcatcttatttatgtaggggaatggcatcagccatctcattttagaaatataattacaattgttgtagaagaatgagctggaatgggggagaaatgaggggatgaaactgagcctggtgggcagggaggccagttagaaaaatcactgcaataatccaagtgatgaatgatgaagcagtggtagtgaacttgaagaggaacaaatagatttgcaatatattcaggaggaagagtcaataggtcttaatcaccaattaggagtgtggggatggagtggaatggatgactgtaggcttctggcttgggtgattttgtggatagttgagccactaattaagaagagaataggaaatagcaacaaatttgaggacttcctctgcctggggaacaattctcttatagattgttatgacggaataaggtataagattatttaatgaggtatttagatgacaaacttgcttgggaagaaatgtgatagaacagagagatggtgtcctaataatgaggggaagaacatccagaaccctgaatttaggaaaacagtgtataggagtatttagttacatgaatacatattaagagatttactaaatagcagggatctaaaagttttaccagagcttatgaacagacaagaatttggtttaaactgttctagatatgcctttgaaatgttattgttttatcagttgttagattaaatcatgcttaaagtgctagttttaaaatgaaatctgattaaaacaatttaacacaggtaaattaatttttacaaacaagaaagaatttgtggtcatttggtaataagtatttcctgctcagattgtatcagtcacattcatttttataagagattgtatcagtcacattcatttttataagacctctgcctatgaataggatatgtgagtcacaactatggaaaattaggcctctgaaatgctgaaataatacaaagggttgttttgccaaaygcttgacactaagcaaagacgaaaaagctgtttgatgtgcagatcatcttctgctcttattcttgccatcacatctaaaagttttgggaactgtttgactctctgttagtattaatataaacagatctataactgctatccaggcagctaaatgtctgtcttattcttgattatcttttgcatttaatccaagataaaatattaaacctcttgatttaatgtcacaaaccagtagtactcacaaagctgaattacagactgtcaacaggtggataattgctgaacatttacagatgttagttcacatggaattgtttagaattactgtgtttaacagtgtaattgtagagcaaaatttcaaatgctactttagataatatttttgcacatacccttagaaattttttttccaataagttgagcaagcagaaaactgcataggcgctaattaactcaaataaacacataagtgattgacacaaacatgctttttttttttttttttttttttgtagagacggagtctcactctctcacccaggctgaatgcagtggtgcgatcttgacccactgcaacctctacctgctgggttcaagcaattctcctgcctcagcctcctgagtagctgggactacaggcacgcgccaccacgcccggctagtttcttgtgtattttagtagaaacagggtttcaccatattgcccagcctggtctcaaactcctgagcccaggcaatctgcccgtctcggcctcccaaagtgctaggattacaggcgtgagccattgcacccagcccaaacatgcattattaaacaagcttatctttgagatatattaatggcactcttgctctttttactttgttgcacagctactaagttagatagataattgctttgattcaagatgcgttaaaatttttaatgcatttgttaacatctctaattatataatatcagtctccttgaaaccattaaacttcatttatcaacagagctttgagacctacttgtgcaatgaagtagcttaggcaatagagagtaagatgaaccacagttcagtcctaagtagttttcagtttagtaggataatattacaaaatatgtaaataagtaggtaaaataaagcgtactaaaataatttacaagtgattgtgtaggatataatagtaaggtaatgtgaaaataatttatgtttataggatacaataatgtaataaaccactgaatacaatgtctaatgcaatatcagtactccataaatattagttcttattagatttatgaaacaaagatggaagtgtataatttcctctgtggatttcaggaaggtttgtagaggcagtaatgcttgtattagaccttaagaatgagtagaaattcatcaggttaaaggcaagtaggggagaagatttgaagatcttttaagcagaaggagcagtgtaagcaaagctacaaattagtgagactgagtctgagtcttagttgtctggcatggataggtagcagatgaggaaagaacctgaacttaataaaaaaatatagagatgtagacaagagccagggaataatgttaaggatttgtaatttatcctgcaagaatattggtaacctttgaaaggtattaaacaggtaggtatgggtaactttatctgcttcgtgttttaaaaagatcacttggtgaatgtttggagaatggattaaaagaggtacatctagaagcagggggtcctgctagctsactgctaccatgggccatgtaagagatgatgaggacttgaaccaaggctatggcagtgggtatgaagaaaaggaaaaagatgagatcctgtgtaattcccaggacttggtaaccaatttgatatgagaagtaacagagaggaaaaagtgtcttcagtgacacccaaggttctgtcatagaggcctgggtggatggtggttctattcacggagagagaaatacaaaaggaggagagtatggaaatcatgggttatgtttgagattatggartgtgcattatttctgtgacattcaagcaatgacacctcagaggaattggaaacatgggtctgttgctcaastgacacatcttgggctagagatctagatttaggagtatttagcatatacttggaatgagaaggcatgaactctgggaaataccaggacagaagtagcaggaagatagaccttgtggagagttccatcttggcagtgtgttgtggtattagctgagcccatgttttccacttgttgcatttggrtttcctagttttacatttcatattgtaacatttggcagattttaaataacttgtacaatgtatngaaattctcaaaggactgatgttttgtaaaacttcttcacaataattattagatatacaaagccctgcagctgtattctataaatagtattgaatgtagtgaaatagtcatcaagctattccttatcttaatcataacttgaaatgttgaaaattctgtttggtggtaagtcatgattttgtcagcaattttcacagtgtcagatctgcccttgttgagagtaaagaattgaaataatgaactttaggtatccttggtacttaatgctatttttgtatcatttgctattgtaatattacttcaactgcttttttcctactttagaagttcagcatgatgcaaaactaggaattgcagatatttggtaattgagggatgaaataggaatgttcttgtgcttttaaagagactcacactgagcttcattccatttattaagtgagctaatttgttccacactgtacctaatgtagaagcaaatttcgaagttattagctaaaggtgtgattagcaaaggccaggcaaacccatttttaactacgttaaatgtccgtataaagcttggagagcattttcctttcttccttctttcttttcatcttttccttttaaccactggagtacctgggtagttgctcctttacattacttactggtttttatacgagggaccttctataagaatatagtgatggcaactcacttactacatgaatgctacttatttctaggagcttaacttggttaagatagtttgacctggcatgattaatatttacaaatggaaaattaaatcttttacttcagtttttattcagtctgttcaccaagttacattgtcctgctatatctggcagtgtacttggtgctatcagaagacaaaaagttaaaacatttgcccaaagagcttagtctaaatgttgggagaaacaagacaaaaatttgtctaagaataaatcggataagaagaaattataaagcttagacgaaggacataaaagaagacctaaccaaatttgcaaaacaaaatatatttattagaataacaaaggtcataaatattttaattttctccacataatccgaaatacaggctcaatgaaagatggaggttttatctgtttttttttttttttcatttatgtatcattagtgcaagagcatagtaggtactcaataaacatttgttgaagaatgttatctgaaagttcactcaaaaatcacattataaaatttggatggaaccagacaagttaattctaaaatttatagattcatagttggaaggaaaagggtccaaaatggtgttgaagaagcctaatgagatgataaggcttgtcctgccagaatgcaatagattgttatttccaaagatgatcacaacactattttccttcccaggtactttttagcaaagtgacattgccactcccccatcaagaggtgcagtctactttaccttcttttaatcaacttgtaggaatagaataaggcagaggtggctttgagtgatgtctgaggctagactttaagacatctgcaatttctgcctttgctttttgtaatatttcttcttggatcccacctatcatgctttccaaagctcaaatagccacatagagatacccacatggagaaaaacaaaggctttagttgaaaaccccagctgagctcccatttgtcagctagcactgtggtagtcaaccatgcgaatgaggctattttggacctcatgatygtccagtgcctgggctgataccatgggaaacggaattttgtggctgcccacaaaatcatggaaaataatgattttttagaaaacctccactgttttgttttgcagcaataaataactgaaacaccaatccaaaaaacttataaagctataacaattaaaacagtataataatagtaccgggatacaaaaatggtcaaattgaagaggatacaaagcctcaaagcagtcctcactcataaaagccttgttgtatcactaaaaaggcattaaaattgagaagaaggaagaactagtggattaattaataaatgagaagtatccataaggaaaaattaaaattagattcttgcttcacattatgaaaaaatacaaacaacagattgattaaagacttaaatgtgatcaacaaaatgttaaaactgtgataagaacatttaagaaaatagttctataaccctgggataaaacattttcatccaaggcattaagtgttaaatgaaaagactgatacatttattcattagaatttaaatttctgttgccattaaaaaaaaagtaaaggacaagccacaaactggaagaacatatttgtaatgcataaaactagaactgacaaagaattttttattcagataatactaagaactcctaggaacaagaagaaggagaaagaggagtggaggaggaggaggaggaagaataataggaaaaggagaaggagggagaagctcaaagaaacaacaaataggcaaaggatataaacagttgatttacagaagtgcaaaaccaaaggacaaataaacatgtaaaaagatgtttagcttcaccagtgattagggaaataaaaattaaatcaataataaaattgcatctcacagccattagatgataaaaattaaagcatgacaatacatatgtctgggaggtagagaaactgraactttcattcactgctggctggaatgtaaattgatattagttctttggagagcaatttggcaacatctgataaggctgaggaagtccatatcctaattgttgacgttcacaaagagacatacaaggatgtttgctgcagagtgactggatcaaatcaaccctgggatttatacggtgaaagaagacccaagacagaacactgaaaggggaggtatgaaggttaatggccaacaggagtggtgaatagatggccttcttttctagaatgagatttctttggtataaaataatcataactgattaaatgaaagtatttgatattattctggcatatatacagaagagactagaaaactagaaaatatcmtacatgtgatatactttatgaagtttaaacagcacagagttctggcaaatgttactaatgatgaataaaatattttgttttctggtgcatgcctctaatcccagctactcaggaggctgaggcgggagaatcacttgaacccaggaggcgaaggttgcagtgagccaagatcacgccattgcactccagcctgggcaacaagagcgaaactccatctcaaaaactaaataaataaataaatttgttttcactgagtctacaaaatgttttatttgttagtgtactttataatgtttaaatatacccttttaaattacttcaaaaatcaaaataaatagagataaaacatgatggtgttacctgtgatttagtgttgatataattttctgagtaggctatttatgttgataaaatatcctttaattttaaaaaggattatcttaaatattatttcagaaaagcaaactaattcctggacattggcacttagaaatatatgtcttgataagtaatgtgcagatcatttaaataacttccctcaaattatactaatttgaaatatgaaaatttagaaaacctggcatagtgacatttttacttccctgaatgtttgaaaagttggaaaaactccaaagtgctgctcatttacaaaacccctatgttgtgtgcttttagaacatctgttcttcaaggtcagaggttattttctgaaggttcttctgcagcgtgtcttgtaagacttgtaccactagcaaatacatttccatcattagcagatatttgtttcacyaaaatgttcaatacatgccatcatgattactcaaaaactgttaaatgttcataggaataatgatgctttgtttgcctcaccattcaaaacaaattaactagagttctacttggtctactgaaattgacatgctaaagatgcccatgatactagtgaaattttacttccttgaataggatatctgtattggtaaaggacagattttggttacataattcaatttatgaacattatcaagtagtgagacataaaattccagattatctacatgaatctcaacaggttcaatgttaactttgctataaacatccattatccacatggtgtagagaaaaggacactkatctggtccacactggctcctaacttgctgagtcatcttgagcaacatttgacctctttatttctcagttaccttgaatgctaaatgtgggtattagactagaactagatgatttctagttttttccataattctctaggcatccatgtacaaaaaaatctaaataggttccgtctgcaaacatccctggaataatatggtgattagaaattccatatgcaaaatatgttcaataatgggtgggttgaacctctgtgcatctttcttatttaaatggaaacaaggatgtggttaattcagcatagaggagaagaactgtggtagcttcaaaggatagtactacagtttcagagtccyttcacctggccacagcactacagtgttgagtggctgctgtggatattgggagacaatgggacacattggccccacctcattacttttgccatggaagagaacctgacttggttcatgaagcagattcaactgagcaagagaaggaatctcataacagcttaatgwtgtctactgacaagcttgagtataaactcttaaagaaaatgaagacttctccaacccatctcatagtgagatgagcttctcatctgttttatgcaaggattattattgcatttctcttcgtataatatatatgtgcctgaaaatgtgtgtataaactaagatattgaggtggctatcttaattttttaatgaagttcaacaaatatttcttgaacactaaatgccaggaactgtggtaagtcctattgccgctaaataatcatagagtaacttctgttctttgagatctactctagtggataataaaagcactcaagtctgtttcctggatgagctcagaccagcagccaagtatgataatcctctgtgccatgaaaatgaattttctgaggaaattcactcaaaaacccatctagaggtaaattcttttaaaatttaaataagtagtcttattatrtaaagactgttacgttaggtaagctattcactcatatatagaaaaagttctttcagtatgtatatatatacacatctctttacccactccttttgtttgttagctaacatggatatttgagttcatacatgtatcaggctaatcccacatgaccaaacatatataacaatcaaaccatagtgtggcatctgcagcactcattttattccacaatgaaataaaaatgaattcagctattaaagtagtctaattctgttatacctacaaatataatcaagaagcaagattttggaacaatatttttcaataaattttcctctgccacaatgcttgtttctgtggacttttagggaataagttgacatatattaaatatgtgagaactttatgctgtattctaaaataacagttgattaattaaagagttaaatattgacccctaggagggccctctgctacagtcaattggagaaagaagaggaataagggcttggcattaccttcaaaaagattttactccaagtcggattcttcatttcttgctgctagacaagagccatcaaagtaaaacagatacaatttccaggaaatacaggaaataaaaaaacactttttcttgctatgagaggtaacgagactgataaaagagaggtagaaaagggattttttttttttaagtgagaggaaacatcgaggaccaaagcccaggaagcacccggatgtgtaaggaaatgaagaggaagatgatccttcagtgagtagtggagcaaataggggaacccggtgtatttaagtgtgtgtgtgtagggtggagagaaacagggaggagggcagagtttcaggaaagaggtttataatgatctattgattatattattattaggaaatgagaataagtaggaaaaaaattgcacctgtctcctttcttcttagctgtggtctcattttagttcctagtattsagaggtgacctaatcagactgcagaatgttctgaaaggttttaaacatgaactgttggttttggcaatcagaagcactgacataacatagtgtatcaaacaaaaatatcagcttcttcacaatactatataaaataatgcatgcaggtctaaaaatagatttaaattcagaataaaattgtcaaagtgactgccaaataaaaacacacaatacacagaagttggagcttttccactcagtaagaatgactgagtttgtggaatgtcagtaaaagatgtatactttaactttagatgagtatttgtgtaatagctagaaaatcattgtattggcttaaatgttgctttgatgaatttctaccaaaatcataatctctgttaaattagtaaattccaaatgagctaaattcaaacaaacagaaaacttgaatataatcctgtgaatataatcctacctcaatgatcctgtgaggtagtattattttggggatcatttttaaatcaatgaagatacttgagtttgaagattaggaaacctgatccaagtttatgatgccagcaagttacaaaggaattggaaatttgagcttagtttctgtcttcaaagcctgtgttccttcatgatactatacagtctctgccatcctaaagaataataaattattgacaaaaagactaaattatattaaataaagttttgatactaaagcatatgattatattctaattccttataatttggtaacccacatttgttatgatagaaatgtttttaaaagaycatttgaaaaattgaaaacctgattttttaaaaccctctgcataaaaaggagttcctttaattcattgtaaactaacttaaattgtaaagccactgattaaatcttaaatctggatcaaaatccatctttgcaaaatttatccaaatttagttatcatgagctaaattcacagaaatgaagtagttcataatttttattttgccagcatcttaccttatgtttatattctatgtttaaagtgtaatggtaagtctttgaatggaaaaatggtgttccaaagttaactatacaaagcttaaggacaagacatttcctcaatgattcttgggaatgagacagtagtaactggatgaattttcatggcaatgaggtaaataacaactggatgagcctctctttttcagagttaactggaaaataaattaaacaaacaaataacaaagtctttctgggcatctcggattgctaagaccccaagcctcagcattttttgactcctttctgattcttcagccctacattctatcatcaagaaatcatttcacctctaccttcaaatataagtccacagactatgatcacttcttccatctctcatctgaatcaatgtgatactcttataactgtctctctaattctgccttgctcccctgttacaatgtcaatcaggtcatgtcatgtgccactttgtggccaccygtttcattcagagaaaaagttaagtccttacaacatattctgcttccctctcccttagtcctgccctgtgtccgtgtttcaaaacctacgcacgtggctctagacaactttgcctgcttgctgtcctctaaaatgctaaaaggacttcacgtcgggacttttgcacttgctattctttctctccagaaaatcttgtatatctgcttggtttcttcttcttgcttctttcagatcttggctcatgtatcagcttattagtgaggcccattctgacgatgtgaccttgactccttattcaaatataaacttcatgaagacagtgatttttggctatttggtgcacttctgtattcacagtgtctagtgtaatcccatagtaggtgttcaataaacatctgttaaattaatagattaattgatggagaaatgattgactatcatatgtgttatttaactgccatgttaactgcagataggtagtatgatctctgttttgctagatatgataaatcaacctgattagcctgatagccatggagttgtaaaagttgacttacaaggtatagttgactatagttgattcattctaaaattcttgtcaggtaaaatgaggtatcattttgtatcattctcctataaactacagagtatttcctcatgaatgattagttttttcaatgtattgtttttaatcacagaggtcttgctactttattttattttagtttagttyagyragatggagtcttgctctgtcgctgaggctggagtgcagtggtgaaatcttggcttattgcaacctctgcctactgggttcaagcgattctcctgtctcagcctccagagtagctgggactataggcatgtgccaccatgcctggctaatttttgtatttttagtagagatggggtttcaccatgttgcccaggctgtctggaactcgtggcctcaagtgaactgcctgcctcggcctctcaaagccttgggattacaggtacgagccaccatgcccagcagtcttgctattttaattaatctggcaagtaattatatctaaagtatacaggcactggtttaatctctgggacatactgattaaccagacaggcaaatctggaatttatagttagttaaacagatgcacaaactaaaaagaaaatatcaaaattgtaagtacaatgcaaataattaaaagaaggaatgtgaggccaggcatggtggctcacgcctrtaatcccagcacttttggaggccaaggccagaggatcatgaggtcaggagatcgagaccatcctggccaacatggtgaaaccctgtctctactaaaaatacaaaaattagctgggtgtggtggcgagcacctgtaatcccagttacttgggaggctgaggcatgagaatcgcttgaacccaggaggtgaagattgcagtgacctgagatcatggtactgcacyccagcatggtgatagagtgagactctgtctcaaaaaacaaacaaacaaacaaataaacaaacagaaagaatgtggtaggaagtgactaggggcaatgggattgggttcttgatgatcatttccacctgcccttcctggtctctttgcccttctccattctgctttccactccagaagaccaaactttatggactctgtcgttggtctgccttacttctggcctctggttgtgtttgaccaatgggaaccatctgcagaagatttgagaactaggggaggaggagggctgggtatactttcccctggatcctccctgccagctccccactgattggcagtgtttttctttacctaaggccaggttcctgttgggcacccttcccctatattttcatgttctgagctgtaggaactgtttcttcctttattctctcacccttggtaaccactcctccctggctcttgtagtacagaattctgcattatatgtgctatcatattgttaaactttataacaataaataatcactatattactataaatcacccctttactaaataaactatatgagtacctgatttgttttttactcacccatgactgataaaggtggtaggaaatacctttgtggtgaagtattagataatgttagtcttgcagaaggcagccataaggaaaatatctaggaaggaacattctagacaacggaaaaatctgagacaaagaaacaaaggcagggatgagctctgtatgtttgtagaactgaaatattttggctcaacagtagtgaagaagagagaggattgtaggaaatgagggtgggatctaggcaggtgcctaccttgaattaatgttcttattgtacttaaacaaaaaaaaagcaccaaaacagagcaaaaaatgtgtgtcagtaaaaggcagtattttgtggggcatgtctttacctaattctgtttatttgtgagttttgtgaaagtgaaaggaaaattaccaaaaataaattatttaaattttcgttttcctttctttgtagcacattttcttaagtcatttaagtgtgactttagtcatcaagtacatacaagaaaaaaagcataaaggaatgaaaattaagagggtaaaacttctgcaggctatatttactatttacyctaataatattaaaaggaatcatgaacgcattgagaagtattttgaagatcaagtttatgtagcagtttattttttaatctatcctcatggctttgttgtgtttgtgagacaaaatgacttcctaagaaacacagattttatttccttagtgttacttctagtaattactctttctctcatatttacatttggtcaattttatctgcttcctctatgcaagaaaaaattaacttcttagacttttaaccttccttcttgttcccccatcactctaatttgttgtattcacatactaagaataatgtttggtattctcttagtttccctttagccagtttatcaactatcttctggatttctggttctcaatcctgacaataaatgaaatcatattctgaaagaacgtcatcattcgttgaaatattttcatttctggtaaatacattgtcttgacttaaaaagtgttttttttggtagcggatgactcctagaatagtacctggcatgtgttaggtgctcaataactatttactgatggaatgaacacaggctctagtgtaaacagatgagacttcataatgtcacttaccacatggcactcaggagatatttagcctacctaagcctcgattatcatcaactataaaattgagataataatagtatctaccatttaccgttgttctaagaattaaatgacatagtgcatgcaaaggacktagcatagagcctatcacctagcaagtgctaaaacattagctattatttttaacattaattatttttcaaccctagaatggtacatttttaacaggtagtacattttaacagcaaaattttagcagaatgtatttatcccccactttgcattttttcctaaaaactgtatcatgggataatttattttgctgtggagaaagactaaactatctatgcctccctccacctgaggtcatttctgaagctgttggcattgggccaggggttgagtggcagaataatctccttatcaattttgttatgtttgatgttgtacaaaataaatagctcaataaaaactscagtttagatgttaccatggttgggaagaaaatggcagtggctacctattaagaaccacaatcacaaatgcagtccttctgtattttatatccttggttaggtgggtttcttgttcttttccttgtttgctccatctggggatgcctgggcacccgtacaaaactcactagtgcctaaacacagacacattagttggggctgcccctgcttcagataccagggagagatttgttggcataatgcaccagggtcttatgccagctcctgattctttgctgatgctgagatgaggaacatggctgggagggggctaggatggaatgaaatctgtggcagccaaagcctccatttgtctttctgccgagtgtgctgagctgtagacactgcagtgttttcaaaaataataataaaaaaatttgctcattagtttttaagtcctgctgactttgtgaaatcaatatagcacattgtaattgatttatgaaatcaaaaaacccctgcttgaccaggaagttcggcagtcgctgctctcagcaacctgcccttctgctcattagtgcatttcctttagtgctgcctgagccgagggcgccttcagagctggaaggctcaagccctctgcagacagtctgcttaagatgtagcttgcattgtgtccctggggtcttatgcttctccccttyttcctaccaggtcagctgaaggacttcagcttctctcttagggtccctaatgttctcataatatcttactggaaaggcaagactccattcatacctgtattttgacattttaatctatttgctacttttcttttctctcaccttttattcttccttgtcttattacttagcttatcttttgccatctgaccttatctattcattgatctcttttattctattttatataacctcacaaggtkaacaatttttttctatttcaattgtctttgtctaatttcagtacctactgttttattcttaagataatattttatacctcttcctgccaaagcctgctataattatgtttgtatgccacctttcaaaaattgaagtaactgctatacaccaaacattgtcctgggtgctttacatcaaattatcttctcaagaagtgtgtaaggaatgcattatccttggttagaggtgaaaaaactgagatttagagaagttagtaacttgcctgagtcaccccactactgaggggcaaggctggtatttgaaactaattctgtttgactccaaagcctgtgtttcttttttccagtacaaaatgattattccarttggcctctgttttacattaaatgcttaactagcaaaatctagctcttggctgcccttaaaggggctcattctctttagtgccattcttccaaataactctgctgttcaaactgccagaatgcaaatgtatttattttaagatcttggtctatgctagcatattggatggcttatcctttttcgtggaattctcrtctatctaatgttatgtgtatggagccccttgcytcatcattaaaggtgagggaagtgttctcatattgtcaaaagtcaccaagagcaatctcataacctagaaaaatcgacagacagctgagccaaataggcagcctttgggagcttcctgtggatttcattttctctttgttcttttgatgcaactttgggagcaagtaagtgggaaaattatagaacactgcagcagcaggaagatgatgcaatgtgctcgatgtcctcacttcttaagtcgttgaaggaacctgtagtttctccatacaggtactgtatgtttcaggtaagtgctatgccatgttcataatgcatgagtttgcaatgagttaataggttccatccatttgatgtcttgcataatattgcagtagcattgggcattactgccattcaatatgtgcaatattgtactaaaaattaaccacagatgccatattaaaacagctgcagatttagatttagctacagaaggaagaaaatgtgctatggaagttggccagaagtgcaatggagatatgctgtaaatgaggaggaggagaaagatactgaggttgaagtgccaaaaaaaataaatggaaatggaaatggggatgggtaagtcatatggtcagtggcaattcaaagggactcaaaatccagaagagtgcagaatgcagggtgacttatgcctgagtgagctgatgaagttttaaagcaggaggtctaatcagaacaatatttagagatatagatgaaggtgtaaagaaaacagctataaatgtaatcattcatttttaggatgcttractgtagtcaggatattgatttaggaataaactactagaaaaactggatgtggctgggcgcggtggctcacgcctgtaatcccagcactttgggaggccaaggtaggtggatcacatgaggttaggagttcgagaccagcctgaccaacatggagaaatccctctctagtaaaaatacaaaattagccaggcatggtggagcatgcctgtaatccagctactagggaggctgaggcaagagaatcacttgaacccgggaggtggaggttggggtgagccgaaatcacaccatcgcactccagcctgggcaacaagagtgaaactctgtctcaaaaataaataaataaaaargaaagaaaaagaaaaactgtggatgcttgaagtgatcaatgtgtgagaagaaagttctggtgtacagggagtcatagcaattccagaccattacaaaattcaagattatcttgaacactcttgtacatgaaggttgtcctctgacaatggacccttgtgagattgacgattcccattttggagaaaagtgttggagggttcagttggcacaattttgtactgaaaactgaagtgacaaaattttatttcaacagaattgcgggcttgcaagaatctcattaactgtagggccatctgccacgttgctactcatttggctcatttaatcacaggtgggtaggaaggtctcaatagtttyggttccyrttcaattctgatttttgcttgggaaacagaaggaaggtctcaatagttttggttcctgttcaattctgatttttgcttgggaaacagaaaaggccagtgacagctgtggcagtgccagggttctcttttctctgtgtgagccagaagatggcttccctatatagtttgctgctaacagagcaagcagacagtaagcatttcctcgccctagtgtttggctgctgaaagaattatctttgttgacttgtggtatacttggcttaggagaagagacaaggaacacagtggtctctaaattagtaattgacttcatcaggggaggaaagactggttattgactgccstaggtcagttaaagcacctgacatttacctataacttgtgtctgccttcctggctcagaaatgaaatagaaacaaatttgattagtaaccaggaaatacagttggtgctttacaagttattaggtacattctaggcctctaaacattttagggaaaaaagtgtctccagtgccaatgcataaccttgttttccttcctcttcttttgaacacaaaagaataaaaacttgatggaaccccctggtgttccaacggtacttgaggaaagtaaagcaaagcagaacacaacaaaatacaaaaacaggctttttctattttgttttactttgtttttcagtctagtgtttcaaatccaggaaatgtcagttctttcaaaggaccttttctccatagaataaaattttgggaaattttgaaaaagctgtagttctattatgatagtgataaagtagattatagctaacatttattgggcactcaatgtgtgcacaacagtactctgtatctcacctatataatcctattcatccccacaaacatctatgttctaagttctgtttatrctccccattttactgatgtggcaattgagggatagaatggttaacaaattcttccaggtcgcatggccagaagtatggcagagtcattatcaaagcccccaagttagtgcctgagtctgcaccctgggccgaaattttccagcttctgtgatacagaattttatgccagaaactcttacattactaaatttttcattctttcttttaatataaatatacataaaaatgaggaaaacttccataggtgtgttctaatactgtgagcaaattaaaactcaattgaatactattttcacaaatacatgtatgcttatctcactttaggatgaaccaattctaaaagtcctacttaagaaatagttatgaccaggcatggtggctcatgcctgtaatcccagcactttgggaggccgaggcaggcagatcgctagaggtcaggagtctgagaccagcctggccaacatggtgaaacactgtctctactaaaaacaaaaattaaattagccaggtgtggtggtgggtgcctgtaatcccagctactcaggaggctgaggcaggagaatctcttgagcccaggaggtagaggttgcagcaagccaagattgcaccattgcactccagcctgggtggcagagcaagactgtctcaaaaaaaaaaaaaaaaaaaaaaaaggaaataagtatgtgaggagtggctatttaacaagggacttgtcgctagtcaagatttagtaatggcttccttcaaataataggctttgtgaaatttacataaaatacagttaataataattcaggctaagcaataatttaggaccacatttgttgcatatgtcaggccttgctttcatgctactttttatttaattaaataaaaatcctttataaaataatgtgacaggtttagtaaatgtatttattcactggaactttatgaattgctaatttttatttgctatttatagtttctttcagctctgtttttttctctctttttaaaaactgtggtaagaacacttaacataagatctactcccttaaaaatattaagtacaccatactatatatatatatatatatttttttttttttttttttttttttttgagatggagtctcactctatcatccaggctggagtgcagtggtgtgatctagactcactgcaacctccgcctcccaggttaaagtgattctcctgcctcagcctcctgaatagctgggattacaggcgcccaccaccacgcccagctagttttttgtatttttagtagagacagggttttgccatgttggccaggctggtctcgaactcctgacctcaagtaatccacctgccttggcctcccaaaatgctgggattacaggtgtgagccagtgcacttggcccacaatacaatattgttaactctaggcactatgttgtgcagcagatctctagaacttattcatcttgcataactgaaattttatrcctattgaatagcaactccccattctcttaattatctaggatcatattttcaggaacgtcatcgcatgtgtgtgtgtgtgtgtgtgtgtgtatatatatarrgtgtgtgcaaatttatttcactcatgatgttatactaaagtatggatttctatatacaaccttgattattccacacttaggaataaaagtttgactaagtgtcatttttcctaaaatatgttttggttccataagtattaaacaaggatacttacatttataaactattttgtattgtttccaaatgaaagcacaagtgatccagacatataggaggctataaagcatgacatatctttagtgacaattggaagtacagaattatggacaaaaactatccacccaactcagaaaagagaatcctgtttcctttactttgctatggcaaaaagttgactcctttatctaacaatagtagatagctatctgaagatttatttaacctttaaaacatacaaggcccagcttacatctacaaatttagagcacatttggaagctctttagataggaatgctgaagtacctctggctttctattttacacgtgacagtgaagcatagaaaattgttccttctgtgagctcttaacagaggccactcttgtagtttctaaagttttattgctaagcttaggctgagggtcatatcatatgatctttatacattttttttttttttgagacagagtttcactctatcgccaggctggagtgcagtggcgtgatcttggctcactgcaacctctgcttcccaggttcaarcaatcctcctgcctcagcctcctgagtagctgggactacaggtaccagccaccacacccagctaattttttgtttttagtagagacggggtttcaccatgttggccagtatggtctcaatctcttgacttcgtgatccacctgcctcggcctcccaaagtgctaggattacaggtgtaagccaccgtgcccggccaacctttatatattctacccattataggtcctttaaacaaatcttgccatttcaagccttaatctattttcccattgatttatattaggtcattattttagacaatggaactatcaaccattggctaattctcctggaagcatttgtagatataaaattacattgattttcacctgaaaggcccaataaactcgcccatactagaaatttaaattttggttcatttcagtaaccaaatgataagcacatcaaagtagttatttggaaagcaatcactgtctttagacaaaaacaagagcaaaaacaaaaacgtgggtatctcctaagaggcctgtgacttgttatacattttaccaataaaataatcatttacrtgaaatttaaagacttactctagatgaaatgaataatgagaaaacagcactaagttcagagaataaaattgtattgacgaagaaagtaaatagatcagtgtggcagaaaagtcatgaaaataagattggaaaagtaagtttgattagtattgaaaagggccaaaaatgccaaacttgggaatatgaccatttttctttagggaagtcactgtagatttttaggaagagatgatgtcattacagttatattatatgaagacatctttcaacactttgtagggtaggctagtaatgaggctattggagtaatctatagaaaaagagatgaaggcaagaatagaagtggtggtgagaaaaatggaaaggtcatgtgggttccagagtcgagaggatgtttgacatgtttttctttgtctgaaatgttcttctctactttttctgccttaccagttccttaatttcaggtctcagctgaaatatcccttttacaggggtatcgtccctgattccctatattagtgctgccattccatttctatgttctccaacactgtttctcacctgcactattagaaatacttataattatttcatgagttactttaaattatttttaaagtccttctcacaagaacatatgttttacaaaggcaggaacaatgtttgtttcattaatacaaatctactagcacctaacagtaagtattcaacaaaattttgtggactaactgacctattattgggccttttatacagggaaattaaagagggcagttggtagaaaagaatcaactctggtttttaactgcagtagcatgttaagcagttattggtctataatttatgctttagaataaatgacttttatatattttcctataaggaggtattgatatactgattgaagaagaccaagatttttggtcagatagaaaatgacaagtcttaatggagtttaaaataccaaaatatcatgtgttaacttagaaaaacagacagaaaggagtgctaaatagaggaaacagccaagaataaagagcagaaatactgtgtctgctctgcagataggacgaacttagcttgatggagaaccagataaacttgtggatgaaccagctcaatgccaccactaatcctgaaaagttatacacaaaccactaagccaagtgctctgtacatgacaatcatagactcatagaattggatagtgcaagataagtcaaagacagaccgcttcccaattcttgatctgatttgcaatatccagccaaatagttgcgaagcttttcctgaaatcctcaggaaagggaaacctttccaacttatttttacttacaccagtagctgatgattcagaagccaatctgaacagggaacatttaatcaaatcataactaagtcaagtacatccttacctacaatgcttaggcatctgctttaatactttgcaaaagacagcagcatgcatgttgtgcatactactcacagatagtacttattactattaattatatgtgaatacctttattagaaaatatgagagctgtatattttctaagtgttccctcttatcaaataaatcagttattgagctagctatcaattgcagaatcacatgataatttgcttagattgaagcaggmtttttgaaatgatgaaatgccgattttaaatgggactaaagaatgacccttttggtcagctacaaaatggcgagtcttaatggagtctaaaataccagattactcatctcctcttcatcaagagctacctttgattccaggcctattgtttcagaattgcatctgtggattttagacctattcttgactcagagcttgtgctgacctggactggaatacttttttctccttaaaaaaaatgtattattaagaatgcttagaattcaatatgaagaaaaaacaactcaactaaatatagatgaaagtcttcaacagacacttcagaaaaaaaaaaacaaatggttggtaagcacatgaaaagatgtgcaatgtcattagtcattagggaaattaaaaataaaaccacaatgagaatataacttcctgctcattaaaatgacaaaacaaaaacaaaaagtcacatattaagtgttgtattagtagatgatatgaaccaatgaaactcttatacattactgatgggaatgtgaaatggaataaccactttgaagaacagtttagaagattctttaaaaaggtaagcattcacttacactacgaaccagtaattacaattctaaatatttacccaggagaaataaaaacatatgctggcgaatgacttgtatataaatgtttacagcagcttaattcacaatagtcaaaaactggaggcaacctaaatgtccatcaacaccaacaggtgaatgcgtaaagtgtgctgtataggaatacacaggggagtattactcagcaattaaaatgaatgaactgctaagaagcacttttttagattactcctttcttcttaaggaataacttattctccagcctatgtcaccagaagctgtgaatcagaagtaggcctaaacttgtaatgagcaaaagaaagcaagaaacaaaaacctacattgaatgatttcattcgtatcaagctcgaaattaggcaaaattaatctgtggtgatagagacagatcagtggctatctggtagggcataagaagactgactacagagagactcagggcaacttttttggtgatagaaattttcttatatcttgatttgtgtggtggttacactggtgtatacagttggtaaaacctattaaaccgtatactttatgcattttgttttatgaaaattatatttcaataaagttgattaaaaataaataaggctggacgcggtggttcacgcctgtaatcccagcactttgggaggccgagggggataaatcttgaggtcaggagttcaagaccagcctggccaacatggtgaaaccccatctcagtaaaaatacaaaaaattagctgggcatggtggtgggtgcctgtaatcccagctactgggaaggctgaagcaggagaatcactkgaacctgggagatggaggttgcagtgagccgagatcgcaccactgtactccagctggggtgacagtgagactccgtcttgaaacaaaataagtaatttaatagtctaacaaaattatttgagagtgtatttaatttagcactttaaaaaataaattatatattgctaattataaatgagaatgttactaaaacaaacttagaagggcatacttaaaagtcttctatatagaattgcttggttaccaaaagtttagttactatgaaattaatgcttctaagcttacagatactttattgttcaatttagttcagattgttcttgtcatttgttaatacaaattattgagaattcattgtaatattgatgttagcgtcatatcaaaaatgtggaaagtcctagtacaatgaatattatgaaattttcttctaattgtcaattttctttttcaaaactcatacattatagtctttactcaatactgttttatttcaattggaaactgacatttttgatatttataagagatttaaaattatttttcataaatatgtagattacaagactatgaaatcaatttgaacaattagaaaaagaactgttcatttgatcttagccaaaaggctgagaagcaataaaaaragaaccatttttaaccctcctcaagtgtattactattatagcatattttgtaaacatgatgtaaaactgcttgtggttgacttagtttttaatactgacatttctgaaatgttatttctctctactgtatttatttatcctactttttaatytatgaaacttgtcaacatggtgaaaccccatctctactaaaaatacagacaattagccaggcgtggtggcaggcgcctgtaattccagctactcagaaggctgaggcacaagaatcacttgaacccaggaggtggaggttgcagtgagccgagattgcaccattgcactccagcctgggtgacagagccagactccatttcataaaaaaaaaaaaaaaaaaaaaaaaaatctatttgacagaacctttaaattgtatctatataaagcttttaatattatgggtttgcttatgttcatgtcttacttagaaaaagcactttatgaaataaatttttatcaactgaagtaataaaacaatctggatgggcctgttaatgacaaagttaactattctccgagagcaaatggaccaaaaataccatttatgcagaagtaagaggaaaataatgatttttacgttaataaaatgtattctgcaaggcacagtggtgcgtgccttaggtccagctactcaggaggctgaggcaggaggactgcttgagcccaktagtttgaggcaagcctgggcaacatagacctcatttcatctctaaaaaaatgtattctttgatgctatatatagtataataaattttgagctgattatgtcatgtgggtaaaggagttgaactctgaagccgaataatgaaggagggagaaaactttagcctgtgagagaaagaaatctttgttcattccagtgaaactggaaaaccacaataaattgactatatgttgttaatttgagaaggcgatattctatcataaggagtaggtgtgctatggcaacactaaacaaagcttaaaagctcagtggagtgtagagttcaagatattataaagactgttaaagaccatagattcaaggacaatgaggaaaattttcaagagtcatgggggttaattaaagaaaatttaattttcatttcctgaaacaaatattacagaatggaatatactgaagtacattagcatgtttaaaaaaaaaagaatatgctctgaccttgttgaaaaaaaatgattttggctcagaaatgagaaatattaaagagaagaacctattgttaatttataataatagtagagatgacagggtctcttgtaattaaaataaattatgtttatggtatattttctctttgttgggcactattgccaggaattgcctgcaaattcagtgaggtgggagtggtttatacccttacctgttcttaccaacacagttataatgatgacatttgtcatttattgagtgtttactctaagtgggcactctactaggtgcattacataaagtaatcctcatagtaaaggagtgaattacactcctggttttataggcttaaagaagatgaaaactggcacaaagccatacaaattataaagagtacaattgggatttaagcacagtcttatgcttattctaacactgtttatgtatgtatgtatgtattttttttttgagacggagtctctctctgttgcccaggcttagagtgcagtggcacgatctcggctcactgcaacctccgcctcccgggttcaagcgattcttctgcctcagcctcctgagtagctggaattacaggctcacacaaccatgcccagctaatttttgtatttttagtagagacggggtttcactatgttggtcaggctggtcttgaactcctgaccttgtgatctgcctgcctcggtctcccaaagtgctgggattacaggcgtgagccaccacacccagcctttttttaacttcactatcctgcctcattgctgcccagtgtaattaaagtccaaatagatacattttcattttttttcctttaagatgattcaaaggggaaaaagagcaaataatgcaaatactcatagaaaggcaaataaacttgcatgaaaagaagaaaggaaagaaaacaactgaaatcctggcacaattaatagataacttctttctatttcacttggttgagggaattttcttgcttgaacattgagaattcttgagatctgtattatcttgaaaaacagaaggactaccaagaggaaataatacacagaggatggtgttaccatgtatatactgtctcttttttggtataattcaaatatcacttgggcaatcatttgttatcttttgaaatagttctgcctggagataaggaaagatttttggctttctaagatatcattttggggctatgtgaaaatagtgtcattatgtagatgcagattttctggttatatttcatggatatttgaggtcacagtcatctctaaatttctataccttcctctttgaaatgtattttcttggcattattagaatttatgtaaaaataagtaggtgataaaaatttccctaatagaagaattgtatcccccccccacccaagaatatagaccttttgtggagtatttctggctaccagttacctcactgaactcaaatgtaatattaccatgactgtctgggaaggaaagaataattgttacatatctgctgtatatcgagaagaagctgactgtgtatgcaggtaatatatggatgacttcctaagagatagtgctgtaaaaccaaagtgaaaatacaacagagtaactgtaaagaaatcccaatagccatccttatgactgacagactataaacttttgtggatgcttgaatctaataccttcttaccacaactgaccttgctctagtttagagcttctaactttcatgtaatcaaagtgtctgtatttttgtgtgggtttaaagatgtggctgtccatgagtggccctgggattttttacaagttacagtgattttgcagttgttgagataggtgccacgcattaaacctatggaactcgccttgactccaagtcaattctagccttatagtactttgtaataatgatgtgggagaaatctctgaggtaggtcagtactgttactctcatgttcatgtagtaatcctgaggttcataaactttcatgctgtttcactaagatgtttctgataggagttacagatactctccatgttgtggaaatatagagggtctctagggtcaggaagccttatgaatgttgtgagaggcagcttttctcctcaaatgtgaggcagctcacacaaaagaartacaaatagttaataaacaaacaaaaaattcaatctcaccagcaatcaagtttgaagtatatcagctttgacctatcaaattgtaaaagagatcttaaaatttctagtttgaagtatcatggaataaaaattttcataactactgggagcagttataatacaaattatcatgaaaacagtgtggtgttatggatcaaaaatgctaaatctgtccttttgatgcagcaatttggcatataaaaatgtatcccgaggaaataatccaagatacaattaaagttttatggataaagctgcttaaaattttctccccaactttttgatattatacattattcaaatgtgcatcaatagcataataattcaattattgcacattcattttatggaacgatatgaggccattaaaactcatgattttgaagaagttttaatgacatggaaatgttcacaatgtaatgataagttataaaaataagacataaaattgatatacagtatcatttcacatttgtaaatataaatgcctgtgcatagatgtatgaatgtttgctggtggttttatctgtctattaatattatgttacattttcttattaatatttgatttttaaaaatattctgcaatgagtatatttgcttttgcagtcagaaaataaagcaatggatgttattttaaaagaaatagctcataaagtaaatatatatatttacatataatattwgtttatttatttatttattttgagatggagtctcattctgttgcccaggctggagtgcagtggtgtgttctcagctcactggaacctccgcttcctgggttcaagcaattctcctgcctcagcgcccccagcagctaggattacaggcacatgccaccacacccagctaatttttgtakttttggtagagacagggtttcaccatgttggccaggctcgtcttaaactcctgacctcaagtaatctgcccaccttggcctcccaaagtgctgggattacaggtgtgagccaccatgcccggccaaaaatatgtatttaaatttaacctattaaaaatgtaactttaagactcaatatggtgctgtatacccagtttcatagccacttatttattcttcttttaatgaatatgtattgagtgtcttttctctgttaggtgctgttttaggcactgaggagacaacctttttgtttgcagaaactcctgaatccaatcgcttctaaccacgtttttttagatatgaactttcttcatatccagtttcttcattttgtctttcctaaatgtggttctaaaattgtattttctctagtttaaattcatcttgtctcttttttttaatttctttcccttaatgtcaaactaatatgtatgtatatcttttttcgatgtgttttatatatatatataatatttatttagatatatactctaaaatagtgtctgatattccttacttgccatactgtagaatcaaactgcctcttggtattgttttggaaactgtttttaaaaattaaaactataccaaaatccacagccagcaacatactcttatttgatgatggtagagatggtattttgctcttgagtaattctatctaataaattctgtggattttgttggcaagttttttctagaaacagattgggtttttcaggctcagcagtcatggggcaaagaactacttccaagtggtaacttcatgctcagagtataaatttcttttcttttagtatagacttagacttttatataaagaggacaaatccaattcagtagctgttaaaaaacccattcatcaaaaagcattcctaaatgtttgaaacacactgaatcatagattttattrctattcagtagtacaatgacttcctcccttctaagaacctattaactactcattgttgtagaattgaacctttcgaggggrtatattctttcttaacaggatttggtgaaatataatgataatttaaatctactaaacagattatttttctcactggcactcttatctttatgtttcacacctcagaattttcttaagacttcatttttagaacgttcatttttaaaaattcttaataaatgttagaaaatgtgtcagtttttatttgatctgggaaaattattttaatggactgttttacatagtcccgcctcatatggttgtatcatttgcatactgcttaaaggtatagagggtgcagatgcaagtagtggttgaaatcttgtattgctgagggaaagatgtcattttccaatgcagttaaccagatgggaccattattgattaattaattgtaattcatatgcatgctatgtgtatatatatatgcatgtgtgtatatatgtatatacacatatgtagatatatgtatatctacatatatctatctatctatctatatatatatatgtctatatccatatctatatctatctatacctatatctatatctatccactagcagatgacctgggcttatataagacaatgttttaattgttaacaaatagaaggtcatggtttatgtcaaggctaatgtatgcgtgtatgtgcttgtacacataagaaaaatctcacgtttccagaaaaatagtctattttttgctataaccattgtttcattagcagaaccatcaacgttcctaatggagtgttaataatcacctgcttatagtggtaccaggttctatgttatacttaatatttctttttgcgctatgaacttatattttaagaaaattgcaatagcatatatcaaatgtaagataggccatgatatccaaatacaaaaaatttctcttctaattctcccatttagttgaatttgaaacagggaatgaattcaggaaagtatgggaaaagctactaaacatgtcttaaataagctatagttctatgttgggtaacacagagatatggagatgtgagagcacactgattcatgttgtttttttccatatttattttcttcttacagatttagaaccctgctaagttctaaatatggtttgcctatcagtgatcaccccaaaacttgtggtttttattcttatgttaatgtttgtagaagaacatcttattttggttaaatgtagccactgcttccccctcgccgtaaattaggtgtatgatctattaaatttttaacactaaaactgacctacagttggctatgttaaaaagcttctttgaatctgatagctcatttttagctatttctttgaataatctgaaaggtatatcctgaaaaaaaaatatattacatagccgagttaacccagctgcatattaattctttaaaatgataaatatatgacatttggttattttaaaaagtaatgacatcaaataaattaatttttcatttcattatacaaagtcttttaggattagttagatgatgctaaaattctgtacatcaaaaatgagaataagacttttttacttaaaagattaatttaattgtctacacataatttaaaaggaacttatttttcctaaattctgaccaaaaatagggaaaattgttttcgtttattaatgctgatggttaaaatatgtaacatttattgaggtcttctgtcagaagcttcactatttttcaaaatggcactataaaataataactattgttatcccaattttacaaattaggaaactgaggtacaggcctctcaagtaatatgtcaaagtgaaggaagcaaaagactcaaatcttaagtcctgactacagttctatacactgcctttatggtactgagctatattaatttcaggcccctctccagacttatatagtgcttgcaaagcaaacaacaggctttggaattgccaaggaggatggatttctctcaaaattgttttataatgatgggaaggcacatttcatgaaatcattattttcacttaacatagaaaaaaaatctgcatgctgaaagtactgttctaccctcctatatcaagtatcctttgaaacatatgcggcctttgactgagcaaagaaataaaagaagatggaaggaagagagaaaaattcagggaaaggctttgctacagttttgctttgggacaatcagtaaccgttttctctacgtggaagttcgttagacattttgggaactgtcttgccctcctgggaaatatttagtttggtttaattacaaaaaaaaaaaaacagcttttttttttttcttttctttcttttttgagacggagtcttgctctgtcgccaggctggagtgcagtggtgcgatctcggctcactgcaacctctgcctccccagttcaagcgattcccctgcctcagcctcctgagtagctgggactataggcacctgccaccacacccggstaatttttgtatttttagtagagacagggtttcaccatgttggccaagatcgtctggatctcttgacctcatgatccacctgccttagcctcccaaagtgttgagattacaggcatgagccaccatgccgagccaaaaaacaaacaaacaaaaaaaccccaaaaaaacccagctttttaaacacaacctggaggagactagtacctaaatccagggcattgtctgccttccaccgtggctcccagctgtctttttggcatgggacaaagaacagggcttgacccacagttggccctcacagagtggaagccagcagaataaaggcaggaagttttaggaaggaaatatttgcttgtttgctttaattcaagagtggaacgtggcaatcttattgcagaattcatcttattttattgctttttaatagctttaaattttctattattccaaaatgtaacttttgtgtaaaatgtttctaaacacaggttttttacattagtcagggtttaattttgagttgtgacttgaacttgacttttctgtgagcgatgaagctcagtccttgcaaagctggatgggtttgcagtctgcctctcatctgctttatctcctcccttttccctcctacttccatgctgccttatcagttttagggagggatcatgaaattctgtaagagaagaaaaccaagtgcaggctgtaggtataattggtgactcagtcctgtgatggtcatcaaaggtgtcagttcctccgaagtgaatccaccatcacctgacagatacatttattgtttaaatgtcatgatgaaagtkcccaagagccccactggtctaaagtgaggtttctcccaggctgagcacattccttaggaaataggaatcctggtccctaatttatgaatatttrcaattgttatcatctgatgaacattttatctattttcttgccttctcccaagacagtacttttgtgccagtttaaaaatgtatgtaattttaaagtatgagagaaacaaggtagagtgatttatgaaaaagcacactgcttctaagtgtatctcccccaccaatgtaaacatctagattgaaatgcggaaaaaaaaaaaaaagacctgctcttcaatgtagaatcctcatactttaaatgtctaaggaaagagaagaatgttgtgctgaatcccaaagcagtgtgacaaagtttttcctacgatgttactgtggacagaaattgatgtctggctgggtgcggtggctcacacctgtaatcccagcactttgggaggctgaggcaggcagatcacgaggtcagaagatcgagaccatcctggccaacatggtgaaaacccatcactactgaaaaaaaaatacgaaaattagctgggcatggtggtgcatgcctgtaaacccagccactcgggaggctgagacaggagaattgcttgcttgaaccagggagttggaggttkcagtgaaccgagattgcgccactgcactccagcctggcaacagagcaagactccatcttaaaaaaaaaaaaaaaattgatgtctatgcactgataaaacaacaaatccttgagaatggggcaacaccactttctagcccaaattctgcttggctttgtcaccttccatttcagatgataatgtctcaccctgctctttctcatgaatagagtcttggtctccttctattttggaacctgttttcgacatgccctctataccttaccctgaaaagggatctaaatatcatttttgtgggaactgtcagggttagggtgaacccagtaaacctctctacccaaactaccactgcaggtgatcagttcatctgatcacagtctttccaatcctgttcttatatttgaccatttttaagtacactattatttgctcacatctacttggaaagtaatcgttgtcaagaggaatgatgaaaggatcatctttttcaagtgcccaggaactttgtgcatataatttcatttaagatgcattaatcatataatcacattttccatactacaagcaaataactgaggcttatagaggtaaataatttcccagtgctacacagctcacaagttgcagaggtggagttcaaagctaaaagtctgtttgtgtcaaagtgcttgctcttccatggcataatgaagcatctccttgtggatgcactgtcccatgtggttgtgagccactagttagtttttacagtatttctatagcaaatactgtaagtactagctttgttttatttcaagcatcacatttaaaataattttggttaatttacagagtatgatatagttttggcaagtagaagtatgtgtgagtcttactgcaatggataaatgtgctagacttcctggaagataagattccaaagaaccccttcattcattcattcagtcaacaactacttattgaattcttgccttatgccaggcactggggagagatctgtgaacataccaggcaaaaatctcagcctttatggggtgcattgttgggcaagacagataaacaaatgaataaaataagtactatattatatggygataattgctttggagaacagtaaaataaggagaaacaattctaaaagccattttaagtagggggtatcatgaaggccttattgaagggacatttgaataaagacttagaggaggtgggccaggcacggtggctcacgcctgtaatcccagcactttgggaggctggggcaggcagatcacgagatcaggagatcgagaacatcctggccaacatggtgaaatcccatctctactaaaaatagaaaaaaaattatctgggtgtggtggcacgtgcctgtaatcccagctactcagtaggctgaggcaggagaatcgcttgaacccgggagatggagattgcagtgagcagagatcacaccactgcactccagcctagcgacagagtgagactctgtctcaaaaaaaaaacaaaaacaaaaacaaaaaacaaaacaaaaaaaaacttagaggagttgaggaggcagacatttggggcaagagtattataggcagaaggagktgtaagtacggagaccatgaggaagttctcttcctgtaataagccaaagagaggctagtgggtgataaggtcagtgagaaaatgtatattgtatgaaattctgttaggccttgaggcattgtaattactttgcctttcatgatgaggaaatgggggatgtcactagagggttttgaacaggaaagtgactgctatgagttatgttttaaatgatcactctagcccacattttgagatgaggtgaaggtggaagccttacttcaataaaccaagacaggaataacggtggcttaaaccagagtagtggcaatatggttagtaaaatgagagacttaagttacatttacagcgtggagtcttctaatcatagaatttagtgatgagttggaagtggctttgagagagaaggaaaaacatcaagaatgacttcaaacatttggcctccatatgccattaactggactggagaatattagaggaggaataggtttagtggggagggagtggaggtgaagatcaggatagtcactttgcatgtattaagtttgaaatgtctattaagcctttgaaatgtcctcaaggagtaatagacatttcaaacttaatatatgcaaatattgtatagataataggatatacaaatctagaattcaggggagagatcaaggctatggatataaatctggagtcatcttgatttgtctatatcagtagtattgatgaaatcactaaaggagtaaatttacacacaaaagagaaggtccaagggctaacctgggacaccccaacattaagaggttggtaagatgaaatggaaaagagaacttcwcaagagagtcccagtgaggttggaagaaaatcaccagtgagtggcatgcttgaatgtaatgaagatggtaggttaagaaggagaatgtgatcaactgtgtcaaatagtgctgacagttcaagtaagaggaggatggagaactgactttagactgagcaatgtggagtttattgatggccttaaggrgagcagttttggtagaattgtggagcaaaattttggagtgagtaagagagagaatgagatgaactggagatcagagactatacaaaacaatagaaatcaccaatattgtcataatagactacaggtattatagctagctttaaagataatgtttatgttcgtaactttttttgaaatgatggcagtttctagacttgctagaagaccttgctattgaacattttatgaattagcatatctattactgtatcactaatttgtgtttttaatattgtgataactatgtcaagttaattgaagttatttatagtcctatatttttatttatgcatttaaaaacattgttctcagaaaggatcccttgtgattaactagtagtccttagcaaaaaaacttaagaaccattcccattttagggtcactctcaagatttctacagakcctttccttctcctatgctttatcaacactgtcactattcctaaccctaccatccccccttttctaagggcagtcacaaagtggaattaaaactaaagttgctatccaccatagatcctatgccattctgttctgttctgtatttcccccttaaaattttaatttggaatattatgctatgaagagatgcttgcaaatttaaatgaaccttccaatatctttcagaatgtcaaagatggaatatgttcacaatatttgattcaattaacaaatgtcttctgtttttctctcttttctcttgtagtcatttgtgaataattaacttgtattttcatgctacatattatctgagaaaagatcattgtaattagtaattagttctctactctaaaactttttgaagttcttaactacttctgttttgctgtagggtttcaaatgaggcaaattgaaaaattcaatcagacttagctggtattttccatacaacatctggtttgacagctagatgtgtagtcaagcttataaatcaaaatgaagctgagttggaagtgatatagaaatgcaaaaatgctccatgatttttgtaggagatttgtgatcattttttatgttaatgtaattaaactaaaaatgaacttctgtattttaaattctacacattttcattgtgaaaatggttttattataatcactttatgaaaaataaagttatctgcagagagagaaggcagagagcttgaggaaagaggagagaaagaaatatttttagggagtctgctagcaaagaaaaaaaaatttcaaatagctatgagggtcaacatgggaaacttacatacctggcttgaagagacttctgaaaggaaacaattataaactcagtacagactagccttgtagcaggatctgttgtttgaggtgttgccaactcatgcttagaaacttagacataggagtatagatgtggagggagtcttgagattggagaccttgccaaatggctttggtagaagaagatggggctaagaaagagaaaagaaagatagcagtttgtgtcagcaaagtttcttactcctgagtttctggtcggatagagagaaaattaaagctaggaaaagaaagaaaggtgtgctaagaaattaggacgagcttaagaaattagagattgcaatgagggacaagtaagttcagttgcactgagagtagaatgggggcattggcacaaataaggttgtggaatgttagacctgaaagtagttgtagaaatcatctactttcaccagttcattttccagatttcccagagaggttaattctctttcccaagctcatggaaataaccaggggcagagcccttagaactcaggggactgaattctgaacccttgcatatttttgttctcttggcccaattgccgcagaagtggaaagaatgataatcctgactcctcttcataaaataaatgatttaaagaaacatctcattatttttactgggcatgaggattgaaacaggaataaaaatagaaatcctgtcttggtttctagctcaaagagttccctgatcatcaatccaggcattccctgagaatgctaccattatcactgaagatttgggaacatgaaattctatagagaggaagaggttttgaagagaataaaagattgtcaaaaagttgaatctgctgcattaggacactaagccaacttctgctgtaagcttttgccgtgagtctgagggtgtaaaatagcagcagactgaagatagtaattataacttttttcaacatctaccctgtggataccagcgcttggcaggacctgtgcaatrgggatgtgtataattaagagagaagggtctgtagaaaggctgtggggaggagataattcatttacactctctctccctatgtctgaatagaagcgtaactacttggacaagttaaatgatatctgacctataaagggaactttcatgaacctcccatttatcacgtatcttgaaagtgcattttaaatctcaaaccttagctctccccattttaattcctttccttcttctttgagcagtcatatttggaggatctcaaaatgcaagagtgtgagaatcaaaattaggatagtttgccccaggagtagtaggatagtgagtgttcctttgtcaaatttggctctggtgctggaattttaacatgtgttattggctctggggattatgttctggttccggctgagttaaagcttgctttgcttttgttttctgtaagtatttaataaaatggcaggattcgcttacttacttattgaattcttttgcctgggaaacatgcaaattctgaacccagctgcacatttgtgacaaagagatagctaataatctgagctatatgctatttttttttaaaaaaaagctttttatttttctacaaaggcagaactatagtacacaaagttaagccttttagagactgagtttaaatctgctttctattaatagctttcaagagtttttctaaataaccttcaggcacaggcattttttttttttttttttttttttttgcaagaaagcaggtggaggraaaaaagacctgtggtttgttaaccaataaatgctaagttgctaaatcttcctgtttcaaataaatcagttgggccaattagaatatttattttcttcctttctcttttattcaatattcacaaatgatactagagatggaataaactcctgagattatctggctcagattcttaatgttctggaagctggtactgaaggccagcaaggatgaatgatcaaaattgcatagtttgtgtgttcaataactgcttttggcccctctagttctatgtacccttcctctgtaccctgctccaggccacagaggctcacctttatgaaatgcttcagagggccctctcactgcttctggttgcatttggccatatgtagggttcatatgcgtaagtccaggtggcagaaggagagagaaaggagaactctaatttctctggctcccttcaggcctagcttagtagtggctgcaatgctggtgaccatctcctgtaagcacacttttcagcagttctagcaaattttccccttgtcttctgccttaggatggtgatgccatcctgctgatgctgtccccatgtttcaccatccttgccagctccccctaagtcggcctacatttttgcaaaggtttgctggattaactttcttgagtcactccttttgagtgtatcatctgtttcctgacagaatccagactggcacagctctggtaagcaccagtgctgggactgggacccaggactctttaccctattctaatgtccttcccactatgcccaagagtacaagaaaactttgtaatcttccttcaggatcaaacatatatatatgcatatatatatatgcatatatatatatgcatatatatatatgcatatatatatatgcatatatatacacacacatattctggatatatttcttctaaagtattttttacttgtctctcatttctactgtggaataaatgtattctttcaatttaataaatgagcaaatagtaaatttaggaaaaaatgataataaaagattacatctcacttcttttgatttacttggtgaagccagactgtgggagatatctttgataaagttggtcctattgaccaagaaagaaaacattatactaaagacttcacataacctgtttattctctatttcccatcaggagatggtttgtcaggaaatgtgtgatagatacatgtcatgaattcaatttagacagagctaggtagcattatggctgtttgtccacttttcccttttgaattatcttctacattccatggttttattaccactagttttctttccccaaagcaaagccattaggcattctttttgctgtgcacttactacataatttccccaaaaagcttctaaactctttttgtcccgtaggaggatgaggcccttgccagatctcctaagggttaggattaaacggaatattggttactgttgagcctgtcactgcatcagttttctggctcctcttagagtgtgatttgccaaattcagttgaaatcagttaagcaaccactttggaaaaatacagatgcttttaaacacagtcagaatactgagatttactctgcaggaaaacagagcaacaggtaaaaataataagaggaattaatttcactctgaaatgacagcattrtgccttttgactattgactttttgcagagaacatttcactggagggaactgacaactcttactagctgcctgcaaagcttgcctcctccttgctaaggagtagaaataatgtaattattgtttattgcctggatgacaataacttgcaaagattctcagcccaagctctgcaagccagttaactctggatatcagttggttttacagggtcaatacattaacaagatagcaagcaatgcctactcattaaggctcaatttactcccacttcccttgggaagaatcccctctgctcccaaaactcttaccagtggttttcaaaccttactaagcttgagaatcatttgctgggtctggcttattgaaacgcatcctagatttgcacragacagccactggcctatccatcacctttgtgttaattagaaaaagaggaactctttgggcagatgcagcccccacatgtaggaaatatgaaggctaacaagcaaaaaggttcttcttccttgggtggtcaggtacctttgcaaaatgcacaagaacaaaaccaaatgccatagctctagggtcttaatatttttgtcagcttctgcagaattcccttaaaggctctgcaagttagatttgagcacccctttctggcagagcactactccatgaccagaatgactaaattttgcctaagcaaatttccaaatgccatgttgtagcgtcactagagaaagataccccccagtcagatcttggtgatgaaggtgagacacaatgggctccaagaatttgaaatccctcatctgtgaaggcagaaatactaggagaatgggtaatgtttataccatcaatgaagaaactcttgtaacctagggttttcaaattacagaagaggaagaacaatggaggctgatctccagtttgtgacagtctagataggtggcctcagtcttgctcttataaattctaattcccagaagtcatgcagtcgtgtgtctatccatatatccattcatccaacatttattgagtgtctactctgtgccagctgttatgagaggcaatgaggaaaactggaattaatgtaggctttggagccaaacagataagtgcctgaattctgtctccctcgacttcttagatgcatactgtcatgcaagatgattaattttactgaattggcattgtcatttggaatgtattttatcacctacatcatagggtgattgtgagaataagatattatacatttctatagtgcctactgggcttggtacatagtgagtaatcagtaattgatagatattattcagagtcatgatacaatgataccacaaaataatcgktatctttttcttcctattctctattgatgatctatgtatataacatccattttcctgtcttatattgtacctgagtcagaataaaatggatcttttcagggaaacaatactcagagtaagattagaaaataccaaaggcacctaggaaaagtttctgacttttcagaggttagaggaagtcttcctwctattttgttgtttaccatgtattatatgataagaaatttggaaagactttgataatgctatatatgttaatgtgctccaatgttttccaaagcatgtttacgtctagtatcttggtacttttcctaattgagatctgagcttattacttccrttttatatatgagaaaactgcacaaaattacattacaagccaatgacagtgtttaggccagaatccacagctccaggtctagtccagtaatttctctacttgtagcccaaggcctataataatcagccttttgtgggaaagacttgaacaattcagcaattaaaaaagaaaaagtagcagtcgattccgccaaggaagggtatacctgggctgtgacagtttctcaggaaatcacttaacattttgaggcctgctagcacattggattttaatccaaatttatctaaaaataattttcaatggactttaaacctcattttccttctgttaacaatttgacataattttaactgaagctaagtttatgtattcatattcatccatggggcatgaccagtgcctacagtttgccctaagaggtcagcattaatattgtaatccattgcgggaccgtgtagtgcacaacatgctctcctgtacatagtagccttgcctttgcctgaatgttgtcacattattttcgctattttaagcgtttttatttctcctctgcagtcactgaggagccctgcaaaaggagctcaagaagcagcaaccttgatttttaaattagtttaactagacacagaacaaatttaagataagtttcaaatatatggtttacaacatgattcacatttgtctgtcaaatactatatggttacattcaatttataaaagcagatactgaaatgtattaagaaaaatctatatatttcaaatttcatactagaaactttattttaaataaatattttatgtttagaagaggctggatttactgactagtagaggcataaattttatttttgaccagcattttaagttaggaattatgatgtacatatccagaatggaagtaacagctagtatttgcgagcacttactatgcaccagctttgttctaattattttgtatttcaaaacttctgtgatagtcttaacaaccttttgagatagattttattattatcctgattttatagcagaggaaatgaaggttcagaatgggtgggttatttttccaaggtcacatagctcttctggttgagatttgaactgaccagtgtctctagaacctggcctacaaagccttgggctaatttttaaaaaaataaaacttatatcatctaatattatcttaggaggacagtgtcagcatgtcataaaacatatcagaagcacaatctggatgatatctattttaagtttcaaagataaaattattatgtagaaaatagatgaaattctctaagcaatatttattatttttataaggtaatgtatctttgaagtttatagctatcttagaaaaaaacaaaacccatgagtcataactaactatggtgtgccagtaagactgtttcaagcaaagagtctttctggaagaacatgatggtatgacttattctttgttgggaaagtacagaaaaaaaatgtaatgtaatcatcaccatttgatcaaaatatggaaaatcttaaaataaacctccttgattcatgtattcattttcaactctctcatttcagacaaccggcagtgagcatttactagggaagatttttgtctttaataacttgaattattggtgggtgcacattcaaagacaattaatgatttccttcttcataagaattacttttctgtgatatcagaagtgatatgctggattgatttgtgtgttgcttacacaaaagtcagaaagatcttgagggaactaagttatgagcccatcagcgaggctcaactgggtcaggtttatgattaagataaccgaggtcagacctgaatagaaacttccacttggttttgctggttggtttctctgtacactagagttgtttctcagtaggctctgttttcttcagtggaaggtaaagaacatagtgggaatcatattaatagctccaggtttttgaaaactacttggaggtcttctgtggaagtatttcaaaggataccttgcattctgaacggctgtaacactactgtgctggcttttgactcttaggttagctaaccagggaagaacctgtttttgtatcaggcttatcttaaaattgttgaaattatataataaattacaagcagggctaattttcaaaatatttaacaactagtaggacataagcactaaccaagcagaagagtccctggctgtaaataatgggtacattgataataattgcaagtcagattataaaggaaaatggattttcagagagatcctcaatttacctgactatgacaatgtcaacttagaattaattgatttaccttctataatggcccattattgcttaagtagtacatcatcatgatgcacatgcatgtgtgcgtgcmtccacacacacacacataaatacacacacaattaatttttccattaggtatgatatcctaatgtcatcaaatgaaaaacaagacggcataccctgaatcgtctccaaggcccttcgtagcttaaaaaatttactttctggctgctacagatgygttgcttatgtcttttgtctctgaagatttgattttacctcctgatgagctgttgaaaggtagtagctcttagattgagtataaaagtgacatctgtctcttttcaaagcctcagaacttttgtatgcatctgggaagctytgtcccctgcatagtttcaattacaatgagtattcttttcattttggatcttagcaaagacttttgccactgtgtggctgtgtgacagctgctgtacacccctccagtggtggttgaygtgatttctgcacctgtcttatgcttaaaaatattggggggagaaaatggacccagcatgctggaaaatattgacttgtttcccatattaggcttagctgctgaatgtcacggatctggaatgagaggaaagccagccaatttgtcaaggtcactagctccctctctgaaaagtgctctgtttatctaaagagttctgagacagggtcttatgtccattaaagatgaaggttcactgttattttagggctggacttggagatgggctttctgaaaaatgtaaacaacttaatcaggccaggtgagatgagcctatctctgtatgcatcccctacctccactttctgtcctctagatcccttcccagtgtagtattaaatgtttcacatgctaaaataaatattctgaacaaacagcaggtcaagtaatccagtttcctttttgggaaaaaaataaatcacattcaggattaatggagaggaacaaaagccaatagtrtggttaagaatttggattcaggagcaagaaagacttgggttcaaattccatttcatgccctatctctgtgatcttcaatatattacttaaaatttctatgcccagtttccctatccggaatatgagtaaacagtacctatctcatagatttgtcgtaagaattaaatacgttargggacacattattgcaatgcctcaaacatagtaagccatttaaaagatatggtgttgggctgggcatggtggcttatgcctgtaatcccagcactctgggaggcagaggcggatggatcatctgaggtcaggagtttgagaccagcctggccaacatggtgaaaccccatctctactaaaaatacaaaaattggccaggggtggtggtgcatgcctataatcccagctactcaggaggctgaggcaggagaatcgcttgaacccaggaggcagaggttgcagtgaaccaagatcacgccactccagcactccaggtgacagagcaagactctgtcttaaaaaaaaaaaaagacagttgtgtgtgtgtgtgtgtgtgtgtgtgtatttaatgttaaagaaaaagctggcaatagccttgtgataaatacagtgcagcaaggcaaaatgacttgtcttgtatttaaataagcataccatctattcagaggaaatctagcattcaaagggagtttctgcacagtgacaagagaggtgctgaatccgacagatcagaattcaaattctgtctcatgtgattacacctcaatttctttacctataaaatgggttaagaccaaactccctgcactgtgcraagcctctaaaatctctctctatgcccctcacacagtgtggcccttatatgaactcatgcttttttgtttttgtaaggattaaatagttgcagctgaataaatgttttgcatgtagctacaaaggttgcttataattcaggagtaattttatacttcataggatgatgcttttatatttctaatggttcttttgctgtatggagccattcacataactgaaaatggtaaacatttattaaaaatatataaaatatattaaatgcaatgttttatgatatgaactaaatctcaaatatcatacatattttgacaaagatagggaaataaggatcttttgtttaatatactagagtctcagtgagactctcacaagtgtgacattcatgtattcacatatgattctttaaacagacatttattaaacatatagtatatctcaaaacctgccttaagcatgtttaggatacaaaaaaaatgtaagattttttcctccctgtaaaatttccctgaaaggaagataattatagatataagtaaatatamttcaagttagaaaattttaatggctatagaagtaaaataataataatatmcaattagagttgaatggggaagaaaaatgcttttggttgtatcagaaaatagtttatgtaagagttaaatttggttataaaatataatttgtcaaaaagcaatgttccaggcagaagaaataatttgagcaaattagagatagaccctgaaggagacgttcaaagagtggtaaatcatggttttgttggagcatattggtattaagagtaattgcatagagaaacagaaagactaggttgagcccagattgtgttaagtcatggggagatgttagaactttctgagctgtgaagtgacaagttttctatttaatgtctggctttaggcccgtgattctgaaccactcagaaatctagagcttttccatttcatagttacagtatccattcctctctgcacacattgttagaatcacaaaacatgtgagaaagctatccttttaggtgtgcattgggaacacaagccctgtgaaattggaggctgctgcctgtgtctagcaagtctgctggtatttgccaagcataagaaaatggactttaattttcacatactataagcatttgaaacatacgtagtggtactccaatcatgtttaatcctatactcactgcagactggatgttttcaacctaacaggtcctaattttcatattggccatagtgacttttttttttttttattttgagatggagttttgctcttgttgcccaggatggagtccaatggcgcgatcttggctcactgcaacctccgcctcctgggttcaagcaattctcctgcctcagcctcccaagtagctgggattacaggcatatgccaacacgccaggctaattttgtatttttttagtagagacggggtttctccatgttggtcaggctggtctccaactcccgacctcaggtgatccacctgcctcggcctcccaaagtgctgggattacaggcatgagcccacagcacctggtctggccatagtgatttttaaaggggatgtttatcataatatttccacaactgatagtttctcagtaaatttattattgatttggcaaaatatatatttgaataaatactaatcatagaaatttgcctgcattctttcatattgctgaatggctccattgaatactttaggaatgttatcaatgcagattataaatttttgctaatgtttgacaataaatttgttatatttgtttgcaagattacatgctttttccagagtctcctaatcaaatagctttaacagcaaagaaaaaaataacacaattataatttatctgatctggaattatgtctttgttctcaaaattaatacaaagcctaattaagagacccacacttgacaccttctcctccctctcttttactgaaaagaacatttcactgaagtattatattggactgctttatgttatgatttatggattcacattgagtttctgggattttttttacttcattttaataggatcataggaatgaagggagcaaataacagattgttatcatttaatatgttcaatttcatcagttggtgtgattgcatatgtggtttaccagtccaggatagaacaccccatgtccttgtggtattcttcctgtagatataaattttataatgaaaatgagccatgctatatcttatggttaagctccataaatcaatgactcttagataaataacacattaataaaatcttcccgagtagatctttaattgagagcattgaaaataagaatcggtcagttgtcacaaagtgtcacataacacatgtagtaacaggtctgctctcttaaaaacgcatctccatgttgttacgcaagtgcatttgtcttttatcctatccttgatctagatatttcctagacattctccccattctgtccattttgcttgttggaaaatatctttggtcaatgcattcagaaaagctttattaaaactttctttgtacatggtactatgttatacgatgcctcaactaccaggtttttcagtctgtctgatcacagttcaccaagtgggcataatttgagaatttcgagaagagccctctccctaaaatatacagtgatgcactacaataacaatgttgtggccaatgagggactacatrtatgatggtgatcccacaagttatgatattgtgtttttatcctaccttttctatgtttagatatgcgtagctacacaaataccattgtgttacaaatgcctacagcattctatacagtaacttgctatacaagtaagttcctagcctaacagcaatagcctataccatatagcctaggtgtgtagtagactgtcatctaggtttatgtaagtacactctgtgatgttcgcacaatgacaaaattgcctaatgatgcatttctcagaacctattcctgtcgctaagcgccacatgactgcattttcctctcttggccagcctaacttagtgtcagtgattaaaattttttctttaagaaatagtatattttattgagttaatctgtattttccctaaatttatcaagattaaaaaaagaaaaaaatatttgaaaacagaatgaaagaaaaagtatgtgaaaccaagggtgagaaaggtagggaaaaaatacaaattatgaagtcctagaaacttattagtctctggaaatttattagtgtttgtctctgatgcttttttatattttcagcaggggagagggagacagagtgagagagggtgggggaaacaaagagggcaggctcagttgcttaaataacaacacattttaaaataaagttatgtagaagaagcagaaccattcccctttccccatggaccctcataaagaaaataccttgtgatatagtgaaatggtaatttcaataatgttctaatagtaaaaccagcattgagtgtgatagctctgtttcttagtgtcctttaatatagtgggacctcagaacaactcaagaaatgcatctgtacaagataccccattagagagtaatcagagagtaattggtcctctaagttacaacactgtcctggggccataccttggaaagataaagatttaggcatgaacaccttggtgtaaagtagtttatgcaagttttttctaatacaatcattagagtagggctggctttctaagttgaaggccagagacagaaagaaggctgccctggagagattaagtaaaagtcagggatttggggctgaaaacaagggcaacttaaaaagatgattacctcagtgtccttcttggagctggttgtgtacatgaatagattttaaaaatgcaaaatattctaagattaagatttaccagcgccaagaaaagagactgtaggaaaattttcattagcaattcctgagtcattcatgctgtggaatacatgaaaaaagaagtttatcaagaacttccaagtacatacgtagatccatcatttgaataagagggggattaattctatgtgtgtgcctgggtgtggtggggagagaaaatggggagggacagagatgagaaatatgtagttctacaactacactcaagaatatagatgaatcttgtaaaacatgatgtcaaatgagaaataagtgagactcaaaagtacatgctttatgattgcgtttatgtaaagtaccaaaacagataaagctaccctatgctgttacaggtaacagtagtggttaccttgggtatgggaatagtgattggaagaactagagggggctttgaaacactgctgatgtgttctgtttcttgatctgtgtgcagagaacttgtgtgtgctcagttattcatcaagctgtacattgaccatatgtgcacttttctctatgtatattatatgccaacaaaaaaagtttttgtttaaactatacaaatgtctctcacatattaaaatattgctaacttaattatgctgctgctatcctttctcaactttccagcatgcaggtcaaaatgtgatcactatttccaaagaataagataattatcattggattccaattctctccctctctattttctcacagaattaattatccaacagagtgcaggcacacctcattttattgtactgcattttattgcactttgcagatattatgatttttacaaactgaagttttgtggcaaccctgtttcaagcaagtctatgagctctgtttttcaacagcatgtgctcatttcatgtctctgtgttacattttgttaattattgccacatctttaaacattttcatgattattatatctattatggtgatctgtgatccatgatctttgatgttactactgtaattgttttggggtccttcaaactacaaccatagaatctgacaaacttaatcaataaatatgtcctgaccgcttcactgaccagccattctctatttccctcccttactgtgggcctccctattccctgagacacatcaaagttgaaatttcacccattaataaccctacagtggtctctaagtgttcaagtaaaagagagtcacatttatctcacttgaaatcaaaagataaaaatgataaagcttaatgaggaaggcatgttgaaagctgaaataggttgaaagctaggcctcttttgccaaatagctagccaagttgttagtgcaaaggaaaagttcttgaagaaaatgaaaagtgctactccagtgaacacatgaatgataagaaaccaaaacagacttattgctgatatggagaaaattttagtggtctggagagaagatcaaaccatccacaacattccctttaagtcaaagcctaatccagagtaaagccctagatcctttcaattctacaaaggctgaaagaagggaggaagctgcagaaggaaaggttgaaggtagaagaggttggttcatgaggtttacagaaagaagccatcttcataacataaaagtgcaaagtaaaacagcacaacgcttgaagtggaagtgatgatgtaaaagctgcaacaagttattcagaagatctagctaagataattgatgaaggtggttacactatacaacagaactttaacttacactaaataatcttctagtggaaaaagatgccatctaggacccccatagctagagaggagaagtcaatgcctggcctcaaagctccaaaggacaagctgagtctcttgttagaggctagtgcagctgctgactttaagttgaagccagtgctcatttaccattctgaaaatcctggggcccttaagaatgatgctaaatcaactctgcctgtgctgtgtaagtggaacagcaaagcctgtatgatagcacatgtgtttatagcatggtttactggacattttaagcctcctgttgagtcctagtgctaaaaaaagattcctttcaaagtattactgctcactgataatgcatctggtcacccaagagctctgatggacatatacatggagattaatgttgttttcatgcctgctaacaaagcatccattctgcagcctatgaatcagggaataattttgactttcaaagagtattatttaagaaataccttttataagtctcttgctgtcttggatgataattcctttgatggatctgggcaaagtaaattggaaaccttttataagtctcatgctgccttggataataattcctttgatggatctgggcaaagtaaattgaaaacctttaaggtaagagtcaccattctaaatgttgctaagaacattcgtgattcatgagaggaagtcaaaacatcaacattaataggagttaggaagaagttgattccaaccctcatggatgactttgagaggttcaagacttcagtggaggaagtaactgaagatgtggtggaaatagcggggaactagaattagagatggagtgtgaagatggaatggaattgctgcaacctcatgatcaaacttgaatggatgaggagttgctgcttatggatgaacagagaaagttgtctcttgagataaaatcttctcctggtgaagatgttgtgaatattgttgaaataataacaaatratttagaatatttcataaacttataaacttatttgatgaagcagtggcagagtttgagaggattgacttcaattttgaaagaagttctactgtgaataaaatgctatcaatcaacaccatatgctatagagaaatctttcatgaaagagtcaaccaatgcagcagacatccttgttatcttattttcagaaattgccacagtcacctcaacttttagcaaccaccaccctgatctgtctgcagccatcaacatcaaggaaagaccctacaccagcaaaaagattgtgattctctaaaggatcagatgatcatgagcactttttagcaataaagtatttttaaattataagcacattgtttctttgacatagtgctactgcacacttaatagactacagtacagcataaacatagcttttatattcactaggaaaccaaaaaatttgtgtgactcattttattgcgatatgcactttatggtggggttctggaaccaaacctgaaatatctctgaggtatgcctgtatttgttttcccctgctgtacaaaagtacaaaactatgtttaagtagcatgtttaattcttgatgccattattaccacataacatctttatatttttatacaaaacacctcgccgtgagagtttcttaaggctgtgcttagtgttaactggaagccaatgctaatactgaaaaaaaaaaaagggtgggggaattggatttgggatcaggatgtagataggcttcccagaatttcaggaaaaaaattcagaacaggaaagagcatcttgaagatataccataaaaagatggtctttttgagtggtatagtcagtttctaatttaagagtaatttctctctcagatgtgttaaagtgtaaaaaaaaatctaataagatttaacacttcaaagtcattaactaactaattaactaatgaatccacacaacagctctatgaggtttatgctaaatatctatcatttcacagatcttgtgtcatttagaaactcttctagcttttctcgtctctgctcttttcaaagtctttaaaaagaacgaattattttcatgtctccagtgaaggacatgtatcaaatttgtctcttgagaaaatccaatgctttgtgaagtaaatttccaaagccagtcaattaactcagtgcttttcctattaatgtgactccaaatttctgatatcccttgccctgagaagctattttgtttgccctgggaagaaagaaaagtcaacctatgtgcctgcacattataggtgctcattaagtgcccattggaattcttcctttgtaactctttgattaatttgcttttgcttaatttagccatcatttcacagactctactggaatttttaaaaacataaatattgatattgtgttttcttcctttaaatgcctaaattatttcacactagaaatgtaatagttactaagttctcagaccattttggtttactgtaataacaatagcatgttctcttgagtgctgagtatgggaaggtgtgatatgtccatgtttggggtagagaaaggaaagagagagtgagaaagtgaggaaggagaaaaaagggaaagagagagacacatgcacacacacgcagacacacacacacacatacacacacacagagagagagagagagagagagagagagacattatggcaatgttttaaagagagatttgtaggataatggaactaatttctcaagtaatgtttataaaatggaaatgatgttgaattactagaagaaacacaatactaacaacagaatttttctgttgtgttgctgaacaacattgttacagaagaatacttaatagagcaagtccattaaaggatattaataacgggcttgcaaattgctggtagatccttttcaggtttgatttaataatgattggtaagcgtcaaggacatttaatcattttttatatattgcagacttggcaatttatgtgtttaatgtgagaatttccacttcaccacttgaatcaacttgctgcattgtgaaaatatctagcaaacgacaggagaaaactaacttttactgacacctgctgtgcctgcaaacatatgttatctcaatttatcctcaaaattgtgctgggacatgaagtattgttcccattttacagatgaggaaactgataccatgccgtgctaccaggctaaccaaaactgcascccaggtttatttaacttcaggtctagtggattcgaagtctacgatctccctcctacaccatgaaatcaaagtaagtcttccacgaacagacttaatttgaaaacctttaaaactctgccggcccatctatcttaaagtggtttttttaggtcatcctctgtatatgctgatgtactgatataataaaaacttggatataagaacctcttttgtcattttttgcttttgtcttctaagatgtcatttgtgtgctccctctttcagccacactcagctcacgcggcttgaattctggctggcacgggcagtgcggtcaaggctgcagctgttagcatcccctcctcccatgctcatcatgagttctgcaaatgagccctgcagactgatatcgtgttctgcagtttatttgacaaatagcttttatggcctttgattttttttcaratcacttataaattctagcaacagacaggttgtttgtcagattcaaattccatacagttgaaaggaaagaggtgaagattcctgcgttcaaagtggactctaaccttaagatttatttgtaaattttacttaaaattaccttgagaggaacctaagatattctcctggcagtgcctagttgcaaattatttctatccttatgtcataaatcttgataataagtcttttaaaatgcactcgagaaatgtattttgtgtttatagtgctggattttagtgagtcaaattgtgttcaggcagtatgtttgcctcttcatgttctgtgtgacactggagtaaaatggagacttcagtcattcagctgcaggctctaagaaagtctgttgtaactgtgcattttaattaaccgactcagctgaggaaatattgtctctctactgtggtgwagctgtctgccttgtaaagtacctccctggataaacagaggacttttatttcttaaactgcctttcccccatcgtctttaagagtatgttgggctttcttttttttattaaattacaggtggagaaggtttaattaactctaaaatgattcttcagcaaactcagttgcatttttttacaacactttgagctacgatatagttactgcaggctgcatactgttattggagcatacagaaacatttagaaacctaaatctgttttgtcatattaccagagatggcatctgcacttgggtacagttgaaatacaaactgaagatcagataagtttttttttttgtttaaaccagtcagtgggctactgtgaactgagctaacaaaatgggaataatttagccattgattactttgtacaacacactgctggatcttaaaactgagttgaatgtgaggagatagtcatagttcaaggagttatatgcaaatttgacctctggaaatataatttgtgggtttcatatttaaagctgctgaatacattttgtcagaaacctcttgcttctatgattaattatagattagttaaccactggacttcttttattcagtcatcatgagacactctatgcaaaatatacatatattttttaagagacatgatcttgctctgttgctcaggctggagtgcagtggtgcaatcgttgctcactgtatcctccctgggcttaagcagtcctcccacttcagcttccaagcatgtgccatcacacccaggtaattttttttcattttttgtagagatgaggccttgctatgtttccagactggtcttgagagctcaagtgatcctccttgcctcggcctcccaaagtgctgggcctataggcatgagccacctaccacacccagcctatgtggaatttttgaatctaaagtagattaatgcaaatttcagaacaacgttttccatcttttcaaactatgcgctctggagcccaagattctctacctaagttggaccaagcagattccagtactgaaagcaaaaacaaacacaaaacctaactacttattttactgttcctctttaaaaagaatgaaaacaaagaagaattaaaaaaaaaattaagtaaccactgggtttatcttaagcaagatgcgtataggggtaaaaaatgatgcagtgaccacagtgaaaccatgaagtggataacaaagagagaacttgaggattgcagttcttggaagattgttacaagtacaatgaaattagtttggaatttcaaatagaaggtaaaaaaaatggactgcaaggttctcaaaagtccttataactacaagtttttataactaaagtgaagttttatttcaatttgtttatcacgtatgttccaaaaaagaatccactctgtgaatgacaaagtttactgtggtccagaggctgacagatacttcacatgaaaagggatatggatggtctgtaagtctgccctaccttacaaattgtaattaaaatgcaacttaaaatatattagggaagaggtcatttttatttctaaaattaaactataatttacaaaattatagttcttcatttataggcccaaacaaaagagttgaatacaaatagaatttttccctccttttacattaaattattagatggtgtcattttaattattgctttcatgagagataaaactattagtattttccttttaactcagtytgaaggcatatatccaagttgtatggattgacttaaaagttggatagaaagaaaaattgaaagaaattttaagtggagatgagaaagagaaaaagaaatgtagtgcaaaggaataaaggaatgaacagaagggaggaaaggagagactcagaaaagggaagatgcttcagttctgtatgatctaacatgccttctgcatgatcagcttttaggaggtaaaaaagatgagcattactacttgtcagcttctgagtgttggaggcctccagtagagtagttactttggaaacgcgtaaaatcagaggccaagacctagtttctgtcatagcgtagggtgttcccttggtgtgggtaagagaggagaggcctcagaatgcatctaaagctgaatccttgcagaactggggctgagataaggagacatccaagctaaagagcaaaggacctttctcaggaggatgtggacggggagagatcacaaatgtatggcttttaaacaaacgttgactacctagcctctacaaaaatgaaggtgtattcgcagctagacttaaatattatttctttgtctcaattttttgtagctcttattccctttaacatatccctccaaatgttcatagctttggtaactatcacaggaaaaaatgattggtagattattcacaacacacaagcaatttaaatcagaacatgatcctttaaaactgtattttcctaagaatacgattaacctttggacaatatgggtttgagctgcatgagtctactcacacgtggattatcttccgactctgccaccctgagacagcaagaccgatcgcttctctatctcctcctcagcctactcaacatgaagatgccaagaatgaagacctttaggattatccatttcgcttaatgaataataaatatattttcttttccttatgattttcttaataatattttcatttttctagcttactttattataaaatacagaataagatacatatataaaatatgggttgactctttatattatcagtaaggcttctggtcaacaatatgctattagtagttctgggggagtaaaatattatatggatttttgactgtatgggagggtttgttctcttgaccctcacattgtttagtggtcagctataatttttgaagcccgttaaatggtaaatgagaagagtgtacatagtgaaaaagtgtatattaaattaaaactaaaaaaagtttttatgactacacaaagaaatataaggttgatacaattaagtttccatagagttgaaatgtttactgtagattgtttgcaataataacttcataataatgaccagaaaatcaattcaacaacatctatcatgcataaaagactgtatcagccaccattggaagaagaaggaaaagaagagattatccatttcctcaaatcgtgatacaaaccccttaataactctaacataaggtagactgtgatgcagtctctgggagagggggaaaaaaaacagaaaagagggaaggaaaagattaataagacatctggagtgagcagaatttgatctattctggaaaagctcagaaattgactggaggacttgggagggaggaagggcawttctcacaaaggaaattgcttgatcaaaagcacagagattgggaagcatgggctactttgagaacctgccagtggtagagcatgggaaagggtagggcaataaaggtggttgtagctgggctttgttgggaggctgaggacattggttttatgtactaccatcactcttcagtattaactacgtgcccagatgcccttgagcttatggaaatttagattctatttccggaaagtccaccaggagtctgttattcaaaataaaaataggtagtgtaatatgactttcaaagcgcattrtggtactgagatttttagcagttggaactaatgaagggaaggagaaagtattatgtgccaacctttgtattaaatgattttatctacatcatctcattgaatcttcataggatctttatgagtattagattatatatgaaatgtaccaggaaaaatatttaacaaatgctgattctttgccttcttgcaacaatcccatgataactacattgttttacacatttttattaggatgacgatgttgagactcaaggtttcacagttactaaaatcccagaaacagaattcaaactggatccatagtccaagttctttctggtatacaaagttgtctctccatgaaaaaaatttaaggagaaagactttgtataatggcgattcactgaaaaaaaaattctcaaatatagtttattgaatgaaacatggattatttaccctgccttggctcctttggaaaggcccaaactcatgtttgagaaaaatactgaggaatctatagaggatgatttcagagtgctttacaaaggtctttgcctaagaagaactttccccaaccctgctggctatgcctgctcttaatatataactttcttacctttagctgaagactttcatctctatttaaaggtgagtgcccttggaagggacagtaatcctgctctcrctctgggagcagatatttgataacgcataagaaaccaagaaagctctgggcaccactggatggaggaatttcaatatggatactacttccaaatagagaaaatacatggaaatgggatgctgagaagacacaaggcagacatctcagagttgactagattgcgctgtagagttcaatctagtccatctgtccgatgactccaaccatgaaactgaccctgtgactttctgacaggatcaacatttgattgggaattctagaaaaacaggcaaggcagtgcactcaaagaattaagatctgcaggcagaaaacaacagagaaacaaaacagaacaaccaaaaaacaaacaaacaaaaaaacaccaggaaaacctattagaaataggaaaatagaaggaatgtcagcttaaatttaagaatgtgatggcaaacttagaggagggtaaattagctttcaagaaagtgaattacaggatctccatcatttgggattttttttttaacattaagaaacgtataatgtgagcttttggctattttgaaatctactttgactttctcttttcgtctatatctagcttaatgctcttgcattttagtgtaaactaataaagactccacacatctgtgtgtgttagaccataaaagtgaccagagtaaagcccataaaaatatatgtagatttttacattttattacttagtcctccctgtaaaagtccaaaagactaaacacttactgctttttaatgaatgacatgagataggctggagtgggtgccacaggctggaaggaacactatactggcagattagactttaactagcagagggatgttctaatggtaaatcatcggaaattatttcctaaagggatctggagatgcatgatttggctttgagaagccttttgtgggtggggtataaattattttagagcagtcctataaagaagtgaaaatgtataggattaatgagtgaaacttacaggaagacagactcaatataaagggctctgttcttatattttaaggaaaactatctgagtttacgaaacgcataaaacactttttatcaaatcattagataatatatacaaattcctggtacataataaggactcaattataccaaaatatcttcacattataggaaaaatattcacctaataggaaaatatatatatatttttttaggcatgtacaacatacgtaccttggtggaaatacaaatacgtatgtaatatgtcctctgccatattagaaagatctttaaatattccattttaatcataattcagtgatgttacctaaccctctattggtgccagtaaacaaaccaagtatttatacctttcacattaaaattttgaatacattaggcaaaatccctttcataaattgacaagtacatgccaacactaatctcaaagcgctgaattttaaacttcttggagagttttcactatggtaaacttcctagagttttcaccgttataactattttcactgttgtaccttagagaggtttcactgttgtaatcttgtcacacatttatcagaattttaaaagctactctactttttcaatatcaacatgatgcattctacaagtttcctttaaagctcttgtgagattctggttgactgcatcaaatattaatgagggaaacttataggaagacagtcaatatgagggctctgttggtaagcatattctttcttttagaaagtacatagatcaatattaatgacaaggagcacttttttagctacatgagggccacccagttgaagctatgaacaccactcaaggtagcatagcctcatgatactgtagcttcactgtctgatgacattttcattctgctcccacttcattaataagctttagcaccaagaatgctgactaaggatttacatttaattgaagtcattgcctccttactgacaaaatgtattttccaccctgcatagatgtaattgatgtgatgaaatgtcaacaaaaattgcctttgctaaatgtagtatttgccttactattttatatgccaggccaaaaaaactatattttacccttgagaagacaaaattctgattgttggaaagagtgtttctgattggtgaaatatagttgagtacccctatacataaagtcctatactttgttttctaggaattagctaattaaggaggaaaacagtaagctttaatactttgtaagactgtaattcaactatatatcctgttttttcaattgcaaatcataatatactgtagaggtgttttatagattgtagaggaaagagaagtgtcagccagctttaaatttgttttatgtcctaatatttaatgcaagtgtgtaacttttcttttggagataatgctgctcttttgagccaaatgactgaattgtgttggtttataaaggaagacattttttggtgatataggaattacagactctttcaaataaggagaacaatttaagagtgagagaaaggataaatgagaatcctgattgggagaagtgagagcccttaaaaataaaaagaaaacatggagaattgttaataaagttattaattatcattacaacatttgctggaaakgataagatagaagctgtttttcttttttttcaataaaatggattattattgcttatagaagttctgttgttagaaagtataattgtaaaatacattgtacttgcttggtcttatatcatgtcccagatattcctgttctctctgtgttcctggaattttcctcacgtgttcaggatccctaactcaagagcgtccattcatgaccctatgaagttaaaatgtcagaaaactcacaactgcttccccacctgaaaaaccatcatcctctctctgatctttagatatgccataggaactcagctgtcaaagaggaacagtctgtgtcttcttaaatgacaaacattttgaaaatacacctgctacttcatattggtaagagcagctacatccagcggaggaagccttttgtcattctttgatgaattaatgatgtaattttgcataagcaatgacatataaaaggaagtccctgtacatttatacccctttttatccagtgatttttcaataattataattgataaagtcaatagtaatttctatactaagaggagatcttgggcacagtcttccactggagtggccaggggagaaacatcagagcagatatcatgtgactgatacctggaatgcgtgctaatcctacagtaacatgttatatgcaattactttttgctcaataatgatgtcatgttgccatataaacattatattgatccagtgtaaagtcaacaaggattgaacacaatgatactagaaagggagtggacaggtaaacgtcctgattgaaagcccttgctatagttgcctgatctgaaatacaagtagaattttcaatgtgtttgataattatttgttttagtgttcgctggtcggtgtctttatgtctgttgtacattgtgataatcagtataaaaatcatagacttagataacatgaggtggaagaagctgtgcctatgtgaaaacagaaagtcaaagacgatgttctagacttctaatgatgtaaaatgggcttggggttctgtaacatggaggttactgatttctttttggctcatgccaaacatagaacaacaaaccccactcagtatctcactaagggctttttgaaaagaagaggtagttgccattttagagtttacaaagtacttttcacatttcgtcctcccaattaccatgagcagtcaatagtacacatctgtgttacatatgagaaacttcaaattcagaaaagccaggaaatgtacctgtgatgacttgattagcaagtgtcaaaggaacttgaatttaggtcttaatttctaaggcccrtattctaccatgcctggctgtgatatttccctcaaatgcaaaagaatcataaattattgttatttagattttattggtagtattaagtatccaaaatcatcaccaacttttggaggctaaaagaatttgggtccaattctgtaggctattatgattaggaaagcagtgactttcacctatgtattattattatttctttaattcatttttaattagagctatttgatacaaactatttaacatccatccattttatttctcttaaaacttgtgtcattcaaatttacctatatattctgttgtgctcattgtttcccccaactgcctctgatttttagtgtaggtagctaggagaatacaacaatagcaaaactccgtgggttagctacagatctggattctaatgagaatccagagcaaaaaggaatagatgaagcaacacagattctgaattttttatttctcatggctcgattcttacttgccatgtctggaactcactttatctcaggcttcatgacctgatgcttgtttctgatgcagtctaatccacactttaaataaacgatttgagttctcattttggtaaatgtcaagggaagaagagatatttcatgcacctacagcatcctaaaacctcttgccaaatccatgaatctgactctgcattatccttccccagaaggagagcataatttcattatccatgaatcatcacctcttagactgtaacatcattgtcagagagcctaatagaaccagtgttcagctggctgaaaagggggagggagggagaaagcgctgaggcaaagcacaggtcactggcacaatcagcaaactggagagttctaaagccggaaggggaggcccccctcctttgacacctttgacatatccctgaccagtaaatgactgatgctgactcttttgatataatattaaaatttgtttttcctacctaaattacatgtatcttgctgatgaaaaatattaacccctttaataaaaatatcaaaatgcttagccagcatcgatgagtataagcactctaaaatatttcttatctattcttattgcgttattactcgcttttcatcttggacacttatttctagccttcagtaccaattctatggcctctgttccagcattactataaaagtcaaaatgaaaagtataacattcaaaaattacattataattatatttcccaaggaaatgaattaaataaaattcaaatctgatttactagtcaaaaaacatgttgtaaaccacgtttacataaggattcaggataaaaagctaaaatgtgtgaatagctgtggttagtctaaccagacactagaggtcactgctgctccatagaaagacaatttactgcctgtctacttaggtagttcactcaccaaatcaagtaaaaaattgtttaaattctttgaaaagatgtaatgtcaacrtccttggaaaatacaaactcatttcaatgcaatatatcttgcataagtattgcttacaagactgtggcactgggactatttaactacatgctgtggtagcactrtgtgtactggggttaataaaaatggaaaaaaactcacatgaagtttagagactaaatcccatttcttctctgttttggtaaagcaaagtattctgtgttctgttgtatagttcaacaggtcaggctttttttttttttttttttttaactgttgtcacctttgagggaagtccaatattttatgtaaatacgtactagaaaaataaatatcaatcacatttctctaatctgcatgaacttgaaatacttatacaaatagatttatgatatgtagtccaraaagtaccatgggatggaggtgaggcaacaacttttgagcaggagactggcagttggcgttttaaaatttacagtggtaaactagttattaaatctacaaraattatatatctgtgctcagaagatactgagaattacagaagattcattctcaaagagtgaggagaaagaaagaacttttttcccataatttcatgtcccaaatcaaaatgagttttaccacctaagggattttattttcgttcttatctattattatgtttattagtaaagttaggcattaaaaagtgacagctttcaaaatattggtgattcatttagtgttatatcatattttatattccaagtagctttgaattttaggaatgcttttcaatacagcaagcatattttatatatactagtagcaccatggcattgagaatttgcaataattcaaaaatataagtattccttgcctaaatatatttggtatccatcacaagtaaggcagaaggttaagtgaaaaagaatagaaatggggttcttcactttaagactgcatttcattaatacaaacatctttagtacagataaaaatgaggctagccaaagaaaatttctttttaagatggaatatgtatttactgatgctttatgaaaaatgtaaagttacaacttcagtaaaaaaatcacaataagctcagtcatccagtaagctgtgaggaagtatctgcattattaatccattggaaatatgtgactttttgtcatgaatacatgtatattcaacaattattcatgggtaaacattgtaactaagatgtttttctgaagtggcatctattgtaagatttaatcaatatcaaagtaccttgagaaatccactttaactatttctttttctttattgcttataaaagtatgattttaatratctggcatccttaaaattttattttatggtgacttgcctagatttttcctctcagcatatgaaaaacccccaaacaataaaaaaaaattagtaaaaatagccattcactttttctttgttgctgcagtgattctgttttcagagaagagggacatggttaaagatgtaggggttggcaagccaaattaaatgaaacagcctcaatgttgcagttcctgatatttgcttctataatagaactgttcattttggaggatgaaggagaatacagactaaatatatctttctaaaaaccttaattgactgtggttcaagttactcaaatatggaagctatgatattcgtgctgcagtcaataaactttcaccaatgacataaaaacatgcatgcagcttgcagattgccaacagggtctgtacagaactgtactgatggatgagttcacaatacagatgaacgcagggacattgtaatgtcagcaatagaaaagcaacagagaactgtcatagtgttggtcttttttcctctaagattcgttttrtacatttattaaggtgttatcaaagtcgtccttttcaatgaggctgtgggtggaaggcacgtcttggaatgtgttctctttacacatstgaatgaagtgtctgtcattaggggactggtgtgtgcaggacatgtaatggaacacaacagggcagcctgacaaattctgaacagaacaggacagagctaaggattctactaactacattagggtcttcgaaaaaactggaaagagaaattctggtaagctctcaaccacatgcctgtagcaagctgctytcccattcgcgaaccttatctgaaaactccctaactaatgtgaggtgtggtggagaaatctggcttctcaatgctgtttcatttatttatttatgaaacatacaggctagaagaaattggcagtgaaacctstagtctgattttacagagatgggtttcagagacaaggctgagtcgaaaactttacatttttgtcatctcctcacattttgcagttgtctgcttgcagtattttaacccttcatcactttgtccctgtgcttgccttactgtaattcagacacctctggaaactgctcagggtgctgctttaacctagcaccatcttttgatagtttcctgcaattttcttttctaagtcaggcattggtttaaaggctctgcctgtctgtaaaatgttcccataactgagtcatctccaagaatcagctcaagctccgagcacctggaatcattcacctctttccttgatttgccagtgaggtgcaaaccttctataactgtagatttggtcccaccaggaggctaacagcgaatgtgggggattacttatgaaagaagttttatcttaaaacaaatgcgacattaatggaatcagtaaagggtcttatacaataggtattatattaaaccggagttcaagcttcacrttgattgtggtatttaaatttcaatgggttgattatgtatgagaggaaaatgaccagtattatgaatgcactaaaacggacaaggaaggatcttgccagcaaagtgagagggagagggaaggggagggggggcatcgcgttcccttgatagtcaccagagttcaataaagcaccacttatttcccagcttttaagagctctttttatcacaatggttcatacctcacactccctggagcccgatttgttataggtgcagggtcccgtcccattcagcagcatctcgctggtctccgtgttggtgggtttataatctacataaaattcctgggtgctgggagtcatttgctttagggactgtcttttctttttcctgtgccttcgcatgagggagcgctgctgcagctgcttcatgctcgcagggtaccgcttccatgacacgtagataaccagcaggatgacgagcacggacaggaaaagcgccacgctgcccgcgatgattttatggaaagagatgtgctcggcgtcagcatcggtctctgggccgggctctgtggctcccaccgtcgggggcaaagggggtttgctctcatgcttcggcctggggagcttgggcttaaacgtcggctttgggagagccctggccagatcaaacctctctgtagtacttttgccacagatgctgtagttcttcactgcatcgatcacatttactccttgcagctctttgggactggcacagataattgtattctcccttagacctttaaaacttttcagccagtttacaagggagcaaatatttctgctgcattcccatatattcccagcaagactgatgtcattgagggatatccaagaatccaaaatctcttgaccaataaatgtgagcttgttggaatccaggttgaggcgctgcagattcgggacacactggaaaacactgggtccactgaaagcttcgatctcattgcctgataaatcaagcctttgtaaggagctccaggtccaggacatggtctgtcctatgacactgattttattccactgcaagtaaaggttctgaaggctgaccaaccttggaaaaagggccaggttgagcttggaaaattgattgtgctccaggtgaagttctttgagtctgatcatgccagcaaagacattcctggctaaacttcggatccggttatatcccaggtccaaaagttccaggttgcggcagtcttggaatattcgcacagggatggttctcarggagttagaccgtaaatgtaaactcagcagcttccgcaagccccgaaactgttcagatcccagagaatgcagctgattataggacagatccaagttccgtaaatttgtcacaggtctgaaggtattgttaagaaaataggagattctattggaactaagaatcagctctttgagtctgcgtattccattaaaagcattttcgtcaatattgctgatatggttatggtcaaggtatagccaggtgagctggttgagccctttaaattgattatacttaagtttttgaaggctgttatagcgaagggacaaacctaagcaaccagcagatatacttgagggtatctcctgtaatttctgagattcacaatataccattttgccttcacacctacagcccttagggcatcctcgttcggcagaagaaagcattgtcagtaagacagtgggggctataaccagtgctacagctgatccgctcagtagcctaattacattgaaacctggaaataaaaacaacttagaaaagttatccccccaaaaaagaattaatccttaatcaagcaaaaataggcatatatttttcatttttaaaaatttaaatctaaataacacttaacatcacatattatctctttgtaattaaagagaattgtctttagkgttttgtttttttaaatagttaaacamggaaacatgccactaagcaaataaattcatagtcttagagcagagcaaggtaatctctaaaataattaaggcagaattattacacacactagaggttttttgttttttgtttttaagaaggaaagaagaaaaatgacaaaacatacccatcctttgtattgttcaaaggtcgtccttaggtcttttgctttggcttaggggccagttgcatgacagcccctgtcagctgcactgtagtgagtcagggctcgctgacacccaggaagaaaaattggaccccttgggagatggaccgattttggaacattattctttgccagccacgcagaacactccaagaacaaataaatcccaacaccgcattcgcagcaaaacatcaaaatcttcctaggtaataggatcttcatggatattacgtttttgcatctttacagttttttggggggtggggagggggcggttaaaaaaaaaactggatcctacaatttcttcttatcgaaaaacatgatgtattcttccaggcaatttggggctacctgagctgccacatctgtattccatascccagcagttcccgtgatgagcacccagttcagccacagagctgcgttggagcccagaaggcaggagagccccgtaccgcgcacacgctcagctcacttctgcagactgtcattctgaaagctgctcggactgttgctttggtttcagtgaatgcartcttatgtaaagctgcccccagtggtgaagaacattatgggcatgtgcagaaatgtctctcttttatcttgcaaatgagcaggctctctgctggaaaatgaatgrttcttttgggtggctcagtaggaactgaatggtcaccgtgatcaataactagcaacattttctgtgatttccaagtcttgttttacaatttggcaacgtctttattgtctgtgtccacttaattgctaaacatgtgctgcccagagtttttctggagcttgacattaagttcacagaccgaacgtcaatttttcttaacctcaacgcaggctttaaactgaaatttataaaatgaattattgagcttttcacagagaagcattaactgcctgcccatttgacctcttggagtcacagtgattatattatgcaaggtgtctcaggatgttagaacacaaacattttggaatagaggggatgactgatgacaagtgaattaatgtgtccaatagcctttccggttttctcacagacgatataattgattttatggctatagtttcgtttgttgttttggttgttgtaattctcttttaattagaagggaaataaaccatttttagtgttaggatacgaatcaagagatcatttggttcatactttattgatgttgctgctatttattacactaataatatttatggagcactttctaagtgctttaaatgggctacgttgttttctctttaaacaatagtatgatgtgggtcctattataacctctcttttaaagatgaggaaacagacttggggaggtaactttctcaaggtcatacagcaagcgagtgctagagctgagcttcagaagcgagtcattcttatgccgaaccactaaccactagatgatcctgttcaacaacattgttatcttcatttaaaaaagaagtcagtgaaaatgaagccgattaaaggattggggcaaggaagctgtgattagcaaattcttgcttgttctattagaattgcctaaatttcttttggtctgaggttcctaaagaagtataaaaactaaggcagcgtagtttagtgattaacagcatagattttggcacctagattccaactcctggctacaatttaccagctatgtaaccttaagcrcgttacttaccttccctatgcctcagttttytcatctgcaaaacgggcataaaaacaaaaactcacttcatgttttgagaattaagtcattttaatatctgtatgttacttagaacagtgtgttgcatgcaataagcctgtgtaagatatttgaataatattaactttatttgtacttgctaggattacgtactgaatattgactatactgaccttcattaactcacaaagaacaactttagtgagcatttttaaatattgtacatggtggatttctgagatttactcagtcttgccttctttgatgagataacttcctttatgttcatcatctgaactttatctttaaaataaatcttctggttctgtggaycatractaataatgttcgattcttttcatctccaaagtagaacataataacatctgccatgtagaggcattttatttaaaaataatggtattcttgaaaaagtttgccttgttgttttttgttaggtgaactgtctgtggaaaaccgtggagagctttcacattctccaaggatgagatgtttgataaaggctagtaatgacaatcaaaaggggtcctacagatatagtacaatggatattaccaattccttgggcagtatgttcttaatagggcagtgctttcccccagagttacctaagctgtgaatgcacatgaaacatccagtgagtttcttaaaaagatagactgcccaatccctcccccaggattctcattctagggggatggaagagtgtgtgcttttcaatagtctctgatgaaataagtttaagaaactcactgtgaaggaatgattaaaaataatattttctcctagtaggaagagagggtttgcacacttataatactgagatgtaagttccacaaggacaaagacaatgttttgtctacttcatttttcctaatatctacaacagcacttggcacattgcagacatgcaataaatagctattgaaaaaaatatgtttttatatcagtcacaagtacaatggatatagtataactgattatgtaatgttcaacatttgtacatgggattgagtcctgaaaatttcctcagtcagtgagactggaaacaattttggagaaagtattcttaaaggaggtatatacaaagacaaaaactagaaagtgagaaaacttagttgatcagaaagtgatctttacttttcacagatatcttgtcttcatagttaaactacaaatttcatgagaacagtaaatatgcttttgactattctcctttgcacagcacagaagggtaatactgaacccttatcatttaatatcccaaatgggcttgacaacttgtatctctcaaaaacagactaatgagaattatattgataacttctctctcacacctctgttgcttgaaaggctctgagttttcccctcactctcccacgtagtcattgagacatctgttttgcccaagagctgcagagagccactccaggaggctggaggacccattaactttgtgcttcttgctcatcatactttacttcccattgacagaagaacagaggaacccactgagaatgtgggctctcactttgcttttcctgggataaatcttcttgaattatttacggtgaatattattctctgctgtgttacacacattgctcttagttttcagacatttttcttttatcttggttcctgatcttatcttactgcatagttctgactttacacctaccctttggatcttatgattaatatttatttagtcttaatactaacaactgagggtataaaatattagartgagtaaataagacctagtattggctagcacaatggggtgactatagtcaataatgaattaattgtgcatttaaaaataactaaaagtataattggattgttttttatacaaagcgtaaatgcttaagggcatggataccacacttacccttatgtgattattacacattgcatgcctatatcaaaacatctcatgtaccccataaacatgcacacttactatgtacccacaaaaataaaaaataaaataaaaataaaacaaaactatatgacaggaatgatgtgctacaacaaaaattgctttggtagcaatgtattgattgacaaggaaaaatgttcataatgaaataatattaaggaaaaaaatactgaccatcaatctctttctcaacagtaatcagtagccactcttggactgagtcagcctccaggaactgtgtatggcccctactttggcacgaccccttaagtcggcatcacaaccaggtctgatctggttcargataataaattgtttgaagagggaagattatccatgaggctagttgagaaatccaaaacaaaataatgtgattctaagccacactgaatacttgaggctgcrgaagttactgcaaagacatagagtagtccctcaagagaaaaagaaaagactgtgttctaaaagattttagtaatttgcctgtatactttttaaaagttttttctccttttacttgtcgactatagcgagctgattatttctgatttgcctttcagcagaagcaaaattatattgcattatgtatttagaaactagcaacttcttttgcacttaatatcgcatacagaacaaaccgtaaactacctgacgagttaaatatccccaatgcatccagggccttaatgatttatacaattataaaaatagtgtcatgtatctaaagactttttattttattgtgcttataggacttcaaatagctaaacatattttgtttarattgggtaaataaatcaaatctcagtttggcaatactgccaaattttagtccaatatgaaactgagttgccagatataaacttagaaattcataactgaaagagaatggactgatatcttaacagttgttgacttcagatattttatttattttacaaatatttaatttgaataaccattgtgtgctaaacactgttccagacactgggaatacatctgtgtgcaaaataaaggcctgtacccttgtgaagattacattctaaagggataagacagacaattaaaaataaacatatacagtatattagtaggtcatatgtactatgaaaaaaaagaaaaatataaggaagattgggagtgcaaggtatgaggtgggctgagttttaaataggatggttagggccattaagaaactggcctgagcaaaccttgaaggatatgagcttgtgagacttaaatgtatatatggggagtggccagtgcaaaggcctaatgtggaagcagatcatgtgttccatgaacaacaaggaggccaatgagtctagaatggagagaccaagtgatagaataattggagatggaggtcatggagggctttggatgacattctaagaatactggctttattatggagaaaacggggagctaactggagatttttgtgcagagttagtatgtgatcaaataacctattaaaaggatcactgctgtggatcggatgttctcatttaccgtccccaaaagccatatattgaaaccccaattcccaatgtgatggtatttggagatagagcatttgtgaggtaattaggtcatggtattggagccctcatgacagatcagtgggattataaggataaaaagagacagaaatgagagagcttgcttcttctctctctctgctacaagagaaggcagctattaagaagccagaaatcaggctgtctttgacatcaggtcttctgttaccttcattttggacttcccagccattagaactgtgagaaataaatgcttactgtttaaaccacccaggatatagtatttttgtttatagaagcacagactgactgagatgatcactcttagcaggggacacagtaacgaggccaccatatcaatccaggagatagatgatggtgtttgggccagggtgttagcagtggaagtggtgagcattggttagattcgggatatatttacaataaaatcaacagaacttttctaaggaaatagaagtggaggtatgaaataaagagggaaagtaaagatggttcatttttattggctaagcaaccctrgggatggtgaagccataactgttttcgtgggtcacattttgtgagcaagaccaagagtttaacacatttggattaaatctggatttggctcttgctttccttcatttttatgagactttagttcttgaaaatatttcttaatcttaagcctcaaagcaccatgatrtatttttaaatattttaaaggtagtttttgaacagaaagttatgaaatgatttgcaaaattagcccccaaacaatagcaaatggatttccattcaaatgaactagacagaggcaacatytttgcatatggccttggagggcagtagagccaaaagatttgatgaaaatctaaatgcgagattgcataaagactaggtaaggaaacatttggactcaacacatgtactgtttattgcatatgtcagttgacatttggaatttggaactgattctgtgcaaacttctttgggtctcagtttgctcatctgcaaaatgggacttataaaacctgacttataaacttttaaggatttttacttaggaaccattttcatgatttatgagtaagtacattgtacaatatttataaagtgttacagatakttctgcaatcagagtatctatgacaaaattaattttcccttgattctgtataggttctgtggccatgagcatatattaagggttatcaagggtcatgaacatgaccaaggacatgccagaatttactaatattataggaaacattcctcagtatttcttttctactaattttaataccacaaccatttattatacagaatacaccattgatattctgtgtattcgcttataaagtactttcaccaatagacgcatttgatttagcttttgtaaagagtttaatgtttgtgacccaacaatatatcagggttgtcagaatgccaatatagagtttcctacagctgtgaaaataattttcttcatttctagttagaatactcatatgcatgtctacttttgtaattatatccagatcttcatcagagcattaacacttccctgaaatatccttgatttccatctgcttgctttaagggctccattaaaaaccctgtctggtcacatatggttatgagtgaatatctctgacttagataaatgaataaagaatattccaggtctgaccattaaaatggtctctcagtgtctttctgggaaaagacaaatttaatgaatgagacattgcaaggttatccaacatgtctccctcccattcacctgaagatacatttatgcagcagcgtcaatccatattctcaggttttattgcattcctcactgtcacttcctgcaaaggtagtcctaaggtaaatatgggaatacagaaatctagccaacactataaacttcagtggcagacttatgaaggctgaaaagactatatgacttcaaggaaatacttttttttcttcctttcagtaggaaaggtaaagcatacgcaaaagttgagaggctagtataataaatatcaactccaaaaattattactattttgctaattttatttcgtcgatactcacacctcttcccacataagtgcaatatttttttctttctggagtattttaaaagcaaatcttcaacatatgtcttttttttttttttttttttaagacagagtctcgctctgtcacccaggctggagttcagtggcacgatcccggctcacagcaacctctgcctcccgggttgaagtgattcttgggcctcagcctcccaggtagctgggactacaggtgcctgccaccacgcccggctaattttttgtatttttagtagagacagggtttcaccgtgttagccaggatggtctcaatctcctgaccttgtgatctgcccgcctcagcctcccaaagtgctgggattacaggcatgagccaccgcacccagccaacatatgtctttataacctctctctctctctctatttatctatctacacacatgcacatttcaggatgcattcctaacagccttttaatttaaccatctagcattattatacctaataaaattaacaagttcttcaagtaggtttgttcgtatcaagatcttagaaaaagcccacacattgcatttgtttttgatgtatttgaagtctctttcattttgtaatgccattgatgtgttggatgccacgtcatttggactttagctttttccatgttctgcatttggtggttttcccattgtaggctttaacttgcacatagtcagttttcatggcatatatgtttaacaagagtctattcattaatttgagcagaatatccagccccaaagtggatatttkgggcatctattcattcttggtagcagtttaagatttgaagaacttttgagtaatacaggacttagagcttagagtaaagttgtacttctactttgtggtatttatgccrtcagagaattcaggaatgcgctaaatggcaagtttgagaactttattggttaacattcatatcaccaggatttctgttcttcacatcccatcacaattgcctttttacccttagcaacagcaattatttgttgttggtacttgctaaataaatctgctaatttttgtattgccattgaagtgttcatctaactgaggcacaaaaaattcttattaataggatagcaatcaaaattcatttgtagtcacttaagctgagagaaatcagttttctagcttttctttcagaacaaattccatcaagaaacatgtggcaccagagtcacattgtaaaacgtctagttttatatatattcctaaatttcctgtattttctcacagtggagaaaagacttttagagggactataaaaacctcttaaccaaatttataccttaatatttgatgttttactttgcatctatgactgtgctttgaatgtaaagtcagtcagtgttctttaaatggtatcataacattttgctatatccacttcacatgtattctgaggtgacaagagtttttgaagaaaatttcatattgtatttttaaagcactgtatataatagtttcaactggatacactggtgtgttttaaaattcgacttcctggcaattatatcagcgttaggaattaaattccccagtcaccaggaggagaaagataatagacaatcttgattttgataaagaaacagctatgccataggttggttttatttttgtttctgaaacaatgtctgatttaaaaacgtttttattttagggcccagatctgaaagatattaaacttctgacaaatgagaatccctgcatagtttgcaatgaagtagcagagaacaggagtctgtgggtccttatattactctaaaatatatcagcctatatgtcaaaccagwggatccttccttatactgttagtacttggtagctgtagctgtggccattcccagttgaacagttcccttaagaatgttggggaatgcttaggatactcttgcaactaacagcagagcccccatgtgscaatattgtaactcgagcaaaaatttacttagtcccgggtagcaaatgccacagatccttaataaaaataaaattaacttgtttattcaatgagtatttattaaactcttacactgttcttcgtgctggggatacagtagwgaataagacaaagtgccttccactggaggacttcttgcattcttgttgatgagatggtaaaaaataaaaatagctacacactgcaatgtcaactagtaataagtgctgtgaagaagactaacaaggatgagggcaatgaccatttgatactgtggccagaaaaatccctttctgagttgttgacgttggagagcaagtagggagcaactcacataatcctgtcaccttagatgtaatctccttttgggttttcattggccaccattaaaaaggaaaagaaaattgtttttttatatactccacacttctgacaccagggtgtggagtttttccataccaaccaattctccaactctctggacatcaactgagtgtcctgcaattcaatttccccccagcacctccttacctcttccttactgattttctttcatttccactttgtctccaggtgcctgtggtgacccagttctttttggacatttttccacttatcaacaaatgaatcctatggtattagctgataatggcttatagtattagctttctcaggattcttgaaatttaataggtgagtctgagaaatggaaagtattaaggaagcacagagaactgcattttatgcacatactgtagcttaaaaagcaaataggagaaaaggcctgtattaaaaacattcatccttgctcttccctctcaatttcttaccaattactctttttaggtgcaatcattttattttagctactgtttaattcttataatatttttgaattttgttgatattttaatttcttgctattttaactgaggattcagtatcatttactctccctgcttcccatgttaatatgttattattacagtattaaataaataggcgatatgactcacaatcactgtgtaaacaaagacactgatgaattaagtggtgtactagactgtgttgccattctcattcagcgttttgcttttcttgcagtttaaggattgttcctattttctttctctctctacctcttttacatttgcttttttgtctgtatctagggcttgttgtttgtcccaacatttaaaaatatatgtcaaggactgggcacagtagttcaaacctgtaatcccagcccactttgggaggccaaggtgagcagatcaccaggtcaagagattgagaccatcctggccaacatggtgaaatcccatctctactaaaaatacaacaattatctgggcgtggtggcaggcgcctgtagtcccagctactcaggatgctgaggcaggagaatcgcttgaactcgggaggcagaggttgcagtgagctaagattgcaccacggcactccagcctggctacagagcgaggctccatctaaaaaaaaaaaaaaatgtatatatgtatatatgtgtgtgtgtgtatatatatatattatatatatatatatgtcaaatgccgaagctttccaaacactcaggcatttcagataatcctatttgcctgcagcactccatttcttggctccaatatccaaytctagctatgtacctagtacttcaccattttccagaacaggatccctatttcctggattccatgtatttattttcttagtttaccactcattttgttgaagcaccttccactaatagatttttaggaaagggtgcatgtgaaataaaaatttcatgtctaagttttttagtccagtattactgattgatagattgctgtaatataattctgggtggtaaataattttccctcagaatctttgagacattgaattactgtcttcccataccactgtcactgtagagaatcagacaatattctgattcttatttctttgtgtatgatctatttttttcctctgtatgatactttcttccctcctggtattcggaaattgtttacagatatactttggttcgtgcttttttttttttttcgttagtttttgggcagtcagtgagctttttaaatatggagacgtgtccttcagttctatacaaatgtattgtatgtttcaaaaaatgatctctccacatttttctttgttctctttctctgaaacttctattggacaaattttggatttcctggattgatcctttggtttttctttcctattttccatctctttatctctttccatcctacagagtaatgtctatgctttatgatccaatcttttatttatttattacaaattttggccagatgtcagaagattatggcacaatcaaatccagcaatgataccactgggtcaagcaatataaataaaattaagtttttgtaaataaagaaacattcatgtgcattcttttatgcattgtctatggttgtcttcaagctacaatggcagagttgagagatggcaaatcctgcaacttagaatatttactacgtggccttttacagaaacagtttgctgatcccccaactcccatcctaatttaggtgatcatattggttagctccatgagctctttttaagttrtctttttgccccttcttcatrgcatactgttactctcatggatgtgccattttttctcactgtgaggatattatttgcagtttttttttttttttggtggtatactgcttgctgcggtgccactacttcttctgaggtaatttagccagttcgtgttggcccatttcatgttggaggcgtttctctacggttaagattcttctgtgttcattcatattaatgagtgaatcactaaaaactgatagaaagtaccctgccggagggcagatcatgaggtcaggagatcgagaccatcctgggtaacatggtgaaaccctgtctctactaaaaatacaaaaaattctccggccgtggtagcaggtgcctgtartcccagctactggggaggctgaggcaggagaatggcgtcaacctgggaggcagagtttgcagtgagccgagatcgtgccactgcactccagcctgggggacagagtgagactctgtctcaaaaaaaaaaaaaaaaaagaaggcaccctgccagtgggcaaggttttggtggtggattttgtgttagcaagattagacagagagcttgcttcaggtacatgtatttagactccactccccacacacccagagaagactgccaaccgctcctacatggaagatgtacacctgctaccagtgttctgggggcaaggcagggaaagggtgctgggtgccccaagttcaacatgtacattctcattttagtcttaggttgtcagtcccaagtctcactgctatgcctagtatacttcagtgtagcttttcaggtttgaatttgccagaaaataaactcttttctgttagagggatggggtagtcttttgattgcttggggtaaagaccgaaatctggcagttgatctcgctctatgaagatcagtccccatcttttttgtgacccctacttctggtgcttctcatgacttttatggcgcgacataaggtcccccttcagtaagcacttagactgtagctgccttgactctaccatgtattctgttctccaaaaatttgtagaaattgttcattcattcctcttttctctatcctcatttgtattcatttgtcattgcttgagttttgacgtgaaagagacaataaaagcatgcgatcaatctgccgtgtttcagatatggatttctcatgacagatttcaggcatggcagatgatactggaaggatgccgtatgaattaagactgtagcccaaggttgaaaatgggagctgaagatctttgtaaaagtgagatgctgtcctcctttgttatccatatcctccaatstattttgcactagtgtcattttaaggtctcttactatgtactcatttcttttttctttttctttttttttttttttttttttttttttgagacggagtctcgctctttcgcccaggccggactgcagtggcgcgatctcggctcactgcaagctccgcctcccgggttcacgccattctcctgcctcagcctcccgagtagctgggactacaggcgcctgccacagcgcccggctaattttttgtatttttagtagagacggggtttcaccgtgttaaccaagatggtctcgatctcctgacctcgtgatccgcccgcctcggcctcccaaagtgctgggattacaggcatgagccaccgcgcccggcctatgtacgcatttcttaatacaacttttaaattggaagaagcttggatatattgtatttacttgtggcttccttggctgtatagttcgttaagggtgtctgccattatttcatttactctactgtgggagtgattaaaatgttcccccgtgtgttcatttatttatgaattttgaatcatcactttgatgaggtttctcccacatcctccttttagcctagaccaacctgctaatatcagcaagcccagcagcctccaaaaatgctaggaaaaaatattttttactaccgttcttgggggttatatcttactatagatattgagggaatgtatttggtggaaataggatgactcttcctggtgttgtgttcatgcacactaaatttgctttggcatcttatactttgtatttattataactttgcaaacttaaatgttttcaatatcttacaggtgtttaattttcctgagcccaatgtttcttctaaaaaaaagaacttttaatttttaatgaaatagaatagaattttatgtaaacttttaaaagaaacaaactataccctattggtatctgtattcattttcctacttttttgtatcaagattttgtttttaattattatcatttatgctttggaatactttgctattttcaaatttgtatttgttattttatagtaaaaaactagaaaacctgaatttgatacatatgtgtatggttctggtggtggtgtggtgtgtgagggtgagtgtgtgtttacaactctaggaagtagaggtttacaagtaaatttaaacttcaaataggcaaccacttatgtataatccaaatctgtaatcttctgatgatgcagtatgggcctgtatgcaaaatctggtaatagtaatgtaaaatttcttctcttcattggctatatttgaggccagactttttctatttagttaaagtcatgaaaatatttttgatttagtgtattcaattttcaatcattgtgttttccttttgaaatactctaggcttctgcctagagaaaccaaaacagttaaacatgtcattatatgttcaggccattagtcctgattcttaggctttatatattttctgtgggtagttctaaacgacttgagaggttttacataatttcaagtggcttacaagctttgcaagttaaacttggaaaatattgtagtaataccaagtagtagtgacataaaggcttaagagactcacgtaattgggattttgagattattttgtccaattcacattttacagatttaaaaatgtagaccagagagatgaagtaactggttcaattaatatacgacacagatacaagactttgagtagagcctagatcctttgagattagtctatttcttataatcattctgtcttctttgaagtcaaatcaatgtttttgtacaatgtgaaaaacagtagttgacactttatataacttttttcctaacctcatatagatttaactagaccactaggacttaaaatctgttttgttaaatagaaaggaaacaaacaagtcttcaattattctctaagtttgttttctttgcattataatagtgatatatatttattataaaacatgaaccatgatctcgccatccaaaagtaatccttactaatattgggaactatacaaattttttattaacttgaatttaatgcatggcattctttgccatgggcaaaacaattcttttaagttcctcctactgttggaaatgtatagaacggtctttattaatgttgaattatacagactttcccttaagtaactgaaacgtgcataattggctctgaaaaggaaagaaattactaatattctagcacacataatctatcttccacatggctagcataatattttaagtagaaagttattccccttcaagtaacaaggtaaacaaaagaattattgcttccttcttgtttgaaatttggttaggcctcagtggaatggctcaaagggcaacttcagaatggtcttactactttcccaatatactatctaaaattgcttacgttgctgtcttctttaaatcccatgaatagctcactgtgacctctggttaaatagcgactcattgtcatgacgcacaaggttgtcattttgtttatatttttgttaaaggcaaacaattggttttcaagaagagcggaaaccaaactggagaggcatccatagcttcatttcagtgctctgccactttgcttttctccacgtcacctgtcttgtgttcacctctgttctgcctcacagctctagcttattcatggtttttgctcgccatggagttggctttacatgttatcttcaatgcctacatgctaccttgtgactgtcttagttgtactgaaaatcagttcattcttttgatagttttctgtttaaaattctagagaataaaattctgattttttttccatgccatcttataggttgctatctggcttatgagttggctattctaggwaaaggtgatcaccctaagtttccagcagaagtgatggttaagggtagtgataaagttggtagagtcatattgtataagacttggcagatgctttaagcgaggccatgaaggacaaagaattcaacttgatacaaagattatttaccatctggcttaaatctacccttttgtcattacttgcacttactaaccaagatgctatgcatacctgcaatacagccacactgtaagtatttattatttattattccccgaacaagccattttctagctgactttaaatcactgtttatgctactctctcttattggaatagtcttcctttagtttttatctggtgaaatcttctataagatgtatctaaaacattataatcttcataaacattttctagggattttggtgacttcctcataagcacttttataaaccatttatatatgccatataaatgcatagtattaaattgtttatttgcccttttccccatagaatattctttaaattcagggattgtggtgtttcattcatctctgaattctacttttaacagataatggatactcaatatatgtgtgttgaaaagaaaacattaagatgatgcagaagtagctactcctaatggctatatcattatcataattatggttctctgggaatacctgtagttgattcacaaatctgttacccaagatgtgataagtgcaagcggaaagtatgtactaagcatgaaactcactcaaaatttgggccaattaaccagagtactggtgtatttttcaccatttggtctctatttgactaacaagtgttgcagatggatttttattgctctcttatttgcttccaatctgagtaattggttggaggaaatttcctgttctgaaggaaatttcatttgtgtccgaaggtagtgatttatttatttatttatttattttgagatggagttttggtcttgttgcccaggctggagtgtaatggtgcaatcttggctyaccacaacctccacctctgggttcaagcaattctcctgcatcaacctcctgagtagatgggattacaggcatgtgccaccatgccctgctaatttttgtatttttagtagagatggggtttctctgtgttggctggtctcgaactcccagcctcaggtgatccatctgccttggcctcctaaattgcagggaatacaggaatgagccaccgcgcccggctggtagtgatcttgtatttactcctgatttggggtgtttgtcaacatgtacaggggcaatttggggacaattccttatttggagctgtttactcttcctgtttcttacctctagtattatcgcaagtggctcctagcttaagtgggctttcaatgaggaccttactggaaatacctgtagcctaaataaataaataaaaacttgccaacaataccgtgtcaagaaggctggctttaaaatccagcttgaagaagcctcatttaaatgactgtttgtaatctggtcctcatatgtctaccatgtgctacttcccattctaggtgctgaagaattaagagaaaagatacatttccacacttgtggcgtttacaatctaatctggcatatcataaacacttgttacaatgtgtgtagggagtgctagcatgaaaaaagcacagggtgctttgtgactccataaaaatggcactatccagactcaacttacaggggaaaaacctgaattaagtgccagcaaagcaaaactactataataaaaatgaatttttttaaaaaaaaacaatgattaatctagccatagcagcagctagaatactcttattcattttataagttctcagtttatgctcgatagagatggttgacacaagttaggaaacttaacctaagtagtattcagcatgaccaggacttcttagagaacatccataacatattggacgatgaaaaaccacttcatagtgtctttggtagtctgcaccagcctttcattctaaacattcggtaaagcaggtgaaatgcaatggtgacagctttgatgagatccttgtccacaaataccctaacttgactgaaagaaatgtgagcctgttgtcagaaataattgtgtctggcagcctgtatgctacaagaaactggcatggagtcacattgtcatcccagaggcttgaggtagaagtgaaagacttgatgtcactgtgagaagcagtatactaaagggcaaagttttcatctcataacaagatcaatgtgaagtcctggtccaactcttttggtcttttcccactggaaaattaggtgtcttactcagttatgccaagtagcctggcatgtggcatgtactaacttcctttagacttttcaatatcagaattaatttgaggccatcaaatagaacttctagccaagactttcaagtagacaattcccagatgtgctatgtgtagtgaagccaagataatgtcttctgaaatcataatgtaacttctctacaaaatacatccctcatgttaagaaaattcatatggatgttttgagattggctttaatttttttggtcagttcctatgatagccttcaccatatttgctttatgacaagggacagtctgggtttcttttaatttaattaccttatttcatcagcttgaaaataagaatcaaggaagccttcacttatctaatcttccagtggtagtggcacatatgttttgatatctgttggggtagatattcccaactacttgatattgatgatgttctctgaactataattgatggtagagtgaatagaaaacttaaatcattgcgcaaactcatcaggtatataaatctgaaagttcctaacatgggatattgagagctagaagtctggcaggaacataatacaagtttttctttgctttaagatggaaatcctctcaaaataaggatttcaggaagcaactgaaaggatatcaaccctttcaatacagttgtcagcacatatttttcaaagagaggagaaaaagaagtatttatttgtagattatggattgtctacctgaaatatctaagaggctcaagtgaaaagttattagtaccagaaaaagagtataacaactaggaaaattacaaagtaagtatacaaaagcaattgcttcatatttgttttcaaactgcttattgttactaaaacacaaaaagacttacaaattagtgaaattgaaaaaaatctcacaaattataacttacctctgagtaagcttaagaaatgtgcacagtttatacctagaaaatagaaatgaaagtggcaatgctaatgacaagagaaatgttattgagggacagaatgaacagagatacatttttgaattgaaagaatcaatagcttaaattaatcagtgtataaattcaatgcagcctgatcaaaacctcagtaggatttttttgtatctaattctatattttaatgttttttattgtttagcattatgttatgtaaatttccaaacatacacaaaagtcaagagaataattaatggacttccctgtatgtgtcgctcaggctcagtgtcagcagttactagcataaagccagagtttatttacttatactcccagttataccccaccctcatggatcatcttgaagcaaatctcaaacatcatataattcatctcagtgtaactctaaaagagacgcactaaaaaaaaatgctataatgctatcattctactttaaaaagttagcaaaaatttgatgacttcgaatcaaataccagtcaacaccaaattcaatatgcacacacaaacacaaacacacacacacactgtcaatttttgaaacaggatcaaaagtagttcctcatattgtatcgaaaaattaattgtagattaatataagtctacaattcctttaaacttgaaagactggtgcagactaccaaaagacactctgaagtggacctttgaagatacttttgaagatagactttctcttctattttccacttgtattctatttgttaaagaaactgggttatttgtcctgtagaatttcccacttttggatgttgttgaatgcatctccatgatatggcttaaaattttcctctgatcctttgcttcctgtaagctatttctaggcatagagttttgatcagatccaggtttgatgttttggcaagaatacttcattcaagatgctgagttccttctactgcattctatcaggaagcccataatatctaatatctcttcgttatggtgttaagattgatccttagatttaagtgtggttggcctgattcacccattatcaagttccctgtcaactattcatctaatgctttagtagtcactgatgattattacatagatctatttgttcaacagagattgtaaaatagtaatattctgttattcctttttcatttattagctggaattctaaagtttttattaaaatatttttattatggtaagaacccttaacatgagatctacttcttaacaaaattttaagtgcacaaaacagtattattaactataggcacaatgttgtacacagatctgtaggatttatttatcttttataaatgaatctttatagctattaaaaagcaattttctctttcctcctcacccaatgcctggcaaccaccatttactctctgtgaatttgactattttagatacctcatgtaagtgaaattatgtatttgtccttccatgactggcttatttcacttagcgtaatgcatgtagcaaaatttccttctgtttttaggccaaacactactccaccattatgtgtatataccatgtttttctttatctagtcatgatcaatgggcaattaggtgcttgttatrtcttgactattacgaatattgctgcaattaacatgggagggcagatatctcttcaagatcttgatttcaattttttaaaaattatgctttaagttctagggcacatgtgtacaacatgtaggtttgttacattggcatacatgtggcatgttggcttgctgcacccatcaactcgtcatttacattcggtatttcgcctaatgctatcccttccccagtcctccaacccccaacaggccccagagtgtgatgttccctgccctgtgtccatgtgttcttattgttcaattcccacctatgagtgagaacatgtggtgtttggttttctgtccttgtgatagttkgctgagaatgatggtttccagcatcatcgatgtccctgcaaaggacatgcactcatctttcttatggcgtcatagtattccatggtgtatatgtgccacgttttcttaatccaatctattattgatggacatttgggttggttccargtctttgctattgagaatagtgtcacaataaacacacgtgtgcatgtgtctttatagtagcatgatttataatcctttgggtatatacccagtaatgggatggctgggtcaaatggcatttctacttctagatccttgaggaattgccacactgtcgtccataatggttgaaataacttacactcccatcaacggtgtaaaagcgttcctatttctccacatcctctccagcatctgttgtttcctgactttttaatgatcaccattctaattggcatgagatggtatctcattgtggttttratttgcatttatctgatgaccagtgatgatgagcatcttttcaagtgtgtgttggctgctgcataaatgtcttcttttgagaagtgtctgttcatatcctttgcccactttttgatggggttgtttgtttttttcttgtaaatttgtttgagctctttgtagattctggatataagccctttgtcagatgggtagattgtaaaatttttctcccattctgtagcttgtctgttcgctctgatgatggtttcttttgctgtgcagaaggtcattagtttaacttgatcccatttgtctattttggcttttgttgccattgcttttggtgttttagtcatgaagtctttgcccatgcctatgtcctgaatggtattgcctgggttttcttctagggtttttggggttttaggtcttacatttaagtctttaatccatcttgaattaatttttgtataagatgtaaggaagggatccagtttcagctttctacatatggctagccagttttcccagcaccattaattaaatagggaatcctttccccatttcttgtttttgttaggtttgtcaaagatcagatggctgtggatgtgttatttctcaggcctctgttctgttccattggtctatatatctgttttggtaccagtaccatgctgttttggttactgttgccttgtagtatagtttgaagtcaggtagtgtgataccttgttctttttgcttaggattatcttggctatgcaggctcctttttggttctatatgaactttacagtagttttttccaattctgtgaagaaagtcattggtagcttggtgaggacgactttgaatctataaattaccttgggcagtayggccattttcatgatgtaaattcttcctatccatgagcatggaatgttcttccatttgtttgtgtcctgttttatttaattgagcagtggtttgtagttctccttgaagaggtccttcacatcccttgtaagttggattcctaggtattttattctctttgtagcaattgtgaatgagagttcactcatgatttggctctctgttggtctgttattggtgtatgggaatgcttgtgatttttgcacattgattttgtatcctgagactttgctgaagttgcttatcagcttaaggatattttgggctgagacaagggggttttctaaatatataatcatgtcatctgcaaacagggacaatttgacttcctcttttcctaactgaataccctttatttcgttctcttgcctaattgtcctggccagaacttccaacactatgttgaataggagtggtgagagagggcatccttttcttatgccggttttcaaagggaatgcttccagtttttgtccattcggtatgatattggctgtgggtttgtcataaatagctcctattattctgagatacattccatcaatacctagtttattgagagtttttagcaggaagggctattgaattttgtcgaaggccttttctgcatctattcagataattgtatgttttttgtcgttggttctgtttatgtgatggattatgtttactgatttgtgtatgttgaaccagccttgaatctcagggatgaagctgacttgatcatggtggataagctttttgatgtgctgctggattcggtttgccagtattttattgaggatttttgcatcggtgttcttcagggatattggtctaaaattctctttttttgttgtgtgtctgccaggctttggtatcagtatgatgctggcctcataaaatgggttagggaggattccctctttttctattgattggaatagtttcagaaggaatggtatcagctcctctttgtacttcgggtagaattcatctgtgaatctgtctggtcctggacttttttcgttggtatgctattaattattgccacaatttcagaacctcttattggtctattcagagatttaacttcttcctagtttagtcttgggagggtgtatgtgtccaggaatttatccatttcttctagattttctagtttatttgcatagaggtgttatagtattctctggtagtttgtatttctgtgggatcggtggtgatatccattttatcgttttgtattgcatctatttgattcttctctcttttcttctttatttgtcttgctagtggtctatcaattttgttgatcttttcaaaaaaccagctcctggattcattgattttttgaagtgtttttttgtgtctctatctccttcagttctgctctgatcttagttatttttagccttctgctagcttttgaatttgtttgctcttgcttctctggttcttttaattgtgatgttagggtgtcgattttgtatctttcttgctttctcttgtgggcatttagtgctataaatttccatctacatactgctttaaatgtgtcccaaaattctggtacattgtgtctttgttctcactggttttaaagaacatctttatttctgccttcatttcgttatttacccagtagtcattcaggagcaggttgctcagtttccatgtagctgtgtggttttgagtgagtttcttaaccctgagttctaatttgattgcactgtggtctgagagacagtttgttgtgatttctgttcttttayatttgctgaggagtgttttacttccaatcatgtggtcagttttataataagtgcaatgtggtgctgagaagaatgtatattgtgttgatttggggtggagagttctgtagatgtctaataggtccgcttgggggtacagagctgagttcaaaccatgaatatccttgttagccttctgtctcattgatctgtctaatattgacagtggtgtgttaaagtctcccattattattgtgtgggagtctaagtctctttgtaggtctctacagacttgctttatgaatctgggtgctcctgtattgggtgcatacatatttagcatagttagctcttcttgttgaattgatccctttaccattatgtaatggccttctttgtctcttttgatctttgttggtttaaagtctgttttatcagagactaggattgcaacccctgcttttttttggctttccatttgcttggtagatcttcctccatccctttattttgagcctatgtgtgtctctgcacatgaggtgggtctcctgaatacagcacactgatgggtcttgactctttatccaatttgccagtctgtgtcttttaattagggcatttaacccatttacatttaaggttaattttgttatgtgtgaatttgatcctgtcattatgatgttagctggttattttacctgttaattgatgtggtttcttcatagcatctatggtctttagaatttggcatgtttttgcagtggctggtaccagttgttcctttccatgtttagtgcttccttcaggagctcttgtaaggcagacctggtggtgacaaaatctctcagcatttgcttatctgtaaacgattttatttccccttcacttatgaatggtagtttgtcttgatatgaaattctgtgttgaaaattcttttctttaaatgttgaatattggcccccactctcttctggcttgtagagtttctgctgagagatccgctgttagtttgatgggcttccttttgtgggtaacccgacctttctctctggctgcccttaacattttttcttttatttcaaccttggtgaatctgacaagtatgtgtcttgcagttgctcttctcgaggagtatctttgtggtgttctctgtatttcctgaatgtgaatgttggcctgctttgctagactggggaagttctcctgcataatatcctgaagagtgttttctaatttggttccattctccgtgtcactttcaggtacaccaatcagatgtagatttggtcttttcacatagtcccatatttcttggagactttgttcatttctttttactcttttttctctaatcttgtcttcttgctttatttcattaatttgatcttcaatcactgatatcccttcttccacttgatcgaattggctactgaagcttgtgcctgtgtcatgaagttctcatgccatggttttcagctccatcaggccattgaaggtcttctctacactgtttattctagttagccattcatctaaccttttttcaaggttttttttctaatccttcccatgggttagaacatgctcttttagctcagagaagtttgttattaccgactttctgaagcctacttctgtcaacttgtcaaagtcattctccgtccagctttcttccattgctggcgaggagctgtgatcctctgggggagaagaggcactctgtttttttgaaattttctgcttttctgttctggtttctccccatctttgtggttttatctacctttggtctttgacattggtgacctgcagatggggttttaytrgggatgtcctttttgttgatgttgatgctattcctttctgtttgttagttttccttgtaacagtcaggcccctcagctgcaggtctgttggagtttgctggaggtccactccagccccttttgcctgggtttcaccagtggaggctgcagaacagcaagtattgcagaacagaaaatattactgcctgatccttcctctggaagctttgtcccagaggggcagccacttgcatgagttgtctgtcggcccctactgggaggtgcctcccagtcaggctacacagagtcagggatccacttgagggggccgtctgtttgttctcagagctcaaacactgtgctgggagaacccctgctctcttcagagctgtcacacaggggcctttaagtctgaagttgtctgctgccttttgttgagctatgccctgcccacaaaggtggagtctatagaggcagtaggccttgttgagctgcggtgggctccgctcagtttgagcttcctggctgctttgtttacctactcaagcctcagcagtggcagatgcttctccccctgccaggctgcagcctggcaggttgatctcagactgctgtgctagcagtgagcaaggctctatgggcgtggtacctgctgagccagacatgggagggaatcgcctggtctgccggttgctaagaccattgaaaagcacagtatttggggggaagtgtaccgtttttcccggtacagtctgtcatggcttcccttgtctagaaaagggaaatcctccgaacccttgcacttcctgggtgaggcaatgccccgccctactttggctcaccctccgtgggctgcacccactgtccaaccagtcccaatgagatgaactaggtacctcagttggaaatgcaggtctgcgtcgatcttgctaggagcttccgaccggagctgttcctatttggccatcttggaaacgaccatcttgatttcagttcttttgaatatattcccagaagtgggattgcttggtcatgtggtaattctgtttttattttttgaggaaactccatactgttttccacaaaagctgtgtcattttacattctcattaacagtggacaaaggttccaggttctccrtatctttgctgacatttgagttgttgttgtatttttctataatagccatcctagcaggtgtgtggcgataactcataattttgatttgcatttcccttatagttagtgaagttactgtttgatataacctgtttgccatgtttatgtgttctttgaagaaatgtctattgaagtcctttgcccatttttaattggataatttagttttctgctgttgaattgtaggggttcctcatatattttggatattaatctcttatcagatatgtgatttgtaaatattttctctcattccatagattaccttttcattctgtttattgttttctttgcagtgcagaagcttttaagcytgatgtagtcccagtcatctaattttgcttttgttgcatgagcttctggtatcatatccaagagatcattgccccattgccaagctcagtgtcatgaaactttcccattatattttcttctaggagttttacattgccagattttacatgtaaatctgtaatctattttgagttgatttttgtgtctagtgtgtggtaagttagtgtgaggtaaggatccagttttgttctttgcatgtggatatccagtttcctcaacattatttgttgaagatgctatctttcctcattgtgtattttttggcactcatgttaagtatatgtgtgtggtattatttctggatgctctattctgttccattggtctgtctgttttttgtttgtttgcttgtttgttgccagcaccatactgttttgactattgtagctttgtagtatattttgaagtcaggaaatatgatgcctcaatctttgttcttctctctcaaaattgctttagctttacagatactttgtagttccatatgaattttaggatttttattctgaaatccctgattctacaaagaacaaccttactatattatgtgtgtatttatattgagtcacattttgtacagagaaggcagaaataatgcaagctactctctctaatgataagtgattggttctctaaaattccgtagatatgaccattgagttgtttttaaatgtcattatgactgcatagattttgtgatatttggtatttttcaatccattgcagttattgttccttatgatgttcagtttatctcatttgccaataggaattctttcacttttgctcctgagtccttttgatatgattccactagtcattagcacattttcactttctggtaggacaaattagcctcttctcttatattttctgacctgaccaggacataaccatatcaataaggcaccttggttccttttgtatccacagtccaggtactggaaatgttcatttctcacttagtcactgtttctaggtcttttctgaagagaagttttgaaagagaaatattttgcatgtttatgttgatatttttatacttctaatttaagtttgagtttataggtttttgttttcaattttaattcatatgtttatctcttttctcttaaactaaaagtgttagttttatatgattctatatatgcaacaatttaatagtattctaagagtaactcatattattaacaatttgatgaataaaaatgatttaagatttccttgcatttttcattgtccttagaaaatacccaccaggagtatacaatcaagttattggtttttgccttttaaaataatttgttgttggttaaactaccaatccatacacagttatattccctttttaaattttcttttaatttttatgaattactgttttactttgaattaattttgtttaataattatttgaaacattttcatgtttccaaagtcaaaacctcaaagtaaagcacatttggagaagtgtaacttatcttgtttgctttactttgtcccttttcttcccatggatatcaccacttttattaatttttggtttaaaatatatatatgtacacacatacacacacacatctttatattttcctatatatataaaaggtagcatactgtatatgcttaaacactttgcttattttcataggaataatatattataacaatatttagtaatatttctcatttttttcacacaaagcagacattttaagcatgagacctatcaggattcaggatgggtaatctcattcattcattcaataaacttttgctgagaactcaataaaagtaggggtgaagttcttggatactaagattaatacaccacagcttctgtcagaatggagcttcagatgcagtagcagagaattcacttaaagcaaggattgctcctcaatggtaaggactaatggaggtgagcatggggtgctactgcaggagcgcaacaaggaacacaaaactcaagactgagaggccttgrgccgactcctacagaatggtcagaagttaaccaggttaaaggtagaaacaggaaggttcaggaagagggaaaggcatacaagaagtcccatggatgatgaaatgagagcatggacgctakcaagaggaggctagagaaacagatgaggaaggcsrtgactggtgaagtccttgtactatgggtgtggcctggaagattctcactggcccagaaagggaaaaaaaggaaccttttaggcaggagttaggttttataaaaaccactcttcattcagttatttaccagcattatttaagaaatgatctgtagtccatgttactgtcagtcaggttcttaaatatcagaacacagcctgttggatacaccataaaatttgcagcctttaataaaatatcattattagtgtaaataaacaaaaacaaacaaagctgtggcccaattatccatcatctggctaaccacaccccctaaacttgttatgtaatctagaaatatgaaagaaacaaaatatgaattctgttttatagagtccattagcctacttaaataacagagttatagctatttaggcctagaaggaaggatatattcagttgtaaggcacaagaaagtcatggcactctttgtggagcaccatgcagtatttacctttgaattttagaataaatatcagatcttgtgctaaacttgttcctattgtatgcattgtttatggcaactattttattttattttattttatatttttttgagatgaagtttaactcttgttgcccaggctggagtgcaatggcgcaatctcrgctcaccacaacctccacctcctgggttcaagcaattctcctgccttagcctcccaagtagcttggattacaggcatgtgccaccatgcccagctaattctgtgtgttctttttttttttttttttttttgtagagacaggttttctccatgttggtcaggctggtctcgaacttctgacctcaggttatcctcccaccttggcctcccaaagtgctgggattataggcgtgagccaccatgcctggcccaactattgtttatgtgatgcttaggtctgtactgttctagtgctttatgtgtattacttccattaatcctcctggcttctttataaagaagcacttgtattatcctcattttataaacgaggaaaactgaggcataaagaaatggactgtatcaattataggtggtgaatggtagggattcacatgtaggcagtctgactccagggtgggtgctgttaattgtaatagcataccatgtctctctcctggaatataaaagaaagaaagaagctgaaagataataaaggtgaagataatatgtgaaagaacattttatattaagaaatttttaatattaacattttcccgcttaatgaacaaatctttcttgattttactgataatccatttttgatctacttcataaaagtttgagtactcttaaaggcattggttgaagatccattgatacccaatgtttgacrgatgaggtacctgcagtcttgcaagatatagtgacacagctggtttgtaacaaaaagactgcaattcatgcctcctgtctcacacaataaagtgtgagaattggggcatagcttttgggactttgagacccaatgtaaccagaggtcactccgaaaggattatatttagttctagacccttctatgctctagagaagtgaaagatggaattgaggatgcatcttcttcaggggctacatttccaagtaggacactttcttttttttttttttttttgtttatttgtttcactttttctctatagctctcgccaatggcacaattatrtataaatatatataatttattgtgaatttcttcatttttcaatattgaaaatgctctgatcattttctaaacttcttgcaaatgaaacgcctactatatatacacataaattacagtattagtatctacaaagacttgcttcaagggaaacaagattttttgatttggtgccacagctaattggttttaattatgcataaataaagcccaaactgcatagttctatgtctttcctttctttgttgagcttgttgtgctttgaaaaaatctacaatgtaatcagtgatacgtattatcagaaatataattgcaaatgtcttaattaaaatatacattcacacaaatatgaggaataagaaaattaatttttcagtaagtatatagactcctatactaaaatgttttattatttttttaacatccggttacaaaaatattttgtttatactatattaagttgcccttattttatatctttaagttctttcttttgtcttttagataacttttaaaatcttctcaatgaagaaacaagcttgagtcagatattttgtaacattttgacatatttaagagaaaggaagagagagggaagcttgtaaaataaaggcttatataagaagacataagaacaagcaacttaaagaaacagaaaatcagagttctggatagactttagagtgataaagtggatagaatatggtttccggtattgttccctgtcatgagttctgttcaaactcctttacctgtaaaactctgctcaagttattaaccatctctgcaactcagctttcttttttttaattataaaaattaacgtgtataaattacttctgaagttgttttgagaacatgtgacaccatctaataaattcatggataaacacctaattaatatttttgttttatttgtatatattttgttagacacatgatttaaggtaacatgcaataacttttttctttctgttatgatttattctccaaaaataaatttgtagatgataccagttgattcagaaaattttaaaaatacatatattaaacacctattgcttttcttacagcattagatacaaaaaacataaggatgagaaaaattgtgctgctattgcaaagaacttgtaaactttttctgctgacctctggcagaaggacttccttggactcagtcttgattatctgtgttcttttaggtagtatccacgacaaatcaaaaggacttagtatgtagccagaataatttgagtatttcattcagtactgaaaagattcatcttgcattgaatttgagtacattaggtttccctcatattttccccccattgatttgctggacagagtaaacaattctctaatcttatcttgtaaatcttacttttcttagtctttgtcatcaacactcataagtagctagtaagtgcaagtcactgtaattaaatgggtttttttttttttgaaattctgttgtttacaatattctcttggcctgtctcccctagaaagtttgtaccttaatctatgctttagactgagtttattgaatttcttttattggcaattctctggttgttagagacattacacataattatttagatccttctagaagaactcagagggccaaaattaaacattcttgttaagacagcttctctctggggatcacttgttagtttatttagttattcttttatgtaagcggttaatcagtgcaagcaatgaaaaggtatagggcatcttggctgctttctgcatttcaaaatatttttgatgtcttttcagatctccctatagagagctttgtaatgcttttctgcaacagagaactgcatgcacggacccaagggtcaaaccttttctaatgtaaatttaatgccatggcttcgtgagctaagatcatttataaatataaaactcacagaagagcagattcatctgttaccatgtatagtaacatctcaaagagacaactaaacatgacagttgaggggatttgcaagtgaaagagaaaaacatgagcagagttgagagccatataattatgctcattcacactgtgactagttttaaagtgatttattcaaaatggttaccagtgtactcttagtcaccttctttcttgactatgtgctaattctgattttggcatttgtctatagaatatacttgttcttcctcttgaaagggaattgtgctacattttcgtagtgtttaaatcagttgatcatatttcacaattattccataacgttagttatttgaatttcaagttgcagtgttcttagagaaagcttaatatcttcattatacatacagtcatggctagctaattagcatcatgaatgctgaagtttaaccctggatgccactatttctgacttcaagaatatattggattttttcactttaaaaagtttagaaggaaaaatatcactgttgaattctacttcttggttatttcaaattatttcaaataggaagccccctgtaaaagtgtccagacttactataaatgcattatagttctcatctattggtttataaataaaagcatccttgaacgttttccaaaagagtaatgcgatttacaatatagttaatgaaaattaagctatattggttttccgggagggaaattgcactacataattaattttaaaaatcactgtttatttattcagtttattgggaaacaagaaacagattcaaaataatgaagctaaaggaacacattgcattttgacatcgtccgtaattaaaagttcagtgttttggaggcaatttcgttttgtttgtgccgccattttagttgccattgtacttaaagctttccttctcctttcttatataggggttctcagcttttaaataaaagatgtaaaggaattatggttatttctgttttcagaataagtgtctaaaattttaataattttaacatttttgttttggttttttatttagtgattattatacaataggcaaaaccatagatcagtataaataagacaggtaaagtgatttgcacaaggttacatgtttggcaatggcagactaaaatgcggcttctagatatccagtctagtgttttttcccttatctgaacttatggtgccttgtgattccttgatttgttaaatttcagaaaataggcattaagagatttctagcccagacaggaatggtacaggaatggtaacttctttatttgagtggtgacttaggctaagctttatatacatacaatcacactctacatttgtaaaacattccgtagttttaaaaagtctctctcattctctcgtttccaacttatctttccctctctttctttcttgctttcactgtttcagaaagtgagaactttctctgaaatctacatacaagaaaataaaatgaaatcatggaaaaggtacagaagcagcttatgacatctacaagggaaatggctagtttttttaggataaaacaaattgactgattatccttacagtgaagacaaagtttgaagtttttcagaatgtgattaaaaatgatgaatgatataatcaaaatatccttcaaaattctgttttagaaatttgtgtaaaagtttgactttctttgaatgaggccttccatagtgagagttgctttatgagagctatcagaccctcatcatgaacttaaattgacttagactgatttctacggaaatgcctaacctgcatttctttcaatttcccttcatcttttcaatgtcttccaagctgtatgattcaccttaatatgtaaaaataaagtaaaatatatttgtttctacataatggtctctatattaacatctttgatgcacaattgaaataaaagctcaaatagaaatactgattacagtggggtaaatagcttaccagaattattcttatctggtcctaagatttggattggagatatggtaatacttccactcacaagtccatgaggaaaagatgggaggggaagggttggaattttaatatgaactataccttaggttggagatgagcctggggactggccagaggtctcttctagaattgaggtgggtggggcacacaaatggctcttatcctgcccctgctccttctctctgtgctctgaatttcacaccttgactccttcaaagggctttacttcagtccttcagtggtggcatcgtccctgcatcaccattctctctctccctactaaatcattcctaatagttcaccaagatttttcaaaatctttcttcttaaaaagagaataatctaaagccttctcttggaccttccttaaaccacaactgctcatctccgttctttctatactaacctttttgatgttttgtcggtatccatcaatgctaattcctcatacaccattcactcttcaacccacttcaatctcttttcacccccattgcacccttcaaattgttcttgttgaagatctccatgctaccaaatctactgtcctgctttgccttaatcttaccccatctctcaccagtatcaatacaattgcctactttctctgttgaaccactctcctttcttgccctcctagccatcatgcacttaaaagaaatgttttcatgttctcctccttctttgctactatttttttttttttgattctgaaatctttgaatgcctcagagcctctcctcttttcctacgttcacttgcatacttctctacttaggtaatattattccgttccatgagcctgaaaccacctgtaggttgatgattctcaagtttatattaactgccaagccttcaaccctgagctccagatttattcatttatctatctattctgcatctccactgagatgtctaaaggttgtttcaaaccttacatgtccaaaatggaaattttgctttccaaattatcacttaaatctgtggttccggccgggtgcggtggctcatgcctgtaatcccagcactttgggaagccaaggcgggtggatcacttgaggtcaggagttcaagaccagcctagccaacatggtgaaaccccatttctactaaaaatacaaaaattagctgggcgtggtggcgtgagcctgtaatcccaactacttgggaggctgaggcaggagaatcgctggaaccccggaggcaggggctgcagtgagccaatattgcaccactgcactccagccttggggacagagcaagactctgtctcaaaaaaaaaaaaaaaaaaggtctgtggttcccctgatcttccccatctctctcagcttttcttcttctcaagccaaaaacacaaaagccctttttgatttctccctctcgttcacttatttcataccttatgcatcataaaatcttatagttctgcctctaaaattcagctccaatcttgctgtttcttattcttgcaagtacctgctaccctacacatacaatccacttaggagccacggtcatctttttttctttttttaatagactttattttttagattaattataagttcacagcaaaatcgaatggaagatagatttaccacatacacactgcactcacataggcacagcctcccccattgccaacatccctaccagagtggtacacttgttacaattgctgaacctatattgacatatcacccagagcccacagtttacattagtagtaactcctggtgttgtacactctgtgggtttggacaaatttacaatgacatgtatctaccattacagtatcataccgagtagtgttactgctctaagaatcttctgtgtcccacctattcatccctctctcctacccaagctctggcatctgctggatgtatttatagttttactgccttcataattttgtatttccaagaacgttatagttggaatcatacagtatgaagccttttcaggttgccttctttcacttagtaatatgcatttaagtttcttccatgtcttttcatggctggatagctcatttcatttagcactgaataatattccattgtctggatataccccagtttatttatctgtttgctaagtgaaggacagcttggttgcttccagattttggcaagtataaatgaagttgctatacacatccgtgtgtaggttttagtgtagacataagttttcaactcctttggggcaaataccaaggatcgcagtagctggattgtatggtgagagtatgtataatttcgttaaagtgtcaaactgttctccaaagtggctgtaccattttgtatccccagcagcaatgaatgagagttcctgttgtttcatatccttgccagcatttggtgttatagtgttttggattttaaccattctaataggtgtgtagtggtatcttgttttaatttgcatttctctatgaggttgtgaagcatcttttccacagtaatcttttaggaaaatcattttcctccttaatatttgttattttttccccattgcttaaaaaaaaaaaatgaaaaactaccatgacctgaaaggcctgcatgatctggtacctgtatagcttagtcatctaggtgtatcttgttgctataacaaattaccacaacctagtggcttaaaacaacacacatttattttctcatagttcggtatgtcagaagttcagcatggacatcactaggctagaatcaatgtgtcaggagggctggcttcctttctggaggttccaggggagaatctgtttccttactcttaaagtgtttacagaattcagttccaagtggttgtgggactgatgtctttatttccttgctgggtgacatccaggccactctcagcttcttgaggcctttatctagtccttgcacatgggccactacagctcagaaccagcaataagccatcttatacacttcaggctgttgcctctctgacc

SEQ ID NO: 6987 - DNA, 16482 bp, Homo sapiens
taagagagtgacctgtgagttgtagggcagtaactactatgctttattttggactaaagcatggtttttaagacattttacttattagatgtaaatctgaattcattcaaccgtaaaaagtattgttatcttttgctgattccatgttcataataaaagttagcactgaacgagagaaaggacaagaagaaactgacaaggtcctgagacagtgtattttatacacagtatataaaatttgcatttttattctctcccatgaaaacagacataaagttactaatttctagcaactacagtcttaaaaagtaaaccagagaaagaataatctcaaactgctgacagtttacctctttcagatgaatttaaatggagaatgagtatttcatgctacccaaattatattagttaccaattcatgatctgagattaaaaaaaacaaactcagtgtttgagtgtatactacatatacacatttcaagcaaacagccacagattttaacgctattaagtacacttttctttcacgccttcagctacttaaatgacaaaaccaatgcaaagactaacctttcagagatttataatatgggaaacttatagggaattaccttttcaaagagtattatgatgtaaaggaaaggataaatgataaacagatcttcacccaacagggtaggctcaaagtcaccaatttgcttggtttttataaaaccattaacaggttgactcaatcgatttagtcagaatatttaaatgacaccccaaaggactttaaatcacagaaatgtaggcctagaaatactcattaatttacattccaacttttacttcacagatgaagacacaggctcacagaacttaagtgacccactgaaggtcaaaagctatctgactctctagaaaagcctgaaatggttgagatattgctatatttggctcatcggcattcaagaatatccaattaattccaggaaaagctaattttagttcactatggccctggaacccagaaataaacatacctgtagccaaacaaacttcaaatgaagacagagctataagaacaagtcagctctaattcagagcccaaaattcacccaccactacacaaataaaaggctacaagctattttaagaaatacctctgtgataaataataaatgaaaatagccagaatgatacttgaagccagtggtcctcaacctccggtgcacataagaatcagtcttcttccaaaatatatatacaaggtgtccgaatatgtaggtctacctagtatagtgccaaatatctgtacatcaaggttctcatgagcactagggtttcagatctcgtttccaccaagttcattattctgcaaacattacatatagaggtatatattagatttgccctagtaagactgttaagtttcatctcacgaatgaaaccaggcatgcacagaaggcatcatattacaccacaacagtagcagtatcagtttttactcttaacccagtgaggaagaggacaactgagtcacaggacctgaagcactctaattttatggaaacaagaaggctggtagccacctgctttctaaccaggaatttaggaacgtaccaagtgtttatgacaccaggaaatgcatgcagcagagaaagtttacatcatctgcccttctaggcacgtgatataagagtgttttggataagatattaactttagtaagaggatattttccgtttacatcttctataaataccccttaagtttacaccaggtggttagaggaagattctgcagctccctagggcaatagcaaagaatgtttcactgtttctgaggagcctcatttgcctgatgcatgactgttaaaggtgcatttccctacacaaccctaaatcagttttcacatttgcatattccagatttactcaggaatgttcaatttaagaatcacaggtggttgctcggtaaatcaaaggctccccaaagattaggttttataatgcttcctgaaatttacagctccactttgccggcctgtttgaattcagatgactccaagttgatcccaaaattataaatcaaagtatctcagaagagtattattctattttagcacttttatagcttactctatgcaacgtgaagtgttatttgtatgctttctatttaaaaaaaaaaaaaagccagcaaggattttagcaggacttctttcttcagtaaactcatcagttttattaaactatcaaatactttttagcctaatttagactaacaagttcacatgcacaacactgccatcccaaacaaaagctaaggcggataagccaagtgcatccccccacttcaacattaaacagacacacgtgcataaaccttggctaaatgataaattttaatcacttacaggccagctttgatcaaataacagataaatttaagagtcatatctttggagtcagtcagatcccagcagttccagtcctggctcagatacaattggggtgtgaacttaggcaaagtaccctgctctctccgggcctcagtttcttcatttgagaagattggaggtgttaacagtggctgcctcttctctttgtcgtgaggaccaaaggagataatgactgccaagcactttcacagtgcctggcacacagagagcactccattaacgttagctgttgttcttaggaggaccgcgtcccctcccaagtcctcaccacacatccaaaacacacaaagcaaaactctttaacaggaaacacaaagaaagagctttaattctacaaggtccctccgattgcaggctcttcatcctccagttcctcaaatgaatgaatgaacgcctaggaggggctctgcaaatagctgtctcttaggaatcccctttgcccactttaaggtaactgtctttcaccaccaattaaacacccacaagtacacccagagcgagtcatgcaaatttcagcggagacaccgaatccaggcgagtccttgatccccacaggcgacctccattcattctccacgcccctataccccgacccctctctttaagttctgggaccagccccaccctcgcgacccttcccctcccgccaagcgtctctaccctgccctccgcacctagcgtgaacctgtcaccccaccaagtgagggactgacgaaggggcccacctcgcccctgcccgagggaccgaggcccagggtgcagccgtcccctcgggggccaaggaggggcgaagtgctccgtccggctcgcctctcctccccagggacccgccagtcccggccgggccagccggagatagcgtgtaataagagggaggggagagctctccgaaccccccttccccgggatccctaccaagcaagtgagtctcttgctccagcccctccgagcctccccggctggagtcatggtgccggggctgccccaggaagcccccataaaaaggagggggagacacccccatactcacccaccgtctcctccccctcagctgtttacctcacagtccctccagcctacagggcgccgccatcttggacgtacagcacctcccccgtcgtgaaagggccaaggccgacggcggcctccgccacgaaaaagagtccccctccggacctcccctccttctcgaaaggaaggatagacggccgcgctcggcagccccgccggaaggaagaggctcttccactcataactgacgatgtgggttggacgagaaaaaaagtaaggagggtttttatggaggggggcggggccgggcggaaggatccgaaaggaggctgcgaagagatcttgtgactccgcgaaggaggcaaaaagaagggccggcgcggcgggaggagccacgcgagagcccgagggggcggggcgggcggtcacgtgactggcgggcggggggacgcggcggagaggcgtaaacaagctggcggcgcctgggtgtggttggagcgccctgcccctgccccccgagtcgtttctgcccttcgcttgcgtggcgccctccgagggtctctctgtgggcggcctcagagcagcgatcctgtttcccaaggagctgctggggcccgcgtgggtgaagggcctgcttgggagctttggagttgcagctcacctgggaaggggcggaaagctgcgggccagggcagccctccttcctgggctaaacattttcagaagcccgcctccgggattgcgggggacccccctggcttctgccttcaagtagctcacacttcacacctactcatgacatctaggggaaaccagccctaataggagacagcttgaaaatcagaacgccttattccgtttcctgctgaaacaaggctttaagtcctccaagcctcagtttcttcctctgtgaaatgggcataatgacatctgtgacgtgaagaatcaaggagatgaagtatggacagcgtttagcccagagtcctgcgcctagtaaatgctcactcactagataggtggcctttattgcgaggctgagtatgatgggctccatccagcacgaacacaaagccctgtgagaggaggcagagtgagatgaagtcgaactgtgggatatgaaaggcattttgaaggagtaggcatcaggttgggttttaaaggaaatgtaggttttgtgaaatactaggtcggtgcaaaagtcatcacggtttttaccattaaaaccgcgatgacttttgcatcaacctaatagaaccaggcgaggcggctcgggagagaaggccattccaggcagagggaaccaaaggagcaagagcctaggggcaaaaaagtgttgggtgagttatgggaataacaggttttgtcatgggaaccaattgggtcacagtgcaaggcagccatggttaaggggggccaggtgtgtgagtagccagcaccgtgggtgccttcagaattctgaaaaggccctggatggtatcgggtagagccgctgctagtcagtatagggccttggtgagaattagaaaaatggcacccctgggctgtattttggcccctatccaccagccccaaaccctcctgggcccttgagcagtgaacaacctttataaccatacgtctagagccacgaaggcttaggagggaggtgaaaattgaactgatgattcctctgttctaacacagtcgctggggggaagctaagagttctagattcaaacagaccagagtttgaatgtaggtttcagccatcatgttctaactggatgagccttagtctcctcacctgcaacatagggctaataataatgctagttcatggggatttggggtgaagtcagtgagtcattaagctctaagtggcacagagcctactccagttaatgttatttttgataactgttaagtgccagctgtcagcatccatcacttccagaaacgggtccaccaaacactaaattcttctgtgtcaccacccaagcatagtctgcatggggtccagagatggaaaggtcgagggaaacggggaagggtctgggttctctcagttccaccaatctgcaaactactttacaggaacagactcttccctttgcattcacaccagggaagggattcaagatttctgaaatcttcagagatttctgagaccaccagtgatgggagacctaaggaggagggcagggggagcagcactgctctggagctctgacccaggaagcccccccacaccctgaccttccttggctccatgacctcatcctgcaggaatgcattctgccatggaggagagcagccataagcagagctcatcaactgctcactttccagggggccataaccacattgtcactgtttctacactgtctggaagaagaatgggcattgttacctcaatatgggaccaccaggggcttgcaagaagaggctgaaggtgacaggcagagacagctctactaccatctcctgccacttaccaggctgggccacctagatgttttctgcttctctggggttgatttttgtcatttgctcaacagacactattcagaccactaccttccatacaccaccctggagcctccctgtgacggggcttcctgaccggcctgtctgagcatgaaagggctgagccctccataggcgggcgtgctgacaggatgcacgtggtggaggacatctgctgcatttggctgtgtgacatctccccctcgccttctgaacaggtgaaccgcccatcctcaattctttcagtgctgatggtcctcacaatcacagtaccagccccaggccacagcaggtggaccaggcctggccaatctgagatgcccatcatggagcttgttaaaagaaagcttaagacaagttcaattagattaaatttaatcgagcaaaaaaaaaaaaaaaaagaaagaaaaagagaattcatgaatcaggcagcctctagaatcaacagattcagagagactcccggggtcagaacaaatttatagacaaagtaaagtggcctggcgcagtagctcacttctgtaatcctagcaatttgggaggccaaggcaggtagatggcttgaggtcaggagttcgagaccagcctggccaacatggtgaaaccctgtctctactaaaaatacaaaaattagccaggcgtggtggcgggtacctataatccaagctactcaggaggctgaggcaggagaatcacttgaacctgggaggcagaggttgtagtgagctgagattgtgccactgcattccagcctgggtaacaaagagagacttggtctccaaaaaaaaaaaaaaaaaaaaactaaactaaagtgacatacaggaatcagaagtgaggtacagaaacagtgagattggttgcagctcggcgtttgccgtatttgaacagtttgaacactcagcagtctatgagtggttgaagtatggccgctgggattggccaacactcagctattgttacaagtgcatactactaagttaggttttcaattttgcgtgcctattaagctaggttacggttcgtccacaaggactcaaatataaaagtacggagtccttctcaggccatatttcatttgctttaacaagctgaaatggttggtctacagtggacctgtgacttgagctggactagagtgctcctctgggtctttatagatgggtgtttaaaaaaaaaaaagcaatttttctctttcctttggggtcactaaactgcgatgaggaagctgtggcctctcccttcccccgtcctacagcaaggtgtgtgacaagtcgagttaaagagtgaaagagacagagatggaaagagaaattcatgctgctatctcctgcatttccggagtccctgaaaccagctttgccctggccttccaagttccatgaagcaataactattttggccaatgctagtttcattggatttctgaccctcatcaacaaaaggccttctggatgtggtgggattcagaggcctttggaaggacaccaccagccaaaaatatttcccactctgtgcccgaagttcatccgcttgaattgccttttggctttagctttcagctgtctgtgcagcagcctcctggccaggtgccctgccgttggtgggcaacccccgcaggatggggtctgagcttctgctggcagcccccaaggccctctgcagccccggcctctctagcgcatcagtttccccttgctttctagcaccgtgtcctccagtaccaaggaacgcccagaggcttcacaccgccctaccttggcttaggccgtctcctctccctccgcaccagatggcctctgcagcctgtgctggtcattctccgtttgcccttctctgtctgggctcccctctgagccacacccgctaagcatgtcctctccctcctcttggatttgaccaaagtgcggcagggtcaggtgagcgaggaagagccttcccacctggcctggcctggccgtgaggcacagctcctgctgcrtggcctgtctcacccgtggtgttagtaatggtttcccccactcacttttcacacccagaggtgatcacggatccccacagctcactagtccttaggtgcttcagcacctcttttttctctgaagctgctcacacctgtctttttaattatcccttggagggtgttactgtttcccaccaggatcccaactgctacagccccttcttagagaatctatcttcagcccaggctactcactgtgaatcaagccaaacccacagatacacacacacacacacacacacacacacacacacacatcaagccaaacccacagatacacacacacacacacatacacacacacacacacccccaaccccctgattggacctggatcagggctgaaaaccttcctcacactgaaccagcctgattctccttcttgagaattagaaccgagagaccccaagactgagatacatggtgttggtggaggattgcaactttacacaactgcagggggaccattcaaactgctgtactccaggagaggcagatcacttagaaaacacctcaaacaggtgccctcgagggttatgcaataaggcgggactgtgctggtccctgggggggttcatatggagttggacccagccatggccgtcagcaccactctggacagcagaggttaagcaggaagagctactaggagccttgctgaggaagccggcatgcccaaaccagcaaggagcagctgtggccacagagaggaaggagagctgcaggactagcccattgcccaggaggcctgcttaggtctggaagatgcccctgtatcttttcaataaattccactttttcatgcctgtaatccccacactttgggaggctgaggcaggaggattgcctggggccgggagttcgagaccagcctgggcaacatagcaagaccccatctctacaaaaaataaagattagccagacacagtggcatgcagctgaagtactagctacttgagtggctgaggcaggaggatcacttgaccccagaatgttgaacctgcagtgagccatgatcgtgccactgcactccagcctgagtgacagagtaagaccctgtctctaaaaaataaaaataacacacacacacaaattctacttttacctgagctagaagatgttcgcttctgttcctgacaaccaacaccaccatcgaggctggagatggccaaacatgctttcctttcttcacccacatcacacctgttcttcctccaagactcaactccaatgtgatctccaccaggaagtctttttaggacccccaggatggcaaaaagacccctgccctgagcccactacccctatcaaatgcatacctccattccttccaccacaccgcctgcttactcaggttgtgcttatgggcctgtctcccaagttctcaagaactctgctgtccccaggaggtgggatggataagagggcccttgaaacctctacttcaaggtcaaaagacaggaacaggccaggctgggtggctcacgcctgtaatcccaatcccactttttttttttttttttttgagacggagtctcactctgtcgcccaggctggagtgcagtggcgtgatctcggctcactgcaagctctgcctcccgggttcaagcaattcactacgcactatacacactatgcactacactatactatacactacactacactatacactatacactttgggtttttgagattttgtttaacaatgccttttccaacccttaatcacacacaaatgcttaagctttctctgtttgtatggggttttttgttgttgttgtttgtttgtttgtttgtttttgagacagggtcttactctgtcacccaggattgagtgcagttgtgcaaacatggctcactgcagccttgacctcccgggctcagaccatcctcctgccttagcctcctgtgtagctgggaccacaggagtgtggtatcacacccagctaattattttattttattttattagagataaggtctcactttgttgcccaggctggtcttgaacttctgggctcaagcgatcctcttgccttgacctcccaaagtgctggggttacaggtgtgagccaccatgcctggccatttgtatgtttcatatttatattgttacattaaaaaataaatttatgttttacatttcacttctaggtctctgcagaggccatgaaaaatgtgccattcagcttttctgctaattgttgaaggcccagctgccaccgctctggatctacaccccatttgcaatgaagccacacatctcgtgagccactcccagcccgtgactgggcacagcaggggccctaacgcaggatagctctgaggaggtgtgggacccttgacagtggaggacattggcccgagaactcttcatcgacctgatcaaacctctcttggaactgcaaagcagtctgagactcttctcccagtttattatctccctattaactatctatagtgtagctcattggaaaagagtcattaattttgattatcaaattcactcctttttctttttgacttgcactttgggtttttgagattttgtttagcaatgccgcttccaacccttagtcacacgcagtccccctctcctcacaggtttcagatccatatcatagctgaaggctctctctgctgtccagctcctcctctgtgtgggacatttatctgagttttaaaatgtccttcccaaaagttgactttagtattattttattatttatttttgagacagtgtctcactccagtccagactagagtacagtggcctgatcatagctcagtgcaacctggaacacctaggttcaagccatcctcccatctcagcctcctgagtagctgggactccaggcacacaccaccacaccgggataattttttttattttttgtagaagtgggctctcaccatgttgcccaggctggtcttgaactcctggactcaagcaaatctcccacctccgcctcccaaagggctgggattacaggcgtgagccaccatgcctgacctgtagtgtattattgatttattattaggtattttatagtttttaatattattttgtgtgtttttttaaaattttcaacttggttgttactgaagtagagaaattctattgatttttgtaggttgatcttatatcttgcacctagttgaactctctaattttactagtttgtcattttatttttatttatgttgagttttctagggatattatcacatcatctgaaaataaaacagttttatctctctctctttttctttttttctgagatgaactcttgctctgttgtccaggctggagtatagtggcatgatcatggcccactgcagtctcgaattcccaggctcaagtgaccctcccacctcaacctcccgggtagctgagactatagacatgcctggttaattttcaaatattttatagaggtgaggtctccctatgctgcccaggctggtcttgaactcctggactcaagtgaaattcccgccttggcctcccaaagtactgggattacagtcatgagtcatcacactcggtctgtctcttctttttaaattagaactctcctcatttgtctttccctttttatagtgttggctgggacctccagtactatgtcaaccagtagtggtgatattaggcatctattcattattcccaatcttcaaggaaatgcatataaattttctacagtaggtatgatgtttgctctaagacttttgtctatgacttttaccaaattaaagaatagatgtggcctttatccaatgctttttctgcattcattgaatagtcagaaatatccttattttagcctatcaatgtggtgaagtacacagatacatttttttgatggtcatttatccttgcactcctaggacaagcacaacttgatcatgatgtatttttaaaaatacttgttgattcgtgttttattaaggatttttgcatttattgtatgcatttatggttcttttaattggaatgtatagactatttacatttaatgtaattatcagtgtagttgggcttaagtttaccttcttgatatttgctttctatttttccatctgttctttgttcctttcttttgtctttttcagcctccttttggattaatttagcattttttagaattccattttaccaccactattggcttctttgctgtacctcttcgtcttatgcttttagtgattgttctaggatttaaaatatgaatctttaacttatcaccatctatattcagtggctactataccatttcagatataatttaagagctttacaacaatatacttctgaccaggcgtggtggctccatgcctgtaatcccagcactttgggaggccaaggcaggcggatcacttgagtccaggagttcgagaccagcctgggcaacatggcaaaacagtgtctctactgaaaatacaaaaattagctgggcatggtggcgagtacctgtagtcccagctacttgggaggctgaggcaggaggattgcttgagcccgggaggcggaggttgcagtgagctgacatggcaccactgtactccagcctgggtgacggaatgagatcccgtctcaaaaataaaataggccgggcacggtggctcatgcctgtaatcccagcactttgggaggctgaggcgggcagatcacgaggtcaggagattgagaccatcctggctaacatggtgaaaccctgtctctactaaaaatacaaaaaattagctgggtatggtggcacacacctgtagtcccagctacttgggaggctgacgcttgaacccgggaggtggaggttgtagtgagccaagatcatgccaccctaactccagcctgggcgacagagtgagactccatctcaaaaataaataaataaataaaataaaataaactatacacttctatttcctgccccctgttttttgtgctattgttgtcataaattttacttctacataggttataaaaccctagctaggggtctatattataaaaatattgttattatttttgctgtaaagaatcaattttttgtgtgtgtattggtctgtcaccaaggctagaatgcagtggtgcgatctcagcccactgcaacctccacctcccagggctcaagtgatcctcctgcctcagcctcccaggtagctgggactacaggcacgtgcaccaccacacccagataatatttgcattttttgtagaaacaaggttttaccagcagggtgcagtggctcactcctataatcccagcacttttggaggctgagctgcctggattgcttaaggtcaggagttggagaccagcctgaccaaaatggtaaaaccccatctctactaaaaatacaaaaattagccagatgtggtagtgcataactgtaatcccagctactcaggaggctgaggcaagagaatcacttgaacccaggaggcagaagttgcagtgagctgagatcatgccactgcactccagcctggatagcagagtaagactctgtctcaaaaaaaaaaaaaaagaaaagaaaaagaaaagaaacagggttttgctatgttgtccagggtggtctcaaacccctgggctcaagcaatcctcctgccttggccttgcaaagtgctaggattacaggtgtgagcaaccacatctggccaatttttttttttttgagatggagtctcactctgttgcccaggctggagtacagtggcgcaatctcgactcactgcaacctcctcctcccgggttcaagtgattcttctgactcagcctcccgagtagctgggactacaggtgcgtgccaccaagcccagctaatttttttatttttagtagagacggagtttcactatgttggccaggatggtctcgatctcttgacctcatgatccacccaccttggcctcccaaactgctgggattataggcatcagccactgtacctggccaaatattttttaaagaaacaaaaaactgagaaaaaatattttatatttgcccacatatttaccattgctggcattcttcatttatttgtgtagatccaagtttgcatctggtattactttccttctacttaaagaacttcctttaacattttttataaaatgagcatgcaataaattctcttgacctttgtctgaaagagtattttaccctcattttttgaaagatatttttgctgggtatagaattctaggttgatggtttctttctttcagcattttttctttttttttgagacagggtcttactctgtcacccgggatggagtgcagtggtgtgttagtagctcactgcaacctcaaagtcctgggttcaagcagtcctcccatctcagcctctcaagtagctgggactatgggtgcatgtcaccatgaccagctactttttaaaacatttttattagaggtgaattctcctatgtttcccaggctggtctcgaactcctggccttaagtgatcctcccgccttggtctcccaaaggattgggattacaggcattagctactgtgcccagcctctttcagctttttaaatatgtcattccattgtctcttaattgacaaaatttctgaggagaaatttatggtaattcttacctttgttcctttttttctgaaggtaatttaaattcttaacataaacggattggttgattgatttgaaatcatcctgagtgtattagtaagagttctccagagaagcagaaccaacgtgatgtgtgtgtgtgtgtgcatgtgtgtgtgtgtgtgtgtgtgtgtgtgtgtgtgtgtgtttaaggaattgatgcacatgatttttgagtctggcatgtccaaaatctgcaggatgggttgccaggaacagagaagaaccactgttgcagtccaagtccaaaggctgtctgttggcagaattccctcttgcttgtgggaggtcagtcttttgatctactcaggccttgaattgattggatgaggcccacccacatagtggaaggcaatctgctttactgaaagtccacttatttaaatgctcatctcatccaaaaacacgtttgaccacacatgtggccactatggcctggacaaattgagacataaaattagccattatactgagtacctaggaaagcaagtttcttggcctcttaagctgtgattttcttgttgttttttaaactgttgtaaggtaaaactttcttcttccaaagaaaagctactatcatacccttttcctccacctccttttgttattattttttttttggcaaagaaaaacattgatgtagattagagaactgtcatttccgtgaatcgtcttctaaaaagctttgcttagcaggtagaccagaaaatttaaaaatcatgtgtcagcataggatatgaatgttggcaaaagtgacaggctgctcaaaaaatcccaggaaatatcctaaaggtgccagtcccagacagagattccaggaacccatggatgctcttccatccttccctgccaaagtacagcagtttgacttctccaagtgcaccctttaaaatgtaccacctgttgctggatccattcaaaataacacatatatttcaggccttcccttttggggaagaattttgaccaaagaatgcattagttgtctattgctgtggagcaattaattctgaaatgtagagttattagaaacatagaattggaacaacaccacctattatctcacagtttctgtggatcagggatatgggtgtagtttagctgggtcctgtggctcagggcccctcacaaggctgcagtctagatgtcagctggtgctacagtcatcccaaggcttgacaggggaaggatgcactcctaagctcacacacagttgttgacaagattcagttccttgtcatgtgggcttttccatagggcagctcacaatatggcagctggcttccatcagagagaacaaaaaagagagtgcaaataacatggaagacagggtctgtcataacttaggcctgcaagtgtgccatcccatcacgttttccatcctattctttagaaggaagtcactaggtagtctcagtgagtgtctaaggaagttactgctcacacccaatgagaggggaccacacaggttgtaaatttcaggattcaggcatctttgggggtgatttgcttccaatgcttagcacacaaacgtgcatggcttggaaaacacctttctctaacggctgcgctgacaccttcagacaaaatagcagatccttctctggtccccacagtactcttctgttcatacatctaccatcctagtcatcacagtaataatgtagcagctatgaggagttgctatgagaccatattgttctaagcactctacatgtattaagtgaagagtatgtagtcgtttatgtgtcaatgcagagaagcactcattcattcaacaatgacatactagcatctcctctgcatttctttgctgggcatgggggaactcagtagtgaacaagagagagtcccc

SEQ ID NO: 6988 - DNA, 23950 bp, Homo sapiens
atagccgtgacctttttagtggacacagcaagctcacatctgttatcaccactccttccccactgtcacacgcaccctttcccccagtggtgccactccccaggctggatatgccatatgctccctagcctccctgtgagcagcctccacatttctcttctctgccctcactcagatttcccccatctcatgtcctccaagtcagccatccccaagtgtgaggggcaggggacacctgacttccttctcaatttcctttccttcttttctgctaaggcggagcctaagcccctggaaagctagagatcccagaaccaggctttgaccaccgcacactccaccctctgcttcacagctcctggcagtcacacacccacggtatcaacattgtcatcaccacccgctaactgatctcaaacccctttgcaaacatcttctcatctgattctccattccaggcaggcattttatcatccagaactgttctgtgggggggaaggggggggtctctgtgtggctgggtggcttgtcctaggatacctagcacagagaactctgtcccccaatttcttagttgcccccacccattccttcctcacatcagcatgggcaaggccagctgtggtttgggtcactgttcaggctgtacttttaggatcctcccaaatagcaaacaactatgtgactatcaggtctttatttcatgggttataggagatagggtcagtaagcctaatgtgtaacagtttcagtggttattacagagttccattgaattgcaacaactccctttaaaagcacaaactcccaccaagaaaatctcagtttcttcattaatcctaagagctttcctatctaggtatcactcaaaattcctactattctgggggcaatgggatcagagggtgttgcagagaaaaatccagagaaagtgaaaagtctacttccttggcagtgctggtgaagcatacccttacacagacgcttccccatgggaacaagtgccaggaactgcttcaggcttacgggggaaaacagtggctaagaagagagaggaggccgggcacggtgactcatgcctgtaatcccagcactttgggagactgaggcaggcagatcacctgaggtcaggagttcaagaccagcctggccaacatggtgaagccccgtctctactaaaaatacaaaaattagccgggcatggtggtgcatgcctgtaatcccagctactcgggaggccaagggaggagaatcatttaaacccagggagcggaggttgcagtgagccaagattgcatcactgcactccagcctgggtgacagggcgaaatctgtctcaaaaaaaaaaaaaaaaaaaaagacagcagaagaagaggggtgaatccaggaggaaggagggggtgcaccagaaaggtcccaggacctctgatgttccagcattcagcatgcattttggttccacattcagctcctgcccacaccagtttcttttctctattctacaatttccaagaagaacccacactaacctattctgtctcaactcccactcctgtcatcccaagccacacatcacctccccaatcacgtgaactaggcatcactaatcgatcctggccttctagacacatccacccagggtgggccctttctatagtatcatgcataaaggcgtcaggtggggcttccactcccacctcttagtcccaattcatctccatctcaccctccccacgtttctctatccaaacccagccttcaaggtcctatattttaaccacagggaaaccacttccctgtgctgtctctgttgttcaactaacgacaactaattttctgagcacctacattaggcaaggcccatcctgagtgctgccaccaagaggtaagtcagaaacagcccccaccctccagagtcagaggacagggcagcgataagccacaccgccacacaaatactatgcaaggcgagagatgagaaccgagtcagtgccagaagggctgagtgagctcagagcatatcccgtccctcctgctgggagcaggcacccggatggctcccaggagggtggagaatgctaggccagacaggggagggagggcattccagtaagacagagagcatgagcttagcatgagctaagccagaaagacggttcaggagaagtgcatttcaactttagctgaaccttccactgctactatttattgacccttacacctgattatttatgacccaggcctgcctcacacactttatggctaatgtgggtgacacccatctgggatacacaagtgtggtgcagcagtcaccacctgttctgactggtccgtacctgagctctgtattgttattaaataaatgaatgcactgaatctcacaagcctgtgaggcagggattactattacccccattttacagatgaaaaaccaaagcacagacaatagtcaaagaaaagatagcaaggtatgcaggagcctgaagtagtgggcacccaatgccagggcaacaaactgccctggcacctcacctggcctctcttatcagggaacaccttgcagcacaaagaatgccttgaggaaaggggccctgttaatcccctggaatccccaacaattgactgccgcataaaaggaatgaggaaagcaatgagagccagtgaagggtgagcataccaggccctgccctgcaaacctagtccctgttgcgtgggcagggcagggcagggcagggcaggggctcggcctcacagctccactccatgcccagcgcagagaacagaggggagagctaccacaaacgccgaatctctacagagaggtcaaggattggagggcagagacagaaatgccccgggctgactgtttccagcttgggctagcactggctggcttaacttttcccctccaaagtctctaggtaacaaacttcgcgtgtctcctttaaaccaacagaccattttacctaagtcttaagggcctggcctgcacccatgggagatacaagtccaggaatcccttcctgaaactggggatcaaggttggggaaggggcgaaggcacgcacagcacctgggatggctcccgcattccctcaaacactggggagagttccttacaaataaactgcaatggtagcagctcccaggaatgtgcgtgctcccagtttcggaggaaagttcctgaagatagccttctctgcttaatctccccaagcctcgcctagaagggcgcgcgcaccctggagggctccgcagggctgcggggccgggcctccggcacccctcccgccacccgttgcctcctgcgcccagggtcacggcccctggccctacccaggcccagactgagaccccgacccctgagcccggggggacggcgagtgcaccccgaccacacatgagggagcagccccagacgccgaggctgatctagggggctgccaggccgacacggcccgcccgcgacccgccgacgccctcccctgccccccacccccacgcctgtagtgcaaccaggaagccgcagggccgcgctgggctgggcgccaggcagccccgggcctcacccgcggcgccgcggtgcactgccgccgcctggtcccaggcccccagccggctcgggaccctcactcacctggccacggggactccggacgcgaggggcgaaatgggacgtgggcgggagtggctctctccgcgggcgtcccgggcgcggcgcctgggttctgcctaggggctgggtcccactcccgctcgcggggcccgcggggcactcggggcactggggagccgcgggcgcagcagccgtcagcgccgggcggaaaactccgcgggcgcggctgccccaggtgccagaggcagtgcaagggaggggcggggcctgagcgcggccccgcccccaagatgaggactgggcacggcgggcccgcgaggagcagcagccttccggctgcggagctgctccaggaagtctcgggctccggaggtccctctgccgcccctaacccctgcggcgcccagtgccgcgcagagccgcattcgccctcctgcaggggtgggcatttcctaagtcctctccagccccgtgtgcgtcggttagtgactctctttaaggtcgagaaaactttttacactgaaaaggtcaaacgcatttcctttatagcaacactcggtggtggtggaggggggaaggtcacgcacagtatgtgaggaagggagcggtcagtgactatcgtggagaaacctgacaaaccacccagccgtcaaggtgacctcgacaggggtaaatcatactgattgcatgcaccgcttgtggtcttcctcccaagaacacctaaccccactgtaatcatgaggaaaacatcacaaatcaattgaggcccttgccatatacatgaccagtactcctgaaaactagcaaggtcatcaaaaacaaggaaagtctaggacactgtcacagccaagaggaacccacggagatataaaaatgacttaagatgttaataataggaaaagcccgggtttatgagaattccctgtattcacactttttctgtaaatctaaagatgttctaaaaataaagcatatttttaaaaggtcacccaggtaatatatgcatatatggtaggtatacaatttttttttttaatgagtggtggctgacgcctgtaatctcagcactttggaaggccaagacaggaggatggcttgaagacagggcttccagactagcctgggcaacatagtgagacccagtctctaaaaaactaaaaataaaaaattcaaaaaatgagtaaaaattgagattcactcttccctccactcccccagcccactcttaggtgtgtccttccaaatatctctctttaacactgtgtgtgtgtgtttacataaacgtattgtttacaaaacgatattgcagtacttttctgcaacatgtttttttactcactatatcttggagggtctttccatacaagtgctcctgaacagacctggttcttcccatccactgcacactgcgcgccatcgtgcgcttcaccattcttcattacctagctccttactgaaggacatttaggttgttgcctatgtttggctgttacaaacaagctgctggttcgattttcctttttttttttttttttctgagacggagtctcgatctgtcgcccaggctggagtgcagtggcgcgatctcggctcactgcaacttccgcctcccgggttcaagcgattctcctgcctcggcctcctgagttgctggatctacagatgcccaccaccacgcccggctaattttcatttttagtagagacggggtttcactatgttggccaagctgttctcgaactcctaggctcaaatgatccgcccgcctcggcctcccaaagtgctgggattacaggcgtgagccaccgcgcccggcccgatttgcgttttaaagtcgctctgaacaataaaatccggaaggactggaggggaggctccgaccttctccctgtctgggcaggtgtgctggtgccgggcaggaacggtgccttgggacagcctggccccggcctcacaacgggccccgggcgctcagtcatattccgtggccgctccaacaccccctacccccaccagcaggcgcggctctctttcggggctggactgcattttttggacatgagtcggcgagtgagggtgaaactcaggccaaagtctccagagccgctcggagaaaacgctgcctggaacagaagagcagaggatcagaggcaccaccagagactctcagagtgggttattaccctggtgggggcgcctgctgcggcgtaggagatggcgggactgggggcgcgggtgtgaagcccccaagaaatctgtgtgaatttcctggggaggtaaggtctccaggcgctctctctgggcccggggattggtccgggaaggtctcctggcgcctacccagcccccactgcctggacgcctgcgcctgctctgccgccccacagcgaccgcgaaggccagcttcttcgaaaggcccatttttctccgtggctgagcgaatgctcctagaataccacgtttataataaatcatgtagggtggaattcctgctggatgtatacacctttctgcatcagagctcttcaaacccagaatggtgaatagctacccctgggcttacccttttataattttcaacaaacctgcgtttagccccggctaggtgccagcaagttgctagggactgaggaggctctgcagaggacccgagctgaggccctaatcctcaaggccaatggcaggggtcaccgcccaggcacccccagagaacgcggtgtgaaggaaaagacaccaaactcggtgttcaaatgtgtgggatctattctagttctgattctgacacttgcaagtcatgcatcctccgagcctcggctttctcacctataaaatcttcaacgtgacctataaaaatccataaaatcacccctgcttcattgtttcccagggctcatagaaacatcatacaaggtaagggaaggtgagtgcactgtaaaaaatggtgacgtgctatatagctctgagtagtatggtatataagcttcctttttaaaaattttaattttagggccagtgttgggattacgggtgtgagttaccgcacccggcctcttttgttgttttctaataagtatatatgactatcatttccctcaaaagtctgctttagctgaatatcacaagttttaatatgctatgcttttgttatcacttagttatacatatttggattttgttgttgttgttgttacagagtctcgctctgtcgtccaggctggactgcagtggcaagatctcagctcactgcaacctccacttcccgggttcaagagattttcctgcctcaacctcctgagtagctgggattacaggtgcacgccaccacacccggctaattttttaatttttagtagagatggggttttaccattttggccaggctggtctccaactcctgacctcaagtgatccaccggcctcagcctcccaaagtgtcgggattacaggcgtcagccactgtgcctggccaatattttgttttttatgttaggattgtatgcttaattcatggattatttagacgtatattttccattctttttttgttttcaaacttcagttttttaaaaaataataataatcatttggggaggggcccagtggctcaggcatgtaatcccagcactctgggaggccaaggtgggaagatcgcttgagatcaggagtttaagaccagcctgggcaacacagtgagagcccctctacaaaaaaaaatttaaataaaaataaatcaatcattttgtcattgatctctaactttaatgcttggagatgaggaaatgtgttcttttagaatttgttaatgcctcctttgtggcctcatatacagactttttttggctgtcccaatttttgtgaacgtctcttcactttttatgtggtttttttttctctatatctctccatctagcttgctaatcaggttatttagatcttttatctcctgggttttttttttttttctctcctgttcaatccattgatttctgaaagagtaggtttaacatttcccacttttattgtagtttgtcaatttctccctctaatttagtctgattttgctttatactattttttttggttttttgatttttgtttaaraggcagtgtctcaccatgtttcccaggctggagtacagtagctattcacaggtgtgattataactgcagcctcaaactcctgacctcaagccatcctcctgcctcagcctcctaggtggctggcattacagccatgtaccacctcacccggccagccttataattttgagagcaaattattaggcttatacaaattaatattgttttatccttttatgacttattcagttttattactttttgtataaatattgttatcctgagatagcatttgtctagtatatgttttatttctccttttttactctttctgtattgttacttaggtttatctcttggaaatgacatattgttttttacaagatttaaaaagttcatctgagtttctatttctaatttgtgagtttaaccagttcacattgataagaataacagaaatatttgggtttatttctgccatcatttgtgttatacatatacccttgaaatggatattcatctagaacacattgataaaatcctataaattattacaaactggaattcttccatgctgcttggtaaatagctgctcacctgagaccccacagtgcccccactcctgaccttcttctgatctggcaaaaaagggtcaatgcttctcacagggagaccctctaggaccttttctaagattctaattagtcagcaaacaggctacaccagtggcttaatatttcaaatatcatgtacaatatgctttcttgttgtttcttttttctctttccctgcattcgtttggattgtttgaattttctttaataggagggaggtacaagaattacagatgtatcaataaataccagcctactagtacctttaccagaatatccctcaaaagctcaaatttatcatgtcaagaaatgaactttttctctctaaacctgctttttctcctgggttctgtcccccgctggggtaccacagtctgacaagccattccagctagagatctgatagcagctggatttctgtctgccagaatcatttttcaaatgctgtcaatagagacggattcaccaggaaactgcaaggccccttgcttgcatgggctctttacaaggtcctggtgggaaaggctttaacaatgtttgacatggtaatatgtttttacagactttgcaaaagtaagcgattttaagtgcaaatgcagtcatgcgttgcttaatgacagggatgtgttctgagaaatgcatccttatgtgactttgttgttgtgcaaatgtcatcaggtgtacttacacagaactagatggtagagcctactatatgcctaggctgcctggtatagcctatcgcttctaggctacaagccattgcagcgtgttacagtacagaatatgctaggcaattgtaacacmatggcaagtacttgtctatctaaacatgcctaaccacagaaaaggtacgggaaaaatatggtatgataatctgaagggaccatcatggtccagctcatctggcttctgtcctggggaggcaggtggaggcagaacccccgctgctagccagggaagagctgctagtccttcctgcccctgccgcctgcctgtcatgtgcccctgcctgaccatcatggtcccacatggtctgtcattgactgaaatgtcctcgtgcagcacttgactgtagttaagatggctggctctttccactctgatttcccctccatctcattgctcctcgtgcccctcatgttggartggtcataggcatttttaggatctggcttgggatgagacagctttatgtagtttacagtcacttctgtgtgtggttgcattaccgctagtcttccagcgtaggaagggcttccaggaatattgttctgattcagccagcagggtcggagatgatatctaaataataaacatttccccarcacctgytttcagaaatatgtcagcagtggaggagaaacaagtatggagccagaaactagtctatggaaaactctctcccccatcatatgtatagagttttaagcatgtacggctgttcacatccatgcctatttaaaatggaagttctctcctgtagagaacatactcaatagtgcaatatatacacttataacacacacatataaatatgtcttttttgagcaatttcagtaaatgtattttgttagagctcctgtgtagtaaggcagaactagaggagtattgcaaatagaagtatgcttttgtgtgaaatgagatgtcttatgcatctcactgtatctgattgcatcttagcttgtctgatatattttattccaatgaagtccacaagttctagatgtctcgcctctcttgaaacatcgcattgcttgtgtcccctcgccctaccctgtggtctcctgtctgcacaccttcgctcgggccgtctccccagcctacaatggcattttctcctcttttcactttggctgctcctactcattctccaagattctgcttacttcttatcttttctatacattctctgacttcccttttcgcgatagtggactgagcacatgctgccatttctccacccaggcccatcctccaggaatgacagggaaggaaaaaaattagtgttctcaaaaagataacaggaaatgttcagagaatcagaagcactgacacgtttctgagaagccaaaagcagacaggatctgatttgatactgcagcccagctcatgagcagcagccaaggacatactataggtatactacagtatatacttcaataatgggaccagcaacaaggcattccacacccagaggtggtgaatgcctggaacaagactcgggaccaaagggctactgacagagggttaaacaagtatgcccgtggaaggagctagatgaattgaccctgaatatctccctcaaccccaccccggcagacaagatgaccaggacagcagtgtctgtctcctggtatgaactgtgttaggaatgaaagacaggacagggccccatatggctggcaaagccaaggaagagttaagtagcagccacatcccaaagaccagctgtgagagcacagctggtccacctgatagtgcctctgcctgttctgcactctccttgaaagcaacatggagcacaagctcatccagcgatttccagccctccctcacagcaagctaggccagcagatttcttgcagaaaatttcatgggtaaagatgagttcactgtcaaaaaatatcatttgagaagcaccaccatgaaagggagaygtccacctgaggaaacataataatcatagctaatatttactgagcatttatgtgtcaggcactattgcaaacataaagtgggactattttatgtttgcaatagacacatgaataccttacaagagtcctgccttataagagtttaaggtaggactatttttattgccattttacaaacgaagaaactaaagtgtcaagtgattaagtaacttcgtccaaagtcacatagcttaacatgagaagccacagattaacctcagctgtctggctccagatctggagattaaacagaacaaatagacaaccagtaatgtgctttgaagtaagtataatgaatattctcaaataagaaaggataggaaagaatcaattagggatgtcagagatgaacaatgtgttcattttgtattactgatcatgggaataaaaaacaaaaaatatattcatagtttaaacaaataaaaccacctgagtggatgagctatggagtggaatgtatgcagctaaagagctgattagtgaactgaaagattggaatcctccctgaaaacagcagacttggataaataaatagaaagtagaaaagaaaagataatagacatggaagatagttccagaagtgccaacatccacccactgggtgttaccaaaagagagactgctagagaaatggatgtccaatgaaacatggttgatttgcaacacaaatttatttcctctccctccccaaatcctaataaaatggcagtagaggaagagcacaggtaaaatccttcaaggacagtagggacaagagaggagaaaacagcaaccaagaatttggacacgtattttggagatagtatacaaaggagtggtaatttggcagaatggtgcatgttctcacttggatgccccagagggagaaaataagaagaagccaatagattctcgctacttcacccccagagtctaagaaaggatccacacttaaagaggtgaggtacagtgtgaggctgtaaacaggaaaacagaggcataagtggaaaccctaggccactttctctaccctcttcagccaggggtcccctccacccaggggagaaaggagagttatttgtcatataaattgaactgaagaaactgtagaatgggaggtctgagccacacaggtttgggaggaggaggtaaggacaagtttaaacacaaggattaagccacaatctacatattgaatgatgggaccccagtccacagagagtgagtaacctaatttacaatctataggccagagtccggaggattcatttgtggagaaaaggaatgtcccacacaaagggcctccaagtggctgatgtgtgctggtttcctcaatgaggagctgacctgatgctcagacactctgtggtgagctccgtcagtcaaaaagccccgctcccccacagagactgcagtcagtgttttgtgcctcacccccaaatgtgaatacacagctaggggtcaccacctgggaggaaggcctccagcaagggtgaccaaccttcctggcttgccagggaccgaggggtttcacaggacatgggacagtcagtactactatggtttgagtttgtccccaccaaaactcatgttgaactttgatccccaatgtggcattgttgggagatgtgcctggtgggaggtgtttgggtcacagagacagatccctcataaatgacttggtgcactccagctctctcatgagagtggatttagttctcgtgggaatgttcctgcaggaatgggttgttgtaaagccaggatgcccctcaggttttgtctcttcccacgtgtccactcaccattgagattttccaccatgttatgacatagcagaaaaagcctccaccagaatctgagcagatgctgacaccatactttttgaacttcccagcctgcagaactgtgagccaaataaacctcttttctttataaattccccagcctcaggtattcttctatagcaacacttaatggactaagacaagtactaaaataagaaaaatctctgccaaaccagaacgagttagtcgtcctattctagcatgtgcaagcaacgtccatttgcatggctttgcttaataatttgcaagcctgacctatattcacagctcacaggctgagaacacagtcatctgctgtaatttatataatcttgtgacaacacctgccaaaaatcatattaaatggcttgtgacttttcttgatcctcttccagcctttgacacaatatataaggaaaaatatgaactatcctgcttgtaatttccagtgggtaaaacaaagatgtgtcctggatccttttatttttaacttgaaaccatattgagatatcccattagtttgctttcctactgacccacrtaactgttaggcacagtgcaggctattgaccagtgtcagctacaaaggatcagtatctgtgccctgcaggttgttgtatacggtagggccccgccaccctgctctgcagtggaacacagaaggycaggcattctctcagatgcaaataacctgatgtgggtatcatggactaggagtagttttagtagacaatgaatactgctatctaatgacctccagaaacaagggctaccaaatctggatctgaaataatcattttaatggaaatmccccaaatttagggagatttataggaaataatgataaacaataaatcatttagttactttgggtgcacacttcacaaccagttttaacagggcttattgctcaaaattagatggaccgcaggtatgtgtgtgtgtgcacatgcctatgtgtatgtgtagccaaacaagatatatagttacatgcctgctttacatttttcctgggctatttttattgccattgcattttatgatgtggaattgtagggaatcagttacccattcattgccctgttagggaactctcaaatttcctcctgaagagaatcttggctctgcctgcagggactcccctgatgcactttggaggggatgtgggttggccttctcttcagaaacacgttgactttcctctttctttctctttctttctttctttctttctttctttctttctttctttctttctttctttctctccttctttctctctctgtctttttcttttttcttttctttccatgtgtgaggcaaagatttatttcttcatttcttgcatttgaagtactgttcgatgacatccttggcctgagactccttccatagtccttaactactgcacaactgcaaccaaccactttacagggtttcccctctctgtcaattgtacaggggccttcccattcccctagtttcttgtygtcgtcacccttgattaggttgatttggtgttcagcacaatgggccttcaccaacttgacatacataggcttatcacagttggatgcaagcacacaaaggtgggcttggcgcttggcggcagcagggaaagagaggaatgttctttctggtgcatgagttttcatacgaggatctatgtcaagccacagctcagtttgttattaaggtatatggctcgtctcttaattggcaatggaaagttccagcattccaagtagaatctcaacctcagagccacactatacttttcaaaagcttggctaagagaaatgctactcgtggataagtgcctggagagtgcatgctgtattcaatcctctggacaaatattcttaaatctattaccaatttagccagagccatgaacctgtgagcttgactgcttcccactgactccttgaagaatgacttttaatgctttgtgctttggttgagggacatgatacacattatacaaagcatggttttgaacactgatccccaactgttgcagggatattgttgaggatgtggcttctctatgaagcctctctatgaacacctagaggagaatatgctctttggtcctcagtatctggaatagttgtgctttttcctagcaacctgcaaatattctggatctcataatgtgtcatatatccctctccccatcagcagctagggtcttagagccaaatcagtgaacaaccatraggccacacaaagaggactaatcacagttggtgaggtagaatcagagcctggggtataggcaagacaccgtagtggctcgatctgccatgggcagatccagatgttgagtgtcagggaaccccctccctaggggagggtttgcaatgaacatggatcctccaaaccaccctaatgcaggtgcctgtaggccatcactgcctctgagggttagggttggggttagggttaggtacgttagggtgatgacatggcacacctggtcctatacctatacccttctctccagctctctatcctttactaacacacatggatggcattgttgggagcagcaggaactgcatgtgagtcaaatgccatgtgctttccattgtttcagccatcacagtccccaggggtaggtacattcacaccccaaagttcacttctaytatgtcagccagggaagcagtatactagacattagcagtgtgggctctggagtcagggggccagtttcaaatcctgcctccatctctcactaactgagaggccttggttgagacatttagtctctttatctataaaacaagaataaaacactgcttacaaacactgctgtggcaggaaacacattacataaccactgtgaaccatttagaacagagcttaacccagcaataaatgctacaaataaatatattgtggtggtgaagactttggtttttggaattgaatacacctgggttcaaattccatctcttccaggatcaactgtgaaaacttgggcaagtttccaacttcattaatcctcaccttttccaactgcaaaatggggcaaatagtgcatacaaaactcatggtccactgcttgagatgaagtgtgtgctccataagtgatagctttagccacttgttattttactgctataccagagagaatgcagctcaagctaaacaggcaagagggaatgtctaaggtgattctgcagagctgccaaccctatgcrgcaactgacctccatctccaacacatggtagtaacagctacttaaatggattgtgttctatgttctaggcaatgacctgagagtttttatatttttgttttacctgggactaggtatggtggatctcaatattttgggggccacaagtactgtatcagactggttccaatcaagggatagaaaccacaagtggttcatgcaatggaagtttaatataaagaattattcagctatgataaaagagcaactatatgatgcaaagagaaccttatagggctactctccctacaggtggagaagagtacccaagaaggacaagcttggaatggggccccctccccaggctggagatcagacattgtyggagaaggtatcattgcagccccctacatagcagagagatttgctgrgttgcatrgtctagagctggttgcaattattggacaagcaggaaamaaacctccacagcccatgcgagccacactgctgggttgagtgtatgagcatgtagaatgattgggtctccagtgcggacagaaggcatggatcgcgtggtgcctgtgttgggaggatactaagagggcgatcaccatgccaggacaagactagttgcctgggatcttctgggcacgtgactggagcagagtaccactggatctcctcacaccagccagacccaggaagagaagctcctttcacctgcactgttctctcagcaccctccacggagaaagcttcatgttatgcttagtgtacaggagaaatgctcatgggaatcctgtccattatcacagagcaggtattagtgggtgaatatggagctgagaagtaataagttgtaactggcatagatatcatggggatatttgaagaacgctgtgaacacatatgcatgggtccatgtattcatgagtgtgcacatatgtgtaattattcatacaattcatggtggatactacttcgagggtgttcacagaccccaggcagagagcgcctggagggaaaattatccaaggcaggcccattcatagttccaggacagccagaagaaagcctccgttaagcaccagaagtctccggggcaggtggggccaggcagcatgaaagaattggccgcaagagttccaaaccctgtcccaattatggagggtgacttttctttgtcctccttctccattcccttccatattgctcatgcatccaaagggagacctgaagactctctagcagggcaaggccattttcttttggcatttttctctccccagagtctagctgattatcagcttagacacacagcaggctatgtgctgtgaacaacaggcatcctgggttattttacaaactcatggatagtcattttgaaaccacctttgcaaaattgtgactgaaacagtgaaagagagctaacttaaccagctccatcttgtttctaacctccaagctgtctttgttcattcctgggcgtaggctgaactaactttgggagaaacttagtttgtagttatagtttaaacaaagatggtaacagccctttcccaatgcagacctccttcttgtctggggactagactaacattagccacaggattagaaattacggtttaggagtcacgcagctggaggctacaagattctgaccctccctaaactgcttctaagatcagtgcttgagacatgttgcagaccccgcacttgctggatcagctgacgccacacagatggataaactgcctcgtctgatcttgtggcccccacccgggaactgacgaagcgcaagaagacagcttcgactccctgtgatttcatccctgaccaaccagcactcctggctcactggcttccccctaccaagttatgcttaaaaattctgctccccgaattctcgaggagactgatttgagtgataataaaactccagtctcccgcacagccggctctgcgtgaattactcttcttctattgcaattcccctgtcttgatcaatcggctctgtcgaggcagcaggcaaggtgaaccccttgggtggttacaattttgctccttcaacaaaactccaagttcctctttgatagtggcaaacaccagttgccgtattttctactgttactggcacaaaaagtccctgttcacagccctgctggacgtaagggcccaggtgctaaaaagttaccccccacctcaccccagcctcatcagcggggctggatactggcagtgggcagaggaatgaaatttatttatttatttttcttatttatttttgagatggagttttgctcttgtcgcccaggctgaagtacagtggcaccatctcagctcactgcaacctccgcctcctgggttcaagcaattctcctacctcagcctcctgagtagctcggattgcaggctcctgccaccacacccagctaatttttgtatttttagtagagatgaagtttcaccatgtaggtcaggctggtcttgaactcctgacctcaggtgacccacccgcctcggcctcccaaagtgctgggattacaggcaggagccaccaagcccggtcttttttttttttttttaacatgtcatgtttttattgtactgtactgtactgtactgtactgtactgtactgtattgtattgtattgtattgtattatattgtattgtattttgaaacagagtctcactctgttgcccaggctggagtgcagtggagtgatcttggctcactgaaacccccgcctcccagagtcaagcaattctcctgcctcaggctcccgagtagctaggactacaggccatgcccagctaatttttgtatttttagtagagatggggtttcaccatgttggccaggctagtctcaaactcctgacctcaggtgacccacctgcctcggcctcgcaaagtgctgggattacaggcttgagtcactgcacctggcgaaatttatttcgttagattctcaaaaaatgtatgacacatgagtgggactttctgcctccatcccacatctgccagagtaaggagagagtccaggagctaggagtattcagggtaagactccccctccctcggccacattgtcattgtcagagtgaagaaggcccctggaactccatgtgttcctggcaatccctccttcctcccccaccatagacaccccccaacatcgttattttccctgagagcatcaggacccgtcttcttagggcctttatctcgatatgcatcagtcactccaagaagctcaggcccctaagtcatcccttcccttatctcctaggcctgagtccacatatagctctatgtggctctctccaccactctctagccttcatttttccccttagcacatacatcacctgacatacaatgcatttgactgacttatttcttagtctcccctgattgagggtggggtgttctgtctctcttgtttgaccactatacccccaggatctacaaggtgtctggcatgtagcagggacttaataaacgtgggttgaggaatgaatgaacaaacaaaagcatctttagtgtcctctgttctctggacctcaggctccactgcagcctagttagtcttgatcttcaggcctaaacaaggcccaaaccacaggcctgcttccatactggcttatcccacctatctagcagtttcccaggctgggctttggagacaggtgggcttggatttgaatcctggctctgcattatgaggcttttaacaccccattttccttatgtgtaaaaccagaaggatgcctaactcccaagaatatggtaagtgaattaaatggaaggtgtgtgtaaagagctcagcacaactcctccaacacagtaagtgcacaataaatgtggccatgagggaggcaatagggcagggtgaggaggagcaacaggcttcctctggtgacatctcctacgagttggtagaggaaacctggcgcactgtgcacagtggattctggtcaggccctgagctcaaggggaaagaatcccatgattgattactgatgtctgtcatgcacgtgcgggccgggtgacagggtagggtgaaagagagtagcagccccaagccatacgtttgccatcctgatctagaatttccaccattgctccttttcttgtgcatgtcttgactgtttttaagggtgagagctcccctgttttcaacagctcagttctgactccgtaatttctcacccaccccagccctgaatggtgcagtctgctcctctgagccccaacactcttttctctgctgttcctttattatttaccatgtagcattttggtttttaaaaatctttctggcctcctttccacacatataggcagaacatgccttcagggtagatttcaccttagagaactaacgcaggaaagtgcacagagttgcaaatcagaaaatctgaacttgttgtgaatttgagctcatcgctttgccttttggagtctgtttccccagctgaaaagcagagccctaagatggctttgcagcccatggtatcccagggctgtggtgagaatcagcatttcactgggctctgtggagaggaaaagctttcatgtttggccagtcgcggtggctcacgcctgtaatcccagcactttgggaggccaaggtgggcggatcacctgagcgtcaggagttcaagaccagcctggccaacatggtaaaacctcatctgtactaaaaatacaaaaattagccaggcatggtggcgggcgcctgtaatctcagctaagcaggaggctgaggcagaagaatcgcttgaactcacgaggcagaggttgcagtgagctgagattgcgccagtctactccagcctgggtgacagagtgagactccatctcaaaaaaaaaaaaaaaaaaagcgttcatattctcattgcatgtccatgtaccccctcctgccaccaggtctcaaactggagcttctgcagatgctcaagatgctttttcagcaagggggtagtaggatgaggcttccaatgggagcagtgggcatttggcaggcattgacaacaagcagagttcggagaatggaaaagaaaaaccaacttttctcgccttaaaccggcaattgcaaagttgagagctaggaaagctaaatgctgccacctgccggtcattttctacgttagcagcatcaaagtaaacagttttataaagctcttgtttattttttattatattttattttattattattattatactttaagttttagggtacatgtgcacattgtgcaggttagttacatatgtatacatgtgccatgttggtgtgctgcacccattaactcgtcatttagcattaggtatatctcctaatgctatccctcctccctccccccaccccacaacagtccccagagtgtgatgttcccctttctgtgtccatgtgttctcattgttcaattcccacctatgagtgagaacatgcggtgttttgttttttgtccttgcgatagtttactaagaatgatgatttccaatttcatccatgtccctacaaaggacatgaactcatcattttttatggctgcatagtattccatggtgtatatgtgccacattttcttaatccagtctgtcattgttggacattcgggttggttccaagtctttgctattgtgaataatgccgcaataaacatacgtgtgcatgtgtctttatagcagcatgatttatagtcctttgggtatatacccagtaatgggatggctgggtcaaatggtatttctagttctagatccctgaggaatcgccacactgacttccacaatggttgaactagtttacagtcccaccaacagtgtaaaagtgttcctatttctccacatcctctccagcacctgttgtttcctgactttttaatgatcgccattctaactggtgtgagatggtatctcattgcggttttgatttgcatttctctgatggccagtgatgatgagcattttttcatgtgttttttgcctgcataaatgtcttcttttgagaagtgtctgttcatatccttcgcccactttttgatggggttgtttgtttttttcttgtaaatttgtttgaattcattgtagattctggatattagccctttgtcagatgagtaggttgcgaaaattttctcccattttgtaggttgtctgttcactctgatggtagtttcttttgctgtgcagaagctctttagtttaataagatcccatttgtcaattttggcttttgttgccattgcttttggtgttttagacatgaagtccttgcccatgcctatgtcctgaatggtaatgcctaggttttcttctagggtttttatggttttaggtctaacgtttaagtctttaatccatcttgaattaatttttgtataaggtctaaggaagggatccagtttcagctttctacatatggctagccagttttcccagcaccatttattaaatagggaatcctttccccattgcttgtttttctcaggtttgtcaaagatcagatagttttagatatgtggcattatttctgagggctctgttctgttccattgatctatatctctattttggtaccagtaccatgctgttttgcttactgtagccttgtagtatagtttgaagtcaggtggcatgacacctccagctttgttcttttggcttaggattgacctggcgatgcaggctcttttttggttccatatgaactttaaagtagttttttccaattctgtgaagaaagtcattggtagcttgatggggatcgcattgaatctataaattaccttgggcagtatggccattttcacgatattgattcttcctacccatgagcatggaatgttcttccatttgtttgtatcctcttttatttcattggaagctcttgtttaaattcagtaaagacccagagggaggaggtggcatttactgagcacctcctgtttataaggaactgtcttcaagtgtgccatgggtacagacataaattagcaccggatattgctgataaagagagcacagattccagagagccaaggctgcctctcaatgactacatgccttaggttcacccttcaacctctctgaacttcagttttctcaacaggtagatggaccagggtgccctctaaggatcccaaggaagggccttaaaagatgaagaggatgttgacagacagttactgagaaggaaaagaggagggcatcctatgcagacaaagaggagggtttcaagggaagtcctgacatgtgtctccttccctcgtccccttgtttgtgaagccgaagggtaagttcctgatctttaagcgcctgtccacctgtgacttctggtcaagggaagggacagaggagttggaaagacttcttgaaggaagaatgaaacaaacacctgtgttgtaggatccaccaactttaagaaatggaaccatgtaattacctttaaagtattctataatttatttacacattattgtatattttgtttacaacattctactgttgatggacatttaaattatttcccattgtctccaggtttatttgtttttctggcttggacatccatatgcatacattttttcttcttcttcttcttcttcttcttcttcttcttcttcttcttcttcttcttcttcttcttttcttttcttctccttctccttctccttctccttctccttcttcttcttcttcttcttcttttcttcttttcttcttccttctccttctccttctccttctccttcttcttcttcctctttcttttttgtttttgagacagagtctgtctcaaaagaccctgagactgtcacccaggcaggggtgcagtggcatgatcacagctccttgcagctttgaccttctgggttcaatcgctcctcccctctcagcctcctgagtagctgagactgcaagcatgtaccacc

SEQ ID NO: 6989 - DNA, 27889 bp, Homo sapiens
  misc_feature (1)...(27889): n = A,T,C or G, or insertion/deletion polymorphism (see Tables 1-2)
caagagaaagcaagttgaggaactgggccagttcttattattgcctctcagctctaaacccacactttgtcctgccttgtgatgctggaactgtactctgattctccgtttctccattgccaactgcctctgtcattagagggtgccgagagactttgtaagactggaagaggaagaagaaaggacttttcttcttccaatgcttgtttatccctatggtggctgtgtagaatcctggcagtgttcaccacagcatattcctttggtaaccgtgccctcttctcagagacctgaatctcagcctggtgtgtgttgtgtgtaggtttgggggcagggaggtgctctgctgagtttccaagttccttgttcatttttctctcagtcttggggctgagggtgggaatagtggctgctctctgcagttcttacatctgtacacattagagttttcaaatagttgagcagtttttacctacttaacacaagagaataggaactactggggagccaggcagtagaagagaggaaatttctccttttagaagtattccagctaataaaggaaaaagggttttagaattagaatatgagtgttttgcaacccctttggtggtaccacaaaggcaactgagtggaagaatatgatgccatctgttaagtagttttgcctctttctctctgtcccccaaaggaaaaagtattggtcttctaaagattcacttactaatttacaggaagtacagaaaagaggaacatgttaaactgcattctaggaaaacagcaaaatccagattgtgggaaactctggcagggcaaataatgaagtttcattaagaaataaatgttaagaaaaaatgaagggagaacctgtaggtgaaaagaaatgtaaagtaagactgatcagttgccatgtatgtaccttatttagatcctgattcaaacaaaaaacttttgacacgtgtgagactgttgggaaatgcgagccagattagatatttgataataataaggaaacatttttaacttttttggtgtcgttacattttaaaagaagattttatccttttagagatatatgtggtactatttatagattcaaaataatagggggctgggtgggaggggctgcattgtacagatgaaacaagattgaccgtgaatggttcactgttgaaactctgtgatgggtacttgagaatttattatattattatgcctatattgcagatatttgaagtttcccaataaaatgtttaaaatagtggcagggggcaagaagaaaaggaccactcaatttaaagaaaaaataattttaaaagacacagagaataggaagagggaaaaattggtgaggcaagagaaaggcagcaggtggggccatatcaagagtgattcttcagcaggtgaggcgtgatagccaccgcaaaagtagagggttggctgtaagatagggggcacagatggctataatgcaagggaaggcagactctcttaagctaagtcacaagatccttaaaggtatgattgatgttttacaccagtttgtatggattctgtaccttggactggaaacttataagtgcttctgataaccctcccccaccttttttttttttttttttctggagagaagatagaacataaaaggggataaagaataggagagggaaataaccaatattgagcccttgctatataatagacagcacgctaagcttaactactttatctcagtcttcaccacagttatatgaggtagccatcccattttatgaagaaggaaatggaggctcagggagattaaaatgcacagctagtaaacagtgaagctgggagtcaacttgaatttttctgcctctgaagtctatttctcccctactatatatcctgcagttcagaatgagaatttaattttaaatttcaacatcatttcaggtgaaggagaaaacattctattaataggattcctgtattaactttgggtagatatcagagaagaatagccttcttttctaactacatcaaaatgaatttttgtgaggttgaggattttaaaatgtacaataaatagatacaatcacatactacattaagatttttcattaatattttacattaaattttctgtgttttttccccagatattgaaatacttcatgagaaatttattaacattgaatcaaaggatcacaggttacagaaagttaaagtgattttgctgctacctcgttgttcaggactgggtgttagtaatccagtagaatttattttaaatgaacatgaaggtacttgttttaatttctaaattattgaaattagttgacagtttaaaatataaaattatttaaaatcattaaaatagcatatcaaatacatctgattaataaataatagcaaccacatataaagtacttactatgtataaagtcctttacctctgttacctcatttaatccttacaccaatccaatagaccagggtgatattcaaaatatttaataattggaataatgtaggcaatcagaaaagatgctggccagtatgctattctgaatataccagagctcttgatgtaagtgttaaaatttaccggcattctatagatgaaaatactgagactcaaagattgattcatttttctcaggtcaagcaactagagacagagctaagattcaaatttagatctgtttgactctagagcctatgttctaaacatgattctaattaaatcattatcagattatttcaaactcaaaggtgtcttaatcgctaggatgtatgctttatgaaatgaatgtctcagactaaatatagaagcattgacatttaattttattggcttttaaatacatttaaaataataattatttaacattaacatttattgagcacttagatgtaaggccctgggcgtggcacttttcttggattatttcagtaagtcttcacaagaattctgtgaagtagtaacttgttaacttctattttacaaatgaggaatctgaggctcagagaagttaatgaagtctcctaggatcattgggctagtaagaggcagagcttggattcaaatacaaccagtctgactctgagactggcacttttaatgactctcttaatcacattatattgctccaaattaaatgaaacttatgcttatcccttgcttatattgaaaggcatattaaattgaaaggttaattagaatattagaaaaagaagacaccccacaaatgtacagaatatagtaactgttttctgtttctagcaaggacagaagaggaaaagaaatggagggaaaagagctaatatttattaaacacaataatgtcccaggcaatattctaggtagtgttcacatactgtcacttagtattcacaataactttttgaggttagtgttcttctaattgtagaggaaaaaaaccaagactcagaaaaattaaaccagttgcttatggtcatgtagctagtaagtagggaagctgggattcaaattcaggtgggttagcacattttccttccactaaacgacactatctttaactgggtttacactgtaccacatggaattttgacttgctatagaaaatttctttccagagagacttcagccaaagaataaccaattcagatggtagaatggtaggtaggctgagaaaatttctagatgaactttaagaaataatcaaagaacaattagtagacactgaaagaaaagggggaaggaaaaaagggggaagaaatagcagctataataagcatagcagtcaggagaactagagctcagaactgtgagactctggccttatcctgggccattttgaggtggaaatccagaaaaaaaataaaccacagaataaaaataaactaaaggctagaggagaaaggcccagaggaaaatacaaataaggaaagtggggaaaggaaaacatttcctaggtactggtaatgttttgaaagccttgatgaggagatgataggataagctaagaagttgtcgtatactggccgggagcggtggctcacgcctgtaatcccagcactttgggaggccgaggagggcggatcacgaggtcaggagctcgagaccatcctggctaacacggtgaaaccccgtctctactaaaaatacaaaaaattagccgggcgaggtggcgggcgcctgtagtcccagctactcgggaggctgaggcaggagaatggcttgaaccccggggggcggagcctgcagtgagccgagatcgcgccactgcactccagcctgggcgacagcaagactccatctcatttaaaaaaaaaaaagttgtcgtatcctgaagtaagcgggcttttgaaggaacctgtactctgaggagctaaaagcttgagcaaataaggagctgccgacctagtgactctggtgggaacgtggaacgttagccagaaacttagtgggggtgaatccgaaagattattttattaaacttagatacaaggtagaatggaacaataaggaattagttttaaaaacattttaacatcgaaaaatattagaaccattgagaaatatatgaagttggtccttgctaacgacttggaattattttaagatagaattaaagaaatagataatacgactttggagtataataatttgtaatagtcctttaacaagtaatggatagttttagaacagagaaaaaaaatgtgaaatgtaggccaggcacagtggctcacacctgtaatcccaccactttgggaggctgaggtgggtagatcggttgaggccaggagttcgagttcagcctgaccaacatagtgaaacccagtctctactaaaaatacaaaaattagccgggcatcatggtgaacacctgtagtcccagctattcaggaggctgaggcatgagaattgcttgaacccaggaggcagaggttgcagtgagccgagatggtgccactgcactccagcctggatgacagagtgagatcctgtctcaaaaaaacagcaacaacaacaacaataacaaaaaacaaaaaacaaaacctcatgaaatgtaaaactaaattgggaagaaatggagtttaattaacctttagtgatagtactggaatgggcaacagccacatacatggtataaataattggctgtcatgctctagtgagttctagagaggcagtataatacagagtttaaaaatttgggtcctctggttagatttctgagttagaatcctggctgtccacttagtagctatataaccttagacaagttgtttaatgtatgtttaaacaattatctcaatgttagaagggctagtaattcttcaagaggtcgttaaaataatctacataaagtagcattcagtatatcttcattaatattgtcaatacatatatttaaattatttttcaaaaattaaaaaatgtaagacattatttcttaatctgttatgaagacataacatttgcttttctgaattttttcttccaaagtttcttttggaaagttagtattttaaaccatatccttgtgtgttcccagatctgactatagcccattcgtttttatcttggaaaataaatcttattttctctatccagtattagtctcgagactgacggcattttctcttctgtgtctaaatgacttatatgactacttggatgactatctcatagcaacttggagaaaaacaatattaaatattttcaatattgtttttgaaaagcaatattaaaatgaaacagaattaactttattgttctaatttttaagtcaacattttaatatctatttagttttaatagatattttccatgaaacacttttattggtaggcaaaatgattgaaaaattatatgatgataacaatatgtaaaaagtttttaatggtgctatatttaaaagcatttctttttaaaattcagatacagaattccttaaagatcactctcaaggaggcatctcagtggacaaacttcacgttcttgctcaacagcagtatgaacagctaacacatgcaatgaaatgtaaggttgtcataggcaccatcttgttaaaataaggtgtacattttagaaatattagtctttcacgatctattataaycaagcaatgaagtgtgagccatgagcacattttccagaacattcagtcttactgccttcaaataacaaaatatttatctttaccaatttaatctgtttttagaatatatgctttactgtaattttaaacaggttagcaakcataatttaccaattttgtaatgccgaagtgaaataattatgtatatttgtaattgtagtttcagctttcctgtttcttctcttagatttcttactcgatataatttttctgttgtcattgtgcctacccttaayaactcttctacagtccaaattttagtcaaactcttatttctcttagtgctaagtagagaacagagaggtgcaatcgcagagaaagcctagatctcttgatttgaagtttgagtaacaaggcggcactttgagtgatttatatcattgctttaatcacttcatttagattttgagtaccactgcctttccacatatgcacacaggaatctagatgtctctgagaaattaataagcttttattaattccgtatatatttataaagtgctcactttgggtcaggtattaagctgtatgtaaggtgtatcagtgttagcaaatcctgacctgcaaaggcttaaagataaatggatatgggcatagaccccatctatattataggtacagatctgagtatagatcattcagtaaataaatatataaacacacatgaggtagaaataaggcctatacaaatcacagaggtcacagcttgccaggagtaaaagcaaaaaataagtaaatagaaagcacagaggaggctttttcttttagttcatattgctaataaatgttcatttgaacatgatatggatatgatctaggaaataagttgattggaagatcaggaatttggtaaataataagccttttacttgaagcattttaattaaattttaattggatatttcaagcttaaaaaagcttcagaaagaatctgaaaagcaaagggattttaatgacataaactcttttatgatgccaaataaacataaaatttggcaactcttgagattatggcagtttatgttactggaagacatactgtaagtcaaaacaagttgtatttagtttcccataaggaaatrctgtcttaggtagtcaggtgtgtaatcaggggtttgactccagattttgatagaaccgattaaaagcccgatttgaagtcaaccacataaaagataattacgtaatctgtcatgggattagagtaaaaacaaatacaaattaaaaataccaaaaggtaactgtgctgagtccttgttagttgtgaaaataatttttaaatatttgagcacttattgtttacttattatgtgccwggcacctgctgcttactttatatgtatcattttatttagtaatcaccaaattttcttccttagcttccatgctatctttgaccagagcaacaagggggctcrggcacccctaattcccttaccctctaagactcacagccttgccactattctctactttaaaatcgtaagtgggagccaggcgyggtggctcatgcctgtaatcccagtactttgggaggccaaacctggcggatcacttgaggccagcctggacaacatggtgaaaccccatctctactaaaaatacaaaaattagccrggcgtgttggcgcatgcctgtagtcccagctacttgggaggctgagatatgagaatcacttgttatagtgagctgagattgcaccactgcactccagcctgggtgacagagtgagactctgtctctaaataaataaataaataagtgggctaggcatggtggctcatgtctgaaatcccagtgcttgggaggtcaacatggtaggatcacttcaggccaggagtttgagaccaacctggacaacatagtgagaccctgcctctacaaaaaataaaaaaagttatctaggcatgggggcatgcaggctactcgggagactgaagtgggaggattgcttgagcccaggagttggaggctgcagtgagccatgatcacctcactgcactccagcctaggcaacagagcaagaccccatctattaaaaaaatacaaataaatcaagttataagaaacatgtctccttatatcctttacacctattaatgacaattaactcaagaggccccgactccaggtcattcctcatctcctatactctggtctccataactctcttcatatccctttgtccacatctctcactctgtgctctctagaatttatagttcctcatcaacaaaaattccctatattttaacttctttgaatgtcctccccctttgtaaaaaattcctgtaacttgcctttcccctgggaacagtgtttcctcagtctttcctctccttcttttttgagctattgccatcacacgttcactcctgccactaaactgaaacggtcctgtgaagatcgccagtgatccccatgctgttgtgtcagttgccagccctggtctacctaggtctgtctgtggcagttgacagaagtggtcgcttcctctcccttcacacacttccatcacttgtcttctagggcaccaccttccaggccttctctctggcctccccttctctgtctcccttactgggtcctctctgtctcaacaccctgtttaacatgggagtgtgccacagtccatgccttggatcttttttctctgcctatacttatcccttggtgattgtatctagtcttatggttttaaacacctctatgtgactcccaaatctgtatttccagtctaaacttcctcttgaaactctaagcttatatttccagctgccttcttgacatctccacttagggactcatagtcatctcaaagctaacatgtctaaggtggaagctctgatcttcctcccgccatacttgttcctcccacagtactgccatttcagttaatgatagttgtagccttccacccgcttaggctaaaaacgttagcattatccatgatttctctttcatacccacagccagtctgtcagtgtatgaggtaggttctacattcaacttatatccagaatatatccagctacctccaccactaccacggtgtccaaaccaccatcacctcacacttgaattactgtaatgacctcctaatttctctgccagcctctgcccctgccctctgcactctattcttaacacagcaattggagtgatcttgttaaaacccatcataacccaagtaaaaacctaagcccttccggtggcccacaagtccctgtactatctggggctsagaccatgctttctgacttcgacttactactctctcttcattccctctgctctgatcaaaccggccccttcactttcctggaacataccagcaccatgttgacttcaggcctttacactggctgttcctttaccttagaatgcttttctctaaatagctctgtggctggttccttatctccatctagtctacccacagtttgccatctcaacaatgctttctctcactgctctatttcacactatttctcctggaactctctatccctcacccggctctgcttttctccatagcattgatcacttaacagtactatatagttttcctatttatctctgtcttactgtctttctcctctactagaaagttagctccacaggggcaaggatttttgtttgtgttattgtatcccaaagcctagaacagtgcctgtctggcaggtggtaggtgctcaataagtatgaatcaatgagtgaattgcaggtggtagtattacctcattttacggatgaaaaatttaagactttaagtaatttgcccaggttcatacagcagtaagtgacagaactgggattcacctctaagtctgtctgtttctagagtcctttaaactatttaggcaatatcgcttgtagaagaatgggcagaagtatcaagttcatggtaacctgcagtatttatttatttgtgtttataactaagttggcctcattttttgttgaattttcaatttccatacaatccagttagagtgactttacttactggccacagactaaattactaagacaagcttttactttaaaggggagccattcaagcatctggggaaattattctcatcaaaaccatgtggtattagtatcaaatagatgtttggaaacatagcacatttgtataggattgttaatatagttgttacagtcattgcatcttcttctaatatagttactaaagctcaagcagttgtttactgcacatgttcagtttttccagaagaaaatgaagctgttgttaagaaagcactggaatttcaagaccttgggaataaaggacaaccttacaggtaagaaaaggaaggattcttctaaacaactcaaacaaatattttttaaaaggaaaaatattattttctaagttgtataaagacattctactttttaaaattatactttagtatgataaaattgcctgacttcttacaaatttaaccaagattccatagggcctttttctttttkttttttttttttttttttttttaaagatggaatcttgctctgtcatccaggctggagtgcagtggcaccatttcgattcactacaaactccgcctcccaggttcaagcaattctcctgcctcagcctcccaagtggctgggattacaggcaagtgccaccacgccaggctaatttttgtatttttagtagagatgggggttttaccgtattggccaggctgctctcaaactcctgacctcaggtaatccacctgccttggcctcccaaagtgctgggatttaagaaatgatatggctggcctggtgcggtggctcacacctgtaatcccagcactttgggaggctgaggtgggcacatacctttacctcaggtgttcaagaccagcctgggcaacatggtgaaaccctgtgtgtttaaaaaaaaaaaaaaagaatatgatatggcaaacgtggaggaatattgattttattttaggcaagccatgattaatgattaatctatagcataaaagacacaagtaatataaagacagaatccataattctatattggtttgagatttgagctcaaattggagagtacatatattgaagatgtttataactacttgttggggatgctgccaaaagaaattatgcattacctagggaattataccaagaatcacttcttagtaccccaaagtggtagaatttagagttgaaagcaatattacatgtcatttaatctcatcacctacctgttgcttgtatttctttttaatatcccagaaatattcagctcattttggacttcagctgtcatgataaaatttgcaaatttgtaattttttttgttccccattgtaaaaatttcacattacagaagtactaacttaaaacaaaagcctttttccaaatggcatcctcttatatataattgttcttaacaatttgatttatagtcttctagatttttccaccaccatagaatgtgcatattttaagatttaatcgatattgtcaaattactaccaagacattcactcttataaacctgttttcccacagcttcagaaatgctgagcttcatcagacttaaaatctttactcacytgtggggtgaaaacatgagatgtcgttactgattgtattttcatttctctattactgaggttgagtatgcttcctgtttactgactggtcagtgtactgtggagtggttaaaagtagggattctagagcagtggttgtcaaacatttttgctcaaataatccttaaacttttttttttttttgagtcagagtcttgctctgttgcccaggctagagtgcagtagcacgatctcagctcactgcaacttccacctcctgggttcaagcagttctcttgcctcagcctcccaagtagctgggattacagacamgtggtacttcacctggctaatttttgtatttttaatagagacggagtttcaccatcttggccaggctggtcttgaactcctgacctcaagtgatccacctgccttggcatcccaaagtgctgggattacaggcgtgagccaccatgcccggcccctaaacatttttgaataactatatatcttgttctttattttagacttaatgtctaacattttcatcgtaagtttaaatagctgcaaaatatattatttctggaatattatattacatatgtgttttaaacatatttctgttaaatgtttggacctgcagatttatttatcttatttgatttatggaaaaatgctaaatttgttacctattttatataaccagttctcattgtcaaaaccaaatttaccttgtcagaaaaggtctgactttattctttaattcaaataatcattaatattcttttgtgattttcttctaaatttgaattctaagatagatatatagaaataaggaagggaaagggagggagggaagaagtgagtgtaggaggagaggaagggagaaagggagggaggaaagaagggagggagggagggagggaggaaggtttgctgagtttgataccctctttaagatttcttacctaaactcttgcattgccatgggagaagagggccacattcctgagttgtccctttgttggcatcctggagatgttaacatcccaggacaatggactataacaaggtagtgacagttataccttttttgttaagtgggagaagggtattgtgaatggtgaagtggctgtaaaaggtggctgtgaaatacagttaatgatattacctacatcattagatccttgtggagattgaatatattaacacacgagcagtatctggcatataataaatgttcaataattttaaattgttatagttgttattatttatttataaatttcatgttcatgtactttcccactgttttcaactggattattctttttcttcttttcacatgtcttattatatattaggaagagttgctgttttcatatgaattacagatatttttcagattgtttatctttttatttttaaataaatacttgaattaaaaatttgctttataggttgagcatggtggctcacgcctgtaatcccagcactttgggaggctgaggtgggtgggccatttgagctcaggttttcaagaccagcctgggcaatgtggtgaaaccycatctctacaaaaaaatacaaaaattagccacgtgtggtggtggtgtactcctgtagtcccagctattcgggaggctgaggtgggaagattgcttgagcccaagaggttaaggctgtagtgagccgagatcgcatcactgcactccagcccgggtgacagagggagactctgtctcaaaaaaaaaaaaaaaaaaaagaaaagaaaagaaaaagtaatcgctttacagcaatttctgtgkagacatttgtatcaatgttttccttatggattctacattttgtgttatgtgaattcctagcttatgaatgctttgatcagttttcttatagtactttcataatttcatcttttttatatttaaataattgagttttctgctgtttattttggtaagagagtcaagtatggatcaaggtttattttttccccaaataatctttccttggcccccgttcccctttggtttaaaatgccatcttttaaaattacgttttaagcccatatatactgtgtggatctgtaattctattccattgacgtttggctctttctatactaatatgacaatgctataaccactgtagttttgagtgggtttcttctcaaattttatatttttttttgttacataaaccccacccacaatccaaagatgcataatgaaatggttaacaatttccttcctacatcttgccacttctagtcctaaaatatcccattaaagggatgaagtagggttctggaggtcccttgatgagctaggtccctttttattatgtgatggtctggagggacmcttggagagctggggtagcaagtaggagtaagcccagaaattttgatatttttactgctgatayagccacaccagcatgtaccagctgaatagcaactacatggatgtgtatgtttgtttgtttgtttttttgtatcacaccataaacttttttattgaaacctacagtaggaaatacattttatatcacaactcagaacacaattacatatattgcatgaaaaagtaagtaccttttaccctgacactttgtactgcattctattctttttttttttttttttaattaaacttcaagtttcagggtacatgtgcacaatgtgcaggttagttacatatgtatacatgtgccatgctggtgtgctgcacccattaacttgtcatttagcattaggtatatctcgtgctaaccctcccccctccccccaccccacaacagtccctagagtgtgatgttccccttcctgtgtccatgtgttctcattgttcaattcccatctatgagtgagaacacgcggtgtttggttttttgtccttgtgatagtttactgagaatgatgatttccaatttcatccatgtccctacaaaggacatgaactcatcattttttatggctgtatagtattccatggtgtatatgtgccacrttttcttaatccagtctatcattgttggacatttgggttggttccaagtctttgctattgtgactagtgcygcaataaacatacgtgtgcatgtgtctttataacagcatgatttatagtcctttgggtatatacccagtaatgggatggctgggtcaaatggtatttttagttctagatccctgaggaatcaccacactgacttccacaatggttgaactagtttacagtcccaccgacagtgttaaagtgttcctatttctccacatcctctccagcacctgttgtttcctgactttttaatgatcgccattctaactggtgtgagatggtatctcattgtggttttgatttgcatttctctgatggccagtgatgatgagctttttttcatgtgtatgtttatattatgttatagatatacatcaagtataggtarctattcctattttaataagctttttgagatgtaattcacatactatgcaattcaccattttaaagtgtacaattcagtgccttaaaatattaatacattcacgaagttgtacaacaatcaccattaacttttgtatatgataagagttaggagtccaaattccttctttgcgtgtggtcatccagttctcccagcaacacttgtggaaaagattattctcccctattgaatggtcttggcacccttgttgaaaatcagttagttaatcccagcctgggcaacatagagagaccccatctccacaaaaaawcagccaggtgtggtggtgcctacctgtagtcctagctactcaggaggtcaaggctgtagtgagctgtgattgggagacagagcaaaagcctgtctaaaacaaaaagaaagaaaatagaaaacccactaatcatagatgcatgggcttatttctggactctcattctattctcattctatccgttgatttatatgtctatacttaagccaacagcacaataagaggttttcaaaatcactaatggggccgggcatggtggctcacgcctgtaatcccagcactttgggaggctgaggtgggcggatcacctaaggtcaggagttcgagaccagcctggccaatgtggcaaaaccccgtctctactaaaaataaaaaaattagccaggcgtggtgtcaggcgcctgtaatcccagctacttgggaggctgaggcaggagaatcgcttgaactaggaggcggaggttgcagtgagccgagatcacgccattgcactccagcctgggtgacagagcaagactccatctcaaaaaaaaaaaaaaatcactaatggatgcctagttttatgaaaagcctttgcagcatttaatgatatgatcagatattatttctcatctgacattttaacatggtagtgaattacatttagtaattacattttccaattttctattagaaaattacattttctaatagtgaacagtctttgagcttgaggtctaggttgtgttctgtgttttgattttctgttacctagtaagagtggagggcacgaaggtgagcagtgcatgagaggtcttagtgtgcacgcaccagagtacatgcttctctggtcttagtactcattatggtcatcagtatctgcacatgcctggcttctggtggttaatttgctcacctggtctctcttgtttcaggatcctattattttcattgctgtcaatgagcccagttgtgtcactgcatcccctactgtcagccctggcctgcagaggaaaaccaccaccaaacctctcagtgctgtggtgcccctctcaccaggccattccttgctgcttgatagtgggtgtacttttgggaccctcctctcaacatagccttctggtgggttttccagccttaatagtgttatccacggcagygagctcacttctctgtcctcttgttccttcttctactgcttgccatctgcagcctggcattgcttcctcaccaagtgtgagccattgtgtgtttgttttctttttaagaaattacctcaaacttagtggctaaaaacatctattacttaggtcacataagtcagatatatctggcatggcacagccaggttctctgctcaggatatgagctaggctgaagtctctggaggctctgggaacagtttacttccaaacccacgcttgtgtttgcgggactgaggtcctcgtctccttgctgctgtcacttgactgctttccactcctagaggccactttattccttgtcccgagttccccaatctgtgcacctgcagtagctgtcatagcatcttgtgttttgaatctctgacttcttccatgtctgacctctagaccctgatttcaaaggtcatgtgattaggtcagatccacccagataatatccctatcttcggggtaactaacgtgggacctatcctacatctgcaaaatcccctttgtcatgtgtgttagtttcctgggctgctgaaagaaattcctccaaacttggtggcttatgataacaaacatttattctctcatagttccggaggctgggagtcctaaaccaaggcattggcaaggtgctggccggttggattcctcctggggcctgtgctggagaggcctgtcccctgcgctctcccagcttgtggtggttgctggctgtccttgctgttctttggcttgtagctgtgtcacatggacactattattattattattattgagatggagtcttgctctgtcacccaggatggagtacagtggtgtgatctcagctaattgcaaccaccacctcctgggttcaagtgattctcctgcctcagactcccaagcagctgagattaaaggcacctgccaccacacctggctaatttttgtttttttgagccagaatttcacttttgttgcccaggccggagtgcaatggtgcaatcttggcttgaacctctcaggttcaagcaattctcttgcctcagcctcccgagtagctgggattacaggagtctgccaccacacccggctaatttttgcatttttagcagagacggggtttcaccatgttggccaggctggtctcgaactcctggcctcaagtgatttgcctgcctcrgcctcccaaagtgctgggattacaggcgtaagccacggcacctggccaggacacaatgattaataaaagatttcctgatagtttaactcatgtggaatagtgtttaattgctttaacttattattaaatatattttaataatataagcctggaaatagaatcatttattattcatgatgaaccacttactaagaaatgataaattcatattaaacataaaaactgaaattttcattttaaatctattcatgatttgagatttttctgacacaaagtctttgttatgtactttcttgaacactatgtaactcatctattaatcctcaaaaagtgactgggaagaataatgtaattaaagtgataggctatatttttatattgtaattgtgcaaaaagtaaccaaaagaaaacgttttctcctttgtattttgaaaatggtagaaatataggacattttggataactgtgattaatgtacatatttacctgctttgataatggaaagcttttactrmcatattagtgactttgggaaggtcagtttttagtttgttaaacatttgttattcttggcatagttggttaaagatggagaatctgggatttataataaattatgaatataaaatattagagcttttaacttataatagtatttagggaaaggctgcttcagaattgtgttcttgattggaatttctgtttaaacgattggtaaagtatactagaaaaaaatgtagtgtaatttactttcttcctctcttggcaaagaagccattctaactgctgaatgcttgttcctgtctgctgcaggcttagtcctcctgttcttccactgtgctccttaaaggaaattcaattgtctactgataaatttttcagaatggaaccatctgaaattaccaatggttgttttctttctattttaacaagggaggtaaggaaaaaaaatcctaatccatgtcatactttggaattaataaactacaaagcctcataagaggaagccaggaactttgcacattctgtaaagatgtgtttgcatttcacaaacacatttcagctgaagggcaggaacaagaattggcaaataagccctgttcttttttttttttttttgagacggagtcttgctctgtagcccaggctggagtgcagtggcgtgatctcggctcattgcaacctccgcctcccaggttcaagcaattctctgactcagcctcaacctagtagctgggattacaggcgtccaccaccatgcccggctaatttttttatttttagtagagacggggtttcaccatcttggccaggctggtcttgaactccagaccatgagtgattggggtgggcctacctaacagatggtgatgacccgtgtgaaccggcgggggagggctgtcatgcaaaattcttttcccttttcactctaccaaagtgtctaaataatactgcccttcatagaagattctcaaagaataaaactgctgtgtcattaatgaatggtataattcagaatcttcatatgcttctaaagagaaaaataatttagtgccaaatgcatgttaggagataatcaatgtaagtggcaacaaattgtgacttcacatgctactgtagagatcagaaaattatcctaaactattccataacaatgagacaacatcacagaaaatacacttgaaaataaaaatctcaagaccagctacttctggacaatggaatacttttcagtctggtannnnnnnnnnnnnnnnnnnnccctgttctttatacttcccccgatgttcctcttctgcctggctgccacccccacctccccaagcattttgtaacatctagtgcatcttccctcatatgtaagaaataagcagccaggcatgggggctcaagcctgtaagcccagcactttgggaggctgacgtgggtggatcacctgaggtcaggagttcgagaccagcctggccaacatggttcactccatctctactaaaatacaaaaatcagctgggtgtggtggcacatgcctataatcccagctactcagaaggctgaggcaggagaactgcttgaacttgggaggtggaggttgcagtgagctgaratcgcaccagcctgggcgacaaagcaagactccatctcaaaaaaaaaaaaaaaaaaaaaaaatctgtgtgattctttttttctatcaggtatcaggttcataaatggggaagtttaagttttttttttgtttgtttttttaaaaaggcattcgctgaggcttatgagattggggactaaggcctaaaaactatttcttatttcttttagtataataaagagagtctttttatttttactgatacattgataaatatttgcgggagacacaataatagctaactcccacatttagtaaatgcttctttaattgcagcgggacccttctgagacagtgtctgtgaatgatgttttggcccgagctgcagccaagggtctgctggatgggattgagttgggtaaatcatcaaaacgggagaagaagaagaaaaaatcaaaaacatcattgacaaaaggtgccactactgataatggcatccaaatgaaaattgctgagttcctgaatcgagaaactaaagccagtgctaatctatcagagactgtaacaaaaccacctcttccccagaaaaatactgctcaagtgggggcttcctcacagaccagaaaacccaacaarctggccccccatcctgcagtgcctgcatttgtgaagaacrcttgtccctccagaccgcgtgaacggcagacacacttcttaagacctcggccagaagacagaatggttgctctgaaacccatcragattgttctgcctccagtctttatgccattttcaagtccccaagggatcagatctcggatgccaactcaacatttgtactgtcgttgggttgcacccaaggcacttgkgcccacctgccttcccacacactcactatccagaaaagaggaaaagcctaaagatgacacaccttcctccctactcaggcctcctcggcgatggctttgattgtcttgtgttttttataggrgccaaagagcagttgattttttttcaaagtctagtatttctctgaagattctacatctctacacaagatattcattcttttggtcacctagggatcttctaagtgtgatattactttcagagaattcagacaagtgagaaacaataatgtaggagtcagcaaagcagaattcagagacttcagccaatcactgctgctctgagaggatccagttagagactcagtatcagcggtcagaacttatctcactcctgtgaactttcaggctggacttaaagctgccaagtttcccctgcagggaaggaaacactgcctcccttcagcaggtagctcattagaaagccaaacaggcaaacgatcctggcctctcccgccagctgaccgctcttcagcatccatgcggttgtagtcgtgactttctcagtcacgatcaagggtgattttttcttaaatatcaagctgttctttgaacagggaatgaacatgagtttttgtaacgtgactgaagttgagtttaagtaggaagcgcaggaagttcccaagtgccaggtgtgtgtagctcagagttccttttacagtgaggtgtctctcactgggggagcttccaggatcctgagcagactggacacaatcatctctcccttcctctatgtcaagcactgttacaaaagactgtgagcaaatttccatctaaatattaataattctgaagaagaggcaaaactgttgaatgcaagcgatacctattgttgaagaaacccacaaatwtctgattctaagatcaggggatacaacaaaatctacaagtcatttcaaatagcacacaggaatcaaactttggtaaatcatttctgaggcacaattaaatatattgtagcactatgttaattaattatattaaatgtcgattcatcttgaatgtattctcaattgcctaccaaaaattggtatgattatcatttctgggtctactgatttttcatcatggcaacagaaattgtcattaaatagaattaagatacaactatatatcttattatttaaaaacattcatagacatattcataaagtttgaatttaaagttttatttttgcaattcagttgtatagaaatgttacataaattcctaaatgctcaattcaggtggcatgatttttagaatattatcttcttcaagatgaatacttaggtctacttcagctctgatattctatttttactttcttacttgaagtgagaaaagagaatggtgaattgtattatagcggtaatacattatttttattttagcttagatttacatttatcagtaaaacgtgtcagtgggctgggtgcagtggctcacatctgtaatctcagcagtttgggaggctgaggtgggcacgccacttgagcaccggagttccagacgagcctggacaacatggcgaaaccccaaaaccccatctctacaaaaaatacaaaaattagctgggtgtggtgggacacgcctgtagtcccagctacttaggaggctgaggtacgaggatctcttgagtccaggaggtgcaggttgcagtgagccaatattgccccactgcactccagcctgggaagcagagtgagaccttgcctcaaaaaaaaaaaaaaaaaaaaaaaagtgtcaatgaagaaaggaaacaagactttttatagttgaaccaggcttattgtattttaaatccctgaagaagaattcttcatgttatcactcttgtacagaaagatataaagtgctcagcttattttgctgattttgaaaatcaaacactatctccttgccctaaaattatagcgtgtggctcatcctcttatcccacccagatttctatctggttggttagggtagtccatgcctcaaggaaggcggtgcagcttaatttaacatattgttcagtaaagaatcccattgtgtatcataagaatcccttatccttttcgggccctccaccataccagactgaaaagtattccattgtccagaagtagctggtcttgagatttttattttcaagtgtattttctgtgatgttgtctcattgttatggaatagtttaggataattttctgatctctacagtagcatgtgaagtcacaatttgttgccacttacattgattatctcctaacatgcatttggcactaaattatttttctctttagaagtatatgaagattctgaattaaaccattcattaattacactgcagttttcttctttgagaatcttctatgaaggacaggattatttaaatactttggtagagtgaaaagggaaaagaattttggataaaagcaatatgaggccggacgtggtggctcacatactttgggaggttggggcgggcggatcacctgaggtcaggagttcgagaccagcctggccaacgtggcgaaaccctgtctctactaaaaatatacaaattggccaggcgtggcggtgcatgcctgtaatcccagctactcaggaggctgaggcgagaattgcttgaacttgggaggtggaggttgtggtgagctgaaattacaccactgcactccagcctaggcgacagagtaagactctgtctgaagaaaaaaaaaaaaagcaatatgagggaattctaatgaaggagaatattgattccactgacatgtttcatttggcattttacattcttggacttcttcttgagataaaagtgctgcaaaattctaaataatgaaattactagtattcagatactccaatagcaaacacatttttaatctgaaattatttaccaccatataatgcctgaaaccataatgaaattttgttactgactagagagaaaccactgtggaagtgcaagatgaacaaaaagcggggacatactttaaattctgtttatctgccttcctgcgcctaacagttaagctaaaccagattcaactgatttctctagttacctttcattttggatttagtgtgtgtacacctctattctttattctttgatgtcaggttcttaaaggaagtgataaacttcttcgtgctaaaatatcacaatcctagcaagaccgcttacaaaagactcgagttggtgactaaataggcttctatgtccggaaggccagctggccttcctgatcaccaaataagtacagggtgattactcaaaatttgaagttacttcctagttcttaccaggcagaaatatgtagtaactaatcaaagcaaaatgctccattactaaagtgatttctaagaagtctgaggtaagaataatttaaaaataactagagacaccgagtttctatttctattccttgtatatgtgactaagatgtcagataaatgagccgaacgttttatgcagctaaatttattctcacaacaaattacatttaaatgtgtaaaagtggtcaacaggaaaagggcataaaggaaaacaaagcgttctttcaggggaagtaagctgctctggaggccaggaactactgcttgcgttgacacggtgtgagtgggtatctttgccctgaagctgaagttaaactttctactggccgtgtggcacacacgttagatgtgtattaggttaagcctggccaactagagagcgaaggggcttattagttaaattgtgctaatatcagttaggaaaatgcttgtcatgttgtggtgaaatcttgagtttgtgttgcaatgcctgggacatgaacgggccatacaaacagaggaaagctctggggcttccaggcaatggccttgtgtcgagtcatcttacaagtgtccatcttgaaatcataaagtggatttaaaaagaagtagcagtgccacagtttatcaccaagaacttattttaatggaaatgggtctaatgtcccttcatgcaacaagacagatgaacaaaaaacaatggtcctaattagctatgagtgatcttgtatccaggtggaaacaaagggcatgtgtacatgtatatatctcttagatgaaatcacacatgttgtgaagggtagaaaaacgaagcaccaagcagtgctttagtctgcaaaggaaagtttttagccataggcatgttggctagtcgttccccttgatgttgccaaggagcagatgtatgaggtggcaagtctgtgtctatctagctgcttttaaaaaataaaaggaactttaagcattttgccttttcttctacatatcccaatagaaatgtgactacaaatcattacaaaaccactttttaggcaatgtatagttcactgagattacttagatctggatacactgggagataatatccaggaaagataatacattaacacaataatgcagtatatttcagtaaaaatagaataaataaaataaaaatattttaagctgtatttaacaggttaattaaaaatatggtaagacatagaaggcatcgtgaacatggctgcctgtttaccgaatcacagatctaaagaatgcatagataactgaagtgtcactaagatatcaggtaaaacattggcatccttttacaaacaaatacacacatactttcatacatactttttggccatggcagaaagtgtctgaacatactctttaacataattttacaaaattaatttgcatttactatacaatgccattttcaaaacaaaacgtctgcaaagttttcaatatgtaaaggctatcattcatcttaatgcatcctataattgcacatataaatcagtttgctacttaaagctagctcagaattcttgatcttgaaaacaagcaaatgtatgccttaaaaaatgaagagggagttctggtagagatttccaatataaaagtgggtaatttgtttagaattttgaaatttatcacactaaaatgtttcactacagcgaccgagatgaaagatcactgtaaatgatttctgaacagcttttcaaagggcacagcaaggattttcttaatgcagtaatttcttatgatggcactggttacttcagatcagtagtatgtcaattggtgaaaaacagactgcgtttctaaagtagcatagttttgtcataacattggggtgctaagacaattccggtccccctgtcccccacccctcatgaattctgagggaatggcaggtagaaaagccacccactcattccatcatgatctctggtggctaagtaccatgagttaggaatgtctaccacaagtagcatctggaaaatctcgtagatggaacaggctgtgaatgtagaatcctgccctctacaacacttttgaggcacgctgtaggaaaacagtcctggacttagatagggcaccatcatgaataccactgcgtaaggaatttggacatctttctcccactcgtgtagggaattctaagattccctgacaatagatctttccatacctgctcttcttagtatatgcccagaatcattctggaaaggctcttcctgacggatatggaggcagcacaacacagcaagaacgggctttgggagccgtgggtcctagtcctggttttcatgaactttggtgagatcttaggccagtgggtttagcctctcggtacttcatatttttacttctaaagtgtatttagtaccttctctacctggtaaggctcagatgtgataagaatgtggaaaccattttgacaagtacatagcagtgtataaacataaagcattacttttataattggatgttgtaaatgttaattttgacattaagaagaagtaaacaagactaatattgagattgatcgccttagcaacttccttttaaaacgacaatgtcaacgagagtctaaatttgtatgtctttccagctaagtttctcacctacatacgaaggagcaggaaaatgctgttttgggaaacttgttaaacagtccattactcctgtgtagactttgctcaggtatgaacatttcaaatcttcaaagtaaaatggaaaaaatataaattaaaaaatatatctagttgagtccaacaaattctaatattaaatacataaaatcaaggaaaggttcaacctaatgtaatttgttgccatggacaatacatgatggacagacagctttctgggcaaaaagcatcagagggggatagagctggatgcagaattccagcagaacgtttacctctagcacatggactagcaaaaatcacacggtggtagaaatctaaaataatcgtgcatgatagaaatatcaatgatatttcctcaacttcaaattgcatatcagctaattctcaaactaaggatgaaaggctgatgaggagtatttcatcttaatgtttatgtagagaatggccatagtgaactataattctctagctgcaccgtacaatataaggcagaagtttgaaatatgtcccacccaaaatgcattatgattttattaatctcttttaaaaataatcagtttgaaaaccatcggaaaagaaaggctatgttttgttcgattttaattcctcgaatttagtttttcatcaattttgaagtttcatttttttccaacatcccacaaacagctgtagacatgaaatggtgtccatgtgtcaaagagcttgtcagggaaagctgccagttggtttctatactgatgccaacagccaattttgtcaaccaacaggttcaattttatgaaaaattaaaacacaaactcgccatcctatttttacagcaattcaatggtatctgctatgcagtgcctactccaatgttgaaaacagggcaaagtgctgtaggacttaaaggttgcttgtgacaggtccagccaagaagacagtgaaactaactcacgcatcattcattccaaggacgcagcgttagttcactaggaggggtggggccacactcttctctgtgtgtgtgtgaagttaagtaatgttcacaatatttacaataagaaaaagaccttccactgcgcatgatgtaacttacagcaaaaaaaattattcatgcttcttttcatatcacatgatggtggcaagacgagagaacatgcttgtctaacactgcttggttaagggtaaat

SEQ ID NO: 6990 - DNA, 140005 bp, Homo sapiens
  misc_feature (1)...(140005): n = A,T,C or G, or insertion/deletion polymorphism (see Tables 1-2)
agcaggggttggggatggagaggaagactgtgaactgatgccaacattgagcaaatgttgaatgaatatctactttatgccaagcactagatgccatggtctccagtaaacacagaggatgaatttaaatatagttcaagtgtaagtagagggctggtggtaggagacgatgatacagcctagtatcgtgagtcatggagtcagagggtcttggaatcccaggggaatggacattcctgctaatcaccatgggacccaggagaatgcaaaccccctgggttgtaggctgtgtgttttaacaacgtggtagtgaggattgtgggcagaagagcagcctcccctggagaaggctgcagagaagcaaaatcattaggaacacaccacgtgcctagccatgtgttaaccacttgaataacgacagcgtttggccctgctctgagggtccctggaacctttttgggcacccatctgtgctgccagaccttgaagggtttactgtttctctctgctctgttggctaagctctgctcacacagggataatgaaggtctcatttgcctccgacaatatggtgcctttctgcataatttacatgttttcttcaaggctcagacactaagtaatgaggtaacaaattctggtgcagggtcttgcaactgagacatggaaacccagactccacgcctttattcttctgtgatctcttccagggcaagtttggagctgggaaaagtgtctccctgtcttggtcttggcaggcacctgttaaagagaggacttggacatctcagggtgaccggaggcatctaagtgctagctctatgtcactgtcaccttctgaaattcagctgcagtcagtagatttataaatacctctcaaagattgaattttgtttccaatttgtaagaacattaaccaccacttattgagtactataagtgtcagctgttctgctaaggatttacattaactatttttttaaacctgcacatcaatgaagtagattttttctttctttccttccttccttcctgcctccctccctctccctttcttcctcccttccttcctccattcctccctccctccattcttcccttcttccctccctgccttcctccctcctttgcttttgaaggaggtaattgaagcttagggaaaatctgatgtggaagacagaggtcctgatgaagattcacaccaaggcagtttgactccagagcctgcccacttagacactaccagatcacttccttaggtcttctatctcagtcataatttggactcattctatcagtgtagtatcagtgtttccggactgacacatcaattcattcatcaaccttttactgaatatcaactctgctggaccccatgggagagggccttaaggagtttaacattggtggagtgtaaggcaaagcctgaaggtctctaaggctagactggatacaggagccagctcagctcacagagtgtggtgttggccccattcagtcttctgcaggtgatgtggagacagaggatttcaagtagtggagagaatagcatgcaaaccaatattcaccacccatctgctgcgtgtcagatactcaagagggtgatgaggcgggaaacagttaggcaagccagggctctggcacacagcattttaggactctcagagtgagagctttctgaaattttgtgccctaagcacctggcttgcctgaccctcatccaggccctccgaggatgttatttgtgagtaacggatgaatactactcagatctccacccttaaaacatgatggactttggggagaggaggagaggagtggatagagttacatttaaccactttcacaaggagtgactttaggagtattagatattattgatgttcctattaaagatgaaaacctaactatatccataaccttccaccatcctttccactgagcccagtagaaaatatttttaagagcattgtgtaagtcttctcaagtgggtaatgggattttactaatttcgtttgctttctgctgttgactatataccagcctctggtacaccaggcccagaagctggttctgtgatctcctacaataaaggttcatctctggtcaccaagacccactaggattcaaagtcaagctagataagagctcaactgcttgggatgaaagtaggatgacagagcagcctctgtatttttctaagttctaggatccaagatcggggagccttcagatcttcccaatcttttgactcttactctgttagtccaaaaacgagttcattgctctttatgaattatgatcacctttgccctaaatagagagcagctgtcattccaggccacttctgcctgcaccttttcaacctcaataattcctaatggtttagacttgtgttattaatatgtagccaggattaagtggctaaagagcaaaactgcaatgaggtttcacattgctagaggcgagggaacactgctggcacaacacagaaggtaactgtggagtcaaatgtgaaacacagccatgcagaccctaccctgtaaagggccaggcagacacaaaaaatgctcagttctgagaagagtcaatggcaaattcagtatggattctgggagaatgcctgcccatcctggacatcaactgcagtgggcttgagattgtcttaggaagagagaaaacacatctgctttcagttcttattgtcaactagatgatgaaaagcagctcaattcagtagaaagggcattagcctgggagatgagacacttggttcaaggccagccctgctactgtcccaggacaattaacttggcttctctggcccctgatttttcttcacctccaaatgactagatgatcactcaggttgcttcctgctcacggatttcccattctctgaatgcccaggaaaaaagaacacatcaccccatctggctcctaccatatatgcgatgaactgtggagctgtagttctttggagacagatggtaggcaggtatctgtttccatatttggtatgaagtacgaggaggagggaaagaaaatactgatgcctgagccaacttacacaggcagactggctccccagccaggctccttcatgctctgctcaaggtgtgtgacttgtcacaggacccacaagagacaccagaggtccctgccccaaactcttcaatccagggggatgttttcaggattctgccccagggaaaccttttagcctacctgtttggggattctctgtttttgatgctgctttcaactcagccctagaggtcttcatggaagccaaccaagcacgtaacacttcaaaaaaaagttgccacatgtaagacattcagcaccaaaacgcttctctctgggcacagcttctgtctttccacttttctcccagaacctgcagcgtagagtaataaatacagcagaggctttgcagcatggcagagatgtgggaccctaggcaggggcccgttgcctgagcctctatgttcttatttgtaaagagagagtaatagcatgtgcctgcagagtggatggaagaatttaaagaggggagcatgaaaaacacccaagggcttagaaagaacacctgggctccctccttttctccttgcaggggccattcagctgagtccccagcatctattctactccagatgatacgccaatcatgggaaccccttccttctgctgtgcttggtatagacatggacgaatgagctatttcaggctaatgaaacatgagagggagtctgctggggggcttttggaaattgtttccttcttcctaataaaaggcacaagaaggatacagtcccaggttccccctggttaatgtgctctctgaggtgacctctgtaattcttgcagctgttttgctactgacctgaggatgaagccaatacacagagaagggcacagaacctgtaggttataagagaagcagagccctcacagtccttgcctagtagtgccttacttatggacttcttgttgtatgtgttaacacattgatttccttataatttaaactcatttgattcagagttttctgttccttgcagcagaaggaattcaaattgttaaatcccttattacaggctcctattcttcatcatccatccttcaggttctcatgtcccatctcaacttccttctgcaattctccttgatttatagctcagctgaagctccaaagccagccatgcccacagtaggacacttcctgccaacccttacatcattgacatttggccttttctgcctaaacaagttgtggtattatggccacaatttcgagggctgcagagtattgacggagaaaagtaaaattatgtccagtggccatattatacggccatgcttccttctcctgccagggccttagctgctgctacagtcaatctggattacttggtgtttcctcctttatgggattattggtagaggagtccctgccagtgggtaagccctctcattctttctcccctagagcaatcttccaggccaatcccaaatgccacttcctgtgaactcccataacatcatttctcttttcaaatccagttcaacctcctaatatagatatttgtccatttcttttatactccctagtagaccctgatttacttagacacactctgttaactatgaagagccacacaaacattcattaagaaggaagccatggataaagacattcattaattcagccagaattcagtctgaagatgggccgtgccactgaatagctaagggaagtagggaaaatgattaaaccctgtgctacaatgtttatctgaaggtagaactaaaatacctacctaaggtagttgagaagattataggagataattgtataaaaatatacggaactgtcaggcacatagttggccctcaatattattttctttttttccttttcaccataagtctgagagagcacgtcctttctttatgctggccaaatgtgtatgtatgtatacataaaacctttctccatggatatcaagtaatctgtaatattataaaactaaattcattttggcaacattcaagtaaaaatcaaatgcttctccctgctttgcccatcagatggaggttgacatgtagacataaactcaacattcagtgcacaccatctgccggccagccctgtgctacatgaaatgatatacagatgaactgaatatggaacttgtcttttgccctaagatttctcattacaatttcttgaacacgtgggcctttcacagatagcaaatgcttctgtatggtggattgcctcactcagatgtttacacactcctctccatggataaaagcagagggaggactatgcaattttaagagtctttctgttactttcttggagtgcttctcaacttttcatcagcacaataatgagttgggggtttcctacacaggcagattcctagccttacccttagagattcggcttgggtagaatcatatcattttccttacttcctttagctattcagtggtatgagtacagcccaggactctgcatctttaacaagcatccagcgtgatcctgttttagatgagaaacaatgggtgctgggttgtggatggtagcaaggaagttggttcttgcagaagtgagtacattgtgacttttttttttttttttttttgaaacggagtctcgctctgtcgcccaggctggagtgcaatgacacgatctcggctcactgcaacctctgcctcccgggttcacgccgttctcctgcctcagcctcccaagtagctgggactacaggcgcccgccagcacgcctggctaatttttttgtatttttagtacagactaggtttcaccatgttagccaggatggtctcgatctcctgaccttgtgatccacccgcctcggcctcccaaagtgctgggattacaggcttgagccaccgcgcggggcacattgtgacatttcaagcaggcatggctaataaccaaggtcattcattggatctcaacagatggacctcacagtctcgcaactaacatgggaaccagtaatctcatgccagaggaagcactcctgaggcagaggagatttcaggagagaacaggttgaacattaataaggaggagctttggcactggtccaagaaacaggataagctaaatctctgcatctattctggacaccagaatggcgcggggaccatttagaggtgagatgggcaggtaagttgatgaagaagaaccaccaaggtatgaaaccatcaggaacttggactatggatgagataaaattttctcagccaaataaaatatttattcatttatttcctcttggcctcccttattaatttatttagtttctgtggaaaatatgaacccagtttgaaggaacagctctgggtgaagtcagctactggaagggtgggaattaaataataatcatcactcattttatggaatgcttttctaggccaggcactttacatacattatgtttaattttcacaagcacacaataaggtaggtgttaattgtctatgtttttcagatgaggagctgaagtttcagagaggttaagcaatttgcctaggttcacacagcaaagatgatgaaacttacaaccacaaggtgagcccttcttactagaagttctcttcgtgtctcctggtgttcacatattggaagacttaatccttcagtgaccgggaaaagacctcctaggacctaccaatccagccttatcagacacctggcagagaaagtgatttctgaagcaggagaaaacccaggaagattgctcagttcctgtgcaagctgcttcccagctggagatgacagttaatcttgaaaatcaattcagtgcctgctctcactgcagacactcctcagggcaggccacggctcctctcaccaccgttaaacagaataaaaagtggggaattgagcagcataagacatgcagtggctgccagtgggaagcggtcaggagcaactgtgtgctgggcccggggtcgccctagaacactgctattgggctcacaggtggcaccttcagcctcaggcacagacaaggtatgggcggacaagaagtggtactggccgattttgcctgagaatgggcagaatcagctcatgtgggcawcctcagtctttctctgacagcctgggcatgggctgctttggctttgtggcaagcctgttcttttctggatactttctggactgtgaccctgtgtcttctgagattgtccaagagtggacgaggcttacccatgggtgatgactcagcagggagcccagggccctctktgtgtggctgcaaggcttcagatatctcacatgtcttctcaaggttgcaattatgtcacatggctctaagactagtagactaggccagattattctagaatcttctctcagattctggaaggtaggcagaaaacaccactttcagagaggattaattctgcttcagaaaaaaagtgagatgagaaagcaatggtatccttcggtgggacatgtgacagtatcacctcacagcactgtggtgtttatcttaatgtctttcacttacaagatcaaggytctgggaggtaggtaggcagggcagaaactattgtccccattttaaagaggaggaaactgatgttcagagactttaacaaggattggaatggtagaaagcaaactcaaagacggaccttactataaatatctgaggttttttttttttttctaacaattaaccctcgctacatgactctgtatatctgagaccgagtatcttctttcctgaggatattgtatgcttgaggtgagggtaattatgataatagcaacgtgtatataggagggctgtgaggagtcccggagaaaatagatgtgaaagtacattgtaaagcaatagtgccatgcaagggaatgtaatattaatattattcaaactcctgccacctcatgttctcttcaaatgtctcttcagcaatgacttgcctttctgtcctttgcctacccagcttcatcatctgagtataatgagaacaaacatatgggggctctgcactggtgcttactatcactattttacagatgagtaagctgaggctccgggaaatgactttcctcagctaataaacccagtgtatggcaggatggcgatgctccgcccctcctgctgcagctcacctcccaggtgtgttcccgctcacactctgtgttgcctctctgtatggtgacctcgaggctctcagaccctgcatgctgtagagagagcctgtgcactccttaaagtacggtcacgtctcatttatgcacatcaccctgtccccagtggctcttaggcaggaggaaatcttcattccatctgaggcccaggaacagggttgtgtgagggctgctccccataatgtcacagtgggggctgccaaaatgtcttcacatacaggatgagccacaggagcagccagtggaaggaaccctggtactctgccttctacagtctgtggggaggaggacactttcttaaacccagtttgtctgaggatctcagccgtcagggaggaaaaagccacccagtcctcagtcctccccttctaggaatcaggaatgttggagagaactgggcactgggctcaaagacagggaatctggaattttaggaatgagtgaagtttccagagaaaggctgcatgtggtcaaattccagttctgccatttcttaagtatgtgatcatggacaactcacttgattcctctgagcctcagttatctcatctgaaaaatgggtgtttatttgttaattaaaaacatttataatgaaggagcaagtgatgctgtaggtatgaaggatacaatgaggcagatgaggtcttgggggctgaaaataactcaaggagtcaatcgctagtgaaggaagtagagcagctaataaatgcacaagaaaaatttacatagtgtgagtactataaaagaaaagcagcataagttgatgactaagggggctcttttggattgaggtgggttagggacgatgtttctgaagaagtgacatttgaatgagataagagtgacaagaatgagccagctatgccaagacccgaagttggacagtgaggaagtagaaagagggtttcaggtagatggggcagcctgggcacaggccccgaaggaggagcaagtgtgatgagctcagagtgctgcagagttgaaaggcagccagtgtggctgcagagaagcaagaggtggggcaagtggtggaggaggtcagagaatgaggccaggctgatcctgctggcctcaaggcatggtcagaagtatgcaagtcactgcagtgtggtagaaagccattggaggtttttaagcagaagagcaacatgacctgattcgtatttgtaaaatatctgtcaggctgctagtagggaaaataactggggcggggggtaagagtagaagcagggagatcatctgtggcattgcagtagtcaaggaaaacaatggcagtggcttagactatagtggagcgaaagaggtcagatatgggatgtattctgtgggaaaagctggcagaacatgatgggggattagatgaggggatgtgggagagaattcaagatggtacctggctttaggaatgactcaatagtcatctggtaacaactcacctagataatggatgagtagtatgcagcaaagtgccagaaacttactaaaggatcagtacatttttatcacattcattattcctgtaggccagttctgcaactgacattcagttgaactttcggtgattgcctctctgatcctcagtttcctcatgtatacaatatggcaggccatatatttttacattcatttgacaaatatgtattagacatttatcatacaccaggctctatgctgagtaccagagatacaaggtaaagaagaccaaatagtatcggcccttatgggagagtggagaagacactattgaacaggaagttactagtcctagggagggtcaagaaggaggtgctgggagaaagaccttgttcaagtgtgtgtccttggggaggcttcctgcatgggatgacatttaagtggggtcacaggataagtaggggttagcaaggtgagggatgaggatgggtgggctggggtgagcagggaaagagggtatcagacaggggtagtagcataagttaactacttgaggcataaaagaacatggcctttccaaagccaaaatgtccaagtgttgaactgcccaaacaccccatctcctgcttgagagaccatggaaagaaagggtggcaagactcatcaaatgcaggcaagtccattttcaaattatctggataagccatagatttgttcaaattttttaaaaggttagcaaaccacattaaatgcttgtgatcttttggaaggatctggtctctagttgtgtgttgctcaactcctttgctaagataatttatcagctgttcttaaataaggatgtgcatcagcctctctagggggaacagagaaagtggcctcactcccaaaattctgattcacaggtctctctataggtattcctgacatgcaatcaggattagacactgcttaattatgggaatacgcttcactgattctgcaacatgttctgagttctgtccttgagtgcagctggatcactaaaaagctactggactttattatactatgttcctaatggacaaaagtcttggaattatgcacagatgtggaaaaaattcatcttaaacatttctgcattccctgtagaactatttttgaaggtattacaatgttcattataatctatttgctttagaatttatttcagttaaagaattggcatgctttctttttacagatggtgagcattaaataatccaatataactacctttttgccttggctgctaggaagctcagagtcaaaactgaatcccacctacagtaactattctcaactgcacaagcagcatattggcataccacttttctcgtggttttaatttcaaatttttagtttaatactatgccaagtatatatgaagaacccactgtttctacatctgaatgaaggttcttcaccagcaccaacatgcaccattgctggagtccatggaagaatgacaaagactatagacatcactactatgtgggtggcagacactgtgaaaccaaaccactaggcacttggaaatagaagcatttgttgaaatcacatgcaattagatcaaagacaaaagtattctttctcacaattccatccagaaagaacactgagggtcaggcctggtggctcacgcctgtaatcccagccctttgggaggctaaagtaggtggatcacttgaggtcaggagtttgagactagactggccaacatggtgaaaccccatctctactaaaaatacaaaaattagctgggcatggtggcacacgcctgtaagcccagctacttgggagactaaagtaagagaatcacttgagcctgggaggtggaggttgcagtgagcagagatcacacctctgcactccagcctgggtgacagagtgaggctcygtctcaaaaataaataaataaataaataaataaatwaatwaattaattaattaataataataaaaagaagactgggtattcctgatgtgagtcagtttgtcttatgagtgtttcctcaaaaaaatagcaagaagcaggttacactatgtgcaatccatttccctctcctttgattatcacagcaatccccagaagcagccctttcacagagaggaagctgaggcttagagggtgtcaatggatgatccagtgctgcagagccagaaggtagcagatccaggatgtctgtcttttgtgacaagtcccaccttccttctggatgtatctttctatcccctgtaaatgagtccgactgcaggtaccagccttataaatgtgattttctccatctgcttgggtattccaccaggccccccactgttggcactctgcttcttctcagccaacaaggccttttgatgatgtgctgtgtttccctgtctctgataacccagtttaggtcttgttattccaattttgacctttatctccaacattacagaggaatctccgtattcttctcagtgcatttctgtctcctatctccccaccttcctgtcacacctcaaccccattctaagcttcatgtccaatatctgtagagtacaggtgctcactcccagaaactgtgggatccatccttagtgggggaagctgcatgagctgctttgctgctgctcttggatggatcctgggatgattgttggaagccctaatccactgggccctcaacttctagaaggaattttctttttctttccctatttattattattttgtagtctttcatgttccacaataatttaaggaggttcaaatttagaaacatttcctactgaagcaaaagctgatattttgccccaggacaaaatatttttgcattgatccagggggaactgagacccagcgcaatgggaaagactcaggcccagagggcccgttctgccagtatgcaccatcccctctgttccaattatgctgtcagcaaatgtatccatttttgaaattacaccactattatgggttatttatatagggtagactgaagtgtccataatgcttatccataaggtgagcactttcttatttctgactgctctctactccacmtgtttcctggatttgagccaatttgccacccatttttaatagatggtcctacttctgtgcttttagactattatccactttcttgagtgccactagtctgtattagtttactgagtttagaagggtcacagtctctatctaccaggttaccaagacaggtgagtctgttctgttttacacacacacacacacacacacacacacacacacacacacacacacgcatgcacacatagagttctcccaaactttgtagtccctgaattgggtggtttcccatgagctcttattgcctaagtgaataaagaagttgagacgttttccttgctctggaaacattagtgtctgtctaagtcatttgtggtttccttggtctagtctactagaagttctttcttgcatgaaaaaaactgaaatggaacttgaatgatcctcctcccactatttaagtactgctttctgaaactttcagctatatagcaattgcctccaaagagttcctgttattttcctctatttttttcctttgtatttggatttacctctttagaaccatgcttcttctcatccatcttctgtcccgagcaccttattactctgttcattagagtctttttcagaacatacttcatagtccctcaggattctgtttaaccatccttttctttggaagcctaagtgcaagggaaagccattgtgaagatacagtgacaggcacttagtgggttcaggtcgtttcattccagcaattggctgaccaagccaaagcactagaaagagttgaccacttctgcataaaacttggtcartgggtggccgaagaactgatttcagtcctgaccccttcagagccttggtttcttcaactgtgaaattattgagttgggttggaggaattcttcagcttcatttctaaaattaaacttttgattttgataaaattggggccatctgcaattgcaagaaatagtgcagaaagattccatgtaccttttatttcatttcctccaatggcaacttcttgcaaaactctagtacagtatcacaaccaggatattgacattgacacatttaagatacagaacatttccaccaccacaaagacccctcatattgcccctttgtagacacacaccttcctcccttgtccctgactcttagcaaccactaatctattctccatttctataattttgtcatttcaagaatgttcataccaatgagaacacatggacacaggaaggggaacatcacacaccagggcctgttgtggggtcgggggaggggggagggatagcattaggagatatacctaatgttaaatgatgagttaatgggtgcagcacaccaacatggcacatgtatgcatatgtaacaaacctgcacgttgtgcacatgtaccctaaaccttaaagtatatataaaaaaagaatgttcatacagcatgtaacttttcaagttgacttttttcactcagtgtaattctctggatattcatccaggttgtagcatgtatcagtagttcattcctttaatttctgagtagttttccatgatatgaatataccacagattatttaaccatttacccattgaaggacaggagggttatttctagttttgggttattatgaatataaagctgctataaacattcatggacagatttttgtgtcaacataagtcttcatttctctgggagaaatgccaaggagtacaattgctgggtcatatggtagttatasgtttcatttttaaagaaactgccaacgttgtccagaaaggctgtgtcattttacatttccaccagaaatatgtatttttctacatccttgctagcatttggtgttgacgccattttttattttagccattccgataggtgtatagtggtatctcaatgtggttttaatttgtatttccctaatgactaatcatgttgaacaccttttcatgtgcttattttccatctgtacatcttcttcagtgaaatgtcttttcatctatcttgccaattttctaattaaatttttttctttactgtcaagttttgaatattttagatactagtcctttgtcagatttcatgcaaacattttctcccacttcatagcttgtctgttcatcatcttaggatctttcatagaacagaagtttttaattttaataaagctcagcttatcaatttcatcttttatggattatgcgtttggtgtcatatttaaatactttttgcctagtcctagaccctgaagattctcctgtttttctaaaagttttgtagttttatgctttacatttaaatctgtgactcattcttaagttaattgttgtataatatatgagactcaagattaatattttgtttgcatgtctttgtgtccaattgctccagtaccatttattgaaaaggacctttcctccataggcaggcacacctcattttattgtgctttgcagatactgagtttttttttttttttttttaacaagttgaaagtttgtggcaactctacattgagcaagtattggtaccatttttccaaacgcgtgtgctcagttagtgtttctgtgtcacattttggtaattcttgcaatattggaaagtttctcattattatatgtggcatagtgatctgtgattagtgatcttccaggttacaactgtaattgttttggggcaccataaaccacacccatgtaagacattaaacttagtcgataaatgttgtgtatgttctgactgcttcactgactggtcatttccccatctcctgctccttaggcatccctattcctttagagacaacaatattgaaattaggtcaaaattcaatagccccacaatggcctctaagtgttcaagggaaaagaagagttgcacatctcttactctaaatcaaaagctacaaatgattaagctcagtcaagttgtaaattcaaaggaaaagctctttaaggaaattaaagtgctactccagtgaaaatatgaatgataaaaaagggaaacatgttgggtgaggtggcttatgcctgtaatcccagcacattctggaattgatttttctatgtgtattttacatcctgtgactttattaactcatttgttagttctagaaagattttgaggggatagagattccttgtaacttcctacacaatcatgtcatctgaaaatatagatggttttattttttcctttcactctatgtaacttttatttccttttcttgccatatcgtactggcgagagcttctagcactatgttgagtaagagtggtgagagtgaatatccttggcttgttcctgagttttagaataaaatgtcagtcttttgacattaaacataatgttaattttaagtttttgtagatgctctttttcaattcaagaacgttcccctttattgctagtttgctgaaggttttttttttttaatcatgaataagtgtggaattttgtcaaattcttatctgatttgattgatgcgattatggttgttgttgttttttttttttttagcctgttaatacagtggattacactgactagtttttgagtactgagacagccttacactctctggaataatttcagctgctcatagtgtgtttataaataaatgatacacacacacacatatatttgcatctatacttattaggaatattagcctatttttttggtactatgtttgtctggttttggtattgggacactactagttttataaaatgaatggggatatattcccctttctattttctaaaagagattgcataaaattagtattaatacttctttaaatattagaattctccagtgaaatcagctgggcctggagatttcttttttggtagtttttttttctttctttctttttttttgagatggagtctcactctgtctccaggctggagtgcagtggcacgatctcagctcactgcaacctccgactccctggttcaagtgattctcctgcctcagcctctcgagtagctgacattacaggcacgtgccaccacagccagctaatttttgtatttttaggagagatggggtttcatcatgttggccagaatggtctcaatctctcgactttgtgatccaccctcctcgacctcccaaagtactaggattacaggcgtgagccaccgtgcccggtctggtagtttttaaaattataaattcaattttccttaataattataagattatctaaattatttcatattaggtgagttatggtagtttgtgtttttcacaaaagtagatccatttatctaagttgtcaaatttatgagcgtacagctatttctagcattctcttgttattactttgacgccttcaggcctgtaatgacttctgatattggtaatttgtctttttttttccactgttaatcttgtgaaaggtttattaattttattgctcttttcaaagcaccagctctttgtttcactgtctctattgtttttctgttttgaatctcataatttctgttttgacttttaatatttccttctttctgcttgctttgggtttattttgctcttttttccaccttatgttcttgagatgggagctttgaccactgatttgagtcttcctttttgcaaatggaagcttgttcagtgataaaaatttcattttcagcactgctttagatgtgtcccacagattttgacatgttgcwttcttatttgcattcagtaaaacgtatttttaaatttctcttgagacttcttactggtccatttcttatttagaattatattgtttagttccaagtattaataatcaaagatcatcttattatctttctgttattaatttctagtttggttccattatggtcagagaacacaatctgatttcaataattttaaatttgttgaggtttattttatggcccaggatgtggcctattttaggatatgtgccataggcacttgacaatcgtgtatattttcttgtttgaaggtgataggttctataaatgtcaattagatactgttggttgatgatgttattgaattatttgttagccttgctgattttctgtctagttgttactatcaattgttaagagagaggttttgaaattttcaactataattgcccatgtacttctctttttgtttctatcagtgtttgcttaacatattttgaggctatctttttctggtgtatttagtagtgctatgtcttcttggtggactgacctttttatcgtaagtaatgtctgtgtctcataattttctttgttctgaagttactttatatgataatatggcaactcttgttttctttttattgatgtttgcatccttttaccttcaacttgcctacattatactagttaagtttttataggcagcatataatcgggtcttgctattcaaccaagttggccaatctctgtcctttaataggtgtatttagtccatttacattcaatgtgattattaatatgtttgggatatgtatgccattttattttttgctcttttctttgtttcctttttcctgcctttcagtgggtttcttgaacattaaaaaattattttatttataatacctttttggctattattattttaaattgacacataattatatatctttaaggggtatggtgcgatattttgatacatgtgtgcaatgtgcaatgatgaaatcagggtcattagcatatccatcacctcaaacacttatttctttgtgttgggaacattcaaaatctgctctttctataatgtttttgagtatacctctttatatagcatttttagtggttatctaggtattatattgtatgtacacaacttatcaccatccactggtggtatcattttaccagttcaagtgaagtgccagaaaccttacctccttttatatcccattatgctcctctgtttacaatataattgccttaaatatttcctctccatatgtttggaaccacatcagagagtgttataatttttgtttcagccgtcaaacataatttagaaaattcaagtgcaaaaggaaagtctattatatatactcatatttttgtttaccatgtcttttattccttcccaaagttcagaaattcttttattatttcctttctgttcagaaaacttttgtttgtcattctttgagggtaagtctgcagatgacgagtactttcagtttttcttaaccagagaatgtcctatttttcctcaatttttgaaggataatttgctggatgtaggattctgggttgacaaaattctatatttattttttagcactggaaaatgttgtgcctctgtcttctgacctacatagttcctgatgagaaatccactgtaatttgaattgttttcccctgtaagcaaggaattttactgtggctgctttcaagaatttttttccttgtctttagttttcagagatttgactctgatatgtcttagtgtggattactttgggtttatcctgtctgaagcttgctcaccattttgaatccgtagattttatgtcttttgccaaatttgggaagttttcaattattttgttaagtgctttttcagcctcaccctctctctcttctcctttcatgaccctgatgacattaatgttaaatattttcttatagtcctacaagtcggtgggttttttaaaaaatattctctgtcgtctctgtgatttctactatccagtctttcaagtcactgatttttttcccctctattttcttaattctgctgttaagcataaccattttttttaacatttcagttctatttttagttccaaaatttttcatttggctttttgtatcttctgttttttttgctgagactttcccatttttgatttatttgtctgaagtatgtttgtattgctcattaaaacatttttatgactgctttaaaatctttgacagataattctattatctctatcatcttagtgatgaaatctatgatcttttcatttgagttgaaattttattcagttcttcctgattcttgacgtgttgagtaattctgtattgaaatctgggcatttctgctactgtattatgagactatgggtctcgtttaagctgtccattttagctggcttcctctgacactacttcaacaaaggaaggagaagctgtgttgttttgttactggcaggtaggggtagaactctggtttccccactaaatctctgttaacacatgagatgggggctcgtcattactgcttggggatggtgggagtcgtggttctctctaggcctctactaataactccctgactaagaggggtaggaatgcctgtttctcgtttcatatgtggactctctgacaccacagaggtggaagggtggccttattattgctgggcagaggtgaaggtcctgactctccactaggctccactgatgcccagtggggagggagggggggcacctcgttactaacaggtgggaggtggaaactcaggctcaccagcctgacattatgaggaaggatatgagctcattaccacccagtgaggatggacatcccagctaccttcttggccttcctggacaccaacccagcaggagaggaggtatggtggggcacttcattacagcctggagagagtggaagtctaagcttcacactctatgcctttgtgtgtgtggtggggtgggtgaggctagctttcatctgtgttgtttggctagaagacagtggttagtgtctaaaagtttctatcttgctaggctgcccctttcctggtcctttggcaggatagaaccagcttctgttgtttgtgcttattgacatttctgggttgccagcttcttcagtcccaagtctaggatacatgaggtgaaatgaaaacccagggaactcaccatgtccagaagttcctagctggtctgtcctcttatctttatctttcagagtattcttgtgtttgttttatatataatgtccagggtttttagtggtagttaagagacagaatagggaacaacccatctaccccacctttctggaagcagaaaggagaagtccccacttgaacatttttgttttgttttgttttttaaaaacaatggaaatatttgatggatatcctacatcaaagtccaggacataaaagatggatgcagagctttccctctagtggaatctaggaaaaattaacctgcagtcccattttcttgtataccccttaattactgtggcccctaaaaggctttcaaagcactgccagcctcctcagtacacagtttgcattaggacctctctaaacactttcagtgtgacagaggcaggcaggagagaaaagcattgttattgatgtggattcccctctctctattagatcatacgtttcttaaggacaagggtttaatcgtctctgaatccacagtgctcaatcctatgcccaacatgaaaggaatcattatgtgtgttgagtggatatacaaacttgaaggtgctcccaggctgtaagagttcccgtctatgtctaaaataaatttatgtatgtcatctttacaaatgttaataaaatctgtatagttgaccattctgcttcatagacaaatgtttgaactatttcatccaaaagggtttggtttctagttctgtgtctacctaggaagtcttcgaacaattctacagggtttgggtttgagatagatcctttccaacattttatctgtgccctggatgaagatatagaaagcattcttctcatctgcaaggttctcaaatctagaagtaagttttaaactatgtactaagtagtcctggacaattagccacccctgctggagactctgagaggatcatgtgaagtagccagtggtttatgaagctgttcttagagttctctggtgacaaacttttgctttccagagttccgtcatctgtcatacagctggttcacctcttgtttcacatatttctggcggagacagttgggaatggatgagagtggaaaaccttgcagcagttatttgctagcctttaataagaaaaggagcacaaccagggaaatgaaacaatgtcctgttgcaaaggacgccaaccccctgaggacaactgttgctgacagaggtttatccttattttgagattgatgttttactaaaatggtgttagctctgcctttctgtcatcctgggaagtgccaacaagggccccagtgttgaaatgcaaactgtggaagaggctttagtacaggaattattgataaggaarttgttgatattgcagctgcgttcttctagcaaatctgttttcttcttggtaactgctctgtggatgggatggagtctgaactccctagcctggtcagtaaggctcctgatgatcttgttgcagaactgcagatggcttataatagaagattcatagctaacacacaggctttttaggtcacctgatgccctagggttctagtatcacagcatttagctagaaaaaaattcacatctccagaaaggccaatgtgaggaactgaagataactgaagacccattccttagtctttcagacagctagtcaactagcagtttttgatgtcgtctttgttactttgactcctggggttgccaagtactgcagctcacttatgctccatccagaaatgtaaactcagcaaaaagatacataggacaagactcgaaactcatggaaaaccaagaaccatctccactgtgaaaactatctgaaagttcatggagaatccaggttgcaagaaccattgcaagaattctccacctggcccaggtactcttagggtaactatttctacctatcaattttgtcacataccccctccaatctgctctgcatgtctccttctatcatacttatttttctattaggttggtgcaaaagtaattgcagtttttgccattacttttaatgagaaaaactgcaataaagttttcaccaacctagtatcctacctctttagttcactcatggcacctagtacttatcttctttggaacttgtgagctgtggttactgctgccaatttggtgaatctgtctgcattttatggtctgcatttttgagaccctgatcagctaattttttccctattttggyggtgttttgacaagtacctgaactcataacttgctggcatgcactggctgctcttaggtcaggtgctaagagggcaccacaccataatgcatgattgcctaaggctgagccctcagcaggggctcgggaaggggcaggcaccattggaggggctcaaggatgcgacctttaccataatttacttgtctggttttcttgcctcatgataaactctgtggatagaggtaattaagacagcccttgatggtgggaaacacagagtctagtggatatgggacactagatcaggattaaggtaagatcttctgtgtgactattgcaaatcagctgtttttaaacaaagtataacataaaagggcttagcaaagaattgtgaaaggtaattagaagtaagctgtttatgaccgggcacagtggctcttgcctgtaatcctagtactttgtgaggccgaggtgggagggtcatctaaggtcaggagttggagaccagcctggccaacatggtgaaaccctatctctactaaaaatacaaaaattagccaggcatggtggcatacacctataatgccagctacccaggaggctgaggcagacagtcactagaacccaggaggtggagtctgcagtgagccgagatcttgccactgcactccagcctgggtgacagagtgagactccatatcaaaaaaaaaaaaaaaaaaaaaaaaaagtggagacaatttgaaggaattgggagaagtatgcattccaatgaaagagcgtaatgaaaacgcacagcagtgtagtatcaagaaaaaggactttagagtcacaaatttaggttctagttctggtgtatctcaagctaaatgaatcactttaaacaagttatgtaggtttctggagtttggtttctttatctgaaagtgaactaataatatttaccttggagtttttataaggattaaatgcagtaatgcatataacatagagcctagaacatagatgttcaataaatgttagttgttaagttggtgcaaaagtaattgcaatttttgccattaaaagtggcaaaattactttttgccagtgcagtaattacttttaatggcaaaaatcactattacttttgtaccaacccagtaattaacagtgataaagatgtgttcatggtatcaaaaaggttcttggtttacagtgcctgggaagtcaacaaaagatcagccttgtggctaggagaggaggtcaacctgagctggtgtacactgagggggcctctttgggtgcagggagttggacgattagccaaagaagtttcagaaactttaggctttgaagtccatcagaatttttccccagacacaggacactcaaagccacagatgtgcacatcaacaggagttcaattaatgattattgaattagaaagtcaaagagatctgaaagttacatgagaaaggggagtgctatagttcctccttggaccttggttactctagctgtcaaatgaggtgattcctttgagttatgacatcttaggattgtgttttcatttagtactcttaaattgacagtaaaaatggcctgtatttacgatgtacattgttatattttgaaatatgtatacactgtggaaccactaaatcaagtgaattaacatgtacattacctcacatgcttattttttgtggaacacttaaaatacactctcttagcaattttcaagtatacaatattatgaactatagtcaccatgatgtacaatagatctgtcgaacttattcctgtgtctaactgaaattttgtatccttcagccatgatctccccacctaccctagtacccccagccactggtaaccaccattctactctctacttctatggattcatcttttttagagtcacatatgagtgaggtcatgtgatatttgtctttctgtgcctggcttatttcactaacatgatgtctttcaggttcatccatgttgtcacaaataacaggatttccctctttttaaaggttgaacagtattccattatgtatatatactatgtttttcaggaaagactcttctagtagatcagagtgggtgaagagtaaagaaaggagatggcaccagcatacgatacagctttttcctctaaagtctcttatagaaaaagttactgaatttggaatctcctaaaattactgttgatttaattttggagaagtcatttgcctgcatttatttctggagacccttctgtatttttttgttgttgctggtcttttttccatagactctaacatttcctttttttttttttttttttctttttttgaagcagagtctcactctgtcacccaggctggagtgcagtggtgcaatctcagctcactgcaatctctgccttccagtttcaagtgattctcccacctcaacctcccaagtagatgggattacaggtgccgaccaccacacccagctaatttttgtagttttagtagagacggggtttcaccgcattggccaggctggtctcaaactcctgacctcaggtgatccatctacctcagcctctcaaaatgctggaattacaggcatgagccaccgtgcctggccacatttcctttcctgtcagaagtaatttatgtttcagtgaaaaccacagaatgatgtcccatttcatagacattatcagtaaattccagagctagcatggggactggcaggtagtgggcactaagaaagtgtttgtcatatggataaataaatggagcgtcttagaaatctagtgcaatctgcctattttacagattgggaaactgcagcctgaagaggaaaaatgagttacacaaagtcatcagtgacagggcaggtacacaaacccaagattctcccaagcttaaacattattataaagctccaggtttgtaatgactaggtagatataattgagaacaaaaragattcagttttaactataaaatagtctctggcaggcattggcaaaatttttatataaaaaagccagacagtaaatatttcaggcgctacaggccacagagtatttgtcacatctactcagctctattattggagcaccaaaatagccacagataatatgtaaatgactgaacacagttgtgttccaataaaacyttattattcatggacactaaaatctgaattttatacaatttacatgtgtcataaaatattattattctgttttatttttcaaccatttaaacatgtaaaaaaaacattcttagctctcaggttgtacaaaactagagtgggctggacttggccaaactttggtctgtgacattaaaaaagagaaaaagtctaatcatcaaaattagttttttttcaaaatttttggcagctgcagaaattcccttagcccttctctcatttacactacaattgagaagcrtgccataagcttagaagaatggaatttcaaaacttattttaattgtaacctgtttctgtccacattttttcaaagactgtctgttcaggataaggctaatttctttcagaatagttctgtgggtttgttcagtactgaaaaaactaaaatgatctataatgagggttggttaaatatttgtacacccacatggcatataataagcagccaaaacatttataagatctattgatatggaaaaattgtttataattaagtgtggaaaggcaagttattaaacattatgtttagttcaatctcattgaagtaaatttagtgctatgtaaatccacaggaaaattataagtaaatataacacgttaaagataacatgttttgtttagttttcttataatttttctataattcataatgaactgtgtaataatttttaaattacatggaacagaacctttaaaaggacaaagacttctgattctttttttgaaattaggaatttattattcagttttaagagtttctttctttatataatctgaatataagtcctttatgaaatatgtgatttgcaaatattttctcctagtctatgggttttcttttcattcgtttaagtatgtcttcaataaagcaagtttttaataatagagtttctaactggtgatcttgaagcaaactgtagcaaagaccagattctacccaaataacggcatcgccttagatcattcctgctctgcgtatttttccacacatcagtcctgttcaaagggcacagwtgcagccatgcatgaycatttctccacttgttttctttattttttgttttaagctacaaatctttccattttacagatatgcctcttggatggaggaagtactgataaatttgttaatagataaatcaatttcagcatccaagaaaagaacattgtttgtcagtagagcaaacttccagccttatttgggggaatttctgtaaccttttatctcatgcaaatctaatccaaatgttagatataattaatgactcaaaaatatttcaaaggcattatctcttttgcttttgtataaattcttaaactagatgtggaggaaagaaggaaagcagaagtaaatatttgtggactgactactgagtgctgggcattgcamctgtctttctttacttctcatacaactgtgtaaagaagttaatagtccctctttataagtgagggctgcaaagctcagagagatgaagtaatttggtcaatgttacacagctagtatggagaggagcagtattaagagtacaactccacctggcttcaaagaccatgtgcctttcattatgtcaaggttattaattcagttttacccatgtaaatggggctcactcattttgcttttaggaaaaatttaagaaacaaaaatttagtcaatggccttaagtctcaaaagaaaacartactgactaaatatttaataagcatayctaaaatacacacatttacataaaattagagcacacatctcaggaactgtaatgaagcaatcggaaaactgttctagaatccaagatttttagagacatgagagaaagagaccttggtgattctgtagtccaaccagctcattttacaggtgagaagactgagggtctaagaaatgaaatggtttgttggaattcctagcaatcagtgagacagctgaggctagactcagtctttcatctcctctttccttctgcttartcagagggttttatgattttctgtccagcaaattagactatgtgtgaaatgtttgagaggttttgagagctcaaactgaggaaggaaacaaagatgagtaagaaaaatgccctgccctcaaagagcctacagtctattgcaggaacatccctgggaaatgaattcagtatgttcagtgttagaatagaaggggacatacgttgatagtgcacacagctgcaggaggtaaattgattttattttttcctgtgtgtgtgcatgtctgtcttttccatagatgatctcttaaattctcaattaaattctgttttgaatcacaaaaaacaaattttaagggtgtccctaaattttacttcttgagatctaagagttggatttataactggtcagttgcttaccctctcaagaagtaaaatttagggatacccttaaaatctgttttttgtaattccaaacagaatttaattgagaatttaagaggtcacctatggaaaagacacacttcttgagatataaaagttggatttataaccggtcagttccttagccttttgttcaggtccatgtggcttgaagaaacaactctagttcagagggaaaaaatgctgacagttcacagcagagcattccccaagcaaaataaatgtattgaaaatcttttcgggtagccaaactcttggcaaacaaggagtttgtcaacctgcttgggtccttgccagaaggctttgttgcacagccacacagctcctaataaactcttttgaggcacaaacttgttgtatgcctcttggtgcttctcttttgacagcatgtaaaggtctttatgaagaaaaatagcctttaaccaaggaaccggcctgtgcttcagacttgttgtaaaatcttgatccagtttttttctctctggacttcaggttctctctctgtaaaaggaaaatgtaggactatctccagggcagcaaatgcatgccatttataccagtggtgtgctagaatttccttgtactagctcatgagaactaattgttaaatttttagaaattttgtgagctagttcacaacttagtgcttgcttgaaatcagccatgtgagaatgtttacaccacataaattgataaatgctacaaatcaggatgtcacctccccactgccatcaaccctcagaactagttactagtactagttaaacatttgccagtatactaccgtccttatcccacatctgtcctgttctacactcatggcagataatgctaaccagtcacagaattctcacctagtccagcctgcatatgacttagcaatcttccctctctcccttcctctctcccctctattccctctctcccttcctctaccctcccctttcctttccttccnnnnnnnnnnnnnnnnnnnnnnnnnnnnnnnnnnnnnnnnnnnnnnnnnnnnnnnnnnnnnnnnnnnnnnnnnnnnnnnnnnnnnnnnnnnnnnnnnnnnnnnnnnnnnnnnnnnnnnnnnnnnnnnnnnnnnnnnnnnnnnnnnnnnnnnnnnnnnnnnnnnnnnnnnnnnnnnnnnnnnnnnnnnnnnnnnnnnnnnnnnnnnnnnncctcccttccttcccctccccttccttcccctccccttccttccccttcccttccccctccccttccctctcccttttccctccccttccctccccttcccctcccctctctttccttccctgccttccttcctttcccttttcattctttcaagcaaaattatctttaaatgacttcatgtgccaggcagtggggatggagtaataaacaaaatctgtaagattcttctcataaaatttattttttagtggcaagaaacagacattaaaccagtaaaaatgaaaagaaaatataacttcatatagtataagtgctgtaaaggaaacagactcaggtggtatgatagtgcctaaggagatacagtcatcagggaagatgtccctgaggaagtggctttgaactgagacttgcataagaaaataatcaccttgcacaccgaaggaaagggcattcaggggagaggaacagcaagtgctaaggccctggagtgagaacaaacttgttgtgttgaagaaagcaaaagctgcatgcccagcatgcagggtaataagagaggtgagagaagtaggcaggttcagatttgtagagtcttataatacatactaatgagtgtggaattaattgcaaaagaaataggaagttgatggggcagtgggaagggttcagctactattcagctactattaactgatgagatttctaaaaattaatggaggtgaaattcatataacataaaattaaccatctgaaagtgagcaattcggtggcatttagtacactcacaatgttgtgcagccagcacctctatctagttctaaagtatttttatcattccaaaagaaaactccagacccattaaactcaactgacaagatttgaagtgccagattgagctttcgtggtagtgggtcatctctcacttttgctctactttgtatgaatctatgatttcatgagccttcattacatataacagagctttttgggatactgaggccccagcttttcgggtggagaggaaaatgtctccgattaaaccaaatgtcttagaacctggcctgattaccagtggggttacctcttttataatgtaaaacattgtgctaaaattttgagaattgaattcttagagcaaacttacttactttcacagttgttgcaggtagtacttcttgtagtatgtaatactagttactaaaatactcaacatggtttttcattacctagcaccagtttactgtgtttgtgaaccaaaatctcaatgcctttagtaaggactctagaggtcttcattttcctctttgatcaacttctttagctcagtgtggcccatcctgcctctctgcactagcctttttgccacctgagatagtgctcatgtgcctagcactgtatagtagactgataacatgggtgtgacttctggagttgtcccaaatcatcagaaacggctccttcatgaccaggtcttatcacacaacataaaggtcacaggaattgaagattatgctgttaatatatatatatatwtttttttcctttggagactcattctgttgcccaggctggaatgcagtggtgccatcatggctcattgcagcctcaaactcatgggctcaagtgatcgtcccacctcagcctcctgagtagatgggactacaggtgtgagccactgcacccagtcttatgctattaatctttaatatgttcttatatatcctaaaatttcagacaatgcaattccaaaagcattacgaatctcacagcttgattaatgttgcaccctctgctatgcctcactcatggagagaggaaaaaacgggtggatgttagtgcaattcaactctctctctctctttcacacacacacacacacacacgagagagagagagggagagagagagggagaaagagagggagagagagagggagagagagggagaggagaggcagggagaaagtgggagagggggactgggggagagagagagagagaatgaatgaacatgagataaaatttggaagtgggatataggtaatttttggacatgtttgagaaatataccactacaacatctaagtgaaaatgtggcaattgtgtatgtgattctaaggctgaggaatgaagtctgtgttgggagttaaaaactttagtcatcagattgtatgtggcagttgaagccatgtgattccatgagatggtccaggaagacaatataaagtgaccataaaagaagacccagggcagaatacagtaccaacatttaaaaatagacggagaaagagaagagtcaggatgcctaagagctttctagaaaagcatgtactacagtcttctgggcaatatactttcatgaasgggcacaattacttctcctggccaggaaaagcttcgaggtggtgcagaagtaccagatgtgatactcttgaggaacagtatttaccagatgtcctctggccacttctactttccaacacagaaccctcctgaactttagacctatattttctagtatttcctcaatgcccaccagcatctcatccttcttcgcaaagccaatccccattgaaaagtgtttagaaggtggaatatcagggatcagagactaacagcaggagtgaagacaaggaaggtattgaccaattgaaggctgtaccgtcctttaaaaaaaaaaaggcatgtaaggcgagaaaagctgtagtttttaaagtaaagatgtgctttcagaaatatttcctctattaaatttctacrtctactgtagacttgaactcttaagagctaatgctgtagtatttatttctgtgtccgagtacttacagcagtgtctggcacaggtaagggctatgaacaaatgtttatatcattgatttgaatgcactttcaaatggggccagcaacaccttcccacaaggatttatcacaaacattccctagtcacttttgcttaggcaataatttcatcagttaaatragggaattgggtcacattctgggacaagcagcataaaactttcctcaattgcaccagactagcttattacacctatctacaatggatactttttcactaataccattgttttcactgctaacacatatatatataaattgagtgagagagcaagagagagctccattatatatatacacacacaaccattatatatataaaaccattacagatacatatatacgtatgcatacacattattgtatattatgtgtacacatacattacatatgtatagacattatatatacattacatacatatgtatattacatgtgtatagacattatatatacattacatacatatgtatattacatgtgtacctcatgtgaaagtatattttgtatatacataaatagttcttatatatgtatatgtaatggttataaatatcatggttatatattatatacaatgaaattaaaaccttggtttagagcaactgaatcattaattatccacgataaattctatacttagaagaaccatcaagggagtgaagaatcggtgttattgtttatggggacagagtttcagttttatgtgatggtggtgattgaacaacaatgtggatgtacttaatgtcattgaactgtacctttaaaaatggttaaagtggggtattttatgttatatatatattggcacctgtattaggaaccacaattacaaataataattaggccaggtacactcacgtctgtaatcccagcactttgggaggctgaggagggtggatcacctgagatcaggagttcgcgaccagcctgcccaacatggtgaaacactatctctactaaaaatacaaaaattagctgggtgtcatggggggcacctgtaatcccagctacttgggaggttaaggcaggagaatcacttgaacttgggaggcggaggttgcagtgagccaagattgcaccattgcactccagcctgggcgatagagtgagactgcgtctcaaaaagtaataataataataataatgataataataataataagnnnnnnnnnnnnnnnnnnnnnnnnnnnnnnnnnnnnnnnnnnnnnnnnnnnnnnnnnnnnnnnnnnnnnnnnnnnnnnnnnnaatggtacagtcttggctcactgcaacctctgcctcccaggctcaagcaattctcatgcctcagcctcccaagtagctaggattacagtcacgtgccaccatgcccagctaatttttgtatttttagtagagacagggttttaccatgttggccaggctggtctcaaacgcctgacctcaagtgatctgcctgccttggcctcccaaagtggtgagattacaggcctgggtcattgcccctggccactatcatttcttttataagagttttggggttattgttgtctctgagtgggaaagtggagaggaggtgtaagctggggtactcatctgcagtgcatgaagggtggcgttatgtgactctgtgagtaagctgtaccgggagagttgtgggttgaattgtgccctaccgcaaaagatgtttaagtcccaactcccagtacctgtgtatctgaccttttttggaacagggtctttgcagatgtaatcaagttaaaatgaggtcatactgggttagggtggatcttaatccaacatgcctggtgtccttatagaagaaaagggacatgggggaaaggagacactcagagagctcaccatgtgaagagggaggattggagtgaggyacctacagccagggaacactgggggttgcccacagtcaccagaagcaaggaagaggcaaagaagggctctgctgcagccttcagagacaggacatgccaacactctgatttcagtcttctgggctcctgaaatgtgagagaataaatttctgctgttttaagtcactccatttgtagtaatttgttacagcagcctcaataaactaatacaagtgccaaggagaaggggatccccactaaccgtttctgggttgcaaatacatttgattggctaagagggattggctgatatcaatcatctttacagagcattctgactgtacaccaacctcattaaggggtatgtgtgtgtgcatgtgtgtgcgcatgcctgtgtgtgtgtgtgtgtgtgtgtgtgtgtgtgtgtgtgtaggagggagtcttgccattacaggcaaggactcataaaagaatgactgacagtctttctttaatgggtgacaggaggcagaatttaaaggctacctatgtgtgaagaagctatgacaaaaccaatgaaatgtttccatttcaaggagacatactaccaatatagctagtttagccacttctctaaaggaaagatgcagtttggagtattggaaagaatgtgagtttagcatgagatgaatgagaatgagttacatgttttaggaagcttatagtcttgaaagggtaataagatgcaaataattaaatctattaaaaggaagaacgattcaacttcatctatgagatacaaaatacgccaagagtacctatgattctaactctccagaaaaatgtccagaaaagaagggtacctcaatggacttctgggaacatgggggcacagagggctggtcatctagttaggaggaagagattgaataaaatgcagagaagggggcaatcaaggcctagggaagtttaatgagagccttcattctataatggcaggtggcatcaaaggtcaggctaaaaattacaggtttgcttttccaaatgctgaggagactctgaaggtttctgagcaggagtgcaatgtgagcagagctgggctttgagtagagtattatggtggctgggtttaatatgaattagaggcacaaaaatacagaagcagggaaaacaattggaaatttattgttaaaccagttgtattttcttgggtggcaacttgcttcttgattttctattctttagagatttaattacaaatgaggcttggaatccaaaaggaaagttcacagaacaagagagtcttcaacagtaaaagtagaacaaaggagcaagtcagcagccccaatttcccctcttcctgtcaccctaaataataataaatatcagggaagcaactgattcatttgtttttatcatttctttacagttaacagaatttaaaaagaacaatttttccaagcaatttagttgtgagcctctgatttctagttataatacagaattacttactgtaggccaattgagatttactagtcacctacaaagtccactctgaggagccttaactgttatttccaaaagagttagaaatattctacccagtgacagcaaagtttttcttttgcactatctctcccctcaaaaaagtatatatgacccattttctatcagacaaaatgaaaaaaaatagctttattgattcctgtggaaaaatgcatactctaataatttgatacctgttatattttagcttagaaaaccacgtagaaaaatgtggcactgccttttagtcattgaagtgttaatttctgggaatactctggaaattgcaataaagaagccactttcaacaaggcgcggtggctcacgcctgtaatcccagcactttgggaggccaaggcgggcggatcatgaggtcaggagatcgagaccatcctggctaacatggtgaaatcctgtctccactaaaaatacaaaaacttagccgggtgtggtggcgggcgcctgtagtcccagctacttgggaggctgaggcaggagaatggcatgaacccaggaggcagagcttgcagtgagctgggatcttgccactgcactccagtctgggcaacagagcaagactctgtctcaaaaaataaaaaataataataaaaaaaagaagcaactttctaatttctaacttcatgcttaaattatatcaaagataatatttgctgtcataaattcacacacaaattagattatatgtgtaactaggtgggccaatgcattcttcaggccaagagtttgttcattgctgatttaggcaaagctttttattgcacacctgggaaaatgaattccaaagatgtaaagtgatttgcttgtggtcacatttctagtaaattatttaattctaacataggtcattcatttcggagcctgcatatttagtgtcttcttattattttcctactatttacactctcaagtagatccttctcttaggttacacagaaagcaatctgggtcaatactctgtcactcacttctaaaagcaaaacaccattcgcaacttttcaactcattttcagaactrtagatttttggggttcttaccactacttatattggttccatgagaatgtaaccaggacatcagttctttcctgttctcttytctgaactatcctatagaattaaattgtacaacagcatttatgaacaatatggatttcactggagactgtataaggaacgtggagaaggtttgcaccatccattgaacgcattcagcttggaatcccaagttcagacatctytctttatctcactcctttttctattgcccaatcacaaggggtccttcttttctatcctttgcaccaatgacaaggtgaccattttcctttcccacaggtcagctccaccccagttgctacctccaaaatacccccagggtctcagtgaaaggaaaggttggccagttcatmgacccaccattgtagcaagcaagggaggagtccccttctgcacttgatcatgacttttgaactcttgctcttacatacatagctttcacagcattttcctacaaattatagaaatgctttacggaggaggaattctattttcaactcattattggggygatatatgagcaaagcagatgatgttcctcagatgttgtagatgaaaacttaatgtgcccaaggagggagaagaatctttaaagtcactgattgagattttgtgtactcttctgcgctcaaggttggttgtttaattaataccatctggctcattcaccacttgctaacacaaggaaatactkagaggactggctttctgatattaaatattacttttgaaatccaaatagttcttcttattaagctgagatcaaagttgaatttaattagctttaagaatagaactgtaaatagaaaaggcattcatcaacaagcatattatccttccttgcagatcagcctacacatcatgtatctcttcatgatgatgaaaataatatgttttgggaaaagtattagcataatactatcaaaggaatttgcctgatataaatgtaatatacatatatatatacatttttatataaaaagacatacttatcacagtagcatcatatttctccatggcttcartaattttttctaagattttcctcaccatcagacattcagaaacatttcctgaaggatcctttagtaaattaatactgctatattaagattcttaaatcctttaataattctttggataattcctaaattactctaagaactgtatccttggaaataaatcctaagaacaaaacgaacatggttttgttggaaggaccagctagagaaaatagccatcttaaaatgcagtcgaaaagtggcaawagcttttagacaaccattagctatcctcatggaggaacagattaaaatgtctaaaagaaatagaaatgttaaatgttccaattttgcatcaagtatgtaatttcttttttgttttgtttcatatccaaccagttggaacctacaaaataatacagcacagatttctttttgttggtcctgtaatacttcccctggaacaattatgcatgtgattgggggactgtcacagccaaactgatgtcctcccttgggaccatgaggaacaattgcccttccccatggggtggctctaaaagctgagtctaaaagctgagcccgtttgatgaatggcagcagccctctggactgtgccaccctttgtggatgggacagagagactacacaattgggccaaaatactttctcccaaatggtcaattgcaaattgtgtgtgactgcaggagagctctacaataaccaaggaagagaaaccatgacaattttaaaaagtactgaaaaacatgtttgtttgtttttctaaatccctaagggtctttttgtttgtttatttttttactggtcccagtttgtttccatccttttctaggctttcatgtcattaaatgaacaaggcatggacatttyatttgcaaaccaagtaacacgtaatatatttctgtgttccaaaccccacatgatgtaacttcaaatcgacaatgtgagaaaaatacatattaatttaattactctccaaatatctattttttaatcctctctgaatggctctcccacctcataggctttaaaacttctggaaaatgcaatgatgagttctaatagaccctgcttttgcctctggatagtggaactctatcatttatctcaggctaatttgctaaagctgtgcacacattaataaaatatattattttaggggagacggaggtgtcgaattattgcttatgtcatttcttaagaagtcgtgctcttaatgcttaaaagaaggctagcattgtttgcaccaaaaagttggtgattccctccccgaaatagtaatgaaattacttctgttgaataaacttttaaagtcattttaaaagctgaccaaaaaaaaaaaaaaaaagcttctggaaaacaaacctacagagtgtcatatatggggtcaaaatgtgggccttggaggcagggactgaaatccctgtttggctaacactgtgatttttggaaaaatgttttagcctctctgaaactcaatttcttgtccataaaatgggctagtaaagctttcagggtacctggaaggattaaattatagaatgtgaaatacagtcctaggaggggaataaaggttagactcgggttcaggagccagcagcctgggtttgattccccattcagccacttaatatgtgcatcaaaccccttcacttctctgtgcttcatttttctcatacatagaatgaaaacagacccagcatgacagctcgtgcctgtaatctcagcactttgggaggccaaggcaagtggatcacttgaggtcaggagttcaagaccagcctggccaacatggtgaaactcatctctactattaataaatatacaagggtgggtgcagtggctcatgcctgtaatcccagcactttgggaggccgaggtgggtggatcgtgaggtcaggagatcgagaccatcctgtccgatatgatgaaaccccatgtctactaaaaatacaaaaagtagctgggtgtggtggtgtgtgcctgtaatcctagctacttgggaggctaaggcagagagaattgcttgaaccagggaggtagaggttgcagtgagcagagatcacaccactgcgctccagcctggagacagagggagactccctctcaaaataaaataaaataaaataaatataccaaaattagctgggtgtggtagcacgcrcctgtagtcccagctacttgggaggctgaggcaggagaatcacttgaacctggaaaacgaaggttgcagtaagccgagatcacaccactgcaatccagcctgggtgacagagtgagattccatctcaaaacaaaggaaaaaaaaagaaaggaacgaaaacattatgtaccttggctgattatcagaaggcttaaatgatttcatacatgcaaagtacttaaacaatgcctgcaccatagtaaacacgtgatgaatgcttgccactattgttgaacagcataactcccctgctctgaatctactttctcatgttaatggggtgtcagaggcatgtctcctctctccaccccaagctcaaggatatttgagtgagcctgaccaggtccaaagttcagcttctttcccatacagagagataacacagtgtccctttatgagtttatgagtgtgtggtggtttagctgggaggtgcccacaggcaatggctagatttctgtcttgtaaggtctagaactgcaggtagggtgttgatggcattcattccagggaagaaaatgttgcaaagctaagtgatgaccccgctcaccaaatggtcccatctgccctggccagtctgtggggttggggttagtgccttagtctaacaagggctcttggttatgatcctcgttcaggttacacctgagacacctgaagaagacctagtgcttctgcagagcttcagattacacaataggcaccaaagagctgacccccaagaagtactcacctagtcataccaggcagagttggacccttgcttgtgtacaaggtgcagggaatgattggccccagggaagtcatagtgatccagtgaaataattgattgtcagagatctggtcatgagaactgcctcaggagaatagcccaacaaagttgagtcagcccagcagaagcccggacctactctgcaagaggaacttaagacatttgatacctgcctcagtcagggagaccaaaggatccaggcacaagcttcgcaagtggagttttattagacttgcacacttccattagactggggccttctcacagtaaattgctattaaattaagtttggcctaaagctgcatccatacatattttaatattggcttaaaggtttcttcatacatattaaactgtaacctgacttgctgtgtacacagagtgtaacgtactctcataacaggtagcgagtctcagccaatcactgcagccgagtttcagtccattacaggcagccaaatgtttaaacagtgttcagataaggcaaacgccaacctgtacctaaccctgctgtttctgtaccttgcttctgtgttctgtatgtcactttccttttttggtctgtaaatgttacccaaccaagcagcatccctggagttgctctgaacctattctggcccttaagactgcccagttggtgagctgatcttcattcaattaaactctgttacatcggattattctaaagtttttcttttaatactattttcagaattttcacatcatctgggtgaattctgaaaggacacctacatagtaaaaacaccctctctcctataatctgggtgactttggatagtggaataagcctgctatagtggatgaagcaattagtccccacctgtgtatttcctgggtgygggctccttgctcctccaggcagtggatgtgtaagcaggtggttttcccactttgagatggcacacccagtgaccctctacacatataccccaaccttgcaaatgattgcttaaggccagcggttctgatttgtgagttgggcgcctggtttgtcatatatacaagcctttggtagtgagatttgtagggtccctttcctcttcatttttgccctaatataatttaatcccaggccctcaaagctgactttttgcataagataaggacttaatggaatcttgtgaaggcagaactctaaatacttggtcacagccttcctttaccaattctccaaaggtgaaaggcagtggtggtggggatgttggggttattactactcctggagcttcctcttcctcttaaatagtaccccagtcttaactggataacctcaaaataggtcactaagtagtttagcaatccagaaataatccttcacaaatatcctataatacctctacctgccccaaagctatcctattctgagaagcaccaaatgaaccctgtcagccaaggtcttctttttaaagatggtcaggcagattcttgctacagcagaaaataaatgtgttctctgcaggccatcaaaatacccaggtgtttggtgggataatttgctatattcacagttttctttttaataaacatgaggtctggactmtaagatccttaggaacccagcaacttgttgggatattttatctgaaatatttggccatcagaatattggaaagattattctgggacaactgtaggcacttttcatgatgactttcctaagataatttaaaaattttgaaagcctgccaacttcaagttatctgatccatttgaaccatgtttctaaagctcaatcctaaatagaactcatgaaaccaaaagctttgtccctccttggtgacattatcccaagaagattattatagaatgctgaggatgtcactttacctgaataaaggatagtggcatgggagaggtggtgctgatgcattgaagacttagtatttgagtgactaatttgaccttcttctagcctggagctaacagagtagatctcacaccagcactacagcatgaaggtagacacagcatgataatagcaaagtagaattaccacaacctcagcaagtcagtacagtcagaatcaaggttgtttgcttggagggaagggtatagaggagagttaatattggcagtaaagtgggtatggcctccccagaggccagtattaagctgacattcttaaggtggtctcactggcatccaaaagcagatactcatttaactcatgcacaaatttgtaatatccagcaattgtcatcatctgatttagctaccaaggcctcccctggaaagacttctgactcccttgcctgttttatgcacagacatttccatcttaatttgggacaatccctgaagaagatgccaacatcttgctttgatttttttgcaggtgatttcttcggactttaccctgtctttgttttgatgtctgcagagagtgctgaaacactggcctggccatggttacttcctttttcagcctggcttggctcctgagtgatttaagacctgttttggaactaagtgtgggagttggaatgatgtggaagagaaggtcagataaataacaattgtcatcaggagacccaggcagaaatgggtctgcagaggcacagagaatgttcttcatgggccctgttccattggttacaaatggcccttttattttcattggaagggataaggaaagttgtcccctaggaacgttctcacaaatccaaggcctcttgctcttgcagaaagatataagagcttatagtcctgagggttacctctttccaagaattcctcatttggaaaaagagatggtgttggaatccacctgagacgctcacatgttgggatcagaagatagtgactggatggatagagtttttatagttcagatgaataaagacttcctttgctactgcactagctgaacctttataaaacacaaatcagatcatgtcccttccctgcttaaagctctttgatagttcaccattgattccacagtcaagtcctagattttctgmctgccattttagccctccatgatcagccacggcttatctccctggcctttcccctcagtgtggaccctctctactcatcctttatggcaaggggttagcatactgcaactcataggccaaatttggctctcaaggactaaactacactacaagctaagaatggtttttacatctttgaacagctacacattaaatgattttgcaaggagtttgcaaggcaaaagggattcagttaagggttttccaggcagataaacagcatgtgaagccatacaagtgtcaagacatcatatcaagagaaagttkttgtggggtcatagaaggatttttaacagaaaatggcaaagtcatatatatgtatggtaggaacagaaaggagagggcagggcaaaactgggggcagggagaccagacaggaggtgattttacttgttcagttaagcagtcatgatatataaactcagacaaatgtgagggtgaggggaagaagatgagcactcagatctgagagggcttaatgaattatctgttacagatgggctgtcgttggtgggtgggggaaagcttggctctggtttcctctcacaggtgrctggttctgttggctctggtttcctcttataggtggctggttctggtccctgagaggataatggagagacacctgagctagagaatgccttagaagtcaaggtgctggcgtgcagggaggatgaggcattgttcaatgtgaatgaatcatggttaaaatgtaaatgaataccttcagccatcacctcttytaggaagccttcaggctgagttatggtcctsctctgttggagcattggttagtcattcagaacctttaccaagtagctcttaactggtttgtacttttattttttaccccacttagatgggatgaactcattgaaagttgatgtaatgattaatctttattttgtcggggcctacagtgtccagttgctcaataaatgatcattgagcttcactgaatagaggtggggcctcttggggaaggtccccctgggtgatgtggtgggcagagcaacagctttgtcctctaacagacctgtagaatctttccactttctacctttgtgagtgttgacaaaaagagtgaaactctataaaatatttgaagagatttattctgagccaaatatgagtgaccatggcctgtgacccagccctcaggagatcctaagaacatgtgcccaaggtggtcagggtgcattggttttatacattttagggatacatgagactttaatcaaatacgtttaagaaatacattggttcagtccagaaaggtgggacaactcaaagtgggggtggaggggtggtgggggtagggcttccaggctaggttataggtagatttcaagtgtttctaattggtaattagttgaaagagttatcaatagaaaggaaggtctgggttgagataagatgttgtggagacygaagttttatcaaataggtaaatcctccaggtagcaggcttcagagagaataaattttaaatggttcttatcagacttaaggtcatgttgacgttaatactggagaggcataatggggtatgtcctatccccacttcccttcgtggcctgaatcagtctttcaggttaaattttaaagtgccctggcctaggaggaagtccgttcagatagttggggggtcttagaatttcatttttggtttacgtgagctttgccagatcacttcatttttatataaatattggcatacctcattttattgtgctttgtttcatcatgctttcagatttggagtttttgacaagttgaaggtttgtgrcaaccttgggttgagcaagtctattggtgacttttttcctacagtgtgtgttcactttgggtctctgtgtcacattttagtaattcttacaatatttcaaactttcacattattattattacattattatgctattacattagactactacattattattattgtatctgttatggtgatctgggatcagtgacccttgatattgtaattggtttgaggcaccacaagttgtgcccatgtaagagggcaaacttaaccaataaatgttgtgtgtgttctgactgttctaccactggctatttttccatctctctctctctctccccgctcctgcctccctattcccttagacacaacaatattgaaattaggccaattaatactcctacaatggcatctaagtgttcaagtgaaaggaaaagttgcacatccttcactttaaatcaaaagctaggaatcaattatgcttagtgaggaaggcacattgaaagctgagatagattgaaagccaggccttttgtgacaaaaagttagccaagttgtgaatgcaatgaaaaagttatcgaaggaaattaaaagtgctacactagttaccacacaaataagaaagcaaaacagccttattgctgatactgagaaagcattaatggttgggatataaaatcaaaccagctacaacattcccttaagccaaagcctaattcagagcaagggccaaactctcttcaattctatgaaagctgagaaaggtgaggagctgcagaagaaaagtatgaaactagcagagtttgactcaagaggttaaagaaaagacactgtcttcgtaacataaaaggtgaagcagcaagtgctgatgtagaagctgcagcaagttacccagaagatccagctaagacaaactgatgaaggtggctccattaaacaacatattttcaatgtagacaaaacagccttctattggagggtgccatctaggacatctatatagaaggtgccatctaggactttcaatagctagaaagaagaagtcaatgcctggcttcaaaacttcaaaggacaggctgactctcttgttagggactaatgcagctggggactttaagttgaagccaatgctcatttcccatcctgaaaagccaaggacccttaacaattatgctaaatctactctgcttgtgctgtataaatggaatgacaaagcctggatgatagcattctatttatagcatggcttattgaatatttgaagcccactgttaagacctactgctcagaaaaagattcctttcaaaatattacagctcagtaagaatgcacctggtcaaccaagagctctgatggagatgtacaggagatcaatatttgttttcatgcctgttaccacaatatccattctttagcccatggatcaaggagtaattttgattttttagtcttattgtttaataaatatatcataatgttatagctgccatagatggtgatttgtctgacggaaaagttaatcccaatcttcctgaatcactttgaggggttcaagattttattggaggaagtaactgcagatgtggtgaaaatagcaagagaactacaatttgaagtgcagcctgaagatgtgactgaatctcatgataaaatttcattataaaacttgaacagatgaggagttgctttttatggaggtgtgaagaaagcagtttcttgagatggaatctactcctggtgaagatgctatgaatattgttgaaatgccaacaaaatatttagaatattaaataaacttagttgataaaacagtggcaggggttgagagaattgactgcaattttgaaggaagttaggaagtcctactgtgggtaaaacgctgtcaaatggcattgcatgctgcagggaactctttcctgaaaggaagagtcaaatgatgcaacaaacttcattgttgtcttatttgaataaattgccatagtcaccccaatttccatcaaccagcaccctaatcagtcagcaaccgttcatactgaggcaagatactccaccagcaaaatgattatgactccatgaaggctcagatgatattatagttggcatttttttagcaatgaagtattttttaaattaaggcatgtacttttttttagacataatgctattgcagatttaagagacaaacagtatagtataaacataacttttacatgctttgggaaactaaaaaaattatataattcattttattgtgatatttgctttatttcaattatctggaatcaaacccacaatatctcccaggtataaagaaaatatacttttccttcgtatttttcagggccaccataacaatgaaatggaggcagcatacattggtaatggaaagagcatgggagtttggaagtcaaaagaggtgattccaatcctgagtctgacaccaaaagtaacttattcctgctctcatagcctcagtttctccatttgtaacatgagggtgttggattagatcatgttaccttcccatctagaattctattaggatttatgaaaccagatgacagatgtagaattgtcatgcaagtgtaaatccagaagcaaattgtgatggtttgaatgcatcctcccaaaagcatgtgttgggaacttaatccccaatgaaacagtgttgaagrgtggagcctaatgggaggtgtttaggtcatgaggcctccatcctcatgaatagattaatgtcaattattaaaggactttatgctaggagttcaatctctggctttcctgccctctcttccaccttctaccgtggatgctgttaacaagaaggcctgcaccagatgctggcaccttgatcttggacttctcagccttcagcactgtgagaatttcttttctttataaattacccaatccgtggtattgttacagcaacacaaaacagactgagacataagtgacagagaagagtcacattttagagtccaaaaaaggcttcagcagtaaattgtatacatgtataaagagtggccccataatgagtgtgtgatgtaccactcacattccccccatcagagctgaggcattcacttcccagctgctgggagcattgcctgctgactatctacagaaatcgtccttagctgaagggagctgcctttcccaaggtagcccctccgtgggggacagcctctattcaaccactagttattgtggggatacaaagtcccagccctctcatctcaattttggagatctctgagagtcatttcagcctcagagctctcctgggatctgttggaactgcatctcagttcaacttccccttcaactccacccagttctgctttcttcacttcctcactggtattccttaaggcattctcaagaaaacatctgcacacaaattcaggcatttccccttagacttcatctctgayttctcccctggcttctagacctctatggacttggctcaggctccccatcaaaaagccaaggtggaaggccagcgaaacctgggctcctttacacttcttactcaacagttacagaaatgcaagttgggaccttttactttacattttctgtgtatcccactgtactttaaaatagcaaagaagatttcttctcccaggaaaactattctaatgtctaaagtcagagaaagcagaaagtcagaaggactggccagtaaagccccctccaaatggtgccatggcaaaaataaaaacaaaagactctaggaaaatatacttaaagaagcttaactctataaatcaacacctggaagctggkagcataagctttgttttccacagggcttgcaccaattgtctgggcctcacagtttggtcaaatctcagccacaagttttcttctgatatcgtaaggcttggaatgaagaagctagaacttcattctgttcccccaaattcagtgtactacaaagaggcaaagaaatacatttaaagaaaaggaaaaagagatcaacaattggttataattctttgaatagctagataaatattgactaagagggcctatgagaaagaagcattcagatctgcctggaaaaattagcttcccttcctcgcttcctcccctactgttcagcatctctgctgcaagattctggctccgttatttctctcagtgggagctgccattttaatgcctcagcacagcactttttcagcaggagatcctgcctcaggtggcagatcaggcctgggagaatwgaggtctcatttaaactaagtcagaaatttcccaacttgttttaaagtgaaatagatttgtaaaaataacaataataattatttgacagtgctgttatagctcccagatcaaaatttaatctttaaagtggaatccattctttttccttctgaaggaaactaactttctacttctctgtcaggcattaccaacctgaattgaaacattcaccagctcagagaaacttcatgtgcttgaggaagacagcagcagaataattcktttctttgtttgaggtctttcttaaatattcattattgttcacctattagccattatatttagattttaaaaagttatttggtcttcttcatactttaaacctcttaaaaatgtgtataaaacccaaacttcttcatttgggggaaacggttgatatatttctatgtaatttacatcattttttaaaaagttgccctcatgagttttatttcattttttttaaaytggggtataattcacatacagtgaaatgcagtagtcataatggggcttgttgtcttcctcagtccgaggtccatctggtcagctcttctctcccgttttctcaaagtcccacctaggtcagccctggcccattcccaagccattctcctcttgggatctcctctgcattgagcctctataagatgcctgcctaccctcaaaggcctcctggtatgccctctgcactgcttcatctggactgagacctggctgtatctgagcccactgtatcttttacggctgcaatggactgaatgtttgtgtccctcacattcatacgttgaaaccctaaattccaatgtgatggtatttgcaggtgggtcctttgggaagtgattaggtcatgatggtggcactctcattaatagkattggtgtccttttaagaagagtcccgagagttagttagctgtctttcctccatgtgaggatacaacaggaagttgacattctgcaacccagaagagggctctcagaagaacgtgaccatactggtaccctgatgatatacttcccagactccagaactgtggagaagtcaatttctgttgtttataaaccagtctatggtgctgtgtcctggcagccagagccaactaagccctctcaagcaaaggctgctcctgctctcataccttccacctcgagaccacaccatggagctgggaatcctcctacctttctgytcccctgtccagaatactgtatgactctttccttatgcatctcctttaaggcagtcccattgctcttttcctaactccagtgatattatttatcaacctctgtgccactttcagtcatgaaggatttttgtaacctattcacagacttctcctccttccacatgcctgtcatctttcttaaagacttaaaatctgcaaagatgaggttttcaaccaaccgctttatatatccctaagcttgtcccactgtctagtctttttgatggccacttctacccagaactatcaacatgtggtatctccctattgccctgggcctctgaggccccagccctctgcccaattcatgatgctcctgcaagcagcatttctcaaactgaagcaaatatctaatcttccccaccatgtcttcaatggctttccattgatttgactgggatctgcaagtgctgccatactcttttcaacaycctgatcctatatccttaaagccaaattctcacgtaatattttacaatttggaccttgcagatccatatcatggcaagctagccagctgttaatcaaatcctccattcactcctgctctgatcatgcagtaagactacatttcctgccttcctcgctgttaagtgggatcatattatggcaatctagctgatggattatgagtggtggtgaggtgtgtccctctgaggcctggcccaccaatatctcccacatctaatccttcatgctcttcttcttttgcaaattggatgctaacaccagggtgatcctgaaagccacttgatgcagatggaaaactctgtcaccttgaatccctaaatggaacataagcctgtctctccctgcccctgtggactggctcccctagactgaagaaaaacatacacattgaccacaaataaaaagcaagcttttaacagagttaagccactgaaattttaggatttgttacagcagttagtttcatctaacaaatacgatgtgtaaggagaaggaattctaaaatggatcatattcaaatagagtcatcagggaccaagaactgggccacagtgaaggcagcaagctttgggtgaggcaacaaagagatctgaagttctctcttctttatggatttttwaaaaaatgttttattcyttcaagaatggtccattcatggaactggggctatcactgtctctatgtgtaatgccaggtaagaatargagaatgatccagagaaaaggagggactcagcggggtgagaggagctaataatgacctcccctcccacaatctagccgtcccccatcctagcggtcgacaaagtgtttatgttctttttgtactatgcactcatgagggacctgtgacatcartaagcagctagtcaggaatttggaatcctggatcctagctgtctttttttctgccataactgaccaccagaattagaatgagaagtggaatacaagataggtaagagagaaaggttcaggaccaaggctgtgagcaaggctccagagcccctggtagtctgtttaatgtgtgagtggcgtgtggcccagggtagaaactagtgggtgtttctccagtgaaggatgccacatgggcctgagcatctggacccaagcctcctaactggcatttctctgtgcttgctgtaatggattgttctagctgtgatgctgatgagagaaattacttaaggaccaagtcttccccctccacccccctctgttctgtctagcattcctgcagtctggcatcttcacttagaaacattatctccccagatcttgcagkgtccctaagtggtagctgtagcatatcgccttggggagttcaaggcaccttatgaatattatctcattaaatcccccagccttttccccaggagtaaagccacacccctcccccaccccaactcacaatccctgcttcattcaaagcagactctgaataataaatattgtgatttattgcaagtcatttagaaggaactataaatggaccctcaacttctccatctatttgaaaggtaccatcttaatgtgtgtatagaagaaataatggctgttctgacaccaacttacctggaacaccaatgatttatggttttggggcagagattgccaggtgccctttactcccactggacaaagaaatcccagaatccttattccttccctgaatactggcatttcacaccttccactcccctcactatcccagtaatacaccaggcgtctggaagtatttgctgctctctaaatgtaccaattttcttcaggttttcaaagctttgaataaactatttcctctgtcagaatgctcctctccaccccaatcatcctctactttgtgatctcctgttcatccttaagaactagctcaaatctcatgtctttcatcaaattttctttgacttctacagggtgagttagttgatytttcctctaatcttccacagcttcaaatagaagagctaccacttctatcaggctctagttacatgctgtacatatatattatcatttaattcacatgatacccctctgaagttggtgatacaattataactaattttgctgataagaaaaaagaggcttgaagaggttaattactcccaatgtttcattgataattagaaggtaaagccaaatttcaaactaaggtcaaacagcaaagcccaaatcttttttttttttgagagagtcttgctctgtcgcacaagttggagtgcagtggtgttatcttggctcactgcaaccttcgcctcccaggttcaagcgattcccctgcctcagcctcctgagaagctgagattacaggcatragccaccacatctgactaacttttgtattttttgtagaaacagggtttcaccatgttggccaggctggtctcgaactcccgaccttaggtgatccaccctcctcggcctcccaaagtgctgggattacaggtgtaagccacygcacctggccagcaaagcccataatcttttacttcataagcttcctccattttgttttgttttttttgtgtgtggggttttgttttgttttttttaaatcacttgttggcctattaggcttgagcttcttaaggtaagggattatgaccttcatgctcatatgtttgtacctagcacaatgcttagtataaaataagtgctcagtaaatgttggtggaatgaatgaatgaaagaaagaatgaatatacaattttgttgcttcagataaatttgttgtatttttaaatttcagggagcatgtaagttgccagatttcccttctgatgaagtgttgggaagaggggtccctatggagagaggaggattatttcaccaatgaggcaaatccaggagtcattaaaattgggctatccacttgaactcatggacgatcctaaagagctcaacctccactaggcttccccrtagagtaattggaatataaacaatctctgaactcattcatccattcaacaagtattaagagttctctctatgtgacgagcattgggctgggcttggggaaacaagagtcagcacaaatagtcatggtccttaaagtggactcctgttgtttgcctgtccagcatctcttctgctaacagaaccactcttttctcttgagaaaatattcttcctattttcagactgtgtgttttagcttgggctartttccarttcttggctttgagtttgggcacttggccaggcacgaccaatcattgtgttgtgtcctctctatccacagtgattggtttaggaatggtcatgtggctccagttgggtaaatgattatcagcaatgagtttttgactggaattagagtcatacatcacttctcaatggggctcattgagaatacactctgagaaatgtgtccttaggagatttcatcattgtgtgaacgtcatacagtgtactcacacaaacctagatgggatagcctactacacacctaggctgtatagtatagcctgtttattctaggctacaaatatgtacagcatgtcactgtacaaaacactgtaggcaattgtaacacaatggtaagtatttgtgtatctaaacatagaaaaagtacagtaaaaatatagtataatcttataggaccaccaccatatatgtggtccattgttgtttgcaatattcttatgtaatacgtaactgtattcaaaaagtgatgctttatttcttctggttaaatataaacctggaactactgacagagaataaaatcaatacaaaggaaatcagagctgagattttgagggagcaagagtagactgatggcataatttcaggctttagaaatggccacatctaaagccagcagaagccctggatttcccattcacatgagccaatacattcccttttcttcttaagccattttaagatggatttctttcacttacaatgaaatgagacctaaataacaataacattggctcttggaagtgaggttttgtaagtgacatcctaaaatgtagaactggctgagtcacagtaggttgcagagcaccaagaatttctctgttcttggctgggaagtcggctggattgaactgttttatgtaatattattaaggctcaaaccatgttctagagatagaaaatataattatattggagagaattgtctattccttatggccttcagtaatgccctgtaaggaagaaggaagcaatgggaagaagagagaacttctctcagagaagcccaccctgtatcagtcagcagtccagaatggctgagaggagccctgtgagttggaaaagctaaattctctatcccaggataaatttaacataaatgaaatgaagggaggctaaatacaaagagaagagactggaaccttgaggtagcatgatatccaacccctccgaacatcatctttcttccgtagcataaaaagcccttctctgggatgcaacgagaagcaaaagaaatttcagtcttgcctccctgccttagtgcatcattagtacggtggacacaacaggaaggcctgctgccaaggaacagaaacttccagatggtggttgagattcaaggacccatctttctgactggatttgactgaatgcaaatcaatcaagtgtttattaagatttaagaaggttgtaatgcctgaaaaacaaaacctgacaaatgataatctgcaacaaactggtcaacaactggggcagtcccaggctcatgaactcactgagagaaagcaagtagccatgggaagggaaacgtcttattgtcacgcttagttatggccacaggatgaatagacaaaggatttcctgccagagcagaatgaggggaagccagacaggttgaccaaggaatacctttcatcacagggcagagatgccctggttgttcctacctaccatccacttatcctcatggtagatgctatacagttgatgattacaatatattgtttctcttctctttgtccaagaaagtttttaatggtagttatctttttctttctcatcgtgtatcatatattttggggaggagtgagtgaatatgtcatttaccatgattttctagacacacgaaacttcacccacaccagaatagaattttcattgcagaaatcctgtcttagaagagagaggcagtcaactagttaagtttgtgtagaaattatgagcactggctctggaataagattgcttatgttggtatcccaagtctactacttacttgcataacttttggcaactaataacactccattgtgcctctgtttcttcatatgtaaacctgggataaaacagtaatatctttttttttaataattttgtgagrcttaaataagtcaatacgtgtaaagaaattgtagtgactggcataaattaagagcttaataaatrctagttatttttattacttatctagacttccctttagaatatgtatgagtgtgttttcagttttaaatggaatatttgtaccatgttaggtgggggcattttggaaattgtatgtacatacgttgggcaatggagttgaatgaatgtgtattgtatttttcttctggtaacagaatacttcttttccttagagaatcgtttttgtggtacatgtgggttagataagcattatcaccttggcttctctaatatggggctaatagtacataccacacagagttggtagtattaaatgtaacaatctaaggcactagaacaatgctgaacacataatagtgagtccaaagtctcaggactcttcactgatgctgcttctactattggaccctggaactcaacaatggcaaaagaaataattcagagacccctctccccaacacacatacctgctgcttggcccctgatcttttacttcctgaaacaggctgttctgataaatgtctattaatttggtgcagggaaggtgtaaggggaaagagttawgtgggtcactttgaagctaatatagtctaattacccacattctggtcattccattgtggctagaaggctctcagtctcccctctgggcctctgtccctctgccaacaatgtcctctctcctttccttcctctactcagagcttaagtcactttttaaccccaaacccaactcatttcttgcctcctctccagccacctgaacctcacttttgtcttggccaatgcaatacgttttgctttttcaagtctctagaagcagactcagcaaactatgacccatgagcaaaatcctgtctttcccacctgttgttgtaaataaagttttgaaatgcccattcatttatgaatgaaaatgcccattcacttttgtattgtttgtggttgctttcaggttataatgcagagttgagtaattgctacagagactctatggccaataaaactgacaatatttagtatcttaccctttacagaaaaagtttgccagttcctgctctggaatgtaggcattgcttaagagcttgttacaagtgcagaatctcagacctactttattaggttcagtaatttaacagattccaggtgatttttatgcacattgaaatttgggaagctgctttgaagcctttttagggcaagcagggaaccctgactcaaattcacagcacttagaccacttcaggatatgcaagagcgtctcagctggttcaagctgattgaaatggataagtagggaagtcctgggcctagatagtggttctcaaagtgtggtcctcagatccccccatcatccacatcacctcggaacttgttagaaatggaaattctagggcccacttcagaccaactgaattagaaactctgggggtggaggtcagccatttgtgtttaatgagccctctaaggtgattcaaatgcaagttacatagcgatccagagactctaattaatttagtttagggtaggaacctgttattgagatgygttagacataatctcccaggtaaatctaattttgagccaggattaaggacctcaggtttagatcctctcatccaaaaaggatttattgtgcatatacaatgtgcctggcactgagctaggtccaggctgtggacatatgtctgtatctatacctataatatctatctctatatgaataaacaaagtccctgcttccgaaaccatcatcacctaatagaggcatcatgtaaatcaataaatttcattcagggtaatgtctgctatagtagaagtagcctggcatccaaaggaggggggtaataaactcacttaaaaggtcacataggcttccagaaggaggaaatatttgagctgagtcttaaagaaatgaacaggacttcccaggggaatttcagacaaagggaacagcatgtgcaaaggcaccagggcacaggacaggaattcatgaaattgcacaatcagaaagttgcaaggagcttggtgtagcagtgccaaatctgaaaatggaaaggtagacgaagaagttcccaacctatggggaaaagtctaatgaggtggacctaaataatctttagtccactgagactttgtgccaaagttggttagaatctatctgcatctcaatgcctggtggagagtggccacatgtggagaaaatcaggtgcaaacagaatgctctggaggaagaacaacagccagtggctgaagttcccaggcatgccacttaagcattcaggtccccattgtctttgaaggyaaagcagatttcaataagtgggaactgcagcaactctacatccaggtatacacacccacaggcacacctgggccgagaggagctggctcgactttccctaggaataaacacccactatctgcccccacttaagctaagaggcgccctcctcagcctgtggrtccaacagaaagatgtagctggcagggccgccctagtcgtgcagccggggagcggacgtggcagtacacagctgctgactttctcccccctcacgttaagctggaacattttgcacttttcttcttcaactctttcaaagcaagtcattttcctcctctggaaggacgcccattgttcctttgacattaaagataggtcttcactgttttctcttaaggcagcaattggtgaagttaagatgtattatggggacttgtcagaaggatacaacattatacaaaggaatgatgtgaaacaaaaattgctctcttcaaccttcccaacctctcccgcatacagatttcaagccatttttctgccctcatgtgttcccggagcagctgggaattgggggtaattgaagagatggagtttgtggttctctgcagatggcccctctggctgccggggaagcaaggtggaactgggacttattcagtggacagtgcaggaggagggagagggaggagtcaggggaagggagactcaggaggamaacctcgcacatgtttttcttaggaatgtcttaggaatgcttacttcaggttctcagggttgcaggatggctggttagttttaaaaagctaaaggtcttctctttcccacagtgaattcggagttgatttcccagtgacttttactcaggatgacacgattaaatattactactgacatgtggtcctatctcaattttgagcgcagggtcaagccagagtcacaatttcctcctttattcattaatttgacggggctttggttcccactccatcacttactaaatgtgtcaccttgggtaaattaactaacatcccccacctcagtttcctcatctataaaatgggaatgagaattagagtttccttatagggttgttgtatgggttaagtgatacaatgtccataattaatatggtgcctggtagtcttaagtcctcagtaagtgtttggcacatgttattattttcatcattattaggccacagacatttattaagtgccacttgtactgacctgtgctctggacagagagagatgaacaaaatgggaagttgctggtgttccactgggagggagagtgatggttcatggttggtggtaaactctgggaaagaggggtcacaggctgctgtggcaggcaagggaggggtacctgcccaaacccagcagtcagggagggcttctagaggtggtggctcctgagggagacttgaaggatgaacagtggagaaggagatagtgttaagtgcagaagtcagcaaagtctcttcctgccagagagaacagcatgtgcaaagatatcaaaagaccctgaagctttcccagaactgtgtgcaggtctaagtgcctggagcacagatagaactgtttgatggggagttgcaggggatgtggctggaaaggaaagtctggccccctcaggaagtgctttgggcaggagataaaagactgggattttaccctgaagcaatagggaaatacttcatggttttcagtaggcatgtggcctggctactgggaggagagtgcattgggtggataagaacctggtcagaaagacactaaagggatccatcagggccctgaagagaaagaactgggacagaggccatgtagatggggaccwgggggtgctccttgggaagttaggagctagaatatctggcatttggtaataacytgatgcaggaggggttggggaaacaccccccaacrtaaaccaccaggtctctgccttcagtgacccatgagtgatccttcacagagatgagacagcagtagtagccagagaagactctgtcatccgttacagacatgctgcatttgaggtgccttgtgagatagccgggtggacactatcaagaggcttggggatttcagggagctctgggtaggtgatgtgcattatccacacagagggagcaattgaagccatggsgtggatgaggtcacccagggcaaggaaaatggcaaaagaatgtggctgaacacaaagtcctggggagagacagaatgaggccggaagtcagttaggagacttaattaaaagaagaggccmgagtagtatgggaggaaaaccaggagaaaaggaatgttatggagaatcaggaatgaggagtggtcacaggcgttggtggccactgagaagccaactgaggtaagcatctgaaagcggcctctggacttacagcgaaggcaggttgtcagtgatggaggcaaggacagagccagttgtggtgaygctgtaagttaaggatggaagatggaaacctacgaggcaggatttgccattagaaaccttggcagttagggaagctgtaatagaacctcgtgcttttcaagcactgcaagtacctgtggcatgtgttataaacacagccacataggcccttaccagatctgctgaaacaggtcttcagaggcagaatctcagaacctacscttggaaaaggctaccttggtgattctgtggtgattctgcagcaagaattccaaatgaccgggactggggcatgaacactggggttagcatcagaaatgttgggtctaaatccagcaccagcccatgtgggttggaaaccacataagtggggcatggatttgactacagatcaatggtaatttgctatctatgtgagtgggcaagtcattagcttcttccrtacccagccttctcatctacaagacagggagcgttctaaccctctccaggttattgtaggggttgttgagaaaatccacaattgaaagcactcattactgctttatyaatgttgttgttagctgcatgaccttgggcaaattttacaacctttctggactctcatttcctcatttgtgtaatagaaacaattgtttcttacttagcaggcattagaagaccaagtcaatagtgcttggggaagtccctgacatatagcaggtgctcagtgaatagtaatgttgtgcattagttagtgcaggaggttacactcagagatggtcaccagttaggctatctgcagtggcagctcaagtctgtcctctgcctccctaggtactagcagggtttgtgactgtgtagggtcctgcaggtgagctgcagaaatctgggctgctggttctggtcataggctttgcagaagcagtgatcaaaggccagggccagctgccaactactagccatcccagtctgtggtcctaaaaatttgctgtcaccccttccagactgcagggtagsctctggttccatgggagatgggtrgaacccaaggacagggtcctcccaaggacagggtcctctacatacccaaaggccttgggaaacaaggcaaaggctgagaattgagatgttcacaccagcaggaaagaactagtcaaatgccctggattttcctcatggctattgcatagccagggactcagagctactgtgcaatacggaaagatttgcagctcactcttctcaggccctgtgggagaggaagtggacagagggaaggatggacagtggggtggtgctgaggcctgcttcctgccttctaggtgctctggggacactgttctgctgttctgtttagggctcctgttggaaagttgggctcctttgggatctcagctacagatggcaatatgaccatgagcggtattcattcagtgccttgcaacttacaaagcactttctcccaacctggatcatttgatctttttaaccacacaatacaggaggcccagcaggaaatgactgtctccattttacagatgaggaaacagtaactttgagagacttacttaggcctcagaattggtgtgtgccagggcctggattcaaattcaaaatcatctggctccaaaactagtactctttgtactagccaggagttgcattaaaaatggtagccctgggccgggtgcagtggctcacacctgtaatcccagcactttgggaggctgaggggggcagatcacaaggtcaggagatcracaccatcctggctaacacggtgaaaccccgtctctactaaaaatacaaaaaaattagccgggtgtggtggcgggcgcctgtagtcccagctacttgggaggctgaggcaggagaatgccgtgaacctgggaggcggagcttgcagtgagccaagatcttgccactgcactccagcctgggtgacagagcaagattccatctcaaaaaataaataaataaaaataaataaataaataaataaataaataaataaatggtagccctggaatgagagacaggagaactagtttcttttcaagacttgtccccagccttgctctatgtcctgtgacaagtcacttaactgttctggggcttgagttagcaatgttaacaacacagatcttggaacagaaaatcggaaagattccttccaactggactatctcgctgtattaatgctggcggtgctcctagccaccagttgttccagaaatcaacctctgaagtgctaacttctgaagggatgctctagactccacccagctccccagggaaatatcccttgccagagagttctttattcctacctgaaagccacaatgatgtatctgagaagaacagagcttgatttagagaggaggaaatccacagacatcaaaaatcaccaatagggcggcgccatcctccttgccagttcctggcctctgtgcccagctgctccccgaggcatgaccccaagcctggctctctctgcccctctagggcccttctgtagcatctgcagaaggttttaggctgaataggtctcccttacttttctgattggcttgtgtgtccccagggtctgtacaaaagcagcagctcagcaggacctcagcaccgtttgtgaaatgaattggtaacacaattatccatcactctgtggctttatgtccacttaggctctgctgagtggtgtcttcacttcccagaaggacctgctgttttcttcctgagcatcaatttttccttgggagccaaaccttggttcctgtagttcacaatcacagaaaatgcaaaagaaaaatttaaaaattaatgaagcccttctctcctagagctcaccttgtcaggctcctggctgggtggaaggatggaagttaactttctttgcactcggggagagcacgtctggggcctggtggtctgcccagttctgccaagcagaaggaaggctggacttccccggggtccataccttggcctaaaggccacttcctttatttcgctttggtttctttgaccttttggctcaatacacagattaaggagaggggcctaaggaacaaatcctctccagtgccacatggattattctggaattaggccgctgctgtcaattttatttggtgatcccagttggatctccaaattatacctgtaatttggtgcactctgtgtattgcagtctgtcagagaaatcctataattattttttaagtgacaaagttttaaggaacagctaaataaatgtagctaaatttagtgcactgtctgtacaatgaaatgtggcaggaggcagagatatgatcagtggctggtggaaagagaattttgctactatccaaaaggtggcagcagaaattacctcaattaacttaacaagaagcctgttctactctgccagcccgcccgggaaccctggcatgcaccttttctctttcctgccaggattccaggccttccttaccaagctgtccccggctccatctgctgctcccgtctgaggctgatccccttgccctagtcacgtcctgcctcctccctgagatactccagcccagcattccagaaggaacagggtcaggagttcacacctccaagaaacctcagtgcagatcagcrtctaacagggagatcagatagacaaagcaagggcccgtttctgccctctacatactccatagaaaacgagagattttctacaaacccaaaagcataagatcttgggaggaaacatgatccatacctcatctagctgttcatttaattgtttttgttttttgagatggagtcttgctctgtcgcccaggctggagtgcaaaggcgtgatctctgctcactgcaacctccgcctcctgggttcaagtgattctcctacctcagcctcctgagtagctgggattacatgtgcctgccaccacacctggctaagttttgtatctttagtagagatggggtttcaccatgttggccaggctggtctggatctcctgacctcaagtgatctgcccacttcgtcctctcaaaatgctgggtttactggcattaagccattgtgcccagcctaagcttttaattttgagaatctactctgtgctggatttttaaaatgacttagataagtgaatgattccttaagaaaatatttattttgctcttactatgcgctacatacccttctaggttctgggtttacagcagtgtacaaaagggaagtgcttgcctgcaagtaactaacattctactggggacactaaacaagataaataacaagataaatggaaagactacatgcttggttataaaattacgtgcttgagaagtacaaaggagaaagataaaacaggataaagggcatgaattgtagaggaggctgctacacttttagatgtgtggccagggccaacctcgctgagaaggacaaggacatgaaggtggtaaggaagcagccctatactgtatgaaaagacactgaagaggaaaatgttaagtgggctgttggagaaacagaatgagtactgcaggctcctgcttgagaaggtcagggggaattggagaagagagatatgtttaaaaactaattactattctaagttcaatgtagtggtttaggccagggatcagcatactatgtgtttttgtacagcctgtgagctaagattggttttacatttttaaatggttgggaaaaaaatcaaaagaagactattttgtgacacatgaaaactatatgaaattcaaatttcagagtccataaataaagttttattggaacaaggccatgctcattcatttatatattttctatggctgcttttgtgctataatggcagagttgagtagttatgatagagaacatatgccctgcaaagcctaaaatatttactatttggccctttacagaaaacattcaccaactcctgctctaggcaatacaagagagtggttagtctttggttttggggtcaggagcccctgattccaggcttgggtagggccaccccttggtggttgtaagactttgggcaaatggtctatctactctgtgactttttcctcatttctgagatagggacaaaagtgctgtattattagtccatttaacgttgctataaaggaatacccaaggctggrccatttataaagaggtttatttggctcatggctctgcaggctgtacaagaaatatagtgccagtatctgcttctggtgagggcctcaggaagctttaaatcgtagcagaaggtgaagggggagagggcctgtcatgtggcaagagaaggagcaagagagaggggaggatgtgccagcctctttttaacaatcagattttgcataaactaatagagcaagaactcactcattaccatgttaccaccaggagggcaccaggccattcatgcatgagtgatctgccctggggacccaaacacctcccactcagtcccacctccaacactgaggatcacattttaacttgagatttggagggaacaaatattcaagccatatcaattacctaccctcttaggataagaatgagaattgaatgaaataaaaaaaatatgaaacacatagtaagtgcttgatatttgtagtcattataatgattacacatagtaaagtaggaaggtaggataaagagatttacggagtgaggaatgtttgtatccccctgaaaattcatatattgaagccctaaccccaatatgatgttatttgcaggtgaggcctttgaaggttaatcagattcaaatgaggtcatgagggtagagtcctcatagatgagcgcccttaaaagaagagaccagagagctttctctctctctcccaccmccatgtgaggacacagagagaaggtagccacctgcaacccaggaagagagccctcaccagaacctgaccatgctggcaccctgatcttggacttcagcctccagaagtgtgagaaatgagtgtctgttctttaagccacccagtctatggtgttttgtttatggcagcctgaactgactaacccaaggtaggagcaactatctttacctggggtagtcaaagaagtggccactgaggatgagcagaatttccctgggtggagaaggaaggaaggaaaaggcagaggaacacatgtgcaaaagcaatggtgatatgaatgagcatgtgaatgggcctggggtgtttgcagacaggagaggacagttctggccacttggagcacagacagcagtaatggaggtgagaggaaaggatgggatttggtagagctaaggctggagaggcacatttgtgaaaggcttgcatctcatactccgggtagacttatttgttacgttctgcccatttgatatttgaagagctccattctccgtccccgaagacattttagactatagggagaaatgtcagctaacaagatgacctcctattttgttctttcatggctgtggatggttcctgagctccttctctgtggctaacagctgctaatcatggggatatactgtggtgaataagaaagacacgacccttgatgtcagggaaaaagagtgttatgagaaataaggattattttttaaaaagaaaggggatgggcacagtggctcatgcctgtaatcccagcattttgagaagccggggcaaggggattacttgagcccaggagtttgagacctgcctgggcaatgtggtgagagccctaattytaccaaaactaaaaaaatgtgctgggtgtggtgggatgcacttgtggccccagctattccggaggctgaggtggaaggatcacttaagcttggaggttgaggctgcagtgagctgtgactgtgccmctgcacaccagcacagagagaggtcctctctggaaaaaaaaaaaaaaaagaaagtaaaaaaggaatacaagatgctaaggaaaaaagtatactgcagcataaagtttttaaagagttttaaatatgcaagtgatgttatcagtttgagggttttttgttgtttttagagatggggtctttctatattgcccaggctggcctcgagctcctgggctcaagtgatccttctgcctcagcttcctgagtatctgggattacagatatgaaccaccatgcccagcactggccatctttttsagcttggagggagcacaaatgaaagaggctgttgctgtagcccatggaataaatagtggtagcttaagcaatggaagtgactgtgggaatgagggaatggacctgaagaaaaaggcgtggaagaaagaattcacagggcttgctgactgggtgtagagtgtgagggagaacagacaatgggcagaaatctgcctgtgcaactgctggatggtgatgccatttgctgagatggggaatgagagagatcactggttttagcggagtgaggtgcagtggggatcatcagctcaagattagggatgttgagttggagatgcttgtgggatcataccttgaagcattttgctatctcattctgaagatcagggaagagatcttgggctggagctagaaattgaagagctgttaataaacagatggtaactgatgccctggggtggctgaggtcactcagatgctgcccctcagccatggaataaaccctgcataatagtctgccttttgaaaacagacagacagacagacacacacacacacacacacacmtgcacacacacacacgcaaatattcaatccctggtgactcagtggcatgtatctggccctgattgtgcagacagttttacaggaagttgccaacacaatgaaccatctgaagcttctaatgaagcaattatagtatgtggaaggaacaatcaatcaactgtaaactcagtggtgagaattttaccgagacagagggtcgatgacaggcttgctgcggttaagtcaaagagagtaacttgatcccttattggagatgaagtacacataatatgggaaattcccaacccctccaccaacagtcacaaagaaaaaaatttctgtaacaagactgctgcctcccaccaatcagtgctgctctcaaaacttgtcatgaaatcctcccccccaaaaaaattgcccacattttaggatattatgcttcataaagacctttttaccccagtgagatctctacaggtcataccagtcagtgctctacccttctcatttgattcttgaatctcaaagagctgtgctaagggagatgtcccatctaaggcaatgattatgatattcttatttccactgctctatagcagtcctctgcatgtattacttctaattttcataatgagcctgcagaataggtattatctggctcaatttatgaggaaagagagactcagtgtttaaataacctgtcctatgtcacggagctcagatgtggcagaactagatcaacccaggtctttctgactccagagtgcatctccttccccatggcctgacgccttccagtctgtctgaacaccttgcatgacctgccctctgttaagtccattctcttgactgctgggatattagaagattcttactgaaatccccacccattgcactgggcttaccttctagagacactcatataaaagatttaggatgcttgaagacagcaatcataccctttcattattctcctctgcagtaaacacttccagtttcttcagccctgtcccatgtgctatggggaggcagccactgctggctgccttcctaacagcgactctctcttcccccgcaatttccttgccagaagctcacctcctactgtagaagctgaaagggccagaaactcactcctaagaagtgaatactgagaagttgattttggagctagggaatgaggacattgaagaggcagagagatgaatgtggcataaaagaagcatctagatcctgatcctgacccccaccagctgtgggcaacttgtttaaactctctggggcctcagtctatttgcctctaaaatggggatgactgtactcactcactgcagggttgtgctgaggacagaacggcattaagcatattaagcacccagcatagtgctgggcacaggggaattacatagtagatggatgcggttatttttataaccattactgaagatgggagctgcaattcttcatggacttttgtttacttaatgcaacgtatggcatgagattcacacatagattaggcaaagggacattcatatcctaatgtttattcatgtatataatgtttcccctccctgcaaaatataacaagcagtaatatttgtgcatgtggattcattatttattgattcttggtcttgctgggtaaaatgttatcccaaccacaggtgccaatatttgtctcaggaaaggaattctcatattttaggaaacatagatacattgtttagcctttctttcaagaagcttacagtcactgaaagccaaagatataggtgtaaattataattacttacagaattcagtagagtaacaggctgtacagaattgctgcctaaaaataggctatatgccatacaggctaggtgtgtagtaggctataccatctaggtttgtgtgagtacactctgatgtttgtatgatgacaaaaatcacctgatgacacatttctcagaacatatttccattgctaaatgatgcatgactatgtatacacacattaatgtaaaaatacatatatatctatatgctyatatacatttatacatacacacatgcattcctttgttctccaaatatctgattactctcccttctgggaacataggagacttaatgtctcccaatccccttatgatgggctggggtcctatgactagttctggccaatgagttgtaagcagaagtgacatgtgacttctgacatgtgtcacttctggattagaacatttaattggcaggacacaccccttcaatcttttttacctctgccatagtgactagcaacatttagatcagtggttrcttgatcagctttggtcccaagtaagggaatttagaacagagctctcagctgcccctcagtgtactgatagtgtgaacaaggcagaaacctttgtcaccagcaactgagacttacagattgttaccacaacatagcatagccagtcccaagactgagggcctccagcagcccagtgtttacaggtgtagctcatggcttcagcagaggaaaaatctctcccttttcagcaccttaatgggctgtttcatggagagaccctctttgcttttcttttgttgtgtcctatctttgtatgcatcaccgaggacaggaagatgttgtaacagagttggccaggtctggaccatgtggctttcatctagacaatggagaagcactacgataggtggtcctcctggaagcatttctcaaacagaatgagggagacagcacagaaaatacaacagggactgtgacccatgggcatagctaagcgtcttttctttccctttttctttcttagctttgtttcttccttccctctataggtcttacttcctcccctacttcttatccatgacagtactttttcatatttcagaaacaatgttatagcttccttggtgtccccagtactcaacatagggactcagtaattgtggagggaataagcaaatgaaagaggttgtgtaagataagacagagccagaatgaagaagcacattttgttttttctgtgactgggagatcaaacatcaaacaatggattatgttgacagaaaaccttccaggataggccaaaaaatgtttaattctcactctctctagaattccctttaacaaacgcaaccaaacacctgggaatgagagacctgccactgtattatccatttgatttcaaactggaaaccctagacagattcccttgcctgcaattagccaggtggagcacagacaagttaatatcaacagctcatcttaatgcctacgctgtctccagaatccagggaaaggtgttcttccctttaatcctctgtggcaggacagatggcacttacaacccaacccagcactggggaagtgttttttatgccaccaattaaaatgcatttcctccactgcgtccatcacttgcacctgcaggacaaccagtagcctcaccatgagcctattccatctgatygctcccttgtccattggggcatgttgctacaaatccaaaaagtgttgccaaggaagaaagtgagagttgcatctgtactggaaactttctagtatgctcctagagtgttcggcaaattcttttatgttctcatccaattgacaattaccgtgaacctgctatgtgccaattgatactagagggaaaggaaaaggtaaacaagactgcccttgaactcagtcttgtagaagagacagattattaagtaactaaaattcattgtgaaaatactctaagtagagacaatttcaggtactgatgagcacagaaaagggaaggcttactaatttgggggaagggcccaaatcaagcctcagttatagagaggccatgtaagtctatatttgtattaaaatagtaacccatgtttttatagtgcaatatggttttaaaatcatttccacatatttgtctcattatttccaacaacctttgtgtagaaattactcttcttctctatttacaatttaaggagttagggctgagataggctaagagatttgcacaaaattacaaacaaaaatggaaaagcaggactcataactaggttttctgattttggagtttgttttaaacttattttgaattgatcagggttctcagctgcaagcaacagttaacaacaaaattaaaacacacaaacaaactaaaaacctctctggcactaagcttggagtctctgtagccaaaacccaaccaggatcgagaactgacaactgagctggtgaagtcaccagtgtaacctcccctgagcattagataccatagcatgcatacctgaaaccaccaacatgccttgtgctgccccttgaacttctgcttcaggtgcttctaaaaactcagtagagttgccccactccttgasaggtggattctcagtaatccctgcttcttgggtttgttaacttcaggtagaatctggagttactgcactgaggggcagagtctccatcaggtcccctaaatgcagggaagataagtgcctggtatttgcagtttcttttatgggcactggactcaacttcacacatttggtaattcccaggcataagaaggaggcttagaaggcaggtggcaacattttatattcccttcagcattacctctcagtagcgcttatttccctgcttaaaaattatatttactctatttggctgtttctcactccctgaagtcctttttaacccagtatgaacgaggaagactgctcctaatcgcctcctgcatcgtgcagcatgaccatgccttcatcatcacaatcatgccagaaacagctcacttcattatcaatcaaacccattcatttaggtgtgtggttacagcctcttccctcaatgactggccaaccaagcttcagagtttaatcatgaaaagtcagtgactttcacttcagagcactgattgggagagaaggaacaagagtccccactcatctgtgaaacgaaaaatgtcttcctctattgacagggaatagtgctggtggctctgctttgaaaaggggtcacatggggaatgactcgctgtctcagatctgtaagtcttttagactcattgattccttttttttaaaggggtgcaagtgaacttaaatttacaaaccaaaccaaacaaccccatacaaaagtaggcaaaagatatgaacagatacttctcaaaaggaggcatacatgtggccaaaaagcatatgaaaaaaagctcatcgtcactaaccattacagaaatacaaatcaaaaccacaatgagataccatcttacaccagtcagagtggctattaaaaagtcaaaaaataacagacggtggctaggttgtggagcaaaaagaacacttatacactgttcgtgggagtgtagattagttcaaacactgtggaagacaatgtggcgattcctcaaagacctaaagacagaaataccatttgacccagcaatcccattgctgggtatatacccaaaggaatataaatcatcctattataaataaagacacatgcctgcatatgtttgttgcagcactattcacgatagcaaagacctgtgattcttcaagtgtggtctcctggatggcagcagcagcaactaggaacattttagaagtgaaaattcttgggccccatcccggacctactgaatcaaaaattctggtggtggaacgccaccacctgtgtgttaacaaaaccttctgtgtgattctggggcatgctgaaacttgagaatcactactttagaccaagaaacttcttctgatgtgggcaccaagcttaagatctttcatgtactcaagtatctttcagtttcccttagtgaatctggatgggaactgaagaaactttaatgcagtaaatgtatcccagatcatccttttaggtaagtcagcctcaaagaaacctactacagtgggcactccaacaaaataaggactaacccttgcattattttatatccattttctcattctgcccacattaccgccccagaagagaagtcattttcaagatgaagaaacagactaaggaaggttcatttacttgcccaaggttacatatcaaggagtggtggagctcatggagtctatactgtgctaggtctatgggcatgatgggggaccatgggggggagttctctcaccacccatctgtaattatatcacaaacacctcaactaatcatctatttctgctaaagaagtgtgtctctttgatctggtgaaattctcaatattttttctttcttgaggagcccctttttataaaagcaattttattcaaatctcccattaactctatggctttgtaacaaaaatgattcaacagatgagtgtaaaccaggcagtccatcctaggagaaaaaagcggagggtttgaaatggggatcaagtagccaccaaacccaacttgtcaggtttagacacaaatggtctcttcctgagtgcttgtgaaatgagatatatttttaaagatgctcctaagccctctctttacttttattgcaatatttctaatcacataaatatctgcctgcattaaatcctatctgtattcgtctgttctcatgttgctaataaggacatacccgagactgggtaatttataaaggaaagagatttaattgactcacaattcagcacacctggggaggcctcaggaaactcacaatcatggcggaaggagaaacaaacacatccttcttcacatggcatcagcaaggagaattgcagagctaaagtggggatagccccttataagaccatcagatctcatgagaactcactatcacaagaacatcatggcggtcaaagcccaatgattcaattacatcctagtgtctctcctatgactcgtggggattgtgggaaccaacattcaagatgagatttgggtggggacacagccaatcatatcgccatcccattttgcttccttcctaacctaccctgaattccatggacagttatttcaactacattcaactttctcaattccccacctcgtccccgcaaacacacactcccctcctgccctgaataaattcactgttctctttgctccagttcctaaactatcgtccactcccaaattaaagtgcacagtcatgttttggatcaggtttccttaaaatctataccttcctgggcaaggacttcatgactaaaacaccaaatgcaattgcaacaaaagccaaaattgacaaaagggatccagtcaaactaaagagctcctgctcagcaaaagaaactatcatcagagtgaacaggtaaccaacagaatgggagaaaagttttgcaagaagtattaaggagtattgactcacgtaatcacgacgtgaagtctcacaataggctgtctgcaagctgaggagcaaggaagccagtctgaatcccataacctcaaaagtacagaagccgacagtgcagccttcagtctgtggccaaaggcccaagagcccctggcaagccactggtgtcgatccaaaagtccaaaacctaaagaacttggagtccgatgtttgatggcagtaagcatctagcacgggagaaagatgaaggccggaagactcagcaagtctctttgcatagcaagagtgacctttactcttgttcccaacaaattcctcatctccatctgagaccacctcagcctgtactttattgtccgtgtcactctcaggattttggtcaaagccattcaacgagcctctaggaagttccaaactttcccacatcttcctgtcttctgagccctccaagtctctaggaagttccaaacttccccacattttcctgtcttctgagtcctccaaactgttctgacctctgcctgttacccagttccaaaatcacttccacatttttgggcatctttacagcagtgccccgctacctggtaccaatttactgtattagtctgttcttatgctgctataaggacatacccaagactgggtaatttataaaggaaagaggtttaatgggctcacagttcagcatgactggggaggcctcaggaaacttacaatcatggtggaaggtgaagcaaacacatcccttttcacatggcagcaggaaggagaagaacgagtgcccagtgaagtgggaagttccttataaaaccatcagatctcatgagaactgactcactatcatgagaacaggatgggggaaacctcccccatgatttaattgtctccacctggttcctcccacaacatggggkcattataggaactacaattcaagatgagattcaggtggggacacagccaaaccatatcagcaattaagaggaatgcctacaaattcacacagcaatggaaataaaattcacagacatataagtaaaagaagccagacacaaaagagcatccactgtataattccatttatatgatgtttaagaatggtcaaaactaatccatgcaaaatgtaaccctagcagtggttgcttgggaggtggtaagattggtaggaaaggaacacaagagaactttctggggttacaaaagtagtttatatttttatcaggagtgtgggttacaaggctgtatgtattttgtcaaaattcatagaactgtaagatctgcgtattttgctgtatgtaagtgatatctcaatttctaaattcctaaaagaaaaatttattgaagtcttttactagtgccttctccctcttaagtcagaactgcttggcagagcaggaggtgcaggactggggaagggttaaaagattgttgtgtgagcctggaattagcacagaggaagtaaggtgaattgaatgtttaatagcattacactaagatgcctgatgaatttatctcataatgagagggcctgccctgaagacttgaagtctataagctacaatctcctttgggtcatytaaagctggaaaaaaaaaaaacatcacaaaattcagtggtttaaatagaaaaatattgtattgttgctcgcaattctgtaaaatgagcctggtttagctgggcagtaatttactggtcttactgaagtttactggctgtttttagttggctggtcagtggttctgcgctcagtcagaatcctgggttgcctgggtcacctctctttccgtatagtctcaggactgctttccccacatggatttctataaggtctcttcaacagacctaccctgtttctaatatggaggctcggggttcctaacagcaggaaaraagaagctgctaggtcytgaggtttacscctatgactggcacagcatcacttcctctgcagtctactagttaaagcatgtcacaggacaagtccacattcaagggaagggactaaacaaagtgtggttcattgagggccatcactgtaacaaaatcttatcaatatcttgcatatattgatttataaccataggaaagaactttccaataggactgcccacatctgtttctgaaactcttgatgttgcccagtatttctaactccatcttctgaataatatatctgctaagatataatagggcccagtttttttgggtaccactgtcttgctcaggtgactttgcataaaggagaaaatttacttccaagttcttggcagaatatcttttagctttcaggtactgacaattacgattttagggagcttttgcccttgctatgccttgtctctgccttccatgtctgggtttcagaaccagcacaaatttgagctctgcctattttcaatggtgtttacaaggctgcaggtatttggcaaataagctaggataagatttttgagttawcctgagaattttccatgcttcacgtacacatacctccacatttcttatgtatcatgggaaccttctacttatttcaaggcagcaactagggcaattggagctcactgcctcaaagaagggaggccacagccaaacaaaagacaacaaaggcatcaattctcaatcttgagtttcaaaagagccttttcaaagtcctggcaaagaaaataggttgatagaaaaagttgttgagtttcaaaagcttggctttttttgtgccaaaagccacatgctatgagaattggggctattgagtgataacatataaaagctaatggtctacttctgtagagtctgtaaaacttccaagggctaaactgaaggagggagctctcagggggagcaagaaacttgcagagtattcatgagaagggatcatgaacatgattcagcttaccaaaaacagaagggtgggttctctcaagtagactctgagatgaggtttggggtgcaaaatactgatttgcaattaatgattaggaaaggaaaaagaagaaagcagaattgggttgagggaaaagttgagctgcaaggcaaccttgaccaagccttaagcagcaggcactctggagcaaatagtactcccaaagtaattctgtgttgggcagaatggctggacctttatacccccaccttacttagtcaccagatacaagctgctctgggaagggcatgaccttcggcaaggttctgcatctgcatctgggagaagctgacagctggagaccatctgctgactgtcctcactccctgcacctgagtaacaacatctagcataaagagggatctgggcagtcgtttatctctgtgtctgccacattaattatctcctccctgagcttaatctcaggccaggagataatggaacacttgagtaggtttgaaaagcctaaagaaagaacctgtgtagaacttcgcaagtgtagcccaaaagcagtatagtgaactggaagcagagaggaaatgggaataagatacatagaggctccaaaatagctctttcagtcttgtgtggttccagactgccatgggagagtgtccaaaagtttccaaagttgcctgtgaccacaagagggtctggcaatgactgataaagagtcaaccatggactgcttggaccaattaacacctggagttgatggtggagcccaggatatgtcgacttattaaagtgagattaaccaaagaccacataggacaaagttcttagtagattccaagcaatgacagatgccagccataaaccaattctctctctccttttttctgacagaggctaggattctacaagacccctctgagccctacgatttccatcaatctggatacatctcaggtcttaagcagaaaaaaaaggggtggggaaaacccaaattgactgagtttaaacttgaagtgacagagaaaatcctaagtgactgagttccttaaatagattgagttttctgccattagacaacatgggggctttaggtagctactaagttcaattataacaaaaagtatttaaaagttacattttaattcacatgcatcatggattgaaaattcatgctgctatataaatatgaaatgatcaaagaaataattattgcattaaccagtaggagagacagaaatgtaaaccaacagaaacattcaagcttactcttggccaagtgcatcgcacaagtgaggatgctatcttaaaatccagacactgctggtgcaattgacattggtagataacttctgtaaatcaactcggaaatatatatatatacacacacatatatgatatatatgtgtgtatgatataatgtatatacacatacatatcatatatgtgtatgatatgatgtatacacacatacatatsatatatgtgtatgatatgatgtatacacacatacatatcatatgtgtatgatatgatgtatacacacatatatatgtgtaggatatgatgtatacacacatacatatcatatatgtgtaggatatgatgtatacacacatacatatcatatacgtgtaggatatgatgtatacacacatacatatcatatacgtgtaggatatgatgtatacacacatacatatcatatacgtgtaggatatgatgtatacacacatacatatcatatacgtgtaggatatgatgtatacacacatacatatcatatacgtgtaggatatgatgtatacacacatacatatcatatacgtgtaggatatgatgtatacacacatacatatcatatacgtgtaggatatgatgtatacacacatacatatcatatacgtgtaggatatgatgtatacacacatacatatcatatacgtgtaggatatgatgtatacacacatacatatcatatatgtgtagtatatgatgtatacacacacatatcatatatgtgtaggatatgatgtatacacacatacatatcatatatgtgtaggatatgatgtatacacacacatatcatatatgtgtaggatatgatatatacacacatatcatgtgtgtgtaggatatgatatatacacacatatcatgtgtgtaggatatgatatatacacacatatatgtgtgtaggatatgatatatacacacatatcatatgtgtgtaggatatgatatatacacacatacatatcatatatgtgtaggatatgatgtatacacacatatcatatatgtgtaggatatgatatatacacacacatatatatgtgtaggatatgatatatacacacacatcatatatgtgtaggatatgatatatacacacacatatcatatatgtgtaggatatgatatatacacacatatatatgtgtaggatatgatatatacacacatatatatgtgtaggctatgatatatacacatatcatatatgtgtaggatatgatatatacacacacatcatatatgtgtaggatatatatatacacacacatcatatatgtgtacgatatatatatacacacacatatcatatatgtgtaggatatatatacacacatatcatatatgtgtaggatatatatacacacacatatcatatatgtgtaggatatatatacacacacatatcatatatgtgtaggatatatacacacacacatatcatatatgtgtaggatatatatacacacacatatatatgtgtaggatatatatacacacacacatatatatgtgtaggatatatacacacatatcatatatgtgtatgatatgatatatatacacgtatatcatatatgtgtatgatatgatatatatacacgtatatcatatatgtgtatgatatgatatatatacacgtatatcatatgtatgtatatgtatatatatatcatatatatgtgtgtatatatacatatatgtatatacatgtatacacacatatataatcaagaaccttaagttatttatttttgcgatttcacttttaagtaggaggcttaagaaaataaccagatagcattctgaatgccatacaaagaatagagaaagcaaggaaatgggttaggagactgatcttacaagattctgggcaacatacatcagcattttgcacttgggtgatggcagtagagatggaagacgtaggaaattggattttttttggaggtagaggtaagactgatggactaaatgtttgtgacggttaaaggtatgacttttagtttttggcttaagcagttgggtgtataatggtggcatttacaaatattgggaagattggaggagggaacatttttgcagagagagggtagaaagcaagagatttattatggccatattgagtttttgatgctattaaatagctgtaaggctctgtctctttgacatctagtctggagcttggtggagaggacagagctggagagattaatttgagactcatgcacataaagacagcatttaaagccatgagactggatgagatcatttactgagtgagttactgaatgtagatataaaaggaatcaagcggatgataggatcaagtggatgagattattacagatttttatttgcttctttattgttttctatattttccaagttttcataatgaaaatacgttagttctataatcagaaaacaagtaaaattataatagatctgcagctgccactcagaaacacatctatacaactccctgctcttttttctccagaaaaagcatttcgcttagttgggccttaaaaatctaaatgcgcctatttagttgggaatctctgagacagtgcttgcatgaaaatcaacatctcacctcttctgcagtgcaaatgagccactcatcctctcacacactcccctaacctgcatcttgctgctgattgaacctgtgcctaattatgtgttgctgcttgagttctgaagtacgtaatagcaatgtttatttgccaagattgacagtgatgactaagtaattttcctcttcatggttttctttttctttttttaagtgaaatagagggtagctctgcctgtcatgctactaccccagagagttggcggggttgtccctggctggtgtgaattgaggcaaaaacccagatatctcaggagcagtttgtcagaagccccagtgagagcgattttccataattcatttggcatgactttcaggcaatggtaaaagggcttcttggcctgaacatttattcattcaactgaaattcactatgtccctttgttgttcctggccctacctgctgagctgagacacaaatataaataagaccttgtatatgatctcaaggaatgcaaattctagtgattcaatctgaattcagtttattaagggtaatgatgagggaagtgtgggataacacaggagtgcataaccagagagagggatatggttcagggtcaagtctacttggaaaggatgaaatagctaacatctattgaactgccaggcacagttcttcatgctttaagtggattaacccattcatgccttccaacaacctgcgaggtaggtactcacagaataataataataataataataaaactcacaggcatttattctcattgtatgggagaaaacaattgagccacaaagtggttaaattttataaaagtattgaaagtcaaagagaaattacttaggctgggtgtggagggaagtgttcccagaaattggagcagcatgtggaaaggcatgagaatgaagtcactgagggattgcaggtattcattaaactggcatttatgtcaggaggaagttcaggggaggcggccagagaaaaagatcagaaaccaaacccttgatgacatcattgagctggtgatcctactgcatggtgtatctgacttctgatttatttggggagagatggaactggagggttttgagatgttttctgaaaggaagtgacagagtctgatgtgccttcattcaggctgctttatgtggtctggatgcactggaggaaaccagacaggaagtggttacagtggtcttgataaacaacgaaaagtaacctacagccacctggagtgagtgtggacagaggctaatggattcaaggagtctcatgcagtaaatgattggacctggggacttataggaggtgagggtctaatatgaggagtccaggcccatgtccaggttcttccttgggtaactgggtaaatggtggtgtttccctgagaccaggagacccagggaaggagcaggtcttgtgtagacagatggtccatggggtttgttcattaaggtgccttgaacgtgggtctctggcgaataggagaaaacaatgcccaggtgaactggcagaaatacatgaatgtgtagatggaaacccaaatgcaggaacaaaccaaccaaccaacaaacacctctcaacctgcctcttatctgcaacctgaaatttcagcattttcctgaaaacttaaggggaggaagatcttaaagatgttcttacaagcaaggggtggtaaatagaaattaattggatagcacttgttattagtgttttaatacgtgttaaatgtcactgacattttgtgcctttttaaaaactctattttaggaaaaatatgaaacttatattcatgagacctttcctaggtttattgttgatgtttcctcctcttcctcccaccgtctgttctctataaggtcttaatttctctaaacccaaattctcctactctgacagttcagaagcccattctttctggtagggaaggcaggtctttatttatgagtgtcctatttcacagataaggaaaagaagagtcacagagagtaagtgattttctcatggtctcattctgagtcaacagtggagctggtatttcaggacagacccttcgggtcccaaaggcccatgtttccatccaccctcaccagctccctgagaggtaggttgggcagatataggacacaggcttggaagaggggctgcactcccttcattgttcccaagcagagttttctggttctttaaaaataatgagcactgaacagtttgggttgtaagtaagataagagctgcaggtctgctaagctcctttttagagtcagggaaacagtctgaaataaagcgatgtggtgttgcttgcaaaactctagaaatgctttcacttggctagagaagtttaccactatcctctctgagcaagaggatggttgagagagaagcatcagattgaacatggttctattgtgtctagatcagttaaaggttccttaggtggaggacatttcaatgccaggagaggtgccatgagagcctcagcccctcccactttgttgatggacttccccattggagtagtttctaggagcaccaagacacacttattcattcaccaaatagttattcagcacctatgtaaagtgtactcccggtcgcttagcctacatctgtctctactttcctcctctctaattaaacctagattttttttttatatctcattcctattctagatagaaatcataatttgtctgggacaatcagatgatggtgattacctgccaaggactgtatgggtggactaacataaattgacccaatcagattacaaggaaggttttatagactgcacttgggaaagaggttgccctcttttctcttctagatgtgaatcatatggtgttgagggtcatgctgtgaccacaaaggcaactagctttagggtggaactgaattgatgatggccagaaaaaaagatcagaacccgaacccttgatgagatcattgagctgctgatcctactgcatggtgtatctgacttctgattttttgaagttatacatttcctcattgtttaagccagtttgagtttgagctgggatctgctattacttgcagcacaaagcatcctaactatatcaatgacttctttgttctaggcacagtgccaggccctggaaacctagtcaataagacacagtctttgctcattgtggagtgagagaggtacagaagtgagcagaacacttcaattctgacttatcagttcagtgcaatgatctcagtaagccctaaaggctacaggagcacctgggagggaagcctcattcaatcctgggggcaagggaacccttcctagaggaggtggcatgtaagctgagacctgaaggatgagtgaagattcactgaagagatgtgctttaagtctgagagagacaggctcagatttaaattcagaagaatccctctagcaggccatggagtagagtgttttaccctcaaatgctcatgcatattggctcccagtgctccctgaacacttagggtcaggcagctgagtgtgtacttcatcagtaaatcttggggagagggaagccccttttctaaccctcatatacatgttatgaggattaaataaagtaatacatgtaaagaatttagctccatgcctctttcatagtctgtgtgcaattgatggtaaccaccaccatcatcatcatcgttgttgtagtttttaattctttagtaacgtaggaactttgtttccaagaactctcaaagtgtgatttggaggtcagttaggatcttctagtatcttcacaaggttcataagcaagaatcctgcagtgtttacatttaaaccaggacagtgactatatttctaaatctaaccataatcaataaccaatttaggataattaatagaagcaagacatcttctcatggctgcttagtcaaagcatgaccatctatcacttgggaagcctcttcacaggtagtgtcgggcgtggggtggtgggatgcatggtgactgactggaactttttaagtatgagaaccctctgcagtggcagaaaagtatttgcagagcaatacttctgtttctggaagactcaaacagagctgcagtacagaaaaaaagactaataagtgagggtggcacttgctcaaccaattatacagagtgaaattatgaggccctcttggaccacacctcatttcaaagatcagcactgagcttctgcctcacttctacattagtcaggctgcaaatacttatggagcagccctacaacaagccaggtgtgctcatagttgtggggatataacaggaagcctgagagagcccctgccctcaaggagcatgcatttcacactctgcagtcctcctctggccccgatactgctttatcacatggcattttcacagtggatacttttattcccctttctacggattaaaaaaactaaggcataaaagaggctaaatagcaccccaggtttcaaagctcataagagaactcaaacctggctctatctgaccccagagcctgtggtgtgagctctacccatcttccatcttcatacttaacgactgaagaaatcaagccatttacatttctgcaaggccagcaagagaaaaatcagtggatgtagtagagatgtagtaaaatcaatggccacatatcaagtgtctaccacataccaagcacatcctagtctctttaatctgtttttattttaagccaccttaaggaaggtgatgttattgtcctttctttgcagatggggaaacaaaggttccaagtcactaaagaattaagcacaataacaatgagaatgatgatgatcaattataccaagtgagcacaaactatgggaaaggccttacttattgtatttaatccctataacatgtatgtgactaggtacttttatgtcaataactttaatgccaaaaatagatggagaagctgaagtgtgtgaaggttaagtgcccaaggccacactataaatggagcagtcaagacttgaactaaggcaacttggcttcagagactgcactcttaaccaggctgatgccccgtcagggacaggacacagaggcagggcttccctgcttgacaggctaccagaagccagagtcttggggagatgtagatgggcccaggcctgcatctgcagtcttccaaacagccccctggaggaggttcttccagctctagggaaaggtcagaatttcagtctcatgttttcacacatcttaaatggrtttcagaagcactggggctgccccagctcctctctttaaacaatgtggttaagctgttgtagcgttgctagagactgcattcctcctgcattgtgatgtggtttttggcagtcatgcatgcagttagctaaaccaaactaagctgtttcattaatgggaatttcaagagagaaattgtgagtagaaacaaggcaagtttgctatccagccctaattcaaaaagccacataattaggtaggtggggaaaggtagtgtcccctcagattcctagagtgactctctctcgtttttctttattaggtggtggtggtgtgtgcatgcttatgtgcatttgtatgtgtgtggagggatgttgggaaggaagtcccagcaaaagatctattaccctggaccctctgggtaagctttctctgtcgtatgaagagcataatactgactaatcggtttcagctctgttcagcttccttttacttccaccagttctcttctacacagccctcagcagcagctccaacccttcacctctctgcctactcatccctctcctctgacttcggatcccacctcagcatgaaccccgtcactccctgaatctttcaccttcatggagaggagagcacattccctttgcacttccttccctcttcatctctaaagccaattgttctcctgtgccctgtatcccagtaagagtttgcttgtcagtgcccctacaactgccatggctccttctttccagtgtgataaacatgtccaagtcatgtgtattctaaaaaacagtcttccctcaaccctctctctctcaagccaccgtcccactcttactcacttggcttcaccactaaacatcttgacacagtctgccctgttagtcacagccaaggatctccactcccatcacagccaattccggcttttctcccctcctctactagcagtcactgctgccgtctattataattttcagacccaggggacctcttcttccatttcctagccacctctaagcaaggaaggaggaggaggctcaaggtgacctctgaagggggagtgttggtattgagttctctggcgttttctcagggagagcctggagttgcagacaaagacatttttcatctaccaagctgcatatttttacttagatattttaaaaagcaatatcgagctctgaaagaaaatgtaacattgatgccaaatcagatgagaactaacacttggtatcaacaggaatatatttgaatttaaaaaggctagctgcatctgacagcaatgtgtctcagctacttagaggctgagtggggtgggggtgggggagagaagaacatttcatcatccatccatccatccatccatccatccatccatccatccatccatttcttccacagacatttattgagtcctgattcagggccaggttctgtgcatggcactagggaggcaacaatgaataagacaaagagaagggtgtagagcagtggttaagggaatgcacgttggctgcttgaagtgctccacccctcctgagctgtgaatcttgggcaattatttagcctttcactaagggttctgatttataaaatggggctaataatagtagtcacttcatatgtgttttaggaggactgtagcgggttgaatggaactccccccacccccaaagatatgtctaattagaatctgtgactttgaccttatttggaaaaagaatctttgcagatgttattaaggatcttgagaggaaatcattctggattagggtgtgtgctaagtccaataacagatatccttttaggggaaagggaaaagacacagaagaaaaggtgatgtgaggggagatggcagagattggagtaacgcgtctgtaagccaaggaacaccaaggcttgcccacagcctccagaaactaggaaagaggcatgaatcaggttctctcacagagcctccaggaggaaccaaccctaatgacaccttaattttccacttccggcttccagaactgtaagaggatacatttctgttgttttaagccaccaagtttgtagtcatttgttacagcagtcttaggaaaaccaacacaaggattaaatgagatgatgtgtataaagtatttagaaccattcctgggacataatgagccttccataaatgtttattaagatggggggtaggtgacagctagggtgatagtctatatcttgtgactcatagggaggcagggaaggcttcacatcagaagtgacatttaggctgagtcttcaatgggaggtaattccagaagagaaaaaaagcttagcactcaagatacgtgcggtgtgagttgtttagaaaggaactgacattttcaggaaatgatgagcatgatatttcaagacactttataatttctatgatagaatgctattgcctatcaactcccaggccttgccagagaagcttactggaagcattttatcaacacttcctttcctatttcctttctgttccctacctgaggctaatagagaagacagtgagatgggagaggctgatgtgattcctcatatttcccacctacaattcggccttaaatagccccctcatagctctgtgacataatgtgactgctggagtcaaattttcccttccgaagggctacaagaaatcaccagccgaagctcagtcaatatagaacatggaggcttctatcttaccattgcttttggaattttttcactcaggaagttcagtttaagaatgcaattgcagtgaacttgtcttgacttcaactggctatcactttacagcagtagaaactgcttccagttataaataacaaaaagcctaaataacagtggtttaaacaaatgtctttccccctccctactccatctcacaagaaattcaggatgagtccatttaggcttctacagcataatcacaatgcatttaggaacccagcctccttcaactttctggggcaccagtaggtcatactttagaaagcatcacactttcacactcctgtggtctcatggttgtaacttggctgctccatattccagaaagaagaaaaaggatgaggggatgtaaaaggggatgtagaaggggaaaagaatgcagtgtggagaaagaggtgatatctataattggaaaacaaaagtttcccagaaagtttcagcttacatttcattggccagaaatgtgacatatggtgttcctagctgcaagggaagctgagaaatatattttttaaagctgggtacattaccattccaattaaaattaggcttcaactaagtaagaaaaatgggagtgatagctattgggcaggcaactaaccaaccaccattgcctttgttagttgaacatagtctttgttaaacttaaatctgattgtgtcaatcccttgcttaaaaatctttatcgagctcacaattcttacaggcatctccacttctttatgttgaaactctttggcatggtattgaacgccgtcatgaattctctgatcaacctttctagctttctcctctcttggcattcctcaccagggcatccagtaccacctgccatccccagaacaccaggctcagcacttttcacctctatgattgcataaatgcctccttttgcacctggaatgtcctctctccatcacgttttcttcctggcatacatcccagactagtcacttaagactctgttcaatggtctagcctttccagtgtcaaccactccccatccctcaggcagccagttcctccctcctccttgtttctaaatgacctttatcatactgttttgtgaattgtccctgtaagccccaaatgaaggaaacataaacaatatcattggtgcctgccatcagcgttggcatcatagttttcagtgggtcttgggccatacaaaactgaataagaattcttctctttctaattaagtcttaacattattttacagataacccaaatctgaaagtctagcctctcaactgtgaatatcttggctatgctaaaatatctagaaatttttaaattgcaataaaagcatgcaagatgcatggttgaatattgttatcttcattttacaaataaggaaactaagacataacgtggtttaagtagcttgcctgaaatcacacaattaagtgggtcagctgggatttgaatccaggtgggctgactttagaacctacattcatgatcatggtatctccctctcttttgtatatccaagggcatgattaagttattacttccattcatggctggtgttggtgcaaattaataatacccttttgaatgctaattgtacctttgaaaatttattttaatggaattatccaaaagtgtggctggggatgccatgggcaagatatcaactacatcattatttataatattgcaaaatctaaaaatctaaatgttcaataactcatgagttacacagttatgtgtttccattcaatatgttatgtcgttctgaacatttttagttgtgaagactctacagcaacatggaaaatatactattaagtggaaaaaagcatgttttaaaattgattagagacatgtaaaaagtgctcaggaatgaaactggtagaaagcattcctggatatggatgtgggaggcaggaaagtgactttattttgatgtctcctctaatatcatcacattaataattgtaaacataaatttttaaattctgaaggtaaagacttctccaatccttaaagctccacctgttggcacgagtggagtgtatacacaagtgtacaagtgaaaggaagtgagagatagttttgttttgctaaacttattcctctgagagctatgccataatggtggcaaatagtgaatcaataaggatagttgcaaggaaaaaacatatagtaatttttgttaaacttaggactaaaagactcaacgaatgtatgtgagtaaccaatttcttttatgcctctctaagtcaaatatgttcttttggatggasagaaaaaacacatttactatcaagaccatgtttcccaagggttgccactatcaatgcagaggtacagtcaaagcctcacaccaggaagctaatgggtccagcaagccccaagcatctccagtggaaggcacgtctccaaatgttgcatatctatgctcaccattcatgagctgtcagaagacacatctcacgtctgtcctgtttcttgctatagctagcaccaaatatttgctcagaaatcttggttaagtgcatgagcaatgcggtgggatcagcatcctttaccttctaaagaacagagtttctttctctaccagttcctgactatggtggaggctgcttggtcacgtgctcttcctaagcacactggaagctcacacacttcccagtccctttgtggacaggtggaacaatgtgaccagatccagcccataaaaagaggctgaaagtgatgtgtgctacttcctggatcaggcatttgagtgggtgaaacacttccaagctctcagcgttgaccttgagattcatgtgttgagatgacagcatcaccagatggagcaacccagactcccgagtcaacaggtctaggacacctcacagacattcacagggaatgtgtgtaagaatcaaatctctatggtgttaagccagagatttcaggatttgccttgttgcaccccctaccatgacttatatagcaataaattccatttcttttacataaacaaagtgagaatatggattagacatgaactcagtaaaagcactgttcataaaatatttcatggagaccatgagagaacagctgtatcgcagtgaagtccattaagtcactttctctcctttctgaaaacatacaggataaacttctcaacctgcagtccttagaaaaggttgagtatctcttgagtattcgaatataaaatgtactcagaatgcgatcttattgattgatagggatggggaggaggaagggttagaaccaagtttttagaatgaacactgaacaaatgattcaggaaccatacttctaacactggtagaggcagatagtgtaactcagctttgagttaataattaatgctgttggttttaatttacttttcttctaggtttcaggactattaatttttccattgatttataacagggtagctcaaagaataagttaatggtgataattatggctgcaggatgttcagtaagatagtttgtggcgcaggctttcataagcaaggacggcaacattgaaatagatcctgtgcagtgggtgtgacttggcagttagcttaaaatgactgtgcttgtggattcagggtcccagatgatgtttaatcacgggtgcttcctccttctgaagttcacacatcactttgattcacatttttgatggaaaatattccttccctaaaactccctcagttggtgatgaatacctgatgcagaaatattaacatttgaaaatcccagctcaacctcaacctcacctcagctttacctttgctttccatacctgtgtagattcaatgacytaaaatatctcgtgtacaagcattgaaaggtagtgctataatatttctagatttcatatctgtagtcatatctgtaaatgatttacaacagatgcacatagacacatgtgaaaaaaattctttattaatttctcacatttcattacaaaatgtatgttgcaaacaacttgaataacctacttgtggttttttttgtttttgttttgtttttaaacccttggcttcaaggactcagggtctccctatctcttatgaagtattgggaaacactgattactggagtcaataggttatcattttgctatttattttcttctctcaagctctgaaaaaaatgtcctctgtataaattaaacaacaacaaaaaatgttgtaaattctatgtcattacagtcaacagaattataataatgcatccaaaatgtgcggccacaaaatatcaggtatatgtttgaaaaagaaaaaaatgacattctagccttgttaaaaggataatggtcccatatttttattaacaggttagcaaaacaaaatccaatggattacaatatttacatgttatttgaaaaataaagtagtgataaaagcatgtcacaattattttctttttttttttcctttttctttctttttttgtttgttttttggtaaccattacaaacacccaatccaggtatggaactgtttaatacatttgaaatgaggccaattaaaaacaaatatagacacaaaatgaatctttgtctggatagttcacactttccccattttctggtttccacatgatggcccccatcccttaaaaaaattaaattaaaacaaacatcctacaaataaaaattcttaacagtaagaaaataaaagaagaacatgcttttcaagtamgcacttattccacaaatgcaacatctttccatggattttatttgaagctgtgtgggacactgtcatctcagcaattccccttccctttcttccctcccaccctcccacaacccttccaagtaaaaaaaaaaaaaaaaaaacatgaaaaccaaaggattcacacgtgcacacatgcacacacacactcatacacgcacacacacatccaagcacacacacacacgggcttytaaaacctaggcttcaagaaaagttyttttctattttttggaacgaaaccctttgttcacaatcagaacatattataaatgtaggcttagatttagtctaagctgctccctcctgaaaaagctgatatgggggacagagcagctggcagctagatttaaaaaaaaaaaaaaaaaaaaaaaaagaaagaaagaaagtagttctccaggctccttgtaggatatgttatttcttgtccactctcacgaaagggatgggattctagtacatcccctcgtcccctaaataaatgaaaacccccaacaaaacacaatgccagcagaaacaaaacacagattttaaaatcacacacaaaagccagccaatcctaacagaaattatttatgagacggataatgcgtgaatttgacaggcaacaaaagggtgaggaggacctcctcgtctggcccacaagctgcatagctgtgccgaaagtttggttctttagttaaattaaaaaaaaaaaaaaaaaaaaaaaagaaagttaacttctttgttatttccatgtttaaaataaaaacattcctattcacaaaaaactaaatctcccttgccccgaaattaaaacaacaataacaacacacacacgaaaaacaattcatatgaaaaactgaattgtgctgtgtttgtaacactcaaattgatagaaaataaacatgtggcaaacaaaactccacaatcaccttaaaattagctcacatgaatctaccaaattctaaattatagttgaacactaataaacagcttacctggaataaaggatgacaattcacaaacagttatctaataattaaagtctgtttcttttttttgttttgttttttactaaaataattaaaaaaatcacagtattttaagaaataaaacccacatggggattttaagcacaatttgtgttcctttctttaaaactctttttttttctccattcaccatcttgcccagcagttctctctacatttaaccacaacgacgacaggtagtactgacaaatgcagagagttcccttggttaagtttgaggtactaggaaacaggtgactgttttatgcaaagcagtttttttttttttgttttctgttttttgttttttgtttttttttcccaaagcggctgcagttaggtcttgaaaaagcttaaggtattaaaactagaaaaacgcaccaaaagttgtgcgtcaaaaagttgctccccaatgagaagtcttctaccgtcatggagcttctgtttccacatactgtccaagaccaccacagggtgcaccgtaccattgggaggtgcttccatattccgcaacaaatgaaacttccatgatgaagatccggaagaaaagatgtagtgatggaaaaggagccacatattccaaccatttaaataactttaatttacatactcactcacacaggtaccagtgctttgaaaatagattgttcagtcctaaaaagcagctttgttctgtcttctcttttctgtccctcccttctcagcccaagccagccctcccactttttcatcactgttcaagtaaggtttgattaagaatttcaccaaacgctcattcttttttggcctctgcattctccaggagagatttgtcggcagttactacacagatggctactgtttcattctttagggaaaagtctatcccaatggcctcgtcatcttccttttcctctatggagggcattttaacactgttctccatgatctcttttgggwggatttcttctctgctcacctgcttggtgtcattcaatgccctggaaaaacatttatcgaagagacagatgagtatagtatatatatttctctttttaaacaaaaaaataataaaaaccctcgagtgtctttattttcctgatcctcaaaaagccttggggtttcctttgaacaaatgccatgggtgtatgacaaaataccaagtgatgcatccctgctatgttttgcttaagtcatatatttctgtatcttaaagatttgaacttacagaagtatccattattatactatatattgattatcccatgttttctttctagataagcataatcattttatgtcactttctctactgggtcataagtggtaacagcaagaattgtcttatgctcagagtcatcggctgaacccagaagcttggagattggttatatttatgaagtctaaaagagtaactcaggtactaaagatttatttgtcaggtcccgaaacaaatcacgaaaacaaactaaaaacaaaaacctgaagatggaacccatgtctcgggaagcttggttatattctctgaggtctagacccttgaggcttcagggaccaagcttcaggcttcctatcaccacacaagccatgtttcctcctgaaaagaccacatcctaggttctctctgcatctggtggactaacgtgccttgttgaggggctgattttatgttcagggatctcataagtattttacaagtatgctctcacctacctgggaggcaggcagaagctggctctgtccccgaggcagtacatgggaatgttcagggccactcagggaatgatcagtcagagaggcaggaacagaagccagatcttttgacctcgattcacgttctattatagaatgtcacgctaatgaagactaaagggatattggctggagaaaacactatacttctgcacacaggcttgagcaggactgatcattcataaagacgatttttttccctatttgacttgcggctgggtgaccattttaaaaaacaacagaaaaggagaaacttggttcctcaccattgcctctcctcccacggcccagaaatgtgacacagaggggtgtacatactgtcaggggaaccaaaacaagagcccctccctccctccctacctcttgctttggacaaaggcatccttgaagtggcccaacttacatgccgtgtctcagcacatgtctttcccactcagagccctgtgaaaacgcccgtccacaaaattcacatggaaaacgcttctcagtgttaagagcagccccgtggtcagaaaatctcatcagctctgcaaagagaaagcagaagtgttacctgtgtgctgtgggaatcagcagaataggtaagtcagcattcattaggataccctctctcctaccttcactgataaagccatgtggtgaaagcaatttccagattcctcactttttcttaggtttcccccttagggcattccttgaatagcattcgagaactgtttctggttcttgggccccaagacctcatttcgcctcacctccccaatgcttctatcacaaaatctgggtctttcttgactgaagagccgcttgcccgagattccaaaggaatctgagcattattttttccgatttattctctcccttgtgtgatgatttatatcagtgcctcacaggctagcatctattcatttcctttttgacacaggtttatctttgttcactgaaaagaacataggctaccgaaagccctggaccaggttatgtgttgtggacctcagggtttctacttgttccaagtaaggctgaaggctcatgacttgtggtcatccatcatagacattataatcaataccttacagggcggttatgtgcactgaatgagatctgcaagcgaagaatctaccatgaacatttatctggatgagtgggaaccagtatgtgaacacatgtcccctgctattgagagatcctggccagctgcctggcacctacccctcaattggtggtattcatgaatacggggatatgcagacatttctggacggtctgttgtaaacatcaaatattgacttagttgttttgtttcctccatggtactaggcacatggtagaagtctgataaatgtggattggctgtttaactgttttcaggccacgtctcctggcaaactcaaagataagagattatatggccattgtgttagcccgagttcctagcccatatgtgtttcattataccacagagggccaagtcttcatgtaggtaataaacagcaggaccttgccagttctgcagccgtgttgcaaagtgagggcatcgcacagggaagtgttgatcatctttacactctgatcactctggtccacacatacaagacattacaggaagatgcctcctggttgaaatgccccatctaataagattctcaggacgatgttaacaggatggggggctctgtgatgccttaatcttcagcacaaacagctatgtgactggggccagatttaacaaaagatgaaacattttctcacaaattaagaagatcaccacacaagccattaaaaataattgcacagactatcttccttgattcttttcattggaaatgagacagcaccatctgctctgcgcattaattccttagcagggattatcttgggcaagaaatcaacagaatgccttcctgactcctccccaactgcataatgagaggggggtggggaggattctgcttgggttaattttgatttcttcatgcctggattcttctctttcaaatcttccctgagcttcctaggcaggacctgcagcgtgtccatattcagtccggcacttgcatttagaaaggaggtagggagtggggtggctgcgaggctgtgaaccccctaaactgagggtgtctgataaaagtctaaattgccaacaagaggaataatgttcctggtacacttgtttctttacccttaatctgtaaataggaaaccagtcatctgtcctttccaatggcacatactaagttccatcctcaaaggaggaggccactgggcactggccacacttccaagagctctccaccagcctgagagctgcacgcaagccacctcctgccctctgctcctagaagctgggatgtctagcagaaacacccgaggctattgtgtgtatttctttttcctgccaagaatacacctagatggtggaaagttgattcttggtctattcaaaggagagatgggacaaaggaggctgctctttcaaggatcggcgagggggaagggaaggtttaggcttgtaattcccattaatgtgactggaagttactcatgtaaatcccccaccctctgagaggaatacgtgcttctccaccctgagggctttttgttcccccatgtggtaaagctcacgaatgtggacactatactttttccagtgagaagaggagaccctgaagttctttccagccaaaccactccagtgtaatgccacagtgccaagtaaaagggggctgccaagtagggtaaaataaggaggtctgcctggtataccacacacatctcaaccaccatgttttaaattcgagttttctttctttccttttcttttttataaggagtcataggggagcagaagcctagaagggtattttgcctttataatgcttataacctttgaaatcacacatgctcagctttagagattaaaaagccataataatatccaatgagaaacagtttatttccagaggagaaaaggcaaggccacagagcgtcatgaagaaaaaggagtctttctgtcaaaagtatcctctcccagaaaactccggtaacagtgcagagatgttaagaaatcattgtaaagaacatactcatgaaatggtttgaaaaagaaaaaagaaagaagccatgcttctccgatcacaaccgttttccttgtaagaaatggattaatacagcctctactaataaaaataataactttataagaacaatcaacctatatggtaaggatgttttatttgtccatgtatttttcaggttaatacaggcacagggtttttgaaagggtagtgtaccttggctgtcatttcctgctgactgtcttggtcaggggttcaagagccaaactggggcccccttcgcaaacccatagtctttagccctggcatcatggtaggagggtgagtgcaagtcaggaaaaggaacagggaacaccttggagggaagtagcccaccaataggcttccttaatgtttgcagacagaacaagcagaaaacacaaagaaattctgcaaaactgctccttacagcaaggtcccaagggccactgaatccacagatttcagggtcaggtccccttcagtgaagattacactactcgaagcactgggaaagtggtgtgcagggtaagaagagggcttgcctttggagccagaagatgtaaatttgaattgaatttggtctccagggtttatattttttgttgttgtttgtttgtttgttttgttttttactttgaacatgctcttaaatttcctgggtccttattttcccatttgtgaaatcacaaaaataacacctacattgcaggcttatcatttattaggtgattgttatattctaggaactgggtgaaggtcttctgtgttatctcatttaatctttacaacaacccatggaaccacaccctggatagccaaagaaatcttaaacaaacagaacgaagttggaggcaccaccctacccgacttcaaagttgactacaaaactatagtaatcaaaacagcatggtactggcataaaaaacagatacacagaccaacagaacagaatagagagcccagaaataaatccacacattcacagtccatcggttttcaacaaaggtgccaagaacacataatggggaaagggcagtctcttcaataaatggtattggaacaggtggatatccacatgcagaagaatgaaattagatccttatctcacaccagatacaaaaatcgtctcaaaatgaattaaaaacttgaatataagacctgaaactataaaactactagacaaaaacaaaggggaaaagctccatgacattggtctgggcaatgattttttggatatgacctcaaaagcatgggcaacaaaagcaaaaacagataaacagaattacatcaaactaaacagcttctgcacagccaaggaaacaatcaacacagtaatagacaacctatggaatgagtgaaaatatttgcaaaccatacatctgataaggaattaatacccatgctgtattagaaaatcaagcaactcaacagaaaatcatctatctgagtagacatttctcaaaagaagacatacaaatggccagcaggcatatgaaaaaatgttcaacatcactaatcatcagggaaatgcaaattaaaccacaatgagctatcacttcacacctgttacgaggctattatcaaaaagagtgaagataacatgctagagagaatgtggagataagcgaactcctgttgcattgttggtgggactgcaaattagtacacccgttatggaaacagcatggaggttcctcaatcagttaaaagtagaactaccacattgatctagcaatcccactcctaggtatatccaaaggaaatgaaagcaggatattgaagaaatatctgcactctcacgttcactgcagggttattcataataaccaagataagtaatcaagctaggtgtccatcaataaatgaatggataaagaaaatgtggtatatacacacatgaaatactattcaccattaaaaaatatgaaatcctgtcatttgtgacaacatagataaacttgtagaacattacattaagtgaaatgagacaggcacacagaggcaggcacaaatactgcatgatctcacttatgtggggaaactagaaaagtcaaagtcatacaagcagatagtagaatggtggttaccaggggctcggggtttggggagatattgttcaaaggatacaaaatttcagtcagataggaaaaataagctcaagagatctattgtacaacacagtggctacagttaataacaacatattgtatacctgacaattgctaagagagtagattttaagtgttctcaccataaaaaatgacaagtatgtgaggtaatgcatatgttaattagcttgatttaattttccacaatgtatatgtattttgaaacatgttgtacatcataaatatatacaatttttattaaaataatttaaaaaagtaaatttaaaaagtccaaaatctgaagttttaaagttaaaaaaaatctttacaacaatcttaggagggaggtgatattattctcattattacgattgtgattatttcacagatgatgaatgtacaaggaaatacaataatttaccccaagccatctagacagtaagtagcagaactggaaaccaaattcaagcaggctaaatgtacagtcctctctagtcatgagattaaagaaaaatgttatataaaaacgaccagcactgaggctagcacataatgatgctcagtaatggcaactagtactattctcatctctgggtcaatatmtgcaatgttgatttctgatgtttatgttatccacgtgcttctgataaatctgcaataactaaagtaacatatctcaacctatattcttgtatgtatagtctggggtttttcacaatattctacgttgaacaatatagaaaaccaactctgaatcacataaatgtatatccacaactaaatatacttttgaaaactttttcattttgaaataattatagactcacaggaagttagaaaaatagtaccaaagtcccacaaaaccttccccagtgtattctgtaaatacatagttgaatgaaagaggtggtctctctttctctctccttacaaagcaagtcagagcacaaagggggttaagaaaagggccacgcagagggacatcagggggtaggggctcaagttctttgcaccaccgtcccctacagttccagcagtgtgtgccccagcagcaattttaaatatgcattcaactggaagttcattctcattcctctagagctctacagtgtcatccatcttgctgtctgcttgtccttattctgaagattccctagataccagttttccttattaaaaacaaatcactgccatctatttttcaacaaacatatatctataattagggagaaaatgtctgttttccttggcgtttctatagctggtaatagtttacaaagacacagctcttgatgtgttttctaagtcagtctgttctgctacttaactaagaaggatcattccttctgttactcctacaacaacctcctgcctcccttctgtctcactacggacatgccagatgccatctgggattgggagggcaggatgagactaacctctgtcttcagccttgctgttcatttcttcttccttgtcctcatcatcgctgctggagctctccattttctccttcatctgttccagctgatccaagttaacccgtccaaccagctcaaagttacggcttacctgaaaaaggcccaaacaaatgatggaataataaaccgcagaccaaatggggttctccctgatggagagatctttctaacatcattttcctgtgactgtggttttgcaaccaggaccaaacaactccggggcctaagaggtctttttcttcgttttgactcttttggagatggagcagccctttgctcccacattccatcattttcaccggaacttttgtacaccggaccttcattaccaaacttgtgaagaaacatgagctatagtacgcaggagaccaaaagtaaaatgaaggctagagtatagagtaaatatccaaaacacattttttttgtagttgaattcaaaggtgtaactctyataacaacccaagtttcaaatacttctgcaggtgaagaagttctgcaagcatgccgaccactagcagtgagacacaatacaaccttctttgccacgatcccatcaaccagggtgttgcaggctgtcccggcttaggccagatgacagccatctgatccttaactctagtttaaatggaagataatattattactgttagtgttactactgtttttgaagctgaccacagcctatgtatcaaggctgggattatctgagaaaaacctagatgactaacccctaaaagctctttaaaagtgttaactatggctggtttttattcatgtaaaatgtggtcagaataatgtgggaatccaagctttcttcaaagtatcattggaggggaacaaaaatctacactaagaaaagtctttaatgatttttccattttgggttctcagatcaatggcagcacaaaatttaccttcatcatgaatcgattttcagaacctctccagttgcatgcatagaatgttcaggcatgacaagctggtgcagggctaaagtcaaaaaattgccatgggctacgccttctatgtaaggtgttatgctccccttgttggaggcctggggaggggacatacaagatgaatgagacctggttctggcctccagaggctcacagttgagttgaagagggaagacagacatcattaattagattccgaggccgacttccctagctgccacagtagggcacagctagatgatgaggacacagctagatgatgaggacacaggagaggaaagagataatttacaagacaattccaaaatagtctttgggaccagactggaacaaagatttgctgaatgccaccaattccatgtgcctggcagatgggaacatcattatcgactgtgacaaatgtaaagagcctcagcgtaccaggccttagacactgagactgaataatgtcccaacaacatcctgtaagagataggtagcattcaggaggagaagaactcagggaaaaacctcttttaaaacaggagaaacaatacactgatctatctataacaatgaaatccatgaaattagttaactttgaaaacaactcaacatgggggtggacaagacgcagacaacaatgccaacgcttaacaagcagggaaggcaacttcttgtttttctcaattaaaaaagctataaaaattaagggactaaggcaagaggagaaagaggtcaattatgaatcctgatttctctttcttcccctctaagtccacagtaacggtttccaaaggacttttgcttgtagcaccttactaactagggcttttacattttcattgatttccttttatgacataagagcaaaaagggatagcataagaaaatgctctttgaagtcagacagacccgagttcaagtttaggatttgccattaaccactagattctggataaatcactcagtatatgtccttgatatcttcatttgtaaaaggaggtcagcatagtgcttgagacacaacagtcccccaaaatgtaatttccttcccctttctgggaatgtgagccttttctagttttggctcttgggaatgcttacaacaagcattgtaaatgcatatttacgaagttatgtttagccacaaagtctacattttagccaaatagcattcatgataaatatttgaataaaaagttttctggcttgctagtttttcaggaaaagtgggcaaggttccaatttgcctaatttttaaacatatttgaagagaagtatttttaagtgactagcacataaaaggcagcctttcctgggccactttctcctgcacttctcaccattaggaatcagggaaactataaatacgtgtaaaggacatgaggggtgggctgtcaccaggaaacaaaaacaatgaaaccaaggagaccaaagaagaatcctcaaacatctgctttaatccagttgttttaattcattcattcattcattcatcaaggattcctggagggctggcttgctgtgtgccagcctctggggtccacactggaacccctgcttcttttggagctcttggtgacagaaggagatctgtcaccaaaccaaatgttatttttttccccctcattctgggtttttttgaagactgtatttgtccattttcccagcaccatcatcccttcactggaaaactgttaacattttaaattctgcatgattttaaaatagtacatgacattttcacagtatgatgttcatcccaggctaacccaggatttatttggtcctgaagatttctaaaatctttgctaggcaattaaaagatttaaaaatgagaactaaaatttttgctatgtaattagaagattttaaaataaaaactctttattgttttgggttatgacggtatttgaaatccccaagccatctatccaaatattaatcctaacacaaaaggaagactcttttccacattcctgagcccattatcatcttttacctggattactgccagccccttcccctcccatgttggtctcctagcacctactcttgtcccttcttgtacctgattctttagtgtggtcaaagcaatctttaacaaaatgtaagtctcttcatgtcagtctctgcttgccctgaggatgaaatacaaatttcttaactgtcgtttacatggcgggctctcatgttattctggcccatcttctctaggctcccccttgctcccaccaccctgaacttactgaggtcctggaatatgtcaggccctcgaggagtctatgcctccaccatctcacctgtctgacactctctcatgcctgccggcttcatgtgttgagtccttaatctcctagccctgcttctgtcacttcttctgggagaccttccctaaactcctcctgtgttcgatatccttgttccatgtgttcacagcattctgcaccccgccttcaagagctcaccccattcagtaatgaattgtttatggcctgcccctccccagtccaactacaaactatgaggacagacttgctgtgagtcttacttacagctgaacccccactggccagcacagtgtctagattaagagagggtgttattctcgcctcctggctactggatatcttcattttcatttaaaatagtttcttttatataaacattcacaaaaaatktatgaaaataagaaaaactcatttaaagtccaactacctatacataataactgttaatgaattaatgtatttctgtattcctgttctctatctgtagattatttacattgctgttatcattttaaaacaaacaagtgtatatccaacttcttcatgcctggcatagtgtacacatcattctctgaataaacataatttttaatcactacatagcatttcatcaagtaggcatatgatagtttacttgactattcattcccgtatgaatttacggtagatgatttctggctttccactattaaacatgtttgtcacaaaaagtaataaaccttattgtatttaagcctttctttcatgcttagttttaattttataggctaaatttccagatgtgaaattacagggtcaaagtcaaagggtatagactttataaaagttcccatatattttgaactgattacactactttttgggcccggagattggtgggtatttgaataactccttgatgatgcagatgacatattgagagaaacacacttgtttcctctaaagatgagaagcagtttattatcatttccccaaaggcccacaacaaagggagaaggagcaagcttaagagtttgagatttagaacccrgctccttccaggctctttctgcaggcaaaagaagccgtatatgttcttgaagggtggattgttcagatacataataattcagactagaaacctatatgcagatctttattcctgtgaaagctatctgtgaatgcccattcactcaaggtcccctgtgaaggccactaacccagagtttggtgaagtcatctgtctaatgagaatgtgagatgagggctgggtgcggtgactcacgcctgtaatcccagcactttgggaggctgagatgagtcgatcacttgaggtcaggagtttgagaccagcctggccaacatggtgaaaccccgtctctactaaaaatacaaaaattagccaggtgtggtgggcgggtacctgtaatcccagctacttgggaggctgaggcaggagaattgcttaaacctgggaagtggaggttgcagtgagccaagatcatgccactgcactccagcctgggtgacagagcaagactccatctcaaaaaataaataaataaataaaaataaaagtgagatgaggtgtcaaatgttttatcctttaacaatgaagtgaggacactgcaaaaccacttccacacttgtctatttgttggcttttaactattcagcaaaatggtttagatctggtcttagcatgtatttccatacttctggcatattctaaggtgataataattatatgtgatttacaaatattatcaagttgaatatgcattttcatattgtactaggatagcaaacccagtctgatagaagactgatatgaatgtgcttgctaatgatagaatggaactggaacccttgtcttcagattacattgcaggcatcaaataggacagactgagattgagaaagtccacttaatgtttccagaatttttaactctaaggttgcccctcttacttaacatttgtagcttcaaaaagaggcacccaaccaggatgctcatattacctaatactgcatgttgatgttaaaaagaatgtgcagcgctgtgaagattttgaatgacttataacacaggctggtaaactttttgtgtaaagggccagataagtaaatatttttaggctttctggactctatagtctttgttacaactattcaactgctgttgtagctcagaagcaacccataaacaataagtcaatggatgaccatggctgtattccaataaagctttatttagggaaagtgaaatctgaatttcatatttcacattacaatttttttgatactttttcaatcactaaaacatgtcaagaccatccttagagagtggaccatataaaaaaggaggtggactagatttggtccatgcatcatagtttgccaacccctaacgtaccaagtggtctactcaacagacagatcttctttgcctgtccttaaaaatcagaatgggaatgagggaaagaaaacagtgggacaaagattcagcaaagtattgtctctacgatttcttacagcaagatggtcaaaagtgcaggtaaaaaaatcttgaattctcagataagagcacctcaattagagttcttgtaaaagcttcaaggaaggatattcaaagtttgtccatacagtcccaaatggtagaatgtctgttttccatggctgaataatattccattgtgtgtttatgtaccactttttaaaaaattcatccatcaatggatagttaggctgcttccatgtcttggctattctattgtgaatactgttgcagggaacatgggagtgcagtagctctttgagacactgattttgtttcctttagttaaatatccagaagtgggattgctgtatcatatggtagttctatctttaattttctgaggagctttcgtgctgttttctctaatggctctcccaatttacattcctatcaacagtgcacaagggttccccttttcttcacatatatcaaaccatcacattgtacaccttacatatgtacaatttcatttatcaattatacctcaataaagctggggggggaaagaaagaaaagatattcagccaaacaaaccagttaggcagtattgaagttctatggaacctgagccatgaaactatatttgttgtgcactgtgctcctctccaattttaaaactacctcttatcaagcaagtaacatgctgaattgtgcttctttgtttaaacttgtctcacctagttgcttataaactcttccagggtagcaaccatttcttacttagctttataggctcagtgcagagtcatacacttgacacacaataaatgctatttgaatttaccagtaacatgaaaacccatgagagatcataaggtataaagacttcataatattgccataagatcaacctatagaacaggagaaaatttttacaatctacccatctgacaaagggttaatatccagaatctacaaagaacttaaacaaatttacaagaaaaaaatcaaacaaccccatcaaaaagtgggcaaaggatatgaacagacacttctcaaaagaagacatttatgcagccaacagacacatgaaaaaatgctcatcatcactggccatcagagaaatgcaaatcaaaaccacaatgagataccatctcacaccagttagaatggcgatcattaaaaagtcaggaaacaacaggtgctggagaggttgtggagaaataggaacacttttacactgttggtgggactgtaaactacttcaaccattgtggaagactgtggtgattcctcaaggatctagaactagaagtaccatttgacccacccatcccattactgggtatatacccaaaggattacaaatcatgctgctataaagacacatgcacacgtatgtttattgtggcactattcacaacagcaaagacttggaaccaacccaaatgtccatcaatratagactggattaagaaaatgtggcacatatacaccatggaatactatgcagccataaaaaaggatgagttcatgtcctttgtagggacatggatgaagctggaaaccatcattctgagcaaactatcacaaggacagaaaaccaaacactgcatgttctcactcataggtgggaattgaacaatgagaccacttggacacagggtggggaacatcacacactggggcctgtcatggggtgggggtagagggaagggatagcattaggagatatacctaatgtaaatgacgagttaatgggtgcagcacaccaacatggcacatgcatacctatgtgacaaacctgcacgttgtgcacatgtaccctagaacttaaagtataataataataaaaaaattgccataagatttgcatcccatgaaataaagttgcttgttaatgagagaataaaagtaggcactttctaaatgattttgtttcaatacttaccaagtaactattaagtgctaaaaatgcccccagtagtttttacatgtatcacttatcccttacgaccattgtgcagtaaatgtgttgccttctatatttgtagatgaagatcacaaaacaggtaggtgatgaagccaggattagttaggactcagatctccacatgacacagctcaagcttttcccattataatgcaaatcatctgcagaaatgcaaaattactcacaaaatatgtcaaaactaccatggctatactggctgaacacaggaatgagaaagaaaaagtattaacaataacgttatgttgcaaaatgtgatgggatagaacagtagcatcctttccgaatttttttcaaaataaaagcctaagaatattaaaaacaaagaatcatagagtacccagaaggatatagagcacagaagtcaaggaaggtatctactttcttttgcaatcactgtgtcacaatcagaaaacatatttccatcatacctaacttagcaaaagtccagacaaaatcacttatttggagacactcagcataacttcagacacaagtactcaaggaagctaggtgaaagacataattaagaaaggctcagagctttgtggctggccagttaagcagctgtcaatctcctggacccaaaatacagagggaaaagatgctaatggatgctaccacattttgcttatttgaacaggatacttaaaatttcatatttgaaaagttgatttcatttattgatttatttaacaaacaattcctgaggctttactgtatgctgggcactaggttagattttgaaagaaaggtgagataaataaatctgccttaagaaaggaaagagaaaagttctatggaagctttgaatctgggacaaagaattttgactggggagtttagtggatggtttcgaaggcacaggtaaagaacatcttcaaatgtctatttgagaaatactgtttaaggttttgccagacacacccctctgaaaaacggtcacacctcttgctcatctaattctggtttctctgtcttctacaacacacggaagagacagagctatagttaacaaaccaagaagcagaactgcatgagggaaagcagaaacgaaatggcatagtcttctagagaagcyttcagcttgcagaaatcattgctgttgataaagctaaagctgctagcatttagttcagaaataaaaagcaatccaaaaaaaaatgtggccaaaggtgtgttttatgatttgggaaaaattcttcttatgatttatttgggaagaatctttggagaaagattcttcgtttatttctcatttccttttctggaaacaaatgtcctaagtgacttttttggccactgtggatttcactagtccaaaaaactcagcaattttattagaataactaaaaagttgatgattccttctgagcttaatgttttgctgttttccccaaactggcaaaaagtaagatatgagtttcttaagagttcaactgcttaaggctccatttatataaaaaattaaaaacatttcaaagtaaattcaattagtgaatgtgtattgcctgaatagactatccttctaaatttaatatactgaacatgacaattttacgagcggaccaagttagagataatatatttttatgttccttaaactagcaaagagagttcagaaccataaagaacactaacaaggtattgcatataaactttcttttaaaaacagtgtgtgtattttttaaatgtgagaagtgcaaggtttgtttttcttcatgactttaaggttcctaaagatgttgtcttaggctgggcacagtggctcacacctgcaattcctgtactttgggaagccaaggtgggaggattgcttgagcctaggagtttgaagatgcagtgagctatgattgcgccattgcacctcagcctgggcaacagagcaagaccctgactcaaaaaagaaaaaatgttgtcttcatctttcaacagtattgctaataaagggcattactgataaataattcaytatgtgtgttggggggtagaatgttgggggacagagaatgcagggagtgaaggaagggagagggaagtaaaggggagggggagaggagggagagactacactagtcaaccttctagaggacccactgagattaaaaacagacagggagtcacaggataaaaaaataaaatttcaaataacctgcactgtttcctttagatcctaagagattacaagtgatgcctcgctcactagtaacaaagataaagatctaggaggaaagattgtgtttatcacctataaaatgagggttctgatggttatcccttttgcactctggcttctgaggataaacatgcagcctaaatcgactgcactggagattttggttcttaaaaggaatggtatatttgactttaaggacctttcttgctggtaccaggattctgtccagtccgtggatgatatagtctgacatctttacagatgttcctgaggtttataacctttgcaggcagaattcagaagtccagttttgaatgttcagttctttttaatgaaatcctttaactgaaaatacattctacgtgtcttatagtttattctgtagattctccccaccacacaaatcacctaatgctatttgtagaagaatataatgagcaatgcactgttttactgggaaaaaaagtgaatccctgtttggaaccaattgctaagtctattccacattaatccggatcttgagtatcttgttgatataactgttctcaggatgaacgtcataaaaagactacaggaaattaacatttattgaagacctactgtgtgttgggttatgggaaacttgcatctgttttaggtattgaggtataatttacctaccataaaatttatctattataagtaaacawctcaatgatgtttaagaacactctcatcactctgagaagctccttcatatcctttgtaatcaatccctgctcccatcttccaggcccaagtaacctcttagctgcttcctgtctctatcatgttgccttttctagaaatttcatataaacagaatcataaaatacgtagtctcttgtgtctagcttctgtccacgtaacattttttggattcctcaatgctgttaaatgtatcaatagctcattctttttcatcgctgaatagtactccattgcatggatacgccgtattttatttatccatccattttatgtgaaggtaggataggtcagatggcaagtgtacgtttaacttataaacaaatgccaaactgctccgaagtggctatggtattttacattccaatcagcaatgtatgagattccagtttgtctacatacttgccaacactttgatactatcagccttcttaattttagccatgctagctagtggttggggagtaaaatcttattattgtcttaatttatatttcccaagtggtgaatcaagctgaacattttttcatgtgcttatttgccatttgtatatcttctttggtaaggtgtctattcaaatcttgtgctcatttttaactgaattgcttatcttcttattgttgagttgtaagatttctttaaatattttggttaaagccctttgttagataattactttgcaaatatttgcttctagtctgttgcttgccttttcattttcttaatggtgtcttcttttttcttttagttgtccataacttttgcatcatatataaaaatttttttccctaacccaagatgatataatcttctattattcttctgaaagttttatagttttagctcacacatttaagcttacggtccattttgattgttgtgtgtgtgtgtgtgtgtgtgtgtgtgtgtgtgtgtgtgtgtagagagtgctgtaaaggtcaagggtcataatctgcatacacaaatctaattgtttcagcaccatttaaaaaaaaaatcatcctttccctattaccttaacaccttttatgaaaatcaactgaccacatatatgagggtttatttcttgacttttgcttctgcactactgatctatgcatctatcttacgtcaatttacagtgagttttgaaatcaagatgggtgaatcctctgattttgttgtttctccacactaggatattctataggtcatttgcatttccatataaattttagggccagtttgtcactttctacccccaaaaagcctactgggattttgatagagattatgttgaatctgtacatgattatgaaaagaattaccaatattgggtctcctaattaataaacatggtatatattgcattaatttagttttataaatttctctcagcaacactgtagttttcagtgtatagttctcatgttaaatgtattcttaagacttttattctttttgatgttattgtacatgaaactgatcttcttaaaatttcattttccagttgtccattactagtatacagaaacataactgatttttgtatattgattttatatcttgcaatcttgctaagctcattcatgttctagtagcttttttttgtagattctgcggattttctccctataaaaatcaaattgtctataaataaaaagttgtgtttcttcctttccaattctcatgcctttaatttcttgttttagcattatggtccttgacttttatatttgaattttcagcataattctgttcagtacattgtacactgatacccctattcctctctcatgaaccctgaaatcaggtgtttgtatatctttccccctaacaaatgaccatttttagccagcacataattccactggctgtcagccaaaaattcagtttcaatagcactgccatctttacttacaaaagtctttggagaattatttcaaaaattcaaattgcattttgtactcatcatgtagggaaaaaagattagaaaatgagaaaaaaagtactgctatctcagtaataagcatgagtctcataaacctaacaattgagacaaacatgagaatcattaggcatgcaggaagtcgcaattctttagcttcaattaggtgctcactggacttaataagctggtcaaccatgaggaagagaaaaaaattaaagaacataatatggcatagtgaaaatattacgttaaagactgtgtctaaactaagaaatgagacagacagcaatacaataatagtgggggacttcaatactccactaacagcactagacaggtcatcaagacagaaagtcaacaaaagaacaatggatttaaactataccttggaaaaaatgggcttaacagatacatacagaacattccatccaacaaccacagaatacacattctattcaacagtgcagggaactttctccaaggtagactatgacgagccatagaatgagcctcaataaattaagaaaattgaaattgtatcaagcagtctctcagaccagagtggaataaaaccggaaatcaactctaaaaaggaatcttcaaaactatgcaaatacatggaaattaaataactggctcctgaatgagcattgggtcaaaaatgatatcaagatgaaaatttaaaaattctttgaaccaaacgacaataatgacatcacctatcaaaacctctgggatacagcaaaggcagtgttaagggaaatcaccaagatcagagcagaactaaatgaaattgaaacaaacaaacaaaaaacaatacaaaagataaataaaacaagagtggttctttgaaaagataaataaaattgatagaccattagcaagattaaccaagaaaagaagagagaaaatccaaataacctcattaagaaatgaaatggcagatattacaactgacaccacagaaatacaaaagatcattcaaggctactatgaacacctttacgcacataaactagaaaacctggcagagatggataaattcctggaaaaatacaaccctcgtagcctaaatcaggaagaattagataccctgaacagaccaatgacaagtagcgagattgaaatggtaatttaaaaattaccaacaaaaaaagtccaggaccagatgtattcacagcagaattctaccagaattggtactcaaaggattggtagcattacttttgacactatcccacaagatagagaaagagggaaccctccctaattcattctgggaagccagcatcaccctaataccaaaaccagcaaaggacataaccaaaaaagaaaactacagactgatacccctcatgaacacagacactaaaatccttaacaaaatactagctaaccaaactcaacaacatatcaaaaagataatccaccatgatcaagtgggtttcataccagggatgcagggatagtttaacgtacacgagtcaataaatgtgatacaccacataaacagaatttgaaacagaaatcgcatgctcatctcaatagatgcagaaaaagcattggacaatatccaggattgctttaagattaaaactcccagcaaaattggcatacaaaggacataccttaatgtaataaaagccacctatgacaaacccacagccaacgtaatactgaatggggaaaagttgaaagctgtccctctgagaactggaacaagacaaggatgcccactctcaccactcctcttcaacatagtactggaagtccttgccaaaacaatcagagaagagaaagaaataaaggttatccaaaactggcaaagagggagtcaaaccatcattgtttgctgatgatatgatcatttacttcaaaaaccctaaggactcctccagaaatctcctagaaccgataaaggaattcagcaaagtttccagatacaagattaatgtacacagatcagtagctcttccatacatcaacagcgaccagtggagaatcaaatcaagaacccaaccccttttaaaatagccrcaaaaaaataaagtacttaggaatatacctaacaaaggaggcaaaagacctctacaaggaaaactacaaaacactgctgaaagaaatcgtagacgacacaaacaaatggaaacacatcccatgctcatggatgggaagaatcaacattgtgaaaatgaccatactgccaaaagcaatctacaaatttaatgcaatctgcatcaaaataccaccatcatgcttcacagaattagaaagaacaattctaaagttcaaatggaaccaaaaaagagcccagatagctaaagcaagactaagcaaaaataataactctgaggacatcactgatatggttcagctctgtgtccccacccaaatctcatcttgaattgtactcccataattcccatgtactgtgggaggggtctggtgggagataattgaatcacgtgggcagtttcccccatactgttcttgtggtagtgaatgtctcatgagatctaatggtttaccaggggtttccgcttttgtgtcttcctccttctctttttgcctgttgccatccatgtaaaacaggactttctcctccttgccttctgccatgattgtgaggcttccccagccacctggaactataagtccaattaaacctcttgcttttgtaaattgcccagtctcaggtacgtctttatcagtagtgtgaaaacagactactacaatcacactatctgatttcaaactgtactatgctgttcctcaccaaaacagcatagtactggtataaaaataggcatatataccaatggaacagaatagagaacccagaaatatacccaaatacttatagccaattgatctttggcaaagcaaacaaaacatgaagtggggaaaggacacccttttcaacaaatggtgctgggataattggctagccacatgtaggakaatgaaactggatcctcatctctcactttatacaaaaatcaactcaagatggattaaggacttaaatctaagaggagaaactataaaaattctagaagataacattggaaaaacccttctagacactggcttaggcaaggacttcatgaccaagaacccaaaaccaaatgcaataaatacaaagataaatagttgggacttacttaaactaaagagcttttgcatggcagaaagaatagttagcagagtaaacagacaacccacagagtgggagaaaatcttcacaatctatacaactgacaaaggactaatatcagaatctacaatgaaatcaaacaaatcagtaagaaaaaaacaatctcatgaaaaagtgggctaaggacatgaatagacagttctcaaaagaagagatacagatggccaacagacatatggaaaaatgctcagcatcactaatgatcagggaaatgcaaatcgaaaccacaatgcaataccaccttacttctgcaaaaatggacataataaaaaaaatttaaaaaatccagtagatactggcatggatgcaacgaagagcgaacacttctacactgctggtgggatataaactagtacagccactatggaaaacagtgtggtgattccttaaagaactaaaagtagaactgccatttgatccaccaattccactactgggtatctacccagaggaaaagtcactattcgaaaaagatacttgcatatgcatgtttatagcagcacaattcacaattgcaaaatcatggaaccaacccaaatgcccatcagtcaacaagtggataaagaaactgtgatatctatctatctatctatctatctatctatctatctatctatctatctatctatctatctatgatggaatactactcagccataaaaaggaatgtattaatggcatgtgcagcgacctggatgaaactggagactagtattctaagtgaagtaactcagggatggaaaaccaaacatggtatgttctcactgatatgtgggagctaagctatcaggaaaaaaagcctaagaataatacaatggactttggggacttgggaggaagggtggaggggggcaagggataaaagactacaaatagggtgcagtgtatactgctggggtgatgggtgcaccaaaatctcacaaatcaccactaaagaaattactcatgtaaccaaatgccacttgtatcgcaatactcaatggaaaaataatttttaaaaaagaccgtgtctaagatgcaaagtataattagtggttttgtaatatgttttaggtctttgggaacacagctgccattatgataggtacatctattattatatttgaacacaattcaattaacaaatactctaaggaatgtattgggtctcaaagtggaggagatacaggacttcatttaatcttacaaaacttctgagaaaggtataacaattcccatttacgaactggaaaacagacccagaaatttaagtaatttgttgaaatatgcacagtaaatggtggagacaagattaaaacccagatctttttggttcaaaagctcttaattgggccctatgttcctgagcaactcatttccatgatccatacctcaaagcctcagccttccgcccactgctgaggaaccctctggttctatggtttctaacattttctggatttcctcagtgatttgcaagctaccgtgcaacaactagagaagaatcttctttctgatttgttctgtctgaaaatatcagccyggaggcttaaacactgtaataaaaaggtctgaggtagttacgtaaataagatacatgtgaataattatagaaagctttgtttgaaaaagatgagtaatttacccttaagtttggggaagaaatgcccaggaagtttgaaaaagaaaggatatgaaaaattttaagtgaggtaattcaggcttttcctctttgcttcattttctcgggcagacacattggaaaataagtgcattccaaagcagagaagttaccattaaactggtccattgtggacaggtgacaaagctcagccttctctctcaacaccccacagaacaattctaacccatgggtgcagatgattcagactaaattctttataatgtgggtttgtaaggccagaaaagaaggactatatttccactcatgaggatacagagcaaggaaaaagcaaacaatatcaaaagtgcttctccttgtgccttcagtaaatactcaatagatattttggacttgttggctaattaaaaagcattttgataggctcttgtcattaaacaaatactaattatagctccttctgtactctgggcaataccagaaatgatcatctcagttcatgagatgccagatgagccctgtgcagagtgaggaagttgtcctgtgtgatttctaccctctgatcggcaaacctctggaagagaattttttttcacaaatcctctattttatgtcctgtactaatgtattcattctcgagtctccttcctcccaaaacatatattttacaatccttataatgttcagacatactgggtaatgccttgacaaatctttgtagttagcaaaatattggaaaccacctacacgattgaggaacacagaggtaattctatcagaacaggggttggcaactgtgggcccacagcctgttgcctgtctttgtaaataaacttttactggaacatagtcatgttggctcatttatgtattgtctatggctgctttctttctttttttgtcgcccacgctccagtgcagtggtgctatctcacttcactgcaacctccacctcccaggctcaagtgatcctccctcctcagcctcccaagtagttgggaccacaggtgcacaccaccatgcctggctaatcttttgtattttttgtagagatggggtttcgccatgttgcccaggctggtcttgaactccagcatggctgctttcttaattgccacaaagactacattttaggcctgcaaaggctaaaatatttgctctccggtcctttatagaaactgccaaaccctgtcatttaaaatgtattaacatttcaaataacatagcaaaatacttcttttagaataagctttaaaaaatgtaaggtatcatgttttatgtatagtataatcacaattacgtaaaacaaatgaaagtgggtctagagaacagaccagaaatgttcagcatttggactagtgtggtagaattatgggtgatttcccttccacccaacctgtgtttcgcaatttttaaaaatgaccttacgtttctaatagaagaaactagacctcactttaaaagctctttgagtccacatctccatctggtacacagtggtcgtgactaaatgcagtggtgtctcccccttggcccctccccacaagtgtgctgaggcgggagcaggaagtcctggtaagtaccttatgctcatcccgaaggtggctgtccagttcctccgtgtgcttggtctcatagtagcagagctggcatttgtaaggtttcagttcattgtgcttttctatatgttgctggaggctctcatcactggagcaggtgaaggtacacttatcacagcggaaaactactccctgcaagtatttggacagtttggaccggcaaacttcaatggggacaacacgctcttctgtggaaacaaattgaatggaaagatgggaatttttactgatggcaaaacagaagttctttctttggaatacaagaagaaactcacccaatcttgctgctcctcgtggatctggttccttgaactgacacacatgcaccctgcccctcccctaacccccaaacaacatattcctcaggaatgagtgggtgtttttaagaccaaaagctctttgtgtacttaatacccagaatgacctataaatagaggtggggtgggctagtaggtgcttgctaattcctgaatggaggtgattaaggcaagggggaggaatagaagtagctgcaatttttaccaacattaatgattactgacaacaaccattagcatgccttccttcctcagcaagtgcaactgaggctggacttacagatgtctttaatggggaaagaaactgacattcaccaggcacctatgttctggtacctttctatcagcaactttatgaggctggagttactctcatttttacaaataagtacaaatgggcaacagagtctttaagtaactctccaaaggtcatagacattgcagttggcaaagcagagatgtgaaaccaggtctgcttaactgtaaatctattatttctcactatttccaattccattctcatttccccttctaaggtattctcaaagagactcttccctccttttgaaactaaggggatttctcatctaatatcaagtctgaaagcaaacctgtacactttcattcactaaaactccaactatgaagagctcacaaatgaaatgactgcaggcaacaatcgggggaggtggggttgcgcaggagacagggaggatttgtgtctttttagacagtctgtaatctgattgtcagagggaaaaaataaaagagagagaggatttgggtgcttttcccgttaacataccaaatgctgtagggctggaaatgcgtgtgcttgtttattttgcactctctcacccttgtgtttaactgctcaaattaaatttcacaccagtctgcccagagtatcagcgcacacgccagatatccataactgggataaaattaaaatctgtgctatttatgcaagaatcaaatatagcatgtgttttcatgctgtgtctggatttcagaagactcagaaagtttacaaatggacgcacacaacatatacttatattatttagaaacagcaatgtattattaagtcaagaaagcatgatttattcccagagtcactgaatagcaaygtttccagggcatcggtacgttgtacaccgatgcgactcactctttagagtcctccctttgttgctggccagtgtgcaggctctagggaattttccccacccaatgtcatgccttagtctcaaccacaacactctgattgtagggcagtcactgccttgggagtccttgaaggcagcgattaatcggcccgcaaaatgctgggcagaggaagcgtggaaggtggtatctgcaacatacyccctggagctctaatgcatgttattttccctatacaaagaatcagttgcttatttagaaatataaatatttttaaacccaagtatagcagacagctaagaaacacatgattataatgtaatccacacatttttttagaatagcaactgtttaagtcctctaaccattcagttgtatggtttggtgtaaacggagaaaaaaaaatgctttggcataaactagtaaatcttaaggagctcatgctaggatattctattcttgtaactcaaggtttctaaaaagtagcattattgaaattttgggacaggataattccttgttgtggggggccagcctgtgcattgcaggatgtttagcaataactgtggcctctacccactaggtgtcaaaagcacccccttctctccagctgtgacaaccaaaaatgcctgcagactaacacactctggggaggcaaattgacctcagctgagaatcactgctctaagcaaagtgccaggcattaactgcaactacgctgggtaaggcactcatggacagaacccatgaacaagctagtgtcaacagcaagagatggggcatgcaggctgaaccacggggaactgcccccatgctggggatatgcctttagaccttaggagttcatgggaagtgttgacatgaactttactggcatcttccttgggactgcatcccccttgctctctctacattttagttcctcatttatatgttatcatctctactgtttctactttcattctttggctttgccctgtcctgcctgccttggttccgttgacctctacggtgaagaagaacagcccggtatcatttttcatataatgatgtcccacacgcctcaaagatagtcattcagtgactctccagtcttcacttctccacaattaataatcagttctttcaaacttttttatgagcctccttttcaattcctctaccacttaggttggttttctttgcagtttccaatttcactatgtgtgtctaagtgaattttacacaaagtcatgaatagtcagaataacaccctgaagttcaagtaattattcatgtgaacaccactgcagactattaagtgctcgctacggttcaagcaccgttaggtgttctacccttgacataactttttgttctcataacaccctgcaaagtcagttctattttcttcagtttgttgatgtggaaaccgagaactgatcaattaagctacttcctcaaagtcacacctctggttcagcacaaagctgtgacctgggaacacaggtcttctgatctctgccagggccctcctcttggacccctgataagaactctccagtctgtatgtgtgtgcttataagcctttcattcataatatttaaaaaatgcaaaagctacagatttctaaggtaaccctttatatctgaatgtctttcaagcaccttctacatttgaggaaagggtcaaatccctgctgaacttaaatctgaaatctagaacttcccatttccaaactaagacaatgccagtctaccaaatmtcttaattatgtgagtttttactgagatattaattttagaaaaaaagttagctttttcccctttctaaaaacatggttaacatgaccaagataaaaataaaaaaagacagactttaaaaggtgggcaaatgactgacagygttttctgaatgaggtcattcattcttgaggcaaatgaaagacataaaagttaaaaactggaatggttccaggtatagactgggctctgccttggttacagaagctcagtgctcagggctttttctatgggggcagtgacaactgtgggtctttttgacttcacacctctcaaaattaccttgggtgaaaactcaaggcctgaatcacactcattgtgactcagcttctagcactggctgcaaaaatattatgacttcaccagttcaactacaagatggattgtgtctctcatctcctcctactcaaaagatgcttggtgctgcagcaggacataaaaccgaagaggttgggcccgagagtaatgtcacattgaagcacatgtgtactaaggtgcaacaagagctgagaatagcatgctttcaagcctccatggaggtcagtggaaaattctgcacagctgcaatacagagggttcacttctgctcaaattggcgagaaaccacaccactgcagagcccagattcaactagcaaaaatccttcctgaaaggcacaccacaacataggtgggtttccttcccagaacatgccaagtctacatgaagcaatgagattggaagttcttcactccaccaaaactttgcgtgcaaattgccactctagaggactgagtccctctttgcaccaaagcaaagaagtgacaaagtctgagtattagagaaagctatgaagaaaataacattatttttatataaatcatcccaaaacatagccataaatagacaaacataaacacaagcaaaacagttcctggtaggaagtatgaggttttgatgttagccaggctgccatcctcaagctagaaggaactggaaatggcacctctaattctatcaggcaaaggtatttggagaagttgaaaggaaacatgtaatttcactgaataaaattaaagattggcaatctcactgtagactttattctcaagaaaaatgacactgatcagataaattaggggagattatttccgttcccaaggctcccacttgcaaggttcagttaaatgcggcatttgtctatgtattgggaaacagaaactttaagttaatatgccaattaaagacccatagcagtgattacatggttccaaaattacaatgtaaatatgtggcaaaactgtgtttcatccctaaaatctgtggccagtttttaaggctcactatggatgtgcaagatacatatacatgggcaaagctaagcatgaaacattgtgcttccaatggtgatcaactcaataggaataccctcataaaactattattcacctgttttttagtctctcttctcgttcaagttcaaattccttcagtgcagaaaccttgcctgactcttcatggctgtatccctacagcttaaaacaatgctagagctttctcctccagctgcccaagatgtcaaaagaaaaaaaggccaaggggaagaagacggccttggctcctgctgtcattaaaaagtaggaggccaagagggtggtgaatcccctgttcgagaaaaggcttaagaatgttggcataagacaggacctccagccccaaagggaccttagtccttttgtcaaatattcccactacttctggctatagtagtaaagggctaccctataagcagctcagaatgactcctgtgattaaccaattcacccatgacttggacccctaacagctactcaactgcttaaactggctagagacaaagcaagagaagaagattgttggcctgcattgagaagaaagctgccagcaaagggaatgtccccacgaagaggccacctgtccttccagcaggagttaatactcttaccacctcagtagagaacaagaaagctcagccgatggtgactgcacatgatgtggatcccatggagctggctgtcttcccgcttgccctgagtcctaagaagggagtcccctattgtatkatcaaggagatggccaaattggggtgtctagtccacagggagatctgcactactgttgccttcacacacattaacttggaagacaaaggcrctttggctaagctggtagaagccatcaggaccaattataatgacagatatgatgagatcccacatcactgaggaggcaaggtccttggtccaaaatctgtggcttgtgttgccaagctgtaagaggcagaagctaaaagacttgccactaaactgggttaaatgtacactgttcagttttctgtatataaaaataataaaaagtctccttcaaaaagccaaaaacaaaataaggctggcatatagtgggtgttcaataaatatttgttgcatgaatgaaaacctaccaaaagtcctaccactgacttcatccttgaaagagaagttcagggcttaatttttccctagttaaactcatcaaatcatggtcaatctcaccaaacgttgatctgacctaagttcacagttcctgaatgagatgggtctaccaatcctttgcttcaacctttgctaaattagtattcaataagtgtctcatcagtaacctgatcagaatttgtcctggcttcccatctgtctactgactaaagttccaacttctatattagtatccaggcgcttcatactttggccagaacatacttctctggtatgcttcctattctcttcaggaccccggaaatgtctaataacattctgcaaacatgtcttgcttccaccgacctcagtggtttattaaattgtctcttccctcgtgtagtgggttgaagagtgtcccccataaacttaagtctacctggaaccccagactttattgggacataggttctttgcagatggcaatcagttaaggccagactagattagggtgtgccctaaacccaatgactagtgttcttataagaagaaaagagggcacaaagagatacacatagagaaaaagcccatatgaagatggagacaaacatgagagtgatgcagctataagccaagtagcgtcaaggaacgctgggagctgtcagaagctaggaagaggcaaataaggatccttctcttgtgccttcagaggaaacacagctctgtcaacaccttgatttcagagttctagcttccagaactgtgagagaatacatttctattgttttaatctacacatttggtggtcacttgttacaatagtccttgcaaactaatatgccctgccttaagtcttctctgcctgttgaaatgttatcatggctcagtttgaaagccacccctctctactacaaacagaaatatacctagatacccatcactcactgtcttgtctatactacgcacatgctcatctctgaggagagtgggtgctgggtcttatgttccccattttgcccaaagaaccaagcatagcgtggcacgtaacaagcaaataatgaatgtttgctgaacacatgagtaaacatcatactctcttttgctgtggccaacataaatccctgattagttcatattcagatttcccatgagcgaagtagattctctctctacttaaatatatcaatttatacagacaaaaagcaatggaaactctatttctgccagcagtagttctgtctctgggccagttcagaagttggttttcttgcttttcatcccacatactttaattaactaagacctcagaaagatcttgtactgtggacctgagagaccaaggatgtcatggatagagcaggaagaggacaggtgcagaaggagccatgtcttgttactttgagatcagccccaactcaaaattgcaaggcagacatgcagctctgtctctcgacttgtcaaggtcagcttcctactgagctgccattttgagtagagatggacaccaaagccaggccgggacacagatggtatacatggctgtcctgaggcactctgctgcctgtggatccgtggacttcccctctgacctcctctgataattctgtctttgaactcagccgccacagctactagaacactcaacagggtgatactacctctctcagggtgagagagtgacgcctggtgggtaaaggcaagagctgtgggtcagacaagcctgggtttaaatcccagctggattacttactagacatttcatgttcgtcaagttgttagcctttctgaatccatttatttcctcatcatgggggataacagtcatccaccacataggattttgtgagaattctataaaatgacatactgtaaagcacttagcacagtacctgctaggcaagcaaccggcaacagtaaccattgttgttattattgttaatgttgttattattactattaatcctcaaatgctcatgttcatttcagatggatgttttctgaccttgataaggactctgaaaatgatccttacaagtaaacagaagagaccacaaataaccagtgacaggtaatgtgatgagacatgggatcaaaggactgcgattgactgcttaccagttgggtgactttgagtgagtgattccagctctcatgtgccctgcaaaacttactattgtatttatgatgggcacaatatgcactacgtcacacactgtgcccttcaggaaaacctgctagacaaattcctctaggtttcagtgtctaggattcctgaaaatttcctgaatgacagttcaaaaaagtctaacaagcagttgaaatctggttgcttctgtgggtttcttttctaccatggtaggcaaggaatctcagggcgaaatctgcagcccactgtgaacaagggcatggcacctcatggtatccactgggtatccaaactctcagctagctttttcatacttagaggtgaactttccactagtttcttcttattttgcatttaccccaatttccttatttgtttttaaacctatagttcggcacacacgtctttaagatatcttaaaacctttgtgaaatgaagtagatggcaaataagtacattaaattattttaaaaatagtttgtctcactctcaagtttcacaggcatacaacgggaatagagtaatagtatccttcacaatgttgctggaagatgaagtgactgtgcgtgtaagcggcactttgttgagggtagaatgctatgggagtatttgtggtcgtagtgtttaatctctctttgcttccccctttcttgtgttctcagctcagggagggaaagtcattgagcttgttaggcatcaaagctctgttcctgccaggcagcaatatgggaaaagaagggaaccaaccacagaaagtgaagactcgccatgtctgctcggcagcagccctgctgatggccccttaccaagctgtgatagggcacagagccaccgcaacacatgggctgggggaccggaagccaggtgactgaggcggaacaccaggcgggaccactcgggccaagaattcctgcctaaatgttcctatgatacttctcccagcttgcaggtggacatcctagccagcaacgatctcatgtctcattagagtgcaagggggaggagggaaatctgtgcatgttaaatgtccagccttccattgagtttgcatgaacatgggtgagtatgtcacaaatgtattggccaaaggcaatggctcaggggcaatgtgaggtgtgttgccaatggcccccaaatactcagcatttcagagtgagtgacatcccagcaagacaacagatgacactcattgcttttgaggcatatgtgacaaatattggaaggctttctaaggtcagaggcgaaggaatgaagataggagggaagaggatgaaaagaagggatggagagaaagaatgaagtagatggaaagatcagtagaaacaccaatcaagactggcaatgagtactccagtaatctttttctatccacctgtagcttgaatcttttcaggacgaaacagattctacatatttttccttccaatgcagaggaaggctgttgtttaacagtgttttaattggccaagggtaaatgcaactcaaagaaagaccgaagtggacttaaaagaagtatcactgtttatcagcaggaaccaacatttattgagcagtcattatgcatccattatgaaaaaccactggacactttacccattatctcataggtacaatcatctcttttaatggatggagaggttaaacacagtgggctctaaaaccagaatttaaatccaaagcccatggattttctaattattattagaatatataatagagactattattagaatgtataatatacattattttaaagaattctctctcccttcaaccatttcaagggaagttccatgttctgctttggaaatcattttggtcttcttgaaagaatctctcacagccatagagctctccacatttcacatttgctttcacccacccattttgtttcttgttcattccttctatgcagtctacgcaaggctgtgggtggcagaattgtcagaatgtacaaatcccccatgctgggaagccctacggaaatgttcactgcagaatccatcacctttgcctccctccaggtggaggaaatactcccagcaggaaggtgtttttgcccttttggctgtcactgtggttatcactgtggtttcttgcctgaagataaggtgaggaacaaggcacaggtgctactgccactctgagagagcatccctagaaggccatctctgctgcctgccccccgctgcatccaagaaaaccaagttagaaaggttacctcggtgcagcacgatgtggtcaatcatgttgcgcttgtatttggtgtgatagaggcagagaggacagcgaagatctttggggccctcctcgggaactgctgagtgcccagcttccacgtgcatagtaaaagcagatctaggagagagtttgggaggagaggtgatgcgtgtaaccagggatcattgcattttcacatttcctgctggcaaacccgttatatatgtccaagtgcggctctcctgcttgtggggctaaaaaaaaatctgttcatcatgtttgttgaccacccagaaacttggtcactcaaccgaatctgaacactgtcaaatggtagtaacttctttctggaaactgtgccctgggctgggttcagagcttagtttgaaaagaaacaaattccccaaacaccttattcttaaaaattgtctgttaagagtatcaaaacaaaatcccaaaaaaggaactatttttcatcatgcttgggaggagagagactattttaaagctaggttgacttagaaactgcctgtataattcttcacaggtaagggggggaggacaagttgtccaggaagtcaatcatcatgattgatgattaggtaaactaagtggtgttgtaccagcttaaaggtggaatggtactgctgcctcttcctccatccttttcaaatcttcaaaatttgcaaagccttaaatgtctcattaaaatcgataaagccaagactttaatgggcagggaccctttcttgtgaacccgagtgttgctctctggagaaagtgtctgcctgtctgtcggcccttgccctctggggtcctctagccttctctcagcaccaaatcacaaatgtatttatctgaaaagtaactggagcaaattaatagagatagaacacacgttccatcaaatcccagctactacgatgctggtgggaaagagacttcttcttccaattcttctttttctttggacatgaagcctaatttccacagcctctcggtgtgaagcatgtattgaagtagtctaaggctcagatcctgattacaataggaacagaaaataatagctttttatctatgatatctaatgtcatattattataatagctttctatctatgatattattacacttattagtgtttgctttgtgccaggcactattctaagtacttcaagatacactggttcatttattgctcacaagagccctatgatgtaggtactattattatctttattttataggttaacaaaatagggacacagatagtgtcttagtgacttgtccagaatcacccaggtagtcaggctccacactctacacttgtaaccactaacctaaacgctatctcacaggatgagattcaaatgcagaagcttagattacatcataggaagcattccattcttaataattgagtccatcaattctgtcatccacaggggcaagggtgactatggattctctttttctagactggagcaatctccctatgattgctcaagtgtagtgttggaagtgccagggtcttgattctctatgtgtctttcaatactacgatcttaagaattaaagaattttctatcaggggagcagggaagacactactgccggatgttttctcttgactttgactttgcttccaagaacatacttttttttccaaagctaaaaaaaggagaggagacagttctctgaagggaaacaccactccacgcatgggaggaaatcatttgcttcaatcttacactacttgagagcccatttgctccaattttaaaactcatttgttctgatatagctcttcatcccttcccaaatcccaaagcagtcttctgaaactaccctccttccatgaagcctggacccaacccctacatcatcacatgggcagggcctcccataagctccaagtaggaaagtgtaagggaagcctgcagtgaggggtggagcaggggcggccgccttgttttccatagctgttcattacgtcacttacttaaagcctgtgtaaaaggagcagtctttgcacttgaaaagcttcttcccaccatgcttgtcccggtaatgacgcctgatgctctggatgtagccggaggagaattcacagaattcgcagtgaagcacggcttcagttttctgctcagtgccagcagcagccccagaaagaggcacagggctaacacggctgttgttccttgccagggcagctgactgatagtggttcaactgctgctgaacatctgggggctctgaatatgatgagtctgtgaagagacgggaaaaatgacacggggcacagagaacacagtaggtgatcgatgcttgaaaacccctgacatcaggtttctttttaccctccagctttactaaggtataattgacaaacggaaattgtttatacttaaggtgtacaagatgatgatttgatatatgtatctgttgtgaaatgatgaccacaatcaatttaatgaacgtatccatcacctcacagttaccatttgtaatgtgcagggaacacacctaagacctactcccccagcaaatttcaagtacaccacacaaatttcaagtattataaattatagtcactatgctgcacattggatccctagaacttactaattttataacggaatgtttgcatcttttgaccaatgttagttttgagagttcttttttttttttttttaagagggatgattatgattccatcttttatcttcatttacattctacaacacagatttggggaatgcatgccgggaggaactatcacctcttttaatctgactttgagggctcatggtatttaaaaataaaattttgaggttaaaggtttcaaagtgtaggaagaaagtaaaccgtttttttgttttattttgttgttgttgtttttttttttaaaggaaatcgcagcatggcaacaggttgccacagaatacccttccctgtaggtgagaaaataaacctgcataatgtacacaggcgtctacacgagaaaggaaaggacatgatgcaacatctcctcctttgcagcccagatttattcaagcaaccaaatttaaaaaaaaaatcagtctttaacagaaatgctcaagcacaaggcactcacacaaatataaaaatgttttatgccttcacactcaagtgatttaaattttaaaatataaaaatccaatagcgttctcctggaatggatgtttaaagcttagtcagcattaagatggagatttattcataaatcccattaaaatgaaattccaaacaagtttccctgaaaggtattttaaagtttgcgattctgaggaaaatgtcggaaatgacaggcacaaatcttaaccccgagaagcttcaatggcatgcggtggagaaatctgatctaggagggaggaggggaaatctcagcgtttcttctttgaattaaaaaaaaagaagagaaaaaaaagtaaaaataaataaataaaggggttgggggagaggaaaagtaaaaggtcttgaaccttttcccaacatgctgcttgcaatgtggaggttagaaattcaaaaacattgtcctatataacctacagctgcctatgaatgacacaaatgaagtccatgaataccacacagatgaatttcagtgtaactttccttgaaaagaaaacaaagggctcttttcttaagcctttcaaaaagcaggggggaaaggggatagaaactgtacaagcctcctcctgatttgatggacacttaattttccaaagcataattccctaaggcaggacatggaggaattctctaaaacccatatttgatgaaaccagcaccatccatcccgtcagcctcttcgaacaggaaaacaaaagcagagcagcctccctgattgctgggccaccgcctgtctgcaaaacactcaaatatcttccccttcttgttctcctccccgcctcctcaattcatattcctcaagattgagaaaaacccctttggaaattgtaaacaaacctgccacacacacaaaaataaaacaaaaggaaacctgaacaatgtctccaagcctccataggttcattaccaggtgtaaatggaagacaaaggaagaaaggaatgacaactgaattcattttacccagttcttttatctcctttttctttattcctctaccctagctgatgaacccactctggatcacaataatgcaattgtcaacttttcattcttctcattcaatagcaggtttgtttaccatttcatggattgtttgagatgttttctatttaagccctcaagtctagtttctgcttgaaacacatgcacaatgaagcacaaaacacactccacctctcctgttatcacaggcttgagctgtaagttgagcactgccagccaggatccccagatagcttctgtcctcttggtaatgttggtcctagtttgcactcttagctctgcagaatagaaattctataaccagcaaggccaaagccaggtcctgctggcctgtgatctgtctaccatccacaatccacccagagaccaaaacaaatctcccaagtgatggtctaggtcttaaaggagtcacagtcccctccataacaaggcacatccctggatctcccagattagtatgaatgctggtagtcatctcagataccaggtacctgacatctccagtccctttctagcaaaactataaagaaatgaacggctcctagccagatgataagccagatgaatgcactcccagacctcccatccacccccaactcaacacatgcactgatctgtcaggcagaccccctccaaggaccccaatctcttttagttaacacatttttatcttgtctctagggcctattgcatattatttcatccatctcaaaaaacaaattctatattttaactctggtatttatacagtatggaaaacctgaagaaataaaaatgcaagaagtcacgggaaaagcattccaagaaacagaggctcattgcccttctcaaatggcagtgcaaaaggaacagctaatgcgtccatgtcataaaattttttttttcctcctggttaaaatcagatggacaggtttattgacaaaaacaagcaaatcccatcatttaggacacatttgtaataatgcccaggttacaactttttggattttcttagggctttactttcctttctgctgccaacattctcaatttcgctctcgctcacgtggaatttgtgaataatgtaggattttagcactttgggcactaaagtgataaagacatgagtgtgtatcattccaccgatctttaaaaagcccacttgctaagctacataaaattcctgtttgttcatgaagcatggcctgaagagcaggaaggaggtcgttctgtgcccaggttagaaaggcaaacagattgttagctgcgaagggcatgtcacataagttaaaaatcatcatta

SEQ ID NO: 6991 - DNA, 64011 bp, Homo sapiens
caaatcaatgagtaaaagaacttggctcctacatcaaagccaagtctttgggcaatgctggcagtttctcctggaagtaatgagaaatgttgtgaaagaactcagcgcattggccagaaatgattgaaaaaccatcaaatttggggcagcaggaggtgtaaatacaagtgagaaaagggattctagagccacctatgaaataccacaatctccttgaggtggggaacattccttgatgttccaaaactgagaaaagcacacccagggccagtctttgtagagtttgttgctgttaagagcccacccaggcagatcacaaggtcaggagtttgagaccagcctgaccaacatggtgaaaccccatctctactaaaaatacaaaaacttgcccggtatggtggcatgtgcctataatcccagctactcaggaggctgaagcaggagaatcacttgaacccaggaggcagaggttgcagtgggccaagattgcaacactgcactccagcctgggcaagagcgagactccatctcaacaaaaaaagagcacacacatctcaacaaaaaaagaggctactggtgttgagggtagagcttgctgctaatgaaccaagaggcacatccttttccatggagaataggaagccccgagaatggggaggtgtgtgacagccatgctggactcagaggcaggtgtcataaactgccccaggctcctcattctcccttctccctcatggagaacagttgtgttccccttgtattatagatccagatttttgcctttggcctgcttactgtctgtttccttggtgacttggtagtcccttctaggacactggaatgcttttgtgccagcccctcactctcgtcacctaggctggagtgcagtggtacaatcatagcttgctgaagtctccactcctgcaccctcctacctcagcatcctaagtagccaggcacacacaccaccatacccagctagttttttggagaaaagtgtctggctatgttgcccaggctggtcttaattcctgacctcaaggaatgctcctgccacagcctcccaaagtgctgggattgaggcacaagccactgtatctgaaatagaatcctatccctaactcaggaggtccaggtagtcagtcttttccacttaaggcagttctccaacctgaggtgacataaaagcactgatctagagacactggcaaaaactaatgtgcaaagaaatgagtcatataggggaaatcaatttctctgggctacaacttccaactccctttactccagtacccagaatcctctcccaggtggtgcttcaagctgctcaggagtgctttagggttcatcgcaaaacaaaagggagtgatgaacacaggctctataaagttcatcagaaggaacagaactgtgggaagatgagacttgagaaacgtgagacagcagaaaatactttaagccacatgagttcagaggaaaggttggagtaacagtttatagttacttcaacagatgatgtgaacctcactttcacaggaccaaagaattagtccaggactcggagagtggtcaggtcagtggttctgagccctggctgtgcactggaatggctagcaaaatggatcctgggcccccaacccactcataacttcagttggtcggggatggagagctacactccccatgtgttccggttttgttagagcatttcttaggaaaggcttcatgatagtctacaaaaagtgcttcctggccaggcatggtggctcatgcctataatcccaacactttgggaggccaaaggcaggcgtatcaagaggtcaggagttgacctgaccaacatggagaaaccctgtcttttagcacgtgcctgtaatcccagctacttaggaggctgaggctggagaattgcttgaatctagaaggcagaggttgtggtgagccgagattgcaccattgcactccagcctgggcaacgagcgaaactctgtctcaaaaaaaaaaaaaggaaagaaaggcttcctttctgagctcagcccagcccatacagggcagttttgttacccaccacaaggtgcttgttacttctccacaggttctgccaccctgaccccactgaccaccccacaaaggagctagctccctcaaggaagacgccacaccagaaaatccaccagttgtcaaatgatcctttattgaaatgttttcctttgtgcttaactctgtgggaaagaaaaaaaaaatcagtaaaaagtttaaaaggattatcccaccccaccagtaaccatttccaaaacttcccagcttatctctgtgaatacactgggtggcccccctttcacccctactgtaacaatgaaaatgtcacttacggctgggcattccacagcaccactgttgatgtcatcgatgatgtcatgaggatggcggccatcaacattacagcccactgactgggcagtccccaggatctctttaatggttcctttaagtaaagaaatggtggcattggaggtgctggctcagtccctcacaatctgcagatactggggaatactgaaggggttcatagcaggcaatggaaggaatgaggttcctgctcccctaatatagaatatagagttccatctagttccataacccggaatgcaaagcttccatgggtccttgatgcccagattaaacacatccaatttacgatccatcctttcagtcccagaaaactgcaccccatcttgggtctcactgagcacccttcaagtaagaagaatgttatcactcagtgaaaaacacaactacagttatggcggttacatgttgtcctgctcttaccagagagttctctggctaaggatcggtgccgcatctgtcgagcaatgttgacaatctcatcaaaagtgatattcccactgtgtttaactgcagaagaggaaacagcaaaagctcttttaaagtctgaagccaaagcagatcatgtgtccttcatttcatttctaggctgttcccatgctttcggcacagagtcatccacatgaagaacaaccctgtttcctaagctggggtttactatcagctcaccactggattgcaccagccaacagagacctggtcaggtgcagtggcgggtggctgagggcaaaaccaagccttcacaaatctgacatggcagaaactgttttagagaaatgacaagcttaaattgccagggagttaaactgcccagtacctgccacctgtatgtggtctcctgattataggtcattattgctgacatcttcctcccacatgcactgattggggcctgccccacacagggactacatggcacttttttttttttttttgagacggagtctcactgttacccaggctggagtgcagtggcacaatcttggctcactgctacaacctccacctcctgggttcgagtgattctcctgcctcagccgtctgagtagccaggtctacaggcgagcaccaccaggctaattttgtattttttggtggagatggggtttcaccatgttggccaggctggtctcgaactcctgatctcaactgatccacccgcctcagcctcccagtgctgggattacaggtgtgagccacccagcatacgtggcactttttcatactacctggctctagcagccctaaccatatcaacacccaatacccatgtcaaccccaggtttcctttaagggaaaacacagccacatatatcaaacatctcacaaaccattaccaaaaccaaactagggaaaagacaacttactgtttttctgtttctttctgtctcttggtggttccttgagggctttgatgatcagggcagaggcagaaggcaccacctcaatctgcagaagagattcctgagtgaatactccacctccagtgaatactgccatgcacgctggctctcaaaaatcatggccacacactgtccaagtctttgccctaggtccgtactcttgacaaagcctccccaacaaggtgaaatcactctcggctcaccactggtggcagaaatactcttcaggaatcccagagggttgctacctgtccccccaccctcctctcccgaaaccaagcacaagcaaatacctgggcctgtctgttctgaatggtcagtttcactgtaatcctcaggcccttccagtcacccgttgccttggcaatgtcatcaccaactttttttggagactagaaataaaggcatgtaatcaacatggtgtccagaggtgaaccacagccttgaaacctgcccaccacttctcacttggcaacaaaggaagctatctcaagtacctaagggcaccttctcaatcagagcacagctatcaccatagcataaattgggggttggggttcttgtccagaactgtaaactgcagacttggccacaatgtaacctagaccccctcctaagtgcccatgtgcttaaggagggggattttcagccctgctgacattagaatcacctaaggagctttcaaaatactaggctcccatgtcagaccacccacgtccatcttcctggatggaggtctgattatttgctactctgaagttctcctcctctagtaatccttagcctcaacaggaggctaagtgtcccttaagtgccagctaacggccaaggaagaatagttaagatacaggttaaaaaagaccaatggggaagagcatttggggcaggggagcactgtgcaaggattaaataaaggcctaatgaaattcagagaaatccaagaggacagaatgacggggaagccagcagttgctcagcaggcatgagacacagcctgccacattaactgctaggtttacatctacaacacagctggaaacgctcactggatcttcacccacaccccgtttaatctcccaacaacgccatgcccacttcctgacgaggaaatacagatgttggctgcccaatgtctctaagccagtcctaacttcaaaactcccccttgggcccacccctcaggtacactaaagcagcagtggagacacatggagctaattacaatttaaaggcaccaggttcgatttttcacacacgaccttcctaaggtacctagtactagttcagtggctcaggcctactgagggtgacagtccaagccacgagggcacctctggcacaggcgtgactccacgagccggcgcttaaagtgaaacaaatgtgaaaaaaatgccccttggaggggataacgtaccagacccagggggccgatcttgggggccagggcagaagtggcaccgacttcacctccggtgcacctcaggtatactgggggaaaagaagagttagtgtctctgcagagggagccccgagccacagccctctcagcgtctttccggggttggacacgccaccctctgcctcttctcgaaacagcacagagcgcgaggcgggccacccgctcctccctcgggtgtgggcagctccgaaactcacaccggggaggcgtggagagagccccgtcgcccgctaacccaggccagtggggcgaaacgcccggagacaagccttaccctagggcgtgcgggctcccaagccgccacaggtggtccagtcctccctccccacctacacgtgaagaagctaaggcccagaaaggctgaggcctggccggggcggcgcaacaccgggaaggtctctgggaggcagcggctttaagagccccatacggggaaagctttgcacgcgcggcggggccgagggatgctccatcccgcagccccggccacaaccagagcacgcaccgactttgatctcgttggggtcgaacttcggcggcatggtggaggcggctggtgtcggatgaacccggattcgggacgaccgaaggaagttgcaccttggcctcctccgagccgaaagccgagaggccggaaatcgcgcggacaagccagatataggcaggaaaacgcggctatcgcgagaactgtcgtcactgcccggccttccagagacgcccttgtcgccatgtttgttgtgggcaggcgcctgaggctgacggctggcaagcaggrcaccgcggtgcgctgaagctagagattccgaaagggggttcgggtagttcgctccggagaagtctgagaagggtggctccggtgatcccagccctagctgtttcccatattcctttatcgtgagtgtcaccccggtccccgtcacccaatcccagagccccgcccctcccctgaggggtccgtagtcccattccgagaccccagtaccgcggcgacccctgctccctcgagcacttgttgtgtgcactttagttatcaaaacagtctatgtggaaatccagtcccgctcttcattcggagagtccgcgattcctagagcctcagacttcgtcatcccggtctgcgtgactttatgagattctgagtttctgttcccagcacctgcctttgaaggagaccagactccggctccgcccggcccgtgccgggtggtctgcggccccgagtccgtgaccaagccctccgagtgatcggcctgccctcgggtgcacccgcgggtcccaacgtgggggatccctccatccgcaaagccaggtcagccactgcccaccccaccccaggaaatatgggtgtggccctcccccygcatctaggctggacgtcggagagggagggacaggcatgtggggcagcctggaaagaactgatcttcggggaggggtgggagagcgatggtggttgggaggaagtggggagggctgcacatcaggaagggggtgcaagagggttagtgattggggagcagaagggtaagtgctggtcatcagggacggatgggggagggctgttttcaaaccattccccatccttgcaggcaggtggggtgacaagagggcctgaactggctctgcaggcctggctgcctccccagacagccccgcccccgtgggtgcagagctgccatctttgcccatccctctgaggactgggtgtatgtcttcttcaactgcatctcctcccatgactatcttctccctagctcctctagcgggccctgaatcaatgttgcttgcatgtgggttgctttgtggctaacatttattgagcgctcatgtgccaggtactgtactaggggcttgacatacatgaagtcgctggatcctcatagaagccagtgttggtagcatggttactcacactttacagatgaggaaactgaggctctgagaggtgaaccaaggtgacctctgcagttgtgggtggcagatttcggattcaaacccagttctcttttcatcccaaagcctgtgctgctcaccatgcacttccctgggtgattgcctcctggctcattgccatcccttatccagctctggtatttacagacactgtgcaggccctgggcaggcagtgagcacctggctctgagttcaggacagtgtacttcgtgtgtgccaagttatgtgagcaccaagcagtygggcaaatcccataggtcaggacttgagaraccacggttccaggctgcaatccaggctgtacagccaggccactgaacttaataagcatctacttcttcactttatttatttatttattattattttctgagacagagactccctctgtcacccaggctggagtgcagtggcatgatcttggctcactgcaacctctgcctcctgggttcaagcaattctcgttcctcagccttccaagtggctgggactacaggcgcatatcaccacgcccagcttctttgtgtatttttagtagagacggggtttgaccatgttacccaggctggtctcgaactcctgggctcaagtgacccacctgtcttggcctcccaaagtgctgggattacaggcatgagccaccacacccggcgtgtttcttcactttaaaaagggttatggtgagaacaaaatggaataataacgagggtggtaagctgagaattgctttttaatttgtattcaccgcagaggtctctttggtcatgatgtagttgagctccctgaggtcctggctggctctggattgctcctgctgatcctgctctgacagcgtttggggggctagaagtgattcattggcagagtctgttagagtcctcaaagaacagccttggaaagcacctgaggaaacgtctctaagtttccctagaacaggaaaaggataatgccaaggcctcactatgggtcggtggcaaatatgggccccaacccaggtcatctggcttgtctgtctccacctcatcctgctgctcaatgtttagtcaacaaagaacaaggagtactgagtgcctgctgtgggctcaggacacagatggaagaactagaaagackcagcccctcacctcatggaattcactagaaagatgtggcccctgaccccatggaactcactagaaagatgtggcccctgcccccatggaactccatgaaactaggaagacgcagtccctggctccatggaactcgctagaaagacactgacccttaccccatggaactcactagaaagacacagcccctgcctccatggaactcaatagaaagacgcagcccctgcccccgtggaactcactagaaagacgcagcccctgcccccgtggaactcactagaaagacgcagcccctgcccccgtggaactcactagaaagacgcagcccctgcctccgtgaaactcactagaaagacgctgtccctgaccccgtggaactcactggaaagtcgcagcctctgcccccgtggaactcactaaaaagatgcagcctctgcccccatggaactcactagaaagttgctgcctccatggaactctctagaaagacccagccgctgcctccgtggaactcactagggagacacagcccctgcctccatggaactcatggtccagcagaccagctgcatgctctgtgttactgcactacctgtcccgggtgttgggggctgtgacaaattccccagtccctaacttctctcctgtgccccagggtcctaaagatcgctctgggaaaagggaaggatgccgctcttcttccggaagcggaaacccagtgaggaggctcggaaacgcctggagtaccagatgtgtttggtgagggaaagtgggtttcctctaactctatcccatctcctcctcggtccccatggagtaggcctccgcactkcccccaacaagccgtgctccttcccatctgcctcccccacccacagaagaaatatttgacttagacccaacagatgaggccccctgccaagggtgcttstcccctgtagactgagcgcactgtcattgcttttcagttcctcatccctctgggcctcaagctctgggaaagcaggggtcattggttcacctgccaaatggaccagtggaaccagatagtgtctatggtcctttgcagctgcttacatttatgttctttgcctggcttgtccactctgcaaaggtgttttgtcttaatactttttaaaaattctttttatccttaggcaaaagaagctggggcagatgacattctcgacatctctaaatgtgagctctcagaggtaaactgaggatagtgttgggctgtgaattggatctgtcccgttttcttggatcttgtgtccctaggaaagacagaggtggactggggctttagaaaggccagaagctctagtcacgagatgtttcyttagattttgttctcgtccaaaataattgaagatgatcctttggcctcaatataacgtagtctccaagagtcaaggagtctaggtagaaaatgtacccatagactcctacattgctggaagggcctggcattctccagcccctgaaggggttcacaatggggacagggtgggtggggcagggcagtctcctgccagctgaccgagggaagggctggccacatccccaacaccactgcttgccagccttgcccctgggctcagcactgccacctgctgtggcgttttgcccttgttcacctcctgcctgtctcttcctcacgtgaatgccactcagagaacaagctaaaaactggcaggaggggagacacttactcttctttatcttatcttagattccatttggagcttttgcaacatgcaaagttctgcagaagaaggtaagatggagcttcatcttcagagactttcttgttgcatgtctgcttgtttgaacccacaagggactttgaggagctgtcttcccggcgtagacacctcctttctctctgcttcttatgctcttggcctgcagcaggtgttttcacagataggagagtaggctttggggttggaccttcctgtgtcacattctaactctgccctcactggcttcatgacttgggcaacttccttaaactcttacttctcagtttcttcccctgtgaaatgaagacattcatagttctccttcctgaggtattgtgagaattaaatgagtggtagatagctagatagagatagaaatatactgagtgtacatgcctaccacgtagtaaaggcttatgaaccccggtgttagtaataatagaaactcacgccttttattctggtcacccaggggagattcagaggggagtgaatgatttttcakcagagcattgcagctttgaatgcagatgggtagaagcgctctaagtgaagtatctaaatgagaatatgcaaaaaaaaaaaaaaaaaaaagtgttccctgccaacagagtagtgagctccttggcgctggaagttttgtttgtttttttttttttttgaagacggacgctctgctctgtcacccaggctggagtgcagtggtgcaatctcagctcactgaaacctccgcctcctgggttcaagcaattctcctgcctcagcctcctgagtagctgggattataggcgcccaccaccatgcccaactaatttttgtatttttagagatgaggttttgccatgttggccaggctggtctcgaactcctgacctcaagtgatccacctgccttagcctgccaaagtgctgggattacaggtgtgagccaccacgcccagtctgtgctggaagtgttgggccgcagtcaatgcctaagaaaaatgcagtagattggccgggtgcggtggctcatgcctgtaatcccagcacttcgggaggccgaggtgggcagatcacgaggtcaggagatcaagaccatcctggctaccatggtgaaacccggtctctaccaaaaataaaaaaaaaatcagctgggtgtggtggcatgcgcctgtagtcccagctactcgggagggcgagacaggagaattgcttgaacctgggaggcggaggttgcagtgagctgagatcacaccactgcactccagcttgggcgacagagcaagagttggtctcaaaaaaaaaaaaaaagaaaaggaaaaatagcagtagatgacctggactgagccctggcccctctgccagccctggaagttttgcgcatgagcttttatttaacatcatggcagccctgggaggcaagcactttattattctctattttccacgtgaagacgctggtgctgggaaggttatgatcaggatggctgcagggggatcccttctcagatggaaggaagatgtagacctctaaggtctctttcacccttgaagatccagkttttaaggaagggcattagattccccattgggagagttcatgatactgacccgcatccccgtggtggtgtctgggagagcaagatggtggggcgtggcacggcgctgggctggctcccacgcccttagcctgccctgcctgctgctcttcctcagcccagcatggccgcacatctctccacacaggtgctgatcgtccacacgaatcacctcacttccctgcttcccaaatcctgcagcctcctgagtctggcaaccatyaaggtactgggccctcctcccaggcagctggggctctgcatggggttccacgcrgcagctgagcgcctgctccytttgggctgcctcttgcatgtcagaggggcccaatctaccagtcagtctgggatttgatcagyatggtttactggatacttctgtgggctgtgtgtgggttagggtgacaaagatgaccagccacaggccctgtccctggggagtttacatgccaggaggaaagccaagtgacagcctcatggcgagtcagctagcagagggcgaggagactgatggtcccaggcaagaaggaagaggagggacgcscaggtgatctggaaggactccctgctgactgtgagctcctccccggatgggctgggaggcattcacaacatgtgggaggtgtgagcccagggttgttatgcgcagacctgagcttgggagagtgatatgcaccttcagaggaggccggcagcacaggtgtcagcccagcagcacaggcccaatctgttatactatattgtttagggaataatgacaagagaaaagcctgtatgtgttcactacagatgctttctttcttttttttttttttaatattttgcacctgagtttggttgaatccatagatatggagggtacctgtgtgtgcacatgtataaatatttctccaaggccttttttgtgcattttcatttttaaaaaattagcagtcagtcgtggtggctcacacccataatcctagcactttgggaggccaaggcgggtgggtcacttgaggtcaggagttcaagaccagcctggccaacatggtgaaaccccgtctctactaaaaatacaaaaaattagccgggcgcggtggcgggcgcctgtagtcccagctactcgggaggctgaggcaggagaatggcgtgaacccgggaagcggagcttgcagtgagccgagattgcgccactgcagtccgcagtccggcgtgggcgacagagcgagactccrtctcaaaaamaaaamaaaacaaaacaaaacaaaacaaaaaaaaacaccagcagarcatgttggcttgtgcttgtaatcccagctacttgggaggctgaggcacgagaatcacttgaacccaggaggtggaggttgcagtgagctgaggtcgtgccactgcactccagcctgggtgacagagtgagactctgtctcaaaataaaacaaaataaaatwaaattaaattaaaaattagcaagtacagttaagcaaagggggaaacatctataattttacactgtggagtaccactrtcaatattttatcgcatatttgaaagtcttacatatttatacaatggagtgtttctttttaacatattagtatctaggcatactgttttatagcatagtttttcagttaacagtaaaaataaatatacataaaataagaaaatggtataatggtttgagaaggaaaatgaggcgggaatgatcaacactgagtgggaaaggagtggcaggcactctgtttctgcactgggggtgtgaggtggccccagcccctcctcagcgctctggagcccggagtctgagggactttctcacttggagactcacaggggtctttcttctgcaggttctagatctccacgataatcagctgacagcccttcctgacgatctggggcagctgactgccctccaggtaaggctgcagaaacagaaacccacctcggatggccytagtgagaccaggcagtcactcaagcctggaatgttctggccgggctccagccagtggaagcaggctgcaatcagtgccagctccaccctccccttggccctttggggtttttttttttttttttgaggcagtgcctcactgcattgcccaggctggggtgcagtggcgccatcagagttgcagaggcaacctctgcctcccgagttcaagcgattctcctgcctcagcctccctagtagctgggattacaggtgtgtgccaccactcccagctagtttttgtatttttagtagagatggtgtttcgccttgttggcctgactggtctcaaactcctgacctcaagttatccactcactttggcctcccaaagtgctgggattacaggtgtgagccaccacgcctgaccaattgtaccactttgagccacaataaataccttggtgtaggactttttgtatgtgtattttttttttctcactcttgtcacccaggctggagtgcagtggcaccatctcaactcactgcaacatctgcctcccgggttcaagagattctcatgcctcagcctcctgagtatctgggattacaggcacacgccaccacacctggacaatttttgtattttcagtagagacttgttttcaccatgttggccaggctgacctcaaactcctggcctcaggtgatccacccgtcttggcctcccaaagtgctggaattacaggcatgagccactgcacctggccagtaggtgtatttttatagaattgctgcattcactaatttgtaacttttggatacctgacaataactcatagcatcctttggttcatcaaatattcatcttattatttttaatggctacttagctttccattgcatcattttttgtttgtttgtatttttgagatagagtctcgctctatcaccaggctggagtgcagtggtgtgatctcggctcactgcaatctccacctcccgggttcaagcgattcccctgcctcagcctcctaagtagctggaattacaggcgcccaccactatgcctggctaattttttrtattttagtagagacggggtttcaccatgttcaccaggatggtctcaatctcctgatctcatgatccacccacctcagcctcccaaagtgctgggattacaggtgttagccaccgtgcctggcccccattgcatctatttttaatggttagtgtgtcatcctgctrgccttgctcacctcgaggtaccaccttctggagggagcacagcttcggaatccaacaagccctggttcagtcccagcaccactgccggcctgaggccttgggtggatcacacggccttagggcagccttttccttaaggccaggggaactagagcctcctgtgctgcctccccagatccccaagtctgtagtccccttctccctccttccctgatggtggggcagttactgagcattttgtggtcggtgtaagtgctggaacctcagccagaaggggttcaaggcctggctgtgctctcctgagcacgtgactttgccaccctgagcttcagtttttttcctgtctccagcggaaacaagaatttctgtcttcctcaagggccggtagggggagataagagcttgtgtgtgtagtgcctgggtgccctggcccggcagggcgaggggtgcgggggtcatcactgtggtctgtgtgtgggttctcgtgtcacctcttcctgkttctttctttttttttttttttttttttttttttttgagacggagtctcactctgttgcccaggccggagtgcaatggtgcaatctcagctcaccgcaacctctgcctcctgggttcaagcaattctcctgcctcagcctcccgagtagctgggactacaggtgtgtgccaccatgcccagctaatttttgtatttttagtagagatgggatttcactatgttggccaggctggtcttgaactcttgaccttgtgatccacctgcctcggcctcccaaagtgctgggattacaggcataagccactgcgcctggctgcctcttcctctttcttaggtcttaaacgtggaaaggaatcaactgatgcagctcccacgttccattgggaacctgacccagctccagactctcaatgttaaaggtagggaccaagaagccgtgtccgtgtgaccctccatcagctctgggccatcctggccgggatccacaggctgccccgcccgggagccattgagcaggagggcagccagtctccgggggtcgctgtaaatggactgacccctgctgggtcagctgtcttcatggtaaccagagacaggctgtctggagggttcctgtggctcctgagagccagggccrtatggccgtatggggaggagggcagctgggccccgagcctcagtcactcatatttataatggtgagtrtagaggactgatggggcgagagctcctaaggagccgcagtaaggttctgagcagtgcttccacctccagcgacgcaccaagcctcctgaggagtccactgggcaggctgagggcagtggtgccatccccagtttacacacgaggaaaacaaggcccgggaaatcaagtgtgacttgctcaagaccaccccgtgggatggtgacagagccaagaccactgcacaggcgccttacccgcaggagcgctctgctcgccacacccagctctctcccttctcctggctgtccttaagcacttcctgcagagtgcctctgtttatcaactgtaacatatgagtaatgagaacaacagtggcgccccattgctcagccattacagcatgaggggccctgtgcggaggacctcacacatcatctacctgaacctccaatctccccgtgttcttataaggctgggtggcagtgtcatccccattttccaggtgagaaaactggcacaaggaggcaaagccagttgtctaaagtctcttggctagtaattggtggagtggggacttgaactggaactccaccttcttgagcctaggaaacctcagagcccaggatctgttgtgtgccctagaggtcagagtggctcccagcgggcatcaggcaggaagctggtgatggggatttggggtgttgagctgtgctattggggtctctgcagacaacaagctgaaggagcttccagacaccgtgggggagcttcgaagcctgcgtaccctcaacatcagtggaaacgagatccagagattgccgcagatgctggctcacgttcgaaccctggaggtaaatgggaagctgttcttgcctggggtgctctctggcctgcccacctcccctctctcccacattactgagtgcttgctctgatctcacggtaccagggccacacagagatcccaaggcatggtccttggaggcttgtagagaggccaatgtgtgaacattcgtaattatatgacttttgctgccataatagaggcagaaaaacatacattaagaatgaagaagaaagaatgctgaatccagaagaggctgacactttaagaaagttgtcggtrggggaacaacacagtgaggcctgtcggaggagggtggtggggagggagagcatcaggaagaaaagctaatggatgctgggcttcaaacctgggtgatgggacgatctgtgcagcaaaccaccgtggcacatgtttacctttgtaacaaacctgcacgtgctgcacatgtactcctgagcttaaaagttgcagaagaaaaaaaaagttaaaaaaaaaaaaagttgtgatattcaagccagaccttaaaggaggaataagatttctgggctgggcaccgtggctcactcctgtaatcccagcactttgggaggccaaagcaggtggatcacttgaggttaggagttcgagaccagcctggccaacatggtgaaaccctgtctctactaaaaatacaagaaattatccaggcgtggtggtgcgcacctgtaatcccagctactcgggggaggctgagacaggagaattgcttgaacccgggaggcggagattgcagtgagccgagattgcgccattgcattccagcctggacaacaaagcaagactttgtctcaaaaaaaaaaaaaaaaaaaaaaattctgagcagacctggataacaggggcagcccaggtgcaggaggcaggtggtgggaagcacagattgtctcagggagggtcgaggaagtgatgtggttggaagctgctgagcttgtgtgatatggggcccagaaagctgggagggagagaaggaggtagggagccgttgggatgggggttcagaattatccaggccaggggagttctataggctagaagtccaagatcaaggtgttggcagggttggtgacttctgaggcctccctccttggcttgtaggtgctgtcttccctccctgtgtcttcacctcatcttccctgtgtacatgtccgggtccaaattccctcctcttagaagcacaccagtcacattggattagggcccagcctaatgacccctttttaacttaattacctccttaaagatgctatctccacatacagccacattctgagggatggggggattaggatttccacataggaacttgggagggggacatagttcagcccatgacagacactgacagaggcagctgctcacggaaagcagctctcacagtcatgctaatgaggtagctcacctttatctggggctttctaagactgggcataacctggaatcgctccgtgtatcgtcacagaactcttgtgaggcagatactattgtgctactttgtagatgaagaaactgaggcacaggcagtttaagaaacttgcccaagggccacacagtcactgacagcagagatcgttgtaaaccaggccgtctgaagctgacgcctgtgctccccacctctgtatgactcggcttctggaacagggacttctccattcatggtggcacgcagtctggccagcattccggagtggcctggagttgaccccactctcagccagcccagcctgctgagcagaggtgtctgtgtcagagtgggtgggtgatcacagagacagcagaggaaggactgacctcagcagctggggccctcctgcctgagaaagggccggctggggagatgggccaacatggcttgtcctctctgctgcctactggaactttctgcaatgatggaaatgttcagtgaccgtgctgtccagagcggcagccactggccatgtgtatctaatgagcacctggtgaccgtgctgtccagagcggcggccactggccacgtgtatctattgagcacctggagaccgtgctgtccagagcggcagccgctggccatatgtatctatggagcacctggaatgtggcttgtgtgtacagccaggaactaaaagtttgatttcattgaattttaattaatttatatttaaatagccgtgggtccttagtggctaccattttagacaatacagctcagagcacgttcccaatcctgaagccatctcgacatctagtaygagttctggacacttcaatttttttttctttgagacaggctctcatgctgtcacccaggctggagtgcagtggctcaatcatagctcactgcagcctcaaactcctgggctcaagagatcctcctcctcagcctcccaagagactgggaccacaggtgtaccccatcacwcttggctaatttttttattttttgtagagatgaggtcccactatgttgcccagcctggtctcaaagtcttgggctcaagcaatcctcccgccttgactcccaagtaggtgggattacaggtgtgagccaccacacccaacctggacacttcattttattttgattcctttaaaaaaaatcttttgggtttcttggtggcacctcggacaaaccttcttttaggatgagataaccgttctgagttcaggccgtactgtgggcaagatcttcaggtgtcacgcacgccacccaccaaacagcccaccaggtcggtaacactgcctgtttggctatgaggagaccacagccccaggacactaaggggcctgattaagcaaacacatggccagcatgcaatgagccgggatctgaagccatggcggtgtctttggcacagcaatgtccagtcactgctcctgctgcccacgatgagaatgctctatgatctgtgcagccaacatggccaccccagccacttgtagctgctgggcccttgaaatgtggtgactgcaaccaaccatggactcaaactttaaatcagatttattttcagttacttaaaatgtaaccataaatggccacacatggcttgtagccagcatcctggtatagcccacagtccgtgcccttaagccaccacgctttactgatggtgactaagagcacccatgtggggttcatttgcttccaggtatggggttttctgctgttgggccctcagcatctgggcggtcagttcctcttccctggggcagtctcccactccctgtgcaaagcacgttcactcaacacccaccgtgtgagggctgggctggccagggctgggggacctgagctacccttcccacccagccacttgtgttacagcaaaatcagagcttcccaggccttctccttttccaggactcccctgatacccaggcatagaggatatcagtgcctgccagcactctgggatgagagggcctgtgggaagtcagaggttggcagcgggagggcagggtccaacacaactcacaccgtggatggggcagttctgtggctgtgagctgaggcccctgcttcctgggcttcataaacacggaggcatctgcatgtgtgcgctgataaacatttgtcattacataatttaaaagtcatactgtatattgtaaaacaaaaaaaatgcaaatattaagaaacatttctgccaggcacagtggctcaagcttgtaatcctagcactttgggaagacgaggtgggtggatcacttgaggtcaggagttcaagaccagcctggccaacatggtgaaaccccatctctactaaaaatacaaaaattagcygggtgtggtggcgcatgcctatagttccagctactcgggaggctgaggcaagagaattgcttgaacyggggaggcaaaggttgcaatgagctgagatcacaccactgcactccagcctgccacagagcaagactctgtctcaaaaaatagtaataataatagcatttcatgtagatagtaacccaaaatctccttttagaggaaaccacttttagtttgatagatatccctccaatttttttctataaaatatgaatgtgaaagtgtatgaatatattatatgaatatattatctaacaaaggaagaatcatatatatatatatatatatatatatatatatatatatatatatatattttttttttttttttcactagagatggggtctcgctatgttgcccaggctggtctcgaactcctgggctgaagtgatcctcccaccttggcctcccaaagtgctgggattacacgcatgagccaccacacccagccagtggaatcatattctatatgctgtcctataacttcctttttttcactcacttatgtatttatccaaagtgaactgagaggctgggtgtatgactcacacctgtaattccagcactttgggaggcgggcgaattgcttgggcccaagactttgagactagcctgggtaacatagtaggactttatctctacaaaaaatacaaaaattaggcatggtggcatgtgcttatagtcccagctactcaggaggctgaagtgggaggattgcttaaacctggggaggtcgagactgcagtgttcgtgccactgcactccagtctgggcaatgggartgagaccctgtctcagaaaaatgtaaaaaagtgcttgctgctgttgtaaccaagcgagttatagagaaacaccacactttgagacaaattgaggagtcctttattagctggcaaccgagaggcagctaatgctcaaaattctcttggccctgaggaaggggctagttttgtttttatactgtggtctaaataggggaggggggagtttagctgaagcaatttttacagaagcagaactggcaaaaagttaaaaaattaattggttacaaaagcagttacaaaaaataaacagttccaggtgmaggggcttaaactatcacaaagggataaatgcaggggctttatgtgccatccactgcgcgtgtccccaggagctgctggtgcagctcrcctcaatatcttatcagtaagtgcattcctggatgtgctttgagtcagtttacactagttatgcccttaagggagggagggaagggggctgcaggtgaagaaactaaaatggagtctgtccggctctctctctgctaggagagagtcactcaggttaaaacaaggtagggcatcacactgcctgcctacagtcatcccaggcactgggaacgcagctgtaagtaacaagacagttcagccacctctgctgtcaggccattcctgctgggtagaggtgacagagaacacacaaattgataaggaaatcgtgtggtctccggttgcgttggtagcgaacagtaaagcgggttacccttgtgtctgcagatgctgagccttgacgcctcggccatggtctacccgccgcgggaggtgtgtggtgccggcactgcggccatcttgcagttcctctgcaaaggtaaagccaggccgctgcctcctcccctcattgaggaactatgacccccatggccaccctgtgccagcccaggctggggaacagcagagacagaaatggccacagtgcctacctgcttggagttcgaggtctggcaagggaaacaggcaaaacaaatgtttacacagggaaatagatacagactgtggttatgggagtgcagtggtgcagctgatttaggttggggccacagggaaggcctgtctttgagagtgtggctccactgacacggagtcatggttaagatctagaaaaagcagaaagctgttccgccagtaggtgcatatggaagggccttgatgggaagtttgacagagagagggccagtgtagctggagggaggaagcagagagaagagagatgggrgaagccaaagacagtgcccgggcccagtgtccagtgggagagcatgtgatcagtcattaggctgcagggaggagaagggattggaggaggaaagaaagagtgcaggacaggggaccagttaggaggctgtcggggtcatccaggagagatgcacagcagaaggagctaaaacccggagccagcactggctggaggcgggaggagagcaggatgccctgtcaggctggaagttcttagctagtggttctggtcacctgtgggactttcagaatgcaaccaagacacacatgcctatgacttatcatggccattgcaaaacagtggggaaggatggtcttttcaatagctgattctggatcaactggttgtccctgtggaaaaaatgaactttaacctcttccttaaacaggaagcaggcagtactcatgataaaagattggtaccttagatttaattaaggccagacatggtggcttgcgcctgtaatcccagcactatgggaggctgaggcaggaggatctcgagcccaggagtttgagaccagcctaggcaacatggtgaaaccctgtctctacaaaaaaaaaaaaaaaaaaaaaaamaaaaatcagccaggcgtggtggcacgtgcctgtgttcccagctacttgggaggctgaggtggaaggatcatttgagcctgagctgtggtcatgccactgcactccagcctggagcaagactccaacaaagcaataccctatctcaaaaaaaaggtttaattaaaatcaaaatgtctcttcctcaaaagataccatttagggaaagaaaaggaaagccataaagttagagatgatatttgcaatacatatatatccaacaaaggactgggatctggactataaacagaaatcctacagatccacraggaaaagacattagcaaaagacttgactaagaatttttacacaagagaatatccacacggtggctcacacctgtaatcccagcactttgggaggctgaggtgggcagataacctgaggtcaggagtttgagaccagcctggtcaacatggtaaaactccatctctactaaaaatacaaaaactaactgggcatggtggcaggcacctgtaatcccagctactcaggaggctgaggcaggagaatcacttgaacccgggaggcagaggttgcagtgagctgagattgtgccactgcgctccagtctggatgacagagcaaaactccatctcaaaaagaaaaaaaaaaaagagatgatatacagatagcaaacagtatctgaaaaaattgcacaacatcatcttagtcaatgggaaaatgcaaattaaaactgcaaagagatactttgacaaacccactaaaatggccagaacttttcaatggaaaaaaaaaaacaaaaaacttcctgctgacaagtcaaccagaaataaaaaaacaaaaaataggccgggcgcggtggctcgcgcctgtaatcccagcactttgggaggccgaggtgggcggatcatgacgtcagaagattgagaccatcctgactaacacagtgaaaccctgtctctactaaaaatacaaaaaaaattagcaaggcgtggtggcgggcgcctgtagtcccagctactagggaggctgaagcaggagaatggcgtgaacccgggaggaggagcttgcagtgagccgagattgcgccactgcactccagcctgggatacagagcaagactccatctcaaaaaaataaaataaaatggccaaaattgaactggtgataccaagaattagcaaagatgtggagcaacaggaacttccatatactgcaggtgggaatgtaaagtgaaaattaccttaaaaattattctcaatatctactcaagctgaacattcaaatatcctatggcccatgagttccattcctaggtacatgcctgtattagtctgttctcacaccgctatgaagaaattcccaatttctatgaagaaattctttataaagaaaagaagtttaattgactcacagtttcacatggccgggaggcctcaggaaacttacagtcatggtggaaggcacctcttcacagggcagcaggagagagaattagtgccaagtgaagagggaagccccttataaaaccatcagatcttgtgagaactcacccaccaccataagaatagcatgggggaactgctcccatgatctaatcacctcccacgagttcccgcccccarcacgtggggattacaattcagagattgaggtggggacacagagccagaccatatcaatgcccaatggaaatgcatatgaataaatgccaaaagccatgtgcaaaaatgttcatagcagcactatttatgccagtccaacctggaaacagctwtaatgtccattaggagtasaatggataactaaactgttttatactcaatgtgtggataccacacggcaagtggaaagaatgagccactgctcctttcaacaacctggatgagtctcacaaacaatgtggagtgtgaggagccagacacaaaggaatatgtgctcttatcagtcaccacagagctttgaaccagcactggttcctggtcatgagagtgtgttcacctttaaacattcatcaagctctgcatgaagattctgtgctctcggcccaaaggcagtgagttatctcaattgattgctcacagtcagttacagatttaaggccttgttccactctttctcctcttctcaccgctgcacttgactaatcttaaaaaaagagagagaaagattttgtgctcttttytgtatgtatgttatattttactttaaaagaaagtggaggggggtggctgcgatcatagccaccaggccacacatatgcaaattagagtcttcgagcaacaggtgattccaatatacaccctggccaatggctgagctagctagacaaaagcctttattttctttaaaaagattttggggccgaacaaggtggctcacgcctgtaatcccaacattttgggaggccaaggcgggtggatcgcttgagcccaggagttcaacatgggcaacatggcaaaacttcatctctacaaaaaatgcaaaaattagcccagcttggtggcacacctgtagtgccagctgctcgggagtcttaggtgggaggattgcttgagcctaagaagtggaggttgcagtgagccaagattgtgccactgcactgcagcctgggtgacagagagagaccttatgttataaaaaaaaaaaaaaaaaaaaaaaaagattttgggctgggcgcggtggctcacgcctgtaatcccagcactttaggaggtcgaggtgggtggatcacctgaggtcgggagttcgagaccagcctgaccaacatggagaaacgccatctttactaaaaatacaaagactagccaggcgtggtgatgcatgcctgtaatcccagctactcaggaggctgaggcaggagaatcgcttgaacccatgaggcagaggctgcagtgagctgagatctcgccactgcactccagcctgggcgacagagcaagactccatctcaaaaaaaaagaaaaaagaacaattagccaccacgcctggctaatttttgtatttttagtaaagacagggtttcgccatgttgaccaggstggtctcatactcttgacctaaggtgatccacccacctcggcctcccgaagcgctggcattacaagtgtgagccaccacgccctgcaagaaataatttttttttttgagacagagtctcactgtcgcccaggctggagtgcggtggcgcaatcttggctcactacaacctctgcctcctgggttcaagcgattctcctgcctcagcctcctgagtagctgggattacaggcgcccaccaccacgcctggctaatttttgtatttttagtagagacggggtttcaccatgttggtcaggctggtctcgaactcctgacctcgtgatccacccgcctcagcctcccaaaatgctgggattacaggcgtgagacaccacgcctggccaagaaataatttttcaatttacctaaactatgtagaagtatatatatatatatatgtgtgtgtaaaatttgttttttgaccttttaaaaaacattaaagaggctgggcrtggtgactcacacctataatcccataactttgggagaccaaggctggcagatcccctgaggtcaggagttcgagaccacctttaccaacatgcggaaaccctgtctctactaaaaatacaaaattagctgggtgtagtggcgcatgcctataatcccagctactcaggaggctgaggcaggagaatggcttgaacccaggaggaggaggttgcagtgagcagagatcatgccactgcactccagcctgggtgacagagcaagactccatctcaaaaaataaataaataaataaaaataaaaataaacattaaagaaaccataaaaggtatcatatgatgtgattctatgccttgctttttttgtctctcaagaaaagtcttgggtattttcctgtctcatagtacrgtttgaatgtccccttaaactggtcacaggatttcatgtggtggcacctgtagcttcgtagccatccctgttggaaggcatttccagtttcctgctgttctgaacatttgaactgacacctctctgtcaccgtgtgcactttcccctagggtgtgtgagagggcacgagcgccctagggtgcctgggaagaggtcccatcagtctccatcccatgaggagtggctgggaggacctctctcccccttcacaacctgcgtaacatgaagtattttattaaagagtctgctaatcggatggataacaagagagcccattattattctaatgtcacttccttgattctgtgaatatttttcatacgtctcctgcccatttttagtatttcttgtgacgtgacygtatccttcccatgaggggaaagaagataactttgagtacatcaaaacttacaacttgtttaccccggaaggacaccatcatcaaagttaaaagaccagttaccacctggaagaagatagttacaacatattatagacctaaggttattaactacaatatataaagagcacctacaaatcaacaggaaaaagacaaacagccaaataggaagtgagtctaaggtatgaaccctttgaaattttacaggcaaaaccacacatggccagagaaggaaagcatcttgcccaaggtctcacattcagggaattattggtagagctggatctaggacgcaggtttcactgcttatctcaggctttttcatcacttcattctcacttggatggtaaagaggtgtaaggggtagccagtacccattgactcactccactgacatttactgarcacctgccacattccaggcccagggctaggaccggtgaaaaacacgaagcgcccaggctagggaagaggagagcagtggctgagtcagggtggggccggctgccctggcagtgggagcggrtgtctctgggtacctcagctgtctcctccctcctggtcagcttgtgtcccgtctcttacagagtcagggctggaatactaccccccttctcagtacttgctgccaattctggagcaagatggaatcgagaactctcgggacagccctgatgggcccacggacagattctcaagggaggagttagagtggcaggtaagacaaggcagcctgctgcacgcatacatrtgtgtgtgtgcgtgtgcatgtatgtgtgttgagggagctgggaatggaagggggcggtggttcagagctgcagctcccagattcctccatagaactagaactggcctcctgacgagttgaactgctttttcaaggcctgctgtggcagcctcaccccaccagcttgccaagcacaagctgtgccctgctgctgtctgttccctgaactaaccatgatccttccctcttcagggcctttgaacaagcagctccctctgtctggaatctccccactcacttgtcttatccttcagttcttttttttttttttttcctttttttgagacagggtcttgctccatcaccsaggctggagtgcagtggtgtgatcatagctcgctgcagccttaacctcctgggcttaagtgatcctcccacctcagactcccaaagtgctgggattataggcatgagccaccatgctcagcctccttcagttctcagtttaaacattacatcctctgagaagctccagtcgaggtcaggtctcctgttgtgtgttctcagagtgccctgcacagttccttggtagcacttatcacagcgctaaattgatgaggaactctatgggaaatgatctgtctcatgtctgtctcccctgctggatgaagctttgtgagaatagggattgtgtctgtaatgttcattgctatctctcagcaaatacttctggaccaaatgctactcactgtctgggacacacacccaccatgctctgggtctagtgaaggagtcagacaggcacatgtgtgagcaccagtgacaggctggccctgtcaggtcctggcgacaagctagcacaggacgacacagaggaggaagctcaaagggtttgccacattagcctgcgtgccccctctgccgccatccccaaggctcatgatccagggtcctctgctggctggtagatgggggaggccatcactgggcaggagtaccagctgccgggcatttggcttcatatcttccactgactcttaatctctggttcctagatgccaccctttcccgttttccactgctgctgggaatgcatttgggattttattattattattattattattattttayagttcagcaagaattagagagggaggagaaggctgtatgtgaaaattgtgccagttcacattctcagaaaatatttgcaacacagtcactggctgaaggattcgtagattgagcagagaaagaactctttccaatcagtaagaagaaaaccatcgcaatagaaaaaatattgggaggccgaggctggtggatcacttgaggccaggagtttgagaccagcttggccaacgtagtaaaaccctgtctctactgaaaatgcaaaacttagccaggcatggaggcgtgcacctgtaatcccagctactcgggaggctgaggcacaagaatcacttgaatccaggaggcagaggttgcagtgagctgagattgcgccactgcactccagcctgtccaggtgacagaatgagactccatctcaaacaaacaaacaaacaaacatttaaaaatgccaactttgctggtaatcagaggagaggcatgttaagttaaaacaacattgaaataccatttccttcctcaagattggcacacattttgacatgacaatttctgttggccagagtatgggaaaacaggtgtcctcataaactgctcttgggagtgaaaattggtatcacaactttggaggataatttgacagtaggtgtcaaaaaagattttattatttttttatttttttttgagatggagtctcactctgttgcccaggctggagtgcagtggtgcaatcttggctcactgcaacctccatctcccgggttcaagygattctcctgcctcagcctcccgagtagctgggattacagggatgcgccaccatgcccggctaattttgtatttttagtagagacggggtttcaccatgttggccaggctggtcacgaactcctgacctcaagtgatctgcccacctcggcctcccaaagtgctgggattacaggtgtgagccaccacacccgccagatgtcaaaaattttcatgggcacagcccgtgatccagaagttccgcttctcaatgtatacccaagataaatgcttgcatgaggagacatttgcaggagtgtttattgcagccttatttgtagtattggatgccccccaaatgtttgtcagtgagaaggcactgcccctgggtcatgtgcacaccatgagatggagcatttgagcctcggctcgctgggacrcatggattagtgaaaagggcagattgcagaacaggatgggctagtctatttccattcttatgtttaaaaagaaaactcaatcaacaccagcctgggcaatgtggsgagaccctgtctctacaaaaaatacaaaaaaattagccaggcatagtggcacgtgcctrtggtcccagctacgagggaggctaaggtgggaggatggcttaagcccaggaggttggagtttgcagtgagctaagattacaccactgcaccccatcctgagtaacagaactagaccctatctcaaaaaagaaagaaaaagaaaactcaaaacaaaaaaaggaaacagacaggtagttgccagtggctggagtgggaagaggatttgatgatgaagtggcatgagcgaattttcgagggtgatggaattgttttcttttttctttttgagacagagtctcactctgtcacactaggctggagtgcagtggcatgatctcagctcactgcaacctctgcctctcaggttcaagcaattctcctgccttagcctcccgagtagctgggattacaggcacctgccaccacgcctggctaagttttgcattttgttagtagagacggggtttcaccatgctggccagtctggtctcgaactcctgaactcaagtgatccacttgtctcagcctcccaaagtgctgggattacaggcatgagccaccgcgcccagccagaattgttttctatcttaattgtgtttagaggttacagaactctatgcatatataaagattcatagaattgttcactaacattgggtgaattagagtaaatagattatacttgattaaaaaaatgtttatatatgcacacaaatacaaatatatttctttcccaaaggcacaaattatatatgtacagatgcatgccttgggcctgataatgacagttacacctgacaggaggtgtggggtgggaggggaaccagggttaggctggagtggtcagtagatgctttagttttttataccatgtttcaaacttttacaaggagaatatattgagatgttatctgtataattgaagattaattttaaaattatattcctaccattagtataggcaaaatcctatttataggttgctgcttttataattcagagactgatcctgttctcaaaacaggataactaaatagaaggaccattcaaaaaatacctgtgtgccaggcgcagtggctcacgcctataatcccagcactttgggaggccgagtcgggtggatgcttgagctcaggagtttgagaccatcctgggtaacatagcaagaccttgtctctaccaaaaatacaaaaaattagccaggcatggtggtgcrtgcctgcagtctcagcaacttaggaggctgaggtgggaggatcactagagcccaggaggtcgcggctgcagtgagctgagattgtgccactgcactccagcgtgggcaagagtgagactccatcacaaagaaaaaacttgtgtgggccgggcgcagtggctcatgcctataatcccagcactttgggaggccgaggcaaatggatcacctgaggtcaggagttcgagaccagcttggccaatatggtgaaaccctgtctctattaaaaatacagaaaatcagccgggtgtggtggtgggtgcctgtaatcccagctactcaggaggctgaggcaggagaattgcttgaacccaggaggtggaggttgcagtgagccaagattgtgccattattgcactccagcctgggcaacaagagcraaactccgtctcaaaaaaaaaaaaaaaaaagaagaacctaactcttgtgtatatgtgtattgctgtttaattacatcaataataaattaattaattaaacaccaataattacattacattattgatgtttaatacctgctccttgttataaatttaaacaatacagacaattacaaaccaagtgaatgtcaacccttccaccctgcactcccgttgcctggaggtagtcatcattaactgattaatgactgtccttcttgacctttgactcaataccttcacacatatgctcagagttgagttttcttgatgatgtttttgcaaaagtagaatcatgctacacacaggtgagggatctcacacattcgccccattggcggttgtgtaatagtccactgtatggatgcaccatgacttacggacagatgttgatagatgtatgagttatttccagtgtttttgctcttttgaataattctgcaggaagttgtacccacacctttgtgcactgtgagtattttggtggactggaaccgggtgctgtaggtgtgttacgcagacatccatgggcatcagatatcccatttcctgctctgctcttcagaccaccatccctgctcagggctgcatcccagaactgtcttgaagagcccctcctacrgtgccatgcacacagtgacagcccaggggttctcatcaggtgtccactggaaccacctggtgcccttgatcaatacggatcccctcatcccccgaccccaccwttctgaggcagtggtctggggtgggccagagtttgtataacatcaggccacccgggggttcctggtgcccatgccagggagaaccactgctgccaccctctcttgaccactgtctttttttcctcccagaacaggttctcagactatgagaagaggaaggtaagaaaatgcctttacccttctgtcactcttttctcattaaagatctcaactcaactcataaaatatttgagaaaatkacttcttcccagctcagaattagaggtcacagtaatgccttcctcttacacgmagtctgctgcatcctcacatgcctcaggtgggtggtagagcatccatgggacaggtgcagagactgaggctcagaggggttgagcccagcaccgggctctagaccactagcctcttcctgtgaacagcttgttttcttacagttgggccctggaggggagtgggggttgctcagcatgaagacctggagcctgccctgtcagtgttgaggggtggattctcccgacttctgtgtcctaactcccccagggcctgtgctgacagtcaccaggatctgtgtcttgcaggaacagaagatgctggagaaactcgagtttgaacggcgcctggaactggggcagcgggagcacacccagctccttcagcagagcagcagccagaaggatgagatccttcagacggtcaaggaggtttgtgagccgcctgctagggtccagcctggctgcaycccccagccagtggcctcctggcttgggccaaggtccctcggatgtggaaaggcrgtgggatgaagctgtcacttccttctgtcccccagcacctgggagggcccttacagatcacccagcccagcctccccgtgtgcagatggacactgtagcctactgggaggagctggccggaggtcacacaaaaaggattggcaaggcagggtgggaaagccagcctcctaaccycrgtcagtacccctcacgrcgtctgagggggtcccaggggctcaggacccctacctcyggctgcaggagcagtcccggctggagcagggcctgagtgagcaccagcgccacctcracgcagagcggcagcggctgcaggagcagctgaagcagacggaacagaacatttccagccggatccagaagctgctgcaggacaatcagaggttgggctctgctcctcggccccagccccagagtccttccccgtgcagtcccctgaggagccgggaggagtgtgtttctccctcactgcctctgcccctgccccgggcttcccttgtcaggatccagtctgggtgcttcaactggcaccagcgtagagagaaaagaatctgacccagtcattacaaagtctggtttcttagcatgagactgctaccagattggacctgtggcctcgggcaaatgtttccccactgggccccaagcttcccatctataaagtgagtgggtttgacaagatagttgggatcacatcctgctccagtattttgggttctgcgtaacccgttgcactgaggtcagctgttcacctgtagtgagatttgccttaacaaaccctgtgcaaggtacgagctagtaagagcagatcttgatggggctggggagacatggcgccagaaaagcctgagaagtctagtgagggggcccattgcaggatgattccagaaacaggctccagccatatgccctgccacttccaggcctcttttttctaaccctgaatcactcgttcctccctcacctgtcagtttcaaaagtacctgcatgagttcaggaaaccagtcatttgttggatgcttcttatgtgccaagcttgttacatctatttcttcattaagtctttacaaatgcaccaagaagctgggttgttttcattttgttttgtttgagacagagtctcgctgtgtcactgaggctggagtgcagtggtgtgctctcggctcactgcaacctccttctcccaggttcaagcaattctcttgcctcagcctcccaaggagctgggactacaggcttgggccaccacgcctggctaatttttgtagagataaggtttctccatgttgaccaggctggtctcgaactcctgacctcaagtgatctatccacttcagcctcccaaagtgctgggattacagatgtgagccactgtgtctggctgggtttttttattcttctaatttcataggtgaggaaacctgggacttgagtggtttcagtaactggctaagaacccagagcttcaaggtggtggagccaaggtgcccccagcccatttcctaagcccctctgcacagctaacgcagtgagacaggaaacaggcctgctggtgactgccaggaccttttatgattttctccacagacaaaagaaaagctccgagattttgaaatcgctggaaaatgaaaggtaagtgttcttccaggggagggcagcattttttttttttttttgagacggagtcctgcactgtcgccaggctggagtgcagtggcacaatctcggctcagtgcaacccccgcygcccaggtccaagcaattcccctgcctcagcctcccgagtagctgggactataggcgcataccaccaccagctaattttttgtattttagtagagacggggtttcaccgtgttaaccaggatggtttcgatctcctgacctcatgatctgcccgcctcggcctcacaaagtactgggattgcaggcgtgagccactgctcccggccaaggagagcagctttgaggrgagaatgtcttgtgattctccagaggattatgccaggacatttccctaaagctataaggagattcacctccttagacgatatttaattacaaagaatcattgtcttcaagttcattaaaacatacgtacactcctgaaaaacattcagagacatgaataaggctagatatataatgtccaactatattcctagtataaaaagttcaggccaggcgcagtggctcacatctgtaatcccagcactttgggaggccgaggtgggcagatcacttgaggtcaggagtttgagaccatcctggccaacatggcaaaacgctgtctctactaaaaatcaaaacttagccaggagtggtggcaggcgcctatggttccagctaaaaaaaaaaagaaattcagaaaaaaaatctawatttctggaaagaaaaattatttagttacataaattatgtatggaggaataacctgcagccattaaatgtcttattgaataatatttctcattaagggaaaacataacatattgctaatggaaaaagtgacaggctatatttatagcagaatttttagtatatcttttttttttttttttttttgagacggagtctcactctgtcacccaggctggagtgcagtggcacgatctcggctcactgcaacctccacctcccaggttcaggcgattctcctgcctcagcatcccgagtagctgggattataggcgcataccaccaggtccggctgatttttgtatttttagtagagatggagtttcaccatgttggccaggctggtctcaaactcctgacctcaagtcatccgcctgcctcaggctcccaaagtgctgggattacaggtgtgagccaccgcacccggccatgtgactatttgtgaaggaaatatttaaaggacattttgctaggtgccaacttaccttcccaaaaacattctgccagtttacactcctctcagcagtgtaggaaagtgcccatttctccaccaccatcaccatcacaaacagttaccagttttcttactgtcaaccaacctagtaggtgaaaagattttactttctttagttaccagtaatgttaagcatctttccagatgtttattgatcacttgaatttcagcattggctatttgcttcttttgcccattttctaagggagcgtccatctttttacacaagatactcgaactacaggctgaaggcgaacagagggccccaagggttgcttgtgatgcggtaggcatccagagagcccatctaggtgtaggttgccaaatcaaggaggccttcctggaggaggtggtgttcatctgctgggattccctgttggaaatgttaaatttgctgaatgaatggatggatttttttctagaataagaatggaacagttgatgtccataacccaggaggagactgagagcctgcggcgacgtgacgttgcctgtgagttttgggatggggagcttgtgagcacgctgcctgctggctgggctggcagggtggatggccctccctctgttggccatgcatggagggccctgagtgttagccctcgagaggggcagtcaagtcctgccatggagcacaggctctggggtcagcctagatgtggatgcagagtcccagttcaaacacccaccatgtgaccttagggacattactgcttactgctccccaacttttccaaggctcggttttcttagctataaaatggaggaaatgggccaggtgtcggggctcatgcctgtaatcccagcgctttaggaagccgaggctggaggatcacatgagcccaggagttcaaggctgcagtgagctgtgatcacactactgcactccagcctgggtaatacagcgagaccatttctcagaaaaaaaaaaaaagaaagtccaaatgcccccaaatagaggattgtttaaataaatgttgktgatccatatgctgtggcactctgcagtattagcatcccattagcatgttatcagggggagtgttcataaaaatgggaagtgggatgataccattttcatttttttaattgtaaaatatgcatcatgtaaactttaccatcttaatcactttattttattttatttatgttttgagacaaagtctcgctctgttgctcaggctggagtacagtggtgcgatcttggctcactgcaacctccgcctcccaggtttaagcgattctcctgcctcagcctccgagtagctaggatcacagatgcacaccaccacaccaggctaatttttgtatttttagtagagatggggttttgccatgttggccaggctgctcttgaactcctgacctcaagtgatcgcctgcctcaacctcctgaagtgctggtattacaggcgtgagccaccgtgcctggtcttcattttaaaatatattagttctgtggcattattgttgtacaactgccaccaccatccatcgccagaactttttcatcttcctcaactgaaactgtccctagtaaacactaactccccgtgcccccctcccctcagcccctgggaatcaacattctactttctgtgtgtggatttgagtgttataagtacctcctatatgtggaatcatacaatatttctccttttgtgtctaccatatttcacttagcataatgtccttgggttcatccatgttatagcatgtgtttgaatttctttccctttttttttttttttttttcctgyttctttatttctaaacactggcccaccagggaaaaattttcttcctttttaatagtaaataacgttgcatttcctgtatatgccacattttctttytttcttttttccttgctctgtcaccaggctggagggcagtggtgtgaacctgctcactgcagcctccacctcctgggctcaagcagtcctcccactacagcctcccaagtagtggggactacagacacatgccacctcacctggctaattttttttttttttgaggtagggtctcactctgttgcccaggctggtctcaaactcctgggctcaagcagtcctcccaccttggcctcccgtaagtgcttatattacaggtgagccgccatgtccagcgtctacattttctttatccattcatctatcagtgggaatgtgggttgtttccactttttgactcttatgaataatgctacaaatgtgtgtgtacaaacatctattctagttccttctttcaattattttaattttttgatttttctttttttcttttttttttttttttgagatagggtcttgctctgttgcccaggctggagtgcagtggcatgatctcagctcacgcaacctctgcctcccgggttcaagcgattctcctgcctcagactcccaagtagctgggattacaggcacctgccaccatgcccggctaatttttgtatttttagtacagacacagtttcgccatgttggccaggctggtctcgaactcctgacctccggtgatccacctgccttggcttcccaaagtgctgggattacaggcataagccaccaygcctggcctattttaatttgtttaattcctaaatgcataaaaactgactagaagaatatatatcaaaatggaataatatttctggatgacaagatcacaggagatgttatgtatgtgctattcagtgttttacaattagccttccaagcatacgttgcttttatagttaaaaagaacaggccgggcgcagtggctcacctgtaatcccagcactttgggaggccaaggcgggtggatcacgaggtcaagagatcgagaccatcctggctaacacagtgaaaccctgtctctattaataatacaaaaaattaggcgggcgtggtggcaggcgtctgtagtcccagctactcgggaggctgaggaggagaatggcgggaacctgggaggcagagcttgcagtgagctgagatcgcaccactgcactccagcctgggtgacagagtgagactgcatctcaaaaaacaaaacaaaacaaaaaggaacaaagggttttttttaagataactatcaggtaggtaaccaggtgaggcctcaaggcctgttcctcagttcctgtggaaatccctgctgcctccctgcccaggtgccccaggagcagccactccactcagctgtccccacctcatgttcccacagccgccatgcagcagatgctgactgagagctgtaagaaccggctcatccagatggcctacgaatctcagaggcagaacttggtccagcaggcctgttccaggtaaggtaaggaagaggagtcccaggtgagggagctgggggagctggctcagggcccaagaccgtgggatgagagctgggcactaaacctcccgccctgggccaccccagcctctgctctgctgttaggggcaagtgatggctgctcttcctgagttttctagccggatccatgattcagtgttgggctgtgttaaagtggtaacagtcattcccatttcttgtgcacttcctgtgtggcaggcactcggcwaagcgatgaaccacattcgctgattgattctaggagggactgtattgttattagcccgatttcacaatcgcaactcaggttctgagaaactgtataacgcacccaaggaagcaagccagcaggtggcggagccaggatttgagcccggcagaggggaggggtgtgctcttgactgtggtacactcatcagtgtctgaggacccccacggttgggggtgggatgccctggaaggataagtgaaggggttgctttcatgctgatggctgctctggggtccggctccctgtgctcactgggcactgtgggtttgttggaggttccacaggtgcccagcagagccagtggggaaaactcagtgctcaggagccccagacagggacaggccagcagccctggatgccctgtttttcctcccatgcatgtggctggcactgctgccaccctccagggcgcctggactgtgcgggcctcccctgggtccctgcagatgtgggaatttctcccccctttcctgataygtgacactgtgcttaggagttgcaagcgcaggggtcaaacagacctggatccaggtcccacttctgcttactaaccgtgaggtctcaggcaagtctctttccttctttgggcttcaaattccttatcagataaatcatagtacctacctgtagagttggtggagaatttgatgagtgttgatgagcataatctctagtgcataaaggtccaataaatatttgctattgttgtgaagcagggacctcactgggaaaaaayagttgctattatgaaataaacaaagccaagatggtggctgggcgcagtggctcacgtctgtaatcccagcactttgggaggccgaggtgggtggatcacctgaggtcgggagtttgagaccagcctggccaacatggtaaaaccccgtctctactaaaaatacaaacaattagccaaacgtagcagtgggcgcctgtaatcccagctacttgggagactgaggcaggaaaattgcttgaacctgggaagtggaggttgcagtgagccacgatcacaccactgcactccagcccgggtgacagagcaagactctgtctcaaaaaaaaaaaaaaaaacaaccaagatggtgccaaagcacaaacatacgtgaggctgcaggttcttgtgcccaagtcaagggctgctccttgctccctgcccagggtgagagtgccgggaaggacagctttgtcatacttcggtggctcaccacccatgggagtcaggagctccccacccatggaggtggctgggcagaggcaggcatccacttccggggggtgctggggaggggattctggtggcaggttgggtgagaggacctggaagcatctctctcccagctcccaactcgatccccttccctccaggccatgggattcagacagactcagtgtctgtggcccacccagggcccggctcccagcaggtactccatgaatgtggtccactgaagaaatgggttatcttgatctcctccaaggggcctggcacatagtaggtgctcgggaaacgttccaagaatgaatgaatttgctgtctttctggcagcatggccgaaatggatgaacgattccagcagattctgtcgtggcagcaaatggatcagaacaaagccatcagccagatcctgcaggaggtgagccctcgcccagagcctgagggtgggagctcaggagggaggttcaggagccagggcagagtgcagagctccacacggagcccttcctagacagcatgtgggaccacagaggtttgtgaccatagaggtgtacaagtgatcagggtgaggggtgggagaggctgagggggggcccgggggatggtcttctggtcactaaaatccacagaagcacctccacctgctctctggcaggctcctacccccatcctgtgtaggaggctccattggaaggacttaagtggcaggaggtgatggtgaccacaccatggaggtcagggcacagaggacgctgtgggacctctggcctcttctcatgtccagacctgctgtgctgctatctgctcttccatctctgcggtgctcaggaggtgcctggcagggctcttgagtggatgaaacgaagggcccctgtgacctcctccccttcggtgtccatattactctgtttagcgtttttgttttctttttttgagatggagtttccctcttgttgcccagtttggagtgcagtggtgcgatctcggctcactgcaacctctgtctcccaggttcaactgattctcctgcctcagcctcccaagtagctaggattacgggcacccaccaacacgcccaactaatttttgtatttttagtagagatggggttttgccacgttggccaggctggtctcgaactcctgacctcagctgatccacccacctcggcctcccaaagtgctggatttacaggcatcagacaccgtgcccagcctgtttagctttttattttcctttttttcttttcttttctttttttttttttaagacaaggtcttgctctgttgcccaggatgagtgaagtgatgtgatcacagttcactgcagcctcaaactcctgggctcaaacgatcctcccacctttgcctcctgagtagcggagaccacagggccaccatgcccagctaatttttttttattttttgtagagacagagtttccctatgttgcccaggctggtctcaaactcctgggctcaagcaatcctcctgcctcggcctcccagagtgctgggattacagacatgagccaccggcctgttcagctctttcctgcagccccgtgggagtcttgccgctgcctcccttcttccctcgcctttctcccctgtcctctgcgtgtttgtcatcccaccctgctcctttctccctaatttcaatctctgttctaaaatggtttgacttagtatctgtggagcttgtctgaggaaaattctccatttctcagaggaggcatctgccttgtggttaagtggggctcgggagctggataggcttggtgtgtgtcccagcgccgctgattcatgcctctgagtgtcactccccatctgtgaagtggggcagtaaaagcacccccacggtccactgtggtggaaactcagggtgcratgccggaagtgcatcaggtagaggctgcccgaagtgagcccctagtaccatcttaaggtttacacaagtgaggtgaaatcttctccctctctcagaaaaaamccatccattaaggtgctttgtacacagcttttgcttttcacagggatggggctgcagggaaaagtgtgggcacrgcccctgctgagggctggtggtctgtgttgcagagcgcgatgcagaaggctgcrttcgaggcactccaggtgaagaaagacctgatgcatcggcagatcaggagccaggtgagcgctggggctggggtccctggacctgctctctcagagacttgcagagtggccctccagggcggcaggtcgcagcagttgaggtttgaaccccagctccttggcttgctagcccaacaagaggtcgaggccttgccctcagaacctccctttgctcccagccttgtgtcggggctgctgggagggtgtctagagacctcctattccggggtctggcgagggtcttgccagcgaggcgggtctccaccacgcctgggccagggaggctggtgctgatgtgtggctttgactgctccagctgcctctgctgtccctgctccaggcaggacttccccactgggaaaagcagccggcgcaggccccagcgctcctacagctcagacagacagaggcgtctcaggggcatatagtatttcccccagaagagggcagggggagctgtgagccacsgtggtcctgacgcctgctgaaaagtgacctcggccyaggaggaggcggtcctcctcwtagaycctccctcatgtgacaagataccccccaccccccgcaggccggctgctgaccttcaahccttgggcaagcccacctacacggcttggtggtcaccgcctgtggagtggggctggggctggggctgaagtgagcgtcaggctatgggagtactcctgcatcatgttcagcacactgaattttgcatttttgcatggtttttttctttctctatttttctttctttctttctttctttctttctttttttggaccaatttacctttttaatttccctctttaatttcaattccacattgccggacatgaagctcattcctctgaccaggggttggtggtgtcatagggacttagggatgagggtcacagggtcatgggcacaggatagagaagtactggctatggggtctgacccccacccctgcccagggctaaaatcccctagacacaccctggagagcctgtgagggccccccacattctcactgcagatggttttgaccaggtcagctattgcccttaaaccctgagctgaggcatcccagagaaagggatctctcccttacctgctctgtgtccttgagcaagtgagaacctctctgagcctcagttttcttgtctataaaatggaggcaataatacctcctagcagccagagaattgatgaaatatgatacatcaagtgtgcagcacaggcctagcacatagtaggtgctcaagacataccagctactactaccactgttactcagtcacttccactaccctctgctctcccctgcaacagcgatgcgagggacaagagaacttgaccagcaggagactgggtgatagctctgtctgtgctttactctggcctgaatccccaaggaaagccccctctccattgcacaagcctttatcctgatcccactctaggagagatcctgtgctggcctcttggtaaacaattttggccacaacaagcacgtccatgccccaggaacgcgaggccatgaaggaacgaattcttgttcaagccccttgacgaggttcccaggcccgcaggttcccctcattccagagcctccccagcctccccagaaaggcttcttagacccacttggtcaccagagagtagcagcacaaaactgaactgtggttaatgtgagtaaaaaaaaaccctgtctcgtcttctgtttagattaagttaatagaaactgagttattgcagctgacacagctggagttaaagaggaagtccctggacacagagtcactccaggtatgtagggctccctgcccctgccctccttcacgtggtgagacccccacctggtgctccctcccagcctctggcagctgctcaccagcccctgggagtcaagggcttccccagcagacagagggcagagctcctctgtggctgtgacaccagaggacaccccccagccccagaaggcccagcgcaggccaaggttagaggtggtcagcctgttgygaggcaggagggtcagaggaaggagggtttcattgccaaggctcccctgctcatctccatcactgtgtctcctgtgctgggtgcgggcccgccgctgagctcctgtctctctctgtaggccgtgctttaggcccccaggcrcacatcctccagggctggagcttttgggtgtcccgggttgtctggaggagagggcccagccgcatctgtgtaactccctgcaggcagcatctctggggctccagcccgggagtcctgcgcacacagatgagagggcagcagggactggcagctggcgtcctggactggatgcctgggagccgggtgtggcccagcacagccctgctgtgcaactttggcaggtgggggaggagaggcagccctttcccctctctgaacctcagcctctccagctgcagacggagggctggatgggatggtgtgtgaggacatgtgcctgtgccaggagtttgagcagagccttcggtctgtcactgtccctgtgtctgttctcagtggagaagtctcaagccatcccatggactcctcagtgcagtgaagggtctgggatctggatccctggtctcaggtgcaccgcaggtgtgctgtgtgcccttagacaggcctctgcccctccaggccttcttcccctactccataagatggcagcggtcctccaggcccagcctgtgccatcaggccatcggagaaggctgagctagcaagggaaagccctttgtgagccttgaaatgatctccagagatgaggggactgggactgctctcagagaagctgcggtcatcatgcctggcgggtgccctagtccctgcccacaagtgtggcagggctctggctgttggggcccccatggggtttccaagagcaggcrcaggagtgaagcagggaccccaggctctggtttgcacgcacctccatttgtgtggggccccacactgctccccgccatttgcttctgcccatgtgctctgttgtctgggagaccaaaggcaggcacctgtggcttgtcatttcttttgtttgatgtttcttaccatcccattgtcatcagtcaccaggatcccatgcctgacttaaccccacaaggaagagagatgcgggcttagggtaagggggcagaagggcctcttagctttgtcccccaacgcagcctggaggcattgggcagagaaccgagwgagcgggaggccaggcccttctccatcctgccactgcgggactcctgcgctgccgccagctcacggtggtgcggggtgtggtcttgttcgcaggagatgatctcggagcagcgctgggccctcagctccctgctccagcagctgctcaaagagaagcagcagcgagaggaagagctccgggaaatcctggtatgtgtttggcttctgtgctcagcatcacacaggcatttgcttttctttaacagacttgccatttttagaaacacctgttattcaagtaagagttattcatcaaagaaaaactggaaagtacaaaggaaaataattgcatttccaagcgttatctcctgccattttttatttgtttgtttgagacagggtctcactctgtcgcccaggctggagtgcagtggcgcaatctcagctcactgcagccttgacttcctgggctcaagcgatcctcccacctcagcttcccgagtagctgggactacaggcatgtgccaccatgcctggcaaatttttttattttttgtagagatggggtttcgctatgttgcccaggctggtctccaactcccgggctcaaacgatctgtctgccttggcctccgaaagtgctggttttacaggcatgagccaccgcgcctagcctctcctgcggttttgatgcatattttccaaacattgtgatgcacctttatagctgttcgtgtatgcgccttttaaacgtggcatgctgcatacccttttcgagcagcctgtttccgcacattcttttcaagtcattaaactattccttgacgtcctttctcaaggctgtscgtggcccctattgttgagtatgtggattacttctggtttttaaacttttctaggcaatgctctccgaatgcctttgtagtcgagtattcgggaacagccatgagtattcactccagacaggactcactatgtccagggcaggccgtttgataagcttttggcaggagtggcccagctgtccctgtcccctgatgggtttgacactggcacattttcagcgtggcagaggcccccttgagagtgtctcctctagacccagagggcacccaagcaatgaggacagaggccaggctcaccatctggggtggaaaagaccgagtcgttcctgtgtccccgtgaatgcaccagatgccctctgagctgcgtcctaggccgggtcctgtgcaggtttagaagagagagaccagctgcttctggagccctgaacaagccaagtggtgcctgtgcccatcagaggaagctgcctgttcctcacggtgccctactgccatctcctacgcatcaggttactttgcagatggtgccttggcgctgtgccttagcagccaggtactatggctggtgcccctgcccttgtaggccttgggggtcaccaccaaaggaggaagcaccgccccagcagaacacagcccatccggctcctgggcgctggaagagaggggctgcagcccgggagggccaacgacggaagggagcagtgggcgtggccaggtccaggaggggcccgcaaagggcagtcaggcccagcagggattgagaaacgcctgtgttgatcccactccccatgtcatgccagccctcactgaacagctccgttgttctgagcacgggctctggagcaagacaggcctgggtccaattcctggccccaccctgggcaggttactcatcaccctgaacctcagctccctcacctgggaggtagaatctccttcccggagttgtgagaattaatgatggcatcgttaggtgcacagcatggtctggcacatggcactgtgaacatgtcagctacgcctgttgtcaccgtggctgttatcagcattgtttgttcactgctgtattcccagcacctagaacagtactcaacgaagagttatcgaatggcagaataaaagaatcacattcaggctgggtgcagtggctcacgcctgtaatcccagcactttgggaggccgaggtgggcagatcacttgaggtcaggagtttgagaccagcctggccaacgtggtgaaaaccccatctgtactaaaaatataaaaattagccgggcatggtggcacacacctgtagtcccagctactcgggcactccagcctgggtgacagagcaagagtccatctcaaaaataaaataaaagtaccaagtgctgtccacccrctcagaggagcatrgttcataaccatcattttggttttgttttgttttgtttttttgagacggagtttcgctcttgttgcccaggctggagtgcagtggcgcgatctcagctcactgcaacctctgcctcccgggctcaagagattctcctgcctcagcctctcgagtagctgggattacaggcatgtgccgccatgcctggctagttttgtatttttagtagaggtggggggtttctccatgttggtcaggctgrtcttgaactccygacctcmggtgatctgcccaccttggccccccaragtgctgggattacaggcatgagccaccgcgcctggcaaccatcattgttattacaggttttattaccattttgtgactaacattgcctgcttcattcctggcagacggagttagaagccaaaagtgaaaccaggcaggaaaattactggctgattcagtatcaacggcttttgaaccagaagcccttgtccttgaagctgcaagtaaggactgctggtgcctgtcccggccagggagccctggggacctcctcccagaggcgcctgtggtgcctccaccatgctctgcctcttgttacttttctggtgactctagcatgccagatcctgtgccaagccccagtggagacagaagcgagagtaagggagtgttcattctggtgagggggacgacaaggcactggtcactgctgtgcagggcagagaccactgagcccacagtagagcaaagcctgtgccgggagccactgtctgtccagcacctgcggggacagagaggcagttgaaacagccccctcttggtggatgttcaagttgcttactattttcaggtttgcagacagagcggcagtgaacccctgggcctatctatctatctatctctgtgtgcctacctatgagtttttgtaggaaaaatcccgagtacattctatgtattatgttatawatattcaaacccttcatttcctgttgtaaacagtgggttcttttcttccttcctgctcatggtacacgtttctgtcttgcaggaagaggggatggagcgccagctggtggccctcctggaggagctgtcggctgagcactacctgcccatctttgcgcaccaccgcctctcactggacctgctgagccaaatgagcccaggggacctggccaaggtgggyagcagccgtctgcatggaggggaggggcaygcaaggccgctgtcctgaccagccgggggttgatctgctccttgtgtagtcctcgttgaggcctgtccttacctaatggcccagggccaccttgcttccagatggccagaacacctgcccatctgccccagccgcctgtgtgtgccctgcacactgtctcactgggaaatcctggggaggtgggtcctgctgacctgatcagactggatcttcagactggagggacaagacaggcccttggggcttatctgatccagcctctgccctgcctcatggtgtcacaaactgtcgtggccacagcactgcctgagcccctgttcctttctgggcacaagctgagctctttacagcacattaatccacttattcttcaaaacagaatactcatcgctgtgccagctaactttgtagcacctgcacgtgcggggcaccattttaagcactttttgtattcgaactcactgaattctcccgacagcccagcagggtacatatcattatcatcatctttcagttgagacccagtaaggcaataacttggcccaaggtcacacagcagagtgaggtctccaccccaagcagtgtggccccagagttcgtgttctttttcatgagactctcctgcccctccctggacagatgcagacaccagggtccaagaggactggatggcactgagggtcacatggccatgccgctcaggctctggaggctgagggactgtggggctcgtgtgctgctgctgcttagtggcttggcctccaaggcttctctcctcccccacctggtggggaagtggctgaggtgtgcaggtgaagcctggcaccgggaagcagttgctaaaccatagctgttgctagtgctggtttccctttgggcctcagtttccccccaacccctgccacactgattgttgggctgaggcctggggaggttgccctcacagctatggtgccgcactgcctcatcctgaccgtgggccccgccaggccccggaaggcttccacatttccagcaggaggtgtcgacggtcctgtgagcctgggcctgtgccaygtggctcrcaccatttagcgggctcccrcccaggccacagtctgcacttccttgaactgtcacaggtgggcgtctcagaagctggcctgcagcacgagatcctccggagagtccaggaactgctggatgcagccaggatccagccaggtacmagcacagctccagcctcttccaggcagggctccagccrtatgtgtgggctctggtggggacagtcatttgcttacatttcaggatgactcctgagggctggttctagcctctgctggtcggtaaggtttcctcccaaggagcaggcttagggatcagtgagcccattttacagatgggaaaaatgggccaccaaattgggagaacaggagacctccacgtagcagtggaggggccctcccagctccctgtcccatagccttccctcagtccaccctacagacgctgggatccacacactgagggactttggactagagggagaaatagcccgtccccagggcctgcagtatacccaatgctgggcctgaggcatgcctgtggacatggagagatgtccacaacaggctgtgaaggggcaaaggcaggtcgtgaggcccgtggggagaaggggcaggtgtggagtctggggtctgccatgtgctgagcatgatctgggagcccggcacctgcccaccgctgtgcatgaaccacgttgaggaacctccggatccatcccgtgaggaggcactgttgtggtcctcattttcaagatggggaaactgaagcgcaaagaggttagcatgtcccccatcaggtcccattgctggcagatggtggagccactgggcttgcctgcctccctggggaagaggtgaggggccagagcaggggtgaaggagagggcagtcttgtgctgctgggctgggcgaggctctggacagggcatttttagccagagccaaggaagaagcggaggagctgaggcgaaggtggagttctggactggacctcagtggggaggccccggggctccagggggctgggctgactgcagccccaggatagcttcaggcaccagttttgcagctacttttactccagggacactgactcaacccccaaaaagtcattaaacttcttagctttttgatatcaagtcatgtgcagaataggccccttctggatgttcctgaccccccagctctcagactggagatcagaagagttttccatcaggagttggggtcacccccggcagacaagcctcacgtgagcaggagccacaaacaaacaggtgcccttcaccctgagtggggtgcagtgcctctgagcccagcagtcctcaggaycggctgcttctcactgtttgagtcatccctggagcaaacaagcaggttcttcctctccatagcagattggccatgaggatctgtggccacatgcagaaaacggatgcctgggctgctcagggcttcctgcttgtgcccattggcaggggaaggggccatggtgggatccgtcctcagttccagaaggcaagggaaaccctcaatttcctagcaattctcttattactcccagaaatcggtatactttatatcaaatatagaggctggggccaggtgtggtggctcacacctgtaatyccagcactttgggaggctgaggtgggcggatcacctgaggtcaggagttcgagaccagcctggccaacatggtgaaaccctgtctctactaaaaatacaaaaattagccaggcgtggtggcgtgcacctgtagtcccagactcaggaggctgaggcagcagaattgcttgaacccaggaggcggaagttacagtgagccaagatcatgccattgcattccagcctgggtgacaagtgaaactctgtctcaaaaaaaaaaaagaaaaagaaaaaaacaaatatagaagctgggtgcagtggctcatggctgtaatcccacactttgggaggcctacgtgggaggatcactcaagcccaggagtttgagaccagcctgggcgacatagggagaccccttctctacaaaaaataaaataaaattagctgggtgtggtggtgcacaccttagttccagctactcggggggcaaaggtgggaggatcgcttgagcttgggaggtcgaggctgcagtgagccatgattgtgcccctgcactccagcctggaaaagagtgggactgtctcaaaaacaaaacaaaaaaattaaaaaaaattagcaaggcgtcatcccagctactctggaggctgaggtaggaggattgcttgagcctgggaggttgaggctgcagtgagctgtgatcatgatactatactccagcctgggtgacagagcaagaccytgtctaaaaaaaaatatatatatatatatatatgaatgccccctcgaaatggtggtttggggggaagcactgatagccttagagggtctagtgttgtaacagcctttaaaaaatctttagttgtggccgggtgcggtgcctcacgcctgtaatcccagcactttgggaagccgaggcgggcagatcacgaggtcaggagatggagaccatcctggctaacatggtgaaaccctgtctctactaaaattagctgggcacagtggcgtgtgcctrtagtcccagatacgcaagaggagaggctgaggcaggagaatcacttgaatccaggaggcggaggttgcagtgagccgagatcgcaccacactgcactccagcctggcaagagtgagactccatctcaaaaaaaaaaagaaaaactttagtttttcctgttataaaaaataatgcttgtaattcaagccgtagaataaagtgaaccgtgatcaggaagggaacgagggatagagtcaaggaagtgggtggctcacgttgcatgatagaaaaagagacttagcagccgggcacgttggctcacgcctgtaatcccagcgctctgggaggctgaggtgggcagatcacctgaagtcaaaagcttgagaccagcctggccaacatggtgaaaccccacctctactaaagatacaaaaattagcctgtcgtgatagtgggcacctgtaatcccagctactcgggaggctgaggaaggagaattgcttgaacctgggaggcagaggttgcrgtgagccgagatcgcrccactgaactccagcctgggtgacagagcgagaytgtctcaaaaaaaaaaaaaaaaaagagacttagcattttgtaagggctgcttctgatgtcttagcaggggatgctgactccagggcagagcagccagcatgctggggactctgtggggctgggggcaggggaacagccttgcggggggcctctcattctgctcccctgggtcacctgatgggcagcagcccatcctgtctcctgggcaaccaggtggagaagccaagagctggcccttcactgagagctcctgccccagggatctgcagctgcatcaccagatggccacatggccctgggttgagtgactccccgtctctgagcctcaaatgtctcatctctgaaagtgccaagccctacttgcagggtggctatgaagcgtcccggggacattagagatcagaggacccacttaacaagcgctgcggccatccctgcagagagagacttcactcccattctgcagatgggaaatgaggctcagagaagagaagaagagagtgtgtggcaaggagagcacttccctcagatctgagagcagaggctcccccaccctccagctcactcaccatggggatgggcagggccacaatgagcccccaggggttagggtcagcggagatgaccctggctcagtctgtctgtctggtccccacagagctgaaaccaccaatgggtgaggtcgtcacccctacggccccccaggagcctcctgagtctgtgaggccatccgctccccctgcagagctggaggtgcaggcctcagagtgtgtcgtgtgcctggaacgggaggtaagtccggggccctccccacccgcctgccctgcctgtggccaccctcctcaaattctgcaggtacagggttgtctctgaacgtgttttctccagttctctaagtagactgtgctcatctagaaagaaggcaggaaataaagatgacccctggtcccatgacccaaatatgagctgcgctcacatcattttccggacctttttctttttgttcctacttaataaatacattaggaaaaaatttcccaaatcatgaaatatcaacaacatgatttaccctgcagaggctttagaaaatcatcttttggccaggcatggtggctcacgcctgtaatcccagcacttttggaggccaaggcaggtggatcacctgaggtcaggagtttgaggccagcctggccaacatggtaaaactccatctctactaaaaatacaaaaatcagccaggcgtggtggtgggcgcctgtaagcccagatacttgggaggctgaggcaggagaatcgcttgaacccgggaggcagagattgcagtgagccaagatcccaccactgcactccagcctggcagacagatcgagattccatctcaaaaaaaagaaaaaatcatcttttaaaaattcattaacacttactctaaaaattacacagagcagtgaatgaaatacaaatcctcctttgcctccactgagggatcctacttagaaaagcagccatgtttgcagtttgatgattccagggtctcccgttgacctgactcatgccatgatatggatggacctattggttccaaatataatccctgttctggggcccttggcattccagacagctttgagcggagcttggatcagttcctgaaagcaggagatgctgaggcaaagtgtggtcctgagtcagtggctgctgctccgggttgggattgtttgtagactgaggagttcagggcctgggcaagtgcatcaacaagaaagaagcctgaacaccctgcgtgccctccggcaggggccrgcggaataggcctccgtcgcctgtccagagcgcaggaatataatccccagttttatttaagaaagaatcagttggggcatttatatgggtatttatattttttacaaactatagagaaatagacagcaaactgctaacagaaggcctaggttacctgtttcggccgtgcctgttctgtttctgtggtggtcaaatgcccgaaggccccactatcaggcgtttatggtaaagatgctaaagaataatgaagggggccggcatggtggctcacgcctgtaatcccagcactttgggaggccgaggcgggcagatcacttggggtcaggagttcgagactagcctgaccaacatggtgaaaccccatctctactaaaaatacaaaaaatttagccaggtatggtggtgcacgcctgtagtcccagctacttgggaggctgaggcaggagaatcacttaaacccgggaggctgaggttgcagtgagctgagatcccaccactgcactccagcctgggcaacagagtgagactctgtctcaaaaaaaaaaaaaaaaaaaaaaagacgggcctgggactcctggaaccyggtagggccagccacatgctcccgctctccctccccaggcccagatgatcttcctcaactgtggccacgtctgctgctgccagcagtgctgccagccactgcgcacctgcccgctgtgccgccaggacatcgcccagcgcctccgcatytaccacagcagctgagtgctgcccgcccacctgggcctggtcctagccctgcctcggccactgtgagccccgggctcctgctcagccttgtgccagccagactcgtatgaggctcccccctgccctgggccccttccccactgcccaggagcccccatcctaagctccaagcatgtctgggccaggcagaggtgctcctcatccatgacaccaccagtctgaatggtcctgggggctggggctggagaggccgctgcaccaccacccgagcctgggagccagcgtcccagcctaatcacggatctgctgcctcccagctgtcttgactgaaggccaccgcccctgcaggagcttgggtcctcatctgggggccatgcacaggcccgtcccaccctgcatgtgggaagggagcaggagggcctggctgggtgaggggaggccttcctgggaaggcgtgtggtgcaggcctgtgctcacagtggcaccagcaaccctgggtctccctctctgctgctccccagaaccccggggccctcctgctctccacaactgtccctccttaccccatgtagctcgatccgaagcaggagtgtcaataaacctgtcttcagtgcgcttctggcctgagtcatcactgggttctcatgggagcccagggaggggaggggacgaggtctggggatggggctcgggcagagggcagctcttctcggggaaggagccaggagtgcgccgcacctcagtcgagaggagaggtcaggtagggccatctcgaatgtcgtgttatcccagcgcccccttcacaggtggagagaccagggcccagaggcagccagggccggtgatggctgcggcctgtgcctccatgagcggaggagccctgtgtgttccgtccattatcccagtgaggcagctgaggctgatgggggtaaatgctcagggccttgcaactgggacatggtgatgcggggtttgaggcccagaagcatcctcaccttcaagcccgtgcggttgtgcaggttggtcactgcacaattcttggagccatatacacttgcactcgctgcagaggtgcacgttgattatgcattttccggcagacggcgttgagccaggtgcagcctcttccttgggctcgtggcaggcctgcttggagcacctgggctctgcctccagctcattcagtgatcgtggccagtgtttgggctcctttccctgtgcattcaacacaggacgtgatgcagccctgaccggctggtggcctccagggggcgctgagtgcttgccccaagtacagcgtccgcagaagcaggcaggagagttcaggtcctggggtggcagaacagccctacgcctgggcctgtttccctctcactgagaccatcagtcctgtgcactgaacagggcaggcgaataccctttgtcgtgtgagtcatttcccaggcaggagctgggtggccttttcccacccacagttccccctcagttccccctcctcccaacaccctcctgggctcaacttggccaagaggggagagactgaggcaggtggggctacctcctggagcgcagtgctttgcagatctccttacgctctcactagggcccagggaggcctcatggaggatctcgaggctcagtgacctgccaaggacaacagcaagggacagccgcatccctggtctccggccacacagccccgtgttctgcacctcagcccttgttgaccgagggaggcccaggcccaagccctaggccaccatggacaggctggcaccagggaagccaacatccccaaggtgactggctgccaccccaccagtagggacatgtttttacccatagatggggcaacccacccccaacagctgcaggggctcgagggctgttcctgtaccacataggctcagcccaggtccccaccttccaaggcctcagtgtacacatcggtgaaatggtggtgacgactgtgtccactttctagagctctctcgaggctgctgttcctgcacacaaggcgcttggcccacagtgagcgcttggtaaacaggagtgtgatcgggagcgttgaaggagctggcatcactgtttggatccagcccgagcctgggcccacccctctgtgggcaccccagggccctgagtggccttgaagctgctgcctgctgccatccctcttggactcaccatcacccaaggctgcccgaggggcacccggcacaggtctggctgaggaagctgcctgtgctgccaccagaaggcaggtcaccttggacaagtcccttctcgctgagcctgtttccttctctgtaaaatggaataagaactcagatcataaacatagaggcactcagtcaagtgagaagccccgaaagccgagccgtatgggggcctagacatagtccccagcccaggccccccgtcccctaccccaacagcaccactcaaggcaactggctttaaataaagcgtttattgattagtagaagcatgaacagtgtgcataatattttcaatacaatatcagggagggatgatgggaacccctcaaaaggcactagaggcgcagatcttcgggacaagagggaagagatgcgccagagaccagggctggggcagctgggggtccctgagtgccaggcgccaccacacgtcctgtgggtcaaggcccctcctctggggagcaggtctagggcacggaggatgcagggctgggaggggaccccacctcggggacccaaaaggagtccatttctgccctgccccccgcaaagcagcaggggagggggcctgggggtcctggggtgggggatcccaggcctgggcccatcctggcttgacccttgtcccaggaacaagaagctgaggagggacgacagccaggcccagagtgactcacaaggacatccaaagaagggactggattttcagagggaggtgacttggtgactgagaggcagcagaggccaaagcctgaccccagaccctcagggagggcccacccaacctgtacccctcaggagccccgtccggctccccaggcaaccactgaggacctcggggtggcctgtagaagacagaacccagccccattacaccccttgctgccgctccatccccaaccaccagagggacagggaccagagggagacctgtgggccaggcgggcaggagggaggcaggctggggccgggagaaggggatacacaggcccataaaacctcaggctccccataaccctcactcagccatctcactcactcactcccagcatcccccaggatgggggtcccctccttcactcaggacacttcccctccgcagacctgcacgttctgggcctttctcatttcaccccaggcctgcccaccccatgaggcaccccctaaatctcatctctccacccagcacccccagcctggctccagcctgaagaccccctccttccccttccctccagaacagtggggaaagcgaggctcggtccacccctaactgcggaaggagcagggccaggagggcagcagtgctccctctcccggtcctggcccagccagctcctgggtgagtgggcgggaacccactgggctcacaccagctttcacctccctctctccaggaaggatggcagcacccatgaggggatggaggccacagaaggacaggaagggaggggctttccagccccccagcagtgtccagcccttggcacaagcaggaaaaccccaaaaccagcccctgcatctgagatcatcccacagaagagaaaacagggagcaagaaagtgttgactgaacccaataaagtgactcaggtgggcccgctccctggcggtgccacacagccctgccccgcctccacccacaaggcacagaccagggtgccctccccagagctgagcctgcctgggtccggaagggaacggcctgtgccatgtgcagcagtcagggacccactggcctagaactcagtctgcacccctgcactgtcctcggtggtggtgtggagggcggggtggctgctggggctggacacctgctctccagtctcctggtcgctgggcttggggggcccaaggtccacagcctttccaggcaggagatgctggaggggtgaggcaggcggcgaggaggcctcgggggcggccttaggctggggactctccccagcgggggccccgttgagcagggggccggctggtggggggctctcaggccgcagaccttgggccagcaggcctcggatctcagtgacaccgtccggggacgcaggtggtggtgactcagggctagcctcaaagggcagccccacctcctcatcctggaccacagagaccacctgcttggcgcgccgtcgcttttccgagagggtggctgactccggggtgctggggctggggctgccgcccccgccgctgttgctgtactcctcgccccagtcgatgggggcgccctcggccagcaggtgcaggttggggtcgctgttgtgcatgaccatgctgtcccggtagaggttgtgcttcctctgcaccgcggcctccttcacagctacagggccacaggggaagggtcaggacacagcactgatcccacagccgcccctgtgctggactctgctcaaaggagacccgtctcatcccgccttgggggtctgtggttgggatgtgactcattccaggcctcgttgctgaaagcagcaaggccgtgatgctatctccaggcccaggctgctgaccacatgtcatctaatcactcctctgaccctcccagcaaagccaaggacgcgagaagaaactaaagcacagagacgcaaggctaaggctgctccggaggccacacagcgaagagtgggcttcacccagaccccaggtgcaagtctgggcttttctttgagccttagctgaccccctcagctgccaccacttctcagctgcgcccccagcatcctcctggcaacagtccccaccccgggacggcacccaccctgcaggatgtccttcatgacggtctgcagcaccacctcctcgtacgtgttttccaccaggatgaacctggcaaagtcctcgaagatcagctcctggaaccggggcagctcctgcccgggtggggcggcagagatgagaggtcagggccaagggtagagggaggcctgtgggctccatcccccaacttagggcccaaacggctggagcaggtgggggctgctcaccgacttgcaggtaggggccagcttcttgagcaggaacgggatgctgatctgcagcagcgcctcccggaagaacctcttccgcacagagctgctgtcgtagtcgtatttctgcagggaacaagggggtcgggggtctgcaggtcagtgggctccattggccctgagggtaggacgaggccagtggtctgacccaagcctccgagtcctcatccgcacaagaggaccatggcgcctccttgcagggacagcaatcctggtggtggccggggatgaggctcggggctcggcctcgcctaggacggtccggggcacggcgtggggccgctcaccttcagcacccgctccaggacccgctggatggacttgcacagctcctccttggtgggccccttccccagctcctggtgcaggagggtctcgaacgtatacacggcattgtccatttgctgcagggcataccgcggacatgtgaagcccccagggtgaccacagccccttcctgggtgccgctgaggggtcctcatcctcaaccagccccccaccccgaggcctgccagggaggaatggcaagcggtctatgcccactcacagctctgcacgctggagcaagtccctgcctcaaggcaacaggaaatatgggaaggggcctgggggcgcaaggagagcttcctggaggaaggggtctctaagctgagacctgggaagtgagtcagaattagccaggtgggcagaggcacagatgttccaagcagaggaggagagagcgtgccaggcaagcgtggctatggcatgacgggacggagcagaagggaccccctgggcgagggggcctgtggaaggcagtggacagggtgtggggtgggggtcgtagcctcgggtctacctcccgcatgtggatctgggctcgctgcttgaacacggacgtgctggacacatcaaatcgctgctgcagcccgtccagtcgcagcgactccatcttctcatagcagctctgcatcttcagggggtggtacgccagccgggacagcttctccatgtactgcaggggccggggccgcgggggctgagcagggccgccctgtggccaggcagcaccccccacacactttgcctgggtcctcgaagtccaggccctggggctggcgcctgctaccagggatggccacctggtgctcatggccacaaaggtaaacccaggagggcccaggacagaagcatgaggctctgaaggcatggagggcgcagtccagtggcacagcgctgtggagaggcagcctcggtgccggcagaaggcgctcatcccttctgaggtgctgggtgaccttgggcaagtcattcaccctctctgagcctcagtttcctcagcttcaaaattgggagagagctttcctgctctccaaggtcctctcca

SEQ ID NO: 6992 - DNA, 50679 bp, Homo sapiens
attgctgttttctttttgtggcacagctgaaatgttctctactagagctgttacacatcttgtactttcttctttgtgtaaaacttatttgaatgaatcatgatttggaaataaaataaatatttggaaatagaaaaatatacctaacaaaggtagaatgaagagaagggatatgtcttttataaaatggtcaattttgaatttgtgaggacagatacaaatacttgtaattgttaatgaagtgaattagtaaccttcggtttgcagcagagaaagcttagaataaagtagttgttgaacccctttatgtgttacaacagatgaaaaatagagcaagggaccatggggaattatcaatgagttataaaagaagatgattgatgtttatgctagatacctatttcatcagaatagttggggttagtaatgatattaactctactagaaataagaagatgcccttaagtagtcttccatttagagcttatgatgccaatatagctatgctcacaaagatttcagtttctaaaataaatgttgacagggagtagattttattaaggaatgaagattttaagtagattaataacatgcttccagtcacaaacatggtcttcagttacccagcagagccaagttgctattttcatgtacaagatacattgaattcagatcagtatacaattaaataagaaaatattttctacttggaaataaaatttggtttaaaggataatgtggactcctgattgctgttgacaagatttacaagtttagattgtaaattatgtgataattgttttaagtcactaaactgtgtgatgatttgttattctctgttagctagctggagcacctacatttaagtttgttataatctgatctttgttatcatctgacctctctgtatctatctccatcatctatctatatatgtgtatctatgtatctatctagctctctccctttcaaggctttcctttacatggaagatttgaaaaggtctttttagtggtctgcttaaagagttggtctagaaacaggtactttcacaataatcgctagaacttgtctggaaatgcccctaggattctaaagcagagccttcaacagttaagatgttgactttttcatgttaaagaagaaatcctgcaaggatgtcactgcaaaaataataaattaagtacttaatggtatgctaataaagttttctttgccccttattctctaatttatgtacacaaaagcttattggtaactgtaggcttttaaaatatttggagaatgtttattatatatatatatttttgaaaatggcgggcatttatatttagtaccttgtttggaaatatttctagccaagggaatagtaaagctctggtaaacacacaggtgcttgtatagcagttatagtacactgaataacagtgataggttaaacacattgtatcaaattgaaaagtggagatatgccaatgacagatatcttggcagcggttcatactctgcaacactcacacaactggtgtgtagggtgagtaattttctacctgacctgctgattttctgtgaatatattcaagtactgtttaaatgacctagtcatgttttctgggtggagggaatgtaagatttgatatcaggttttgtgtgtgtgtgtgtgtgtgtgtgtgtttgtgtgtgtgtgtgtgtgtgtgtattttaaagaaatatcaacattttaattgcagaattttctgaagaaaatgagaatttcaattatctattatttcaggctgtggcagtttaactttcatatgagaagttagggatagatgagcctgacccaaagaacatctggaagtaagctaatttctcgacctttgtttcgttttatccacatatcatggcattgaattgtgactatctgctgcctgtttatctataatggttcttttgcacagaagaaggcaacaggctcagataagttctgtattctcaaaccttaccttagaattgccatttttatggttgtattcataatttcaaatgtgttctgctgtagctttgggttttttgttttgtttttcatttacagagtccctagcaaggaatgagaagcctgctggctataagacatattttgcatacattttgaagtacttttaacaaggagacagcaaagcagaccattatttgctagatgcagttacaactgcttggactcatgaacaattccagggcaggggtcctggattctaacacctgacaaactaatattaagagatgtttctctctcaatgaaagttttttatcacaatgaaaaagagcagtaagcacatattaaatatgttttaaataaaggaataaacttgtcttcagtttccaagttaaactatatttcaaaagatcaaataacaaagataacacacagctgttcctgtcatctaatggtgcataataaatcatcccaaaatgtggtgacttaagacaacaatcatttattatctcttatagtttctgtgggttaggagcagtcacaagcccttacccagattcaatggaaagagtgtagacccattttagggagattatgtgggttgagacataatattagtctggccatttttagaaaatgcaatatgctacaacatggaaatttctttttctacaaagaagtgtcacaagattggtggcttcattggctatatgtagttatatctatgtgtgttggaatttatatctttaaatttaatatggcataaaaagcatttctcaacaacttcatttttcaaaggaattattgcaatgactataattttccttcctaaggataggccataacttaacacttatatgacagtttcatttttttgctgttataaacaacactctactacatatatacatatacttctagatagagtggttccttaattgtatcacttgggattgcatttggctgcaaataacaatcaatttaaaaatgatttttgtttttttctcccatgtcaaaaagttgaggggttggtgattgctagcatgcgttcatttgctcaatgatgtttccaaggatcttttggatgcttggtatgtttgttcgcttttatctttatagttttaagattatgtctgccctcttggtattttgtctgcatcccagttgggaggagaacaaaggggaaaaagtcaaaggaatatattctagtgaatcttgactactaatggtggggggaaaaattcttccctggggaactgtgcctaatctcattggcacatggttcagcctagcaataaaggagaccgaaaaaatgagtattctgtttgctgggtattatgattttcttaagttggctccccgtaagtatactttgatacggatagttctatcctgaagatttactggggagtaatcttcagagataagcctgtaatgaagggagaaaggtagaattgggtagaagcagcagctgacttacaatgaatgtggttgcaactgaaaccttacctgaactcttagggactctggagctcaggtgacctttcagaattgtcacatgtagaggcaagggacctatgcctttgtaatcccaactcactccatcattaattgtgagcttcccctgggaagagacattgccttggggaaggtagtttcctacaacctaggacagttcctagtgaacgactatgccatgagtggtcaatagcagttatccccagcagctgaaagatggatgtatccaatatgaagaggagatatggccagagctctgtgatatgcaatagaggggagaaaagacacaggaaagaggagttgagagtaggcattgggtgagtttatctgccacactgaaaatgtgtattttgtgtatttactcttttgtatttaacagtgttttccaaaacttttaattaagcacatattccttttgaaataataagatttctgaacacttaaagtaaaatatatctgcatgtatgtagctatacagacagagagagagagagaggtgcacagttcatccgtagtataattgtagaagagaaacaagtcttttttttaaacttacctagggatttaaaatgactacagtaatgaattaaaagtgacatatatgaagtaaaatctttgacttggtaaatttattcatgttattttagctttacatgcatacttatttaaacataaaaggacacacagtattagaatgattcttgttacagattatgtctttttaaggtagttatgaactcccaaagcacagtgttgcatagtgacttctaaataaatacttcaagttttatctttttactggagaatatgaaagagtggagagttagaaggatttaaagttatattattgagtcatactctaaaatatgtgatgtgtttccactaactggacatatttgaggggaccacaaatatgaatccctttgggttagtcatcttcatggaagatgagtaaaatataagataacagtaaataaagttcattctgtctggattccaatacctatactgccatttctccttttttcaaatcatactgcttcctatattcatagcacaacctctacttcatcagcacctgctaacagagcaaggataaatacgaatactttattggacccactaataaaaatggccactgtaactaggatgcagatcttgaaataataaaatgtttttttcaaaactatcttaaatactcactgtaactcataatatttaactggagaagcaattataattgatttctttttctatggttcaactaatgtaccatagcctttgaggcttttccctcatgaatttgtggctcccaaaacagtgatttcaggtacacttactgcattatagcaaaatattctattcaatttactaaacgtagatataaaactagcccctggctcacagactctatttccaaagcaacaggaaatgaattattcaccaacagagaaatatatttttatttctctgcacataaatatatgtttaaagtgcaaagattaaaaaaaacatattgtttgttatgttttatttaccacagagacagtgatgtgaaaaaggcagaatgagaggaaaagtatgagggattttgtattctacaagatgggataactagtgggaagggaaagaaactatgtgacaagaataacgaatgggcgggggagaaaagagaaaagaatgatagttcagagcccagaaatcaacaaaggtaggtcaactgtgattcctggagataccagaaagtaccagctgtgatcacagcagtacattgattatgtagagactgaattcagtttcagagaagggaagatgatggtgtgggccttgaaaaaagaggatgtggaagatgaatggaggaagacagcagggactggcattagtctatttatgggaaaagaaagagcaacagattttagcctattaatttcaagtgaatagattaagcctattaatatcaattgaatataattgcctgcccccgcccagaagtccacttctagagttggggcggcggaggggtgggcggcggcgggaggatattatattcaattaaagtccgcttctagaggatgcagggaaaatacattcatttgaaattaataggctaaatagaatgtgctgggaaagaggaaatcacgaattgcacttgagttgccagcaacccttagagatgtctgaaaagcaaatttaaaaacaagtcacttgcaggaacagtttccagttcttaataagataattcagaatttgagacaaaatcatgaacaaagattgcaagagggattttgctaagctaaaaacccttgcagagaacgcctagaatggcattgcttagatttaagctttttcttggaaatgtgagaagtgacgcagctgacagtcttgtcttgttcttccagtggtggaaggtgataatgagccatcagggtccaaagggtaggctgttagggaagagaaacattgtgcctggacaaacagcataatcagccctcaagtaatccagccatggttgtggttttatgcagggatggcagctgcccattagtgttaattaaccaacaaggtgtgggtgtgctttccaaagactggcagccaggggcaggagggatccatagtagtcagaggctgaaggtgagggtaggactctaacttctgtgatgaaaaatgaactgggcttttattggcattctctgtttctggctactgagcatccaggacgctttgtactctgtgtcccaagggggaggtgctcattaaggttaccatctcataggtgagaaagctcagcctctgccctcaagagctggggaaggaagcaacctgtctcctgacttctggaacaaaacggcatacactgagcaaagccagaatgctgtgggatttctttcttcagaggctgagcctgacaacggtttgaaaggctccaggtgcagtgcaagcaagccagccttctgaaacagggtcaaaaactggactagttgatggcaaatgccctccaactcctgtgactcagactcagagcctttgagcaatgctggtgagaatccaggcctggctggtgcaaccatgtagtgccatgtggctgatgtgcatggagctaccttgaatgcagcattgctttcttgaattttgatttaagtttcatgttacttgacataagaattgaaaacaactaaatacataggaagtattgtaataaggatagaaataaaataacatgcaatgtaactttcagtatttgcaataacagttttcattagaccattcactatttcttaaagagaatttgtatttaaacgaaacatttctgatttatccaaaaatcttctgttactgggatttattaatattaaaacttctatgttttctatcaacacatttttatatgacagtcttatttttagagttttattaaacaattcaattgatatatagaaattgtctttctttaagactttttaaaactatccagctaacattttttaaagcttcactgcgttatctccttattatgaagcccatcagcatttagtgttttactcgtttagcatagtatacactgtcatttaaatgttttcattattaatagctctaaatgttttgtgtatttacatctaaatctctcatttattgaagcatggcaactactttttccccatcttctcttctttttctttcagtgcctggaacatgcctgatagataataaatatttgtggattttgttgttgtctttaggcctctgtaaagagatcaatcataaataagtatagagaagacaacgtgaaaaatattttatttgcaatgttgggttaaatgtattcaacagaagctttaagaacccactgcttgcaatatcttagaaccaaaaagaggagtaagatggtttctgtcttcaaggatttcacaatttaaccttgtgcaaatagaattmatatgttggtttgctctaattatggaaggttagtatacaagatcccttcttactcctccctcctcccttctagaactactaggaaccataaataatatatatttaaaaaaattactaagattacactgcaagtgtcttatcctatcctctagtaatggccactactcacagtatgtgtccagtatttcagtgtgctgtagaggtacaggggtagttaagattaaacctgtaatagcttatgcccctgctaacgttaaagggcctaaatattttattttcttttaattctatattacataattagctatacttcatttttatcatataattaaatgcagaacacattcaaggagccctcctgagattcagggacccaagaatgaggggatatgaaatcatagtatttaataatagtacatgcacatatttgtaaattttgctcggacttcatatatacatacacaaatgtgcttgcctctcttccactccacacacacacacacacacacacacacacacacacacacacacacagtgttcttccaatttgtttcactcattatcggcaatttatactcagagacaaggggctttctctgggattataattatggtaaatttcaaagcttctttgcctatttccttcaaagtcataataaatagatgcctacaggaaaaaaatagtttcacagattattgttatgatgtcttcgaagatagaagttgccagatgattgattgcctactgtcattctactaagagacccgttcttttgtgaaagtaaggaatgaatctgggtgtgtatttcgtgattagttagggaatcaggtgatattgatggtctcatccacatccaggaagtttacacaattgcaattcaattaactttgtcctatgcaacaccttctgttcccatgatagcatttgaacagtgcaatatgtacaaaacatgttgattcagaaatagactcactgaaaactttatattggttttaatatattgtatctctctttaagaaaatcccttctctttctgccatgtgagaaatcaggtcactggtcataaaattgctttgaaatttgacagcaatttcaatgataatgaaagctaattatagcattgttttgacatctaccctttccacaatgatcctattaataaacacttattagacctgcatgcttcatatttattcttgacctcagtgacaacaaagaataacactagtttaggaaacaacacttaatcctgtctttaatttatagtttagatttgtttcatctctttggtacttcaatatattttatttggtactgtttattatattaaatttactaggcaggtgacacatacttttatcctttgagtggtgattctgaggtgaataatagcttaatttagagagggaccttgaataaactatctagctggttttaccattataatttacatcacacagcaatatgaggtgtgtgtgtccatttacagttatatattgttccaaactaaaagggaaatatatttggcaaaatgggactcttagagcagtctacattgcagacttcaatttgagctatgtaacatatatttctcataatttattggaagcaataatactgtaacagccaaatatgtttgagtttgtgtgtatgtgtgttttcatctcaattgcttcttttgtgatggcacattctgacgcagcatactgatacctctttttcagaacaatgttgacatatgtccacttagacaaatgaatattttcatctttaatgacttatttgagagggacaagaatttcagacacaaatttgaatagaattggaggtgtgagtaagataggaaaaaggaagaaatgtaggaccatgttataattattcaatcataagaatcattaccttatatctgctgcagacacacacacacacacacacacacacacacacacacacaccatgcacagagtacctttccaaacatgttgaatttaaattcattattaagatcaatattggctggtatgattttgtcattgataagaagctttaattgacttgtttttgtgccattatttgacattaagacaaggtaaaaccagtgccttgtttccctactgtgaattctcaatcatttttgtgaatcatcattttaaatataacagcatatgagaccatgaaaactattttctgcttagcagcatttttttctatgtaatcattatatatgtgtattttctggaaaccttatttataaatggttctgtatcttcaggcttcgcaataagtgtcatgattaatacaattttcttgattggtattaaaaattcacatacaggtatagataggttttattctcttcaaaatgattcatttttattataataagccaaattataaattattaagaatatagaaaaggaaagttgaaattaccttgattttcactcctcagagatcatcacaattgccattttggggaggatcattttggatatcacatttccatatgcatacacaaaaccttaccatctttcataaatgagattattacacatgctgttttacttgtcattggtgtgttccatatacaccaatacatataggactatttcatcaatcgcgtttttttgtaaattagaaaactaatttcactgttaatatagtgaaaaatatacttggaaaaacttcagtcgatatagaaacatagtcaaaaggggatacttctcttcatagcaatagtaatcctaccttctctcccatatataactcaaattaacagtaggaattatcactgtggacattatactttgcatttatacataattttaagtaaataatttttttttttgagayggagtcttgctctgttgcccaggctggagtgcagtggcaggatctcggctcactgcaagctctgccttctgggttcacgccattctcctgccttagcctcccaagtagctgggactacaagtgcccgccaccaaacccggctaattttttgtatttttagtagagacggggtttcaccatgttagccaggatggtcttgatctcctgacctcgtgatctgcccgccttggcctcccaaagtgctgggattacaggcgtgagccactgcacctggtcatgtaagtaaataattttaaatagaatcatgttttccattctgcagtatctcacttaaaattatatacttgagatattttacagcagcataacattttattttttttacagaatcataatattacataatttattctccactgttaaatatttagattcattttcgcttttacaaataaagttttcacgtggctgtgagtctgttcacatatgcaagtatttctgaatgacagattccattaaattgaattgctacagttctgaacattttaaattttcgtaggtgaaactaaattgctctctgaaaagttggccatttaccttccagttgtatccccatattctcagcagtattggataatatcaaaaactttttacatatttctgatctgatgagcaaaaaccgtgattttcttgcttagttgaatatcctgcttagtaagagctagactgagaatcttttcatgtatttattagtcatatttcatatgtaaagtctctatttaaatattttgtccatttttaatggccttttttccttattgatacttaggagctatttatacctgtggataataatttttattatcaaatataaaaacaaagttttgcctatcttttgtattttaactttattttcaatattttgacatttaaaattttttatgtagtaatatattctagcctttttacataattgcacttttctcctgaaagtagagagcaggaaattgggccatcaccaatattttttaccattaccctgaaaaacactaaatttttgtgtttttaattactggcacataatacttttcttcattcttttttttttttttttttttgagatggagtttcattcttgtcacccaggctggaatgcaatgaagtgatctcggctcacttcaacctctgcctcccaggttcaagcgattctcctgcctcggcctcccaagtagctgggattacaggcatgcgccaccaagcccggctaatttttgtattttttagtagagatggggttgcaccgtgttggccaggctggtctcaaactcttgacctcaggagattcacccacctcagcctcccaaagtgccgggattacagacgtgagccaccgtacccagcccattccccatttttataaaayttatttgccagcctttcatatattcttccagatgcacattaaaatttacctaagttcagtatagctctatamatttaatagacaaattttatgagagataacattatattttgcaatactgagtttttccatccaggaatctgatatttctcactattcattccattctctttttatatcattaagtaaaatttaatacatvtatagatatgcacacatatctataattgtgcttatttcaatagatatatactgctatgaaatttataatatttagttgctataataacaaattttgtcatgaaaacttttawaatatatagaaaaatatattattcatctcacattcattctgcatgaagaagtgttacygaatactcaatagtaataacagttttcagataatcttgttttccctaggtagacaattttgagacctgggaataaatatagttatttgttaacaatatttgcatctattgcttttttttattcatttagatttactagaaccttgagtaaaatattgattaacctcacttatagtgggaatgcttatcttaatcttgaattttgagcatgacacttgctggaaatttctggattttgtttgagattaagaattattcttcctattcatagattgctaaggttttgagtttgttttttagtgtagttttgctttgctttaatcagaataggcataaacctgtcatcaatgctttttaaaaatctattgatatccagttcaaaaaggaatttcagtattagatctctcartcatgagtcatttgttcattctgggaataaacaacattgtcttgctttattattaytttttattacacagttgaattaaattggctaatatttcatctacaaattcatgtttaaattaataggaacrttgcctgatagctcttctcctttgtctaatttctgtctaattttgttatcagttacataagcagtaaaacaaaattattgaaatggaaagaggtctagaaatgaagtcaatctgttcctcatcttatagatggatgaccaaagacagagaggtaaagcaaaactaatatcagagaccggattgtgtgattgaggattcataaaatttgggaagcagcttgagatgcaaagttcaagagaatatgaatttcctaagtaataatttgtctccatgtaacactcttactacagtcatctctatgaagttcacctacctctatcttcttrtagtatttggagacagagttttagtttttgatcctttcacgtgtccctttaaatagattgtgcttgttgggattcactttcattgattttgacttctatcatttccctgacagttcccagcccacataataggtgcataatcaatatttgttagttgatgaaattgtttccctgcaatttgctatgtgcttttacagcacagttatattagttaaatattctacagarcccataattcataatcatttcttattactaccaagggaagcagagcagcgctgcttcactaggagaaagagaagggctgacttgttagccagaggtcattyggtgccaacatggggagatcacagctctttctgcaattatcagaagcagagcatatattacattctgaaatagacaatgaagctcttggatttgtcgatggaagttactgtgcctctttccatctgccacacttgccaacatttggcatccagcttgggccctttaagagttactttacttgattaaaaataaataaattaaaagctaaattgggacctattcartagttccatatttgatatcttaagtgaaggtaaaacttgaaagaagctgccccccaagccttgttaaggatgatggccagactagaagaaaaacaagtacttttcttgaaagtccagttgtctaagcctttgtagaatattgaaaatgaatttcaaaggaaaaatttcattcctctttatttcttgtcctgaatttctgctgctgactcctcccttaaaacccatttttcttctatttgtcatctcatgttcatcaagaagatgatacattctcaagcatactgattcaggcattcatgcattcattcacyccccaaagaactatttatagactgtctactgtgtgtcaggtactggcactgtaggctgaatgatgagcaaatacaggggtggtccctgcttttataaatctggggaaatgtatgctaatcaaataatcttcccagtgaacatataattataaactgagaatcatgctctgaaggaaaaatctgacttaggtgggcagaagtttcaggtattctgtgtggaggtggaggacagtgttggtgaaaaactttccaaggaattacttttgagcagagatctgatggatagcagttaagcaagtataagtggtgtgaaggtggctgtgaaaagggaggaagagagcattccagccaacagagaacagtatgtacagatgttttctggcagaagcaagcattgatacataaaagtacattgatatagctgaagcaaagagagaacaagaactacacatgatgactctcaggccagactgcaagacgtagtagggatgggggtatgatgtggggatggaaaggtgatgatgggggaaccaaatttgcatctgaaaaaatttgttggctgcaatgtgaacatattgtagagaaagaacatttgctgacaacaaaagctaaaactggaaacaagaataaaataaataaaactgatcaaaatcttaactagggtagaggacagcaaaaatataggttggtgcaaaagtaattgcagtttctgccattgcaaaaaccacaatcacttttgcaccaacctaatacatgatttgagatattactgagaggtaaaatgttttaaaatggatagatgggagaatgagagagtgagtattatccaggcgacctgtagctctctgccttgagtcataagactcatggggttactttacctcatacacagtcctctgttcatgtcagactagtttaaccatcatcatttgacttgaacactctaggaatgattagcatggttgtctctgtggctgaactggatattttcagggataacttacttgacctctcagcagttgatatatgatatcatcctcttgaaaccttttcttctcctggtctccatgacatcacagtattgtgggcaacctttcttatctctggccactttttstaagtctcattgaaggagtaacctcatgtttctgcctaataaatattaatatcttatatacctccaagaactytttctcctcacataatcatatctaattaccatcaataaactagtaacttcttaattaatatctctactgtagaccccctcttaactacacatctaactatatgtagtttatgtcttcttatgtatctcagtggcaactcaaactcaaagtatctgattcaactcttgctatctcctaccaacctgaagaacttctagtgttccatctatcagtgatttggctagtgactttgtagttttgctacttactactgtgtccaaggggcatagacaccatttttccttcttcatgcttcttcacaagcttttatgaactgccatttatttctaaattcagaaagaagcccaagtctcctttgccaatacaagttaaaaataaataacacatttcagctagattatttccacacccatattcaaagtttttctctgtttatttgtatctttgctacagatttgtctaatcttgatgtttccaatgaatatacacagtcagactgaaatccactcggggcagttaagtttaataacctaaggactttcttttctcaggtgtttccccccataacctaaagcaataattcttacctttatattcatayggtacagaattaggatcatttttattaggaaggagtggaagaaaggacacagcttccaacgaacaaattaagttgtacacaggactttaaaaaatagaattcaccaaatgtgttaatttcagacacaatagacaataatttatattaacaatgattcagttccagatagagataaattattatttttatttatttacatagatgaaatgctattttcggggtatttaacttgatgggaaaatatttttaaaagaatatatcatcgtctttaccctcaagcagctcaccatctgatagatacataaatgagtttagagagaaggagaattygctataatgcgagagtgtgggaagataaagatatggatcctgggcatctgaaaagagtttgtggaagagacaatatttgatccaggccttgaagtataggtatgattttcaaagagtatgtgaggggtggttttcaaacagaatgagcagcttgctgaaagataaactcaaaaatgataaattattttcttcaagaattagatgttctcttgtacctgatatgtaacatgttctaatagacattgaagaattagatcgtcaaaggaagacacttatctgtatgtgcaggaactgatatgactgtctccttccttacatttgttcctaacactaggacatgcaggctgactaaacccagaggcaggcatttaatgagaagttgcctttcacagaaataattatggttatacattaccagctttcaactttgttgaaagtatccatctgagattagtacattcttagggtataagtttctggctcagtacttactaagaatcgtggttctctggttgtatgcaaaggaaaataaatttggcttacttaaaaagaaaataaagactttatggaagacataaggtaatgcacataaatcagaatgaaagaaggctaagattcgacagaacaaagagtgattcagggctgtaggtggcactagtaagtaagggatatgcccaggctagacctaggggaggaccaggatccttgattgacagtcgtaccaagactttacaccactaggttagaaaaagaactgttctccgagggaaatcagtgttattaccaaagggaggaatggattttggatggaaggccagaatatcccctayacttgattttcttattttaatttttagccttttctctatttctcaagtagaagtttaagtcattatttcttgcctctaatgtgtgaagctttctattaaacttcctacgctawcccacacatgttcaggtcattcttttttagactttcacctcagtacatttatcttcgggaaagactgtctattcaaacacatgaaaattaaccaaaatcctagtatgtatctgtgtgttgtcatgtgtgtattgttgttgttgttgttgttgttgtgtgtgtgtatgtgttggagatgggggaggtggtatatcagaatcacctgggagaacttttaaaaaatctaattatacagtccttacacctctgtcttccatgcgtatacacacttaatgtatcagaatatcttgacagaagggaattggacttttctttttaatagctatttactggtgattctattactcttaccatctctcttatcccacaagttgaggactattgatttggattttttgtaggccccattttatttccattattgaatatatttgccattctgtattctagaacaagtaggagaaatttgttgagagaaatatttcatctccttataaagaagaacttcataacttgtgtaactttgtaactttgggctgtcctgcaatgggactagactgccctggaagacaataaattatctgcctctggaagtatttacacaagagttgcatgaccaattgccagatgggaaaatgcatgaaaatgagacagtgacctttctcccccattgagagctaggagacgtggtgacatgatattacaattaactatatgaacaatatataaacaatgaatgtgtgacaatgaaaatctcagcaaacatcaaggtttgcttcgtgttctggagagatcatattacaggtaaatacctgtgtgggaacttcttggtgacagactgaatgatatgtgataagcagctgtccaaatagtgtactcattcctaacaatgatttcatttcagttttctaagatgactgagaacactaccagtgcccctgagatttcagataaaacttaatactagaacgttaaaacataccatgctctgatattcaatttatttaaaatagaatatctttaccagattagaacaaagtaatgatgaaaagcagacttaacctatagtatggtagatcttttttaaagggtcattgaraaaattttccatctcaaaatatctgtttcattgcygtccctggctctaccactggtgactcatycttttgtttcaagcctgatcatcctcctgaccttgatagagagtgagggacagaactagcctaggtgtcaggattctacaaggccaggctccacaacagggaatttctcacctgaaaccatgggttagggagtgaaggatactatgttctctgctgagtgaaagaaaagactcaaagtccagcaaatggaaatcatgacagaaacatactaactagtatacagaactggaactaggggtcagtgccatggcacatggctgtaatcctagcactttgggagactgaggcagatggattgcttgaggtcaggaggtcaaaaccagcttagccaacatggcgaaaccccgtctctacaaaaaatacaaaaattagccaggtgtggtggtgcgcacctgtagtcccagctacttgaggggctgtggtgggaggatcatttgagcccaggaggtggaggttgcagtgagcctagatcgagccactgcactccagcctgggcgacctagtgagacttggtctctaaataaataagtaaataaaatgaacttgaactaggaaccagaaggaagggaacaaacattaacatgattgttcagctgaggaattgtctggctaggcattctcatctacartgttttttagagcccaaatagggcaataaggtcagccatgtttaaagggcctagaatataccatacattttagagggcagaaggaatggtgggaaggaaagagctgcaagagagggatgctaataaaaaacttcactctcctctcataacaagacacatatccctgtttgaagacttcttgtttgtttttaaattattacaatattggtaattattttaaggatgtaatttaatctttcataaaaatgaaagaacattttgtcccaggtttttcttttcaataaatgtgtaaatttaaataactaccttttgtcccatttatttaagataakttagattctgctttttgtagacttggttaaggatgtagcaaaataccaataaaaagtctggtcaatcatttcaatgccagaatgcttttcaagactttcttcagggtagcaaaaaggacatacacatattgctagttaatagtcgccctgccattggttggtttgagtatgtttcatccccctgcttaattttgttttcttatttatacaatataagattagagagtggggttaaatgtcacaaaatggtgacctgtgaactaaagtaagccaacagactgttagtttggctaagacattgagtttttcctttcatttctctcgttttaatgaatgcctttcagtagggcatacataatcattttgtctggggacccacaaccccagcctactactgagttcaatctagactcaatgtttgtatcccatcccctgcatggctcttgaaagcatttgagtttgtggctcttgggtcagacatattgttaaatttctttaggctcctaaggctttaattctacaaaacctctgagagtatgaaatttctttttttcttttctttttctttccattagttgagagatagattaaatggaaggcaattcatacatggtgarggccaccaggcttcagactctccccatacattatctcgtttaattctcaaagcatcccagtgaggtcatcattatcatactcattttatargtgacaaaacaaggtcaaataatttaatatcttgctcatratcagaagcttattaactgtaggaaytgggttcaaacccaaatctgtttgtctccaaaaactcccgatatccttgtttccctcagtgagcagaaacattctacagagatcttatgaataccaacaaagctttgcccacattttgcgcagatacacaaaggatatcaaatgtccaaatatctaaaactatttttacagaacatcttatttgcaggctgtattctttgaccagcagggaattacatttctactgttcttgggaacatacttgactaaagagccatgcagaatttaggaagaatcatcattagaagaaatttggctttattcacacactgatgtaacattagaaaatatgtcataaaatcattcaaatttgaaatgtaaagatattttatttctaacacttttctgttttgtcacagatattacktatcttaaaattcgaccttgtttgtacacaatagcactaaaactgcacatgacttgaaatatactctattacctagtaactttgacagaacagttctggtaaggagaagttcaagtatgtgcaggcatagaatacatgaagacaaaaagagtgttagtatgatgactgagcagaaaactttgagtagaaaacacaactttcagttgtgttgtattttcattagagggttgtataaaattaattctgctaatataaacacacactgtgtttaacataatttctatactatgtcagtcacttaattggcttttaataagcctcggtggccagcaaatatccagaagaagaatgtatactttcaaaaggaaaaagaagaaaatgaggatacagtaaatataagtaagtaaaataaaaaagtatctacatagggccagttttttataatttctaagctttgggttaaccagcattcttctaatttgaccacattgagccaatgatttttatttttatttttatttttttactttaaacaaacagtgctcaattttacaggtcagtattttttgcaaatgcagtgtgaattaatataatacaaattaaagcaattagactgtcaagtttcacttttagtgattggggtttggggagtggaaaggggcacagaaactgttgcccttttcaaacaactcacaaatgtgctaattatgtgtcagaaattatgaaagttgaggcattgtgaccttcaagccaacaaaagaccttttcaagtaagccatccccatgtacattaataaagtgagcaatgcccttccacagttaaataatgtatggctgttatttcattatatgtgaatgaaaaccgaggagttatttcactattggcatattaaaagaaatgttataaaaaagcaaagactgtaaatccatttaaataacattttgtggtacttttaaaatagtgatccaaagtcatatgttgtttatttccactgcatgtggctaatgsgtagtttctccgcaactggatgtattttagatcttagcaggaaaaactgcaatgcgttaaagtataaaacaactgacagagatattttaaaagttagaaaaattactgttagataaagtaaatccttgcaatgataaagacaatgagatattttgtagatcagagaaaacattgcctctgtccataagccttactgtgttagtaagaagaatcttgaacaagagtggggtgcagaggaagggaaaataacctctcactcttcatcatggctctttcatggtctgaagaaagtatttgtaaaccttggatttaggtcatggacataatggtaattaaaacagcactcattttgttggaagaaaatgtaaatttcaaaagcaataatataagagaaatttgggtgtcactaatgcttgaatcaaatgcactgcaggaatgtcaaacagtgcccatgaagttgtagtggaaaatcaagagcaggaagaagttaattatcttgtatttgttcagctttgtagtatatttgatgcaaacaaaatgtataaagatacagtcatacttaatgcaacttaaatatgagtaatagacctctgggaaataataaaccaattacaaatttaaaataaatcacaatcatatgagattccaaaaacctattagcattcaatccacagataaacttttgtttttccagtctcacaatagcttcttattatgggttagatgttgataccaagagactgtatagggtttactgattctctcactagtctctcctcattttaaacaattatctaggtccttttattgttatttgctttaatagattctctgaattctttcataaaatagataccagtgatgattttgagaatgttatttgtcattgagattcttgatgaatgtgtacatgttcttgttcagtataagtgttgctgcatttccttgctaatctaaaataatttccattattttggattgtatttaaggtggcaaatcttgcttgttccatgtcaacaaatgaagatggaattaaaattgtcaaaattgcagccaatcatttggaaaccttgtgtccacaggtatgacaactaagttactttttgtgtgtaaaattatatataattcctaatgcttttatgcatatgaaaatacactatttttttttctttttttttttttgagaccaggtctcgctctgttgcccaggctggaatgcagtggcgcaatctcgactgactgcaacttctgcttcctgagtagctgggattacaggcatgcgccaccatgcctggctaatttctgtatttttaatagagatggggtttyaccatgttggccaggctggtctcgaactcctgacctmaagtgatctgcccacctcggcctcccaaactgttgggattacaggcgtgagccaccgtgcccagccaaaatgtttatttgaagcatggaagacagaattgtcctaaggcgattcttaaaaagagagtagagaaaaagactgacattctttaagtggccatattggaatctcctgaggcaaaggtgctttgtccaaatgatttgatttatttttagtaattatttattttgaaatttcaaatcagctgaaagaattgactctttttttcttttatcaaagaaggtatcggtttgaaaaaagttaagaaatattttcttgtyggtaattcagatgtttcttaaaatctgaagagtgacacacttttagggaattatttctacatgacaaatggttttgaagccatgaatcaagatacacatagagaaattttaaacactcttatctgagaagaagcaggatataatacggatacttcctaataaagaccacaaatgttataaggatgagaaawataacaaagattagggactttaagtctctggacgtctcctgagaktctcagtctacaaaaagtagggcatgtgttaaattattgatttgccttgctgacaatttcatctctaagaatattaaggaaactgtgaaggaaactgcttctttggacttaatgttgattaacaagtaagaacaagctggaaaagtgggatctagaggacctgcagctgagatctcccaactgatgtcaattttctatgaaactccagagggaacagaatactgcaatgaggtctctaaagtagttgaatgaaatatactcccatcaacactctttaagtgttttcatctctgcacattgtgaataatgctcaaggttatcactttttaaaatgccttttcaatctgaagaggattaagtatctctcattggttttaatgtgtaattttctgattcctagtgagaacattctttttgcaaatatttattgactatttggctttctaattcggtgacttgcttatatcgttttccaattttccgatttttgttaggttgtmttttgtaattaatttgcttaggtttgttaaaaatatctctgttgcccatgtcttttgaaatattttttaaataatttttcagtcacagaagatttgaagaactttaaggtaaacatatgatttatcttttaattattttaatatatagttatggagcacctactgggtgtcctggtttgtggttttgtacctcgttaagacattctatcaacaaatttgtcacatatttcccacattatgttgttaaaagagtaaagtattattattcaacatacagatatttattccctctgaaatatatttttatgtctaacatgaggtagagatcatttcatttagtagtgttgacatttgggccaccatcatatattaaatagttgatcctttctcaattattgtgaaattctaccattgtttcacacacatcccataaggacttataaatatttccattgtctaatatatatttgtatacacatgttcatatatacttataaacataaatacacgtacacatgtacaagtttatataaacattatattatgtttgcacttggtaattcaccagtgtttttttcacatatggccatatggacagcttctttttttttattttttactttttatgtttttattattattatactttaagttttagggtacatgtgcacaatgtgcaggttagttacatatgtataaatgtgccatgctggtgtgctgcacccattaactcgtcatttagcattaggtatatctcctaatgctatccctcccccctccccccaccctacaacagtccccagagtgtgatgttccccttcctgtgtccatgtgttgtcattgttcaattcccacctgtgagtgagaaaatgcggtgtttgttttttttgtccttgcgacagtttgctgagaatgatggtttccagcttcatccacgtccctacaaaggacatgaactcatcattttttatggctgcatagtattccatggtgtatatgtgccacattttcttaatccagtctatcgttgttggacatttgggtttgttccaagtctttgctattgtgaatagtgctgcaataaacatacgtgtgcatgtgtctttatagcagcatgatttatagtcctttgggtatatacccagtaatgggatggctgggtcaaatggtatttctagttctagatccctgaggaatcaccacactgacttccacaatggttgaactagtttacagtcccaccaacagtgtaaaagtgttcctatttctccacatcctctccagcacctgttgtttcctgacattttaatgattgccattctaactggtgtgagatggtatctcattgtggtttttatttgcatttctctgatggccagtgatgatgagcattttttcatgtgtctgttggctgcataaatgtcttcttttgggaagtgtctgttcatatccttcgcccactttttgatggggttgtttgtttttttcttgtaaatgtgtttgagttcattgtagattctggatattagccctttgtcagatgagtaggttgtgaaaattttctcccattttgtaggttgcctgttcactctgatggtagtttcttttgctgtgcagaagctctttagtttaattagatcccatttgtcaattttggcttttgttgccattgctttaggtgttttagacatgaagtccttgcccatgcctatgtcctgaatagtattgcctaggttttcttctagggtttttatggttttaggtctaacgtttaagtctttaatccttcttgaattaatttttgtagaaggtgtaaggaagggatccagtttcagctttctacctatggctagcctgttttcccagcaccatttattaaaagggaatcctttccccatttcttgtttttctcaggtttgtcaaagatcagatagttatagatatgcggcgttatttctgagggctctgttctgttccattgatctatatctctgttttggtaccagtaccttgctgttttggttactgtagccttgtagtatagtttgaagtcaggtagcgtgatgcctccagctttgttcttttggcttaggattgacttggcgatgcgggctcttttttggttccatatgaactttaaagtagttttttccaattctgtgaagaaagtcattggtagcttgatggggatggcattgaatctataaattaccttgggcagtatgccattttcacaatattgattcttcctatccatgagcatggaatgttcttccatttgtttgtatcctyttttatttccttgagcagtggtttgtagttctccttgaagaggtccttcacgtcccttgtaagttggattcctagttattttattctctttgaagcaattgtgaatgggagttcactcatgatttggctctctgtttgtctgttattggtgtataagaatgcttgtgakttttgtacattgrttttatatcctgagactttgctgaagttgcttatcagcttaaggagattttgggctgagacagtggggttttctagatatacaatcatgtcatctgcaaacagggacartttgacttcctcttttcctaactgaataccctttatttctttctcctgcctaattgccttggccagaacttccaacactatgttgaataggagtggtgagagagggcatccctgtcttgtgccagttttcaaagggaatgcttccagattttgcccattcagtatgatattggctgtgggtttgtcatagatagctcttattattttgagatacgtcccatcaatacctgatttattgagagtttttagcatgaagagttgttgaattttgtcaaaggccttttctgcatctattgagacaatcatgtggtttttgtctttggttctgtttatatgctggattacatttattgatttgmgtatattgaaccagccttgcatcccaggatgaagcccacttgatcatggtggataagctttttgatgtgctgctggattcagtttggacaacttcttttatgttcastttatgaggactcagcttaaatatcatcttctcagagatcaatctcccttctccctaaatcactcctccagctgtgacttattatgttaccatatttatttattttagagtctatatcacaacctgaagttatattttatattaatttgttacctttattatatataacacactcacacagaaagttcatgaagtcartgatttgatctcccttattcaccattaatatcccctgtacctagcagaaataaaatatatattggatgttcaataaatatttgttcagtgtataaatcagtgagaaggttgctagaatgataaatcattctatattcatagagggcagggatgattttggcaacagcttcttgatatttttcttaatatggtgtgtcttatttttaataagatgaaaaaaagacagtataattactttgagctgtaactgatagaaaaaaatcctttacagtgactattttatgtatagatactgaccaaagatgagatctgaattcataggctagattgattttagagtgagtcagttaagtcctgggtcaggaggagctaatagggtggccctgagtttctatttgttaagtacaattgaattcacgtaggtttcagtgaattgagttgttctggttcttactgtgtacaaaggaccacactgtaaagctttgcccagttataggtatcacccttcaaaaaagatttgtcacttggagcatatttagcagagatatttgaaatagtgacatgagttgaaactatatcatatgaacacctcagaaaagcaatagggaatttttagccaggaaaagacctggaggaacacaatcactctcattatatctttaaaggactatgatgtgaatgacttgttctgaagggccccgaggggcaaaatacaacctatgagcagatgttagaagaatgcaaattttatctcaatatagagawgagttttttaacagagctatcctgacaggaattggrctttattgagaacacaggatttggagtttctcaacactgcagacatttaacacaaggagagtgactagttgaccaaggtattttgtggggggcacaaacaaatcttgggtgaaaagtgggtctagaagccttttgaaacccaatccttagatcctctaatggatctgtctgttttatgaaagagagaaatgtgatctggatgattgctggagtactacaggtgtgtgaacagttatactcaacctggtggaaggataaagcsatctatagggcttaatccttgctccactttaacaagtgacttggaagaatactgaaaaagtaaacattttatatttgtgtaaggcacaaaactgagaaaggtagaatggtctaatgtttgaaaactcataagytgaaattaaataagggcaaatataaagtcagggccttagcttaaatacaacctattgcacgagcatatagtgaaacgattgcacatcaaaagcacatgggtcatcaggagttgagagggacatttgctctcttgttcaatgaatttcaaacctggatctatgaaagcattttcatggtctatagcaaaagtagctcagtgtagttagctttttttcatatagtgaaatttattcaacttttcattctcaggttttatatttactactttatatttatcagaaatatttgatttatgaaataataaagtagataatagttttttacatttttatttttggcaacaaataaattatttatcaatcaataaaaaatatttttttactttactaataaaaaaataaaaatatacccaccctatgtcagttccttctccttcctgtgtctccttcttctttgaaaaatatttgtggcctgaaaagtccagaaagttaaaagtactaatttaggtgacttaacagtataagtcagtagcgtgatatggggactgacttatagcattgaaataattgatctttttgtagtgtaagtttgatcattggattttcatgctcacgtgtgatacgtgcctccttcaaaccttgttatgacactagcacattattcatatgacatgaaaaataaaataaaatggttatgatacttagcttgtgaaatagaaggaaattttcaatatacttggcacaggaatgtccacatcaagaatttcatgctgagtcctgggcccatagtttaaaggataggcagaaaaagaataagttgttttaagccatagtgagctatcacctcattactggaagtgtttaaacaaaagcaaaatarggtgtaccttgacaaaaatattggagagagaatttcattattgagaagtagaagaattagatcctcttaagtgttctttccataaataagattcactaattaacaaaaatcatgatgaaaacctagggtattttccctgtggtgaatacacattcaattaggcaaaccctcctaagtacttagattttccaaaatcacaagagagaaatgtggttctaaaatatgtggttctaaaataagtcaagttttccaatcacggtctagtttgagtcactatgtagtattgctttgttatatctatctgttgctctcaccaagtagtatccaataacctgacagggctaaaacagcttccagagatacctaatttattttcagtgatgtggttgggtataaagagataatayttttataagttgttactgaaaatctgtaatttctaaaagagatatatattgagtgtgttgataagtagggaagaaagtcaagattgccctagagaagcatgtgaaatataaaaagaacaaagtatttgggctagggcatgcactggagatcacttgtattcatattttagcatggaaagccataaactccatgaggataggaatttttrttccgctgatatatcctaagaataatgcttgacacatagtaggtactcagtacatttttgctgagtgaatgattatacctcaatgamctttttcagattatattcattggcaggtaaatgctggaagccattactattccccttccttctttgttttctgggagtgtagaaactcccaatttctaatcaaaatgataaaaagtcccagtatgacactttgtctgttgaagtacaagtcatgtgaagtgactggcattatctctctctgcatagacaggactattttgtaaaaacagcaacttgttctgattaagttatgatgtatttagcacacacttcagtaagagcattagactatctctttmaaatggaaagctatgtgcttatttgtatgggttttttatttgtttttctggtagagaagttgtcatatctgcgaactgaaagcacttaattttctaagtatcaagctttgggaagcaaacatattctctttcatctactgttgatgatgatgatggatgttttgtttgcaactaaacaatataggacccaaatattcaatgtaaaatgaccatattctttaagaatcatgtaaaagccatatcaggccttttataatttatgcctaatttatttcttttcacttcagggaatggcacaaaatgctcttaagactttggaaacaaacagtcgcgtcataatgtaaaaaagacttaaatgaggtgattttatttttaaaaagcttataataattgagtggtgtaycctcaagactgactagggtgatttcaaatgtaagtttastaccagtttctttctagtgatggtgtggtatctatgtggggagagagtgcgtgggtgcagctatgagcacagctactaagactggaaataaatgtctgtgcctttgtcctatcactgccctgtatcttgttccaattacacagccactttcttccacctactccaaggaactcttcattcaacaaatacttacggaccacctactgggagcatccatgaagctagggtgaggcaggggcagggagtggggatttagggggtactcartggagcagttctgagaaataagaattttaaggcctaagttttattagaaggaaaatcggaggtggtgtgtcctggcagaagaaacagaatttgtggaggagaagtcatggccatcaaactcaagtgggaaagtggggtaaaaaattagataatgactttaaagtacatagcctagaattagcatagtttcacatgcaggccaaggcaagaatctcagaatgaattacaaaccaaagtgtttacagcctcatttataatcatggtgtgtgctgtgatattaagcacattaacataaaggatctgtgctggcctgtacaatgttcttctagtcacggaggaaaataaaggtagagccttgctgacattaagtttataatcaaaattgaaaatttattatccagatagaaaggaagtggtgtttgggaggaatcggtggaaatggcatgagaattggattcatgtcaggggacacaggragagcccacagaaaaatgtcattttccatgggccttaaaggagaagcaagatttgcacatttgggaaaatacgaaaagggcattctaggcaacggagatggaaaaacatgtaatagaaattgaaaaaagtaaacaattgagtctgtctaagccacgttgtttctttacaggaggcacccttggattttgggtggaacaattatttgttgtgtgatacagtcacagtggtggggatcaaccttttctggggaggccagaaagctcagaatcagcactaagacacaacttccacctcccccagtccagtctttytaataaccaaaagtgccttcacacatttccataaacctcccagtaaagtgatgttgccccasttaagaaccagtgggagggcatagtctgtggaaaggtaagttgtagcccttagtgccaagtgaaggggtttagatcagtttcatagatttggtttagttactacaggtactacaggttttgagtaggagagtgacatcatcacagctgtgctttcggaagattgatttgaaaattctgtgtcaactgaatgggaaaagggagaggcatgacctgctaaaagataattgaatattacatgcagaagtcaggatctgaataagagatgtasgaataagaatttttaagatgggacaaattgcaaatagacaatataaattgatcagaaactgaaaacaaattagatgattgtgatgatggaggtgaaagggaatgaatttgaggtttatagcctagtacctgggaaaatagtggttatattagaagaaattggaaacaaaattaagaaagggacactttaggacagaaatgaatatatttaagttactaccagaagatccaggttgagatgatagaaaataaaactacaagaacttgagatgtcaccactagattatggtgaccattcatatagatgtgatgattagaaccataaatgtgggatgagattgctaaagagcaaaataaaaataaaagaatcaaaggcgtaaccttaagaaaacacatctgggagagaaaaggaagaggaacctgaaaaagaacaatgagcaaagtaagaggaaagtcagggaagtgtggctggaagcctagcaaatgggagcatttcagcacagtgatcagcaaagacagatactccagtgaagtccagagggatgagtactgacaatttggaaattaggaagtgagcagtcatcttaaccaaagaatagtttcagcagcattgtgagaaatgaggagagggcaggggccagaagctatattcctagattttttcccccttaaattgaaaagtaaacctaattgtggaaaagagaatcactgggaagctccaccttgcagactttttaccataaagtcctaccattctttttactatcagttatttttttctttatttgtgtgtttattaattggtatatcatagttatatatattttgggggtacatatgatatttggatacataaacaatatgtaataatcaaatcagggtaattggaatatccaacacctcaaatatttatccttttttgtgttggagactctacaattcttcacttctagctatttgaagcatataataagttattgtcaattataattttcctactgtactatctaatacctgaacttactttttctatctaactatttttgtacccattaaccaacttctcttcactgccccttattctctttccggcctctggtaaccgccattctacctccatgagatccacagttttagtgaataagaacatgcaatatttgtctttctgtgcctagcttattttacttarcatagtgacctccagttcaatctgtattgctgcaaaagacaggatttcatttttttgtggctgaataatattccattgtatgtgtgcatgtatatacacacacatatgccacatttttttatttattcatctgttaatgaacacttaggttcattaacaaaatatggattttggctattgtgaacagtgctgcaataaacatgggagtacagatacctctttaacatattgatttcctttctttggggctatatatccagcattgggattgctggatcatatggtacttctacttttagttttttgagaaacctccatacagttttccatatttaccgtatgactttatattcccaccaacaatgtatgagcattcccctttctccacatccttgctagtgttattttttgtccttttaataatagctattctaactggcctgagattgtatctcattggggtttgatttgaatttccttgatgactagttatgttgaacattcttatgtcttcttttgagaaatgtttattcaggtctttgggacttttttttccccaacatgtctaaataaactgttattgaaacacagccatgtgagttcctttatktattgtctagggttgctttcatacaacaaggaaagagaccatccacctaacctaaaatagttactatctgacctttttaaaaaaacttttaagttcaggggtacatgtgcggktttgttacatagggtaagctcrtgtcacggggcctgaagcattgctccaggaacatagcccccccatgggtatttttacacaaaaactggaggctattcaaaagatacacatgaagtctattcctggagattattttgtcacccaggtattaagcctagtacccattagttattttccctaatcctcttcctcctcccatcctctactcttcagcaggcaccagtgtctattgtttccctctawgtgtccatctgtgttcctcatttagcttccacttataagtaagaacatgaagtatttggctttctgttccatgttagtttgctaagaataatggcctccagctccatccatgttactgcaaaggacatratctcaatcttttttatggctgcagagtattccatggtgtatatgtaccacattttctttatgcagtctgccaattgatggacatgtgagttgattccttgtctttgctatggtgaatagtgctgcartgaacatacacatacatgtgtctttatgatagaatgacttatattcctttggatatatacccagcactaggattgctgggtcaaatggtatttctgaatttaggtctttgaggattcaccatgctgttttccacatggttgaaataatttacactcccaccaacagtgtctaagttcctttttctctgcaaccttgctagcatctgttattttttgactttttagtaatagccattctgactggtgtgagatagcatttgattgtggttttgatttgtatttctctaatgataggtgatgttgagcgttttgcatatttttttggccacatgtatgtcttctttagaaaagtgttcatgtaccttgcccactttttaatggggttgctttttcttttcttgtaagcttgtataagtttcttatacatactagataatagacctttggctgggtgcgatggctgacaactgtaatcccagcactttgggaggctgaggagggcagatyrcttgaggtcaggagttcaagatcagcctggccaaatggtgaaacttcatctctactaaaaatacaaaaaaaatttagcctggcatggtggcacatacctgtggtcccagcttcttgggaggctgaggtgggaggatcacttgaacctgagaggtggaggttacagtgagctgagatcacaccactgcagtccagcctgggcgacacagtgagactctgtctcaaaaaaagaaaaaaaaagataatagacctttgtcagatgcatagtttgcagaatgtatctcccattctgtaagttttctgttacactctgttgaatgtttcttctgttgtgcggaagctctttagtttaattatatcccaattgtcaattttttcttttgttgtaattgcttttagtgtctttgtcatgaaatctttgcccattcctgtgtccaacatggtattgcctaggttgtcttccagggtttttattggttagggttttacatttaaatgtttaatccattttgaattaatttttgtgtatggtgtaaggaaggggtccagtttcaaccttctgcgtatggctagccagttatctcagcaccatttattgaacagggaatcctttcccattgcttgttttttgtcagtttttttttgaagatcagatggttgcaggtgtgcagccttatttctggatactctattctattccattggtctctgtttttattttggtgtgctgtttttttactgtagtgctgtagcatagtttgaagctagtagcatgttgcctccagctttactctttttacataggattgtcttggctattcgggctctttttgttccatatgaattttaaaatagttttttttatagttgtgtgaagagtgtcattggtagtttaataggaatagcattgaatctataaattgctttgggcagtatggtcattttaagaattttgattcttcctattcatgagcatgggacgtttcgccatttgtttgtgtcatctctgatttctttgagcagtgttttgtaattcttattgtagagacctttcacctccccgattacctgtattcccagatattttattctttctgtggcaattgtggatgggattgcatttctgatttggctcttgacttgactgttgttgatgtatgggaatggtagtgatttgtgtacattaattttgtatcctgagactttgctgaagtttttttattagcttaagtttttgagctgagactgtgggattttctagatataggatcatgtcatctgmaaacaggaataacttaactttccctcttcctgtttacatgccctttatttatttctcttccctgattgctctggccaggacttccaatactatgttaggtaaggaatggtgagacagagcatccttatcttgtgctggttttcaaggaagtgcttccagcttttgcccattcagtttaatgttgactgtgtgtttgtcatagatgactgttattattttgaagtatgttttctcaatacctagtttattgagcatgtttgacataaaagtgatactgaattttattgaaagccttttctgcatctattgagataatcatgtggtttttgtctttaatttgcttatatgataaatcacatgtattgatttgaatcaaccttgcatcccaggcatgaagcctccttgatcatcatgcatttgctttttgatgtgctgctggattcagtttgcaggtattttgttgaggatttctrcctcaaaattcatcaaagacattggcctgaagtttcttttctttcttgcttttttttttttttttttttttttggttgtctctgcctggttttggtttcaggatgatggtagcctcatagaatgagttagaaggagtccattctcctcaatattttggaatagtttcaggaggaatgataccagctcttctttggacatctggtaaaatgaggtcgttaatccatctgatcctgcattttcttcgattggtgggctatttattactgattcaatttcagagctcattattagtctgttcatggattcagttccttcgtggctctgtcttggcagggtgtctgtgtccaggaatttatccacatcttttatatttgctagtttatgtgcgtagaggtggtcatagtgttttctgatgattatttgtatttctgtggggtcagcagtaatatcccctttgtcatttttaattgtgtttatttggatgttctctcctttcttctttgatagtctagctagatgtctatctaacttattaattttttcaaaaaaccaactcctggattcgttgatctttcgaatgctttttggtgtctcagtctccttcaattcagctctaatttggattgatttgtttcttttcttctgctagctttgtgtttggttttctgttggttccctacttcttttagttgtgatgttaggttgttaacttgagatctttctaactttttgatgtggacatttagtgctataaattgtcctcttaatactgtcttagctgtgtcccagagatgctggcgtgaggtatctttgttctcattagtttcaaagaacttgttgatttctgccttaatttcattatttacccaaaagccatttgggagtaggttattcatgtaatgaatttccatggattatatggttttgagtgaatttcttaggcttgatttctaatttgattgcgatgtagtttgagagagtgattgttatgatttcagttactttgcatttgctgaggagtgtgttatgtctgattgtatgatttatttcagggtatgtgccatgtggtgatgagaagaatgtattctctcttgcttttagtggagagttctgtagatgtctctcaggtccgtttgatccagtgctgagttcaggtcctgaaaatctttgttaattttctgcctcaatgatctaatactgtcagtgaggtattgaagtctcccagtattattgtgtgggagcctaagattctgaaggtctcagagaactttcttttgtgaatctggacgcctctgtgttgggtgcatatatattcaggatagtgaggtcttcttgttgtatttaaccctttactgttatataatgtccttctttgtcttttttgatctttggtttaaagtctgttttatctgaaattaggattgcaacctcccttttttctgttttgcatttatttggtaaatttttctccattcctttattttgagcctatgggtgtcattgcatgtgaaatcagtcttggttctttattcagcttgcccctctgtgtttaattggggcatttagcccatttacatttaaggttagtattggtatgtgtggattcgatcctgtcatcatgatgttaggtggttagcgtgcaaacttgtttgtgtggttgctttatagtgtcactggtctgtatatttaaaagtgtgtttttgtagtggctggtaacagtctttccacatttagtgcttccttcagaagctcttgtaaggcaggtctggtggcaacacattccatcagtatttgcttgtgtgaaaaggatcttatttctacctcaattatgaagcttagtttggctggatatgaaactctgggttgagatttcctttctataagaatgtcgaatattggcccccagtctcttctggcttgtagggtttctgctgaaaggtccactgttagtctgatgggcttccctttgtaggttacctggcctttctctctagcagctttaacattttttctttcattttgaccttgaggaatctgatgattgtatgtcttggagygatcttcttgtgaagtatcttactggggttcttcgcatttcctgaatttgaatgttggcctctctagctaggttggagaagttctcatggatgatatcctgaaatatgttttccaagttgcttatactctttctgtctctttcagggacaccaatgagtcatagattttgtttctttacataatctcatatttatcttaggttttattaattccttttcattcttttttctctattcttttctgactgtcttattttagaaagctagtcttcagcctctgagattctttcctcaacttggtctattctacgattaatgcttgtgatggcattatgaaattcttgtagtgtgtttttyagctctatcatgttgcttacattcttttctatactggctattttgtctgtccgtttctgttgttttattctgattcttagcttccttggattaggcttcaatgtactcctgcatcttaatgatctttgttcctatccatattctgaattctacttctgtcatttccgccatctcagcccagttcagaacccctgctggagaggtgatgtggtcatttttaggacaaaaggcactttggctttttgagttgttggagttcttgtgttggttgtttctcatctttgtggactaatgtttcttcagtcattgaagttgttgacctttggatttttttttttttttgcttttatcctatttgatgaccctgagggtttgattatgctatgaagtgaattctgccaactggctttgtttctggaagactttagggagtgaacacttagctctcagctcctgtactgggtgctgtaactctgggggagtagtatggtgacctgagagtgttctttggttctttgaggttagaaatctgctacactagggggccgaggtactcccagaatgctggtcagtactctctgatgggtggtgtcagccaaagcatttcgtagtatggtgacagcaggatctgtcttcatccgcgtatgtcagcagcagtggcagccacagcatggcagggtgcacgctcatcggctgcagcagggtgctaatgggtgtcagtgtacctgcctccatgcggacattcaccacagcggtggaggcagcatgagtcaggggaacggggggcccctgctggcgaatgtgcatgcagtcacactggtggtggtgttagcatggggattattgctcattttttaattggattttttgtttttgtttttgttctttgtttttgctactgagctgcttgagttccttatatgttctggttattaatcccttgttggatggatagtttttaaataattttctgccattctgtaggttgtcgctttactttgttaattgttttctttgctatgcagtagcttttttaacttgatatgatcccattggtctatttttgcttttttcacctttgcttttgaggtcttacctaaaaaaatctttgcccagaccagtgtcctatactgttttccaaatattgtcttctagaagcttcatagtttcagatcttatgtttatgtttttaatataattttatttgatttttgtatatggtgaaagatgggaatctactcttattcttctgcatatgaatatacaatattctcagcaccatttattaaagagactgtctttccctgatgtatgcttttggcactcttgtcaaaaatcagttggctgtaatagtgtgggtttatttctgtattctctattctgttccattgttctatatgccttttttcatgctagtaccatactgttttagttactatagctttgtagtacaattgaaaaccatgtagtatgatgtcgagctttgcattttttactgaggattgctttaactattcagtcttttgtgtccatacacattttaggatttttttgtaattacctgaagaatatcattaatatttgataaggattctactgaatctgtagatcactttaggtagtagacacattttgacaatattaattcttcaaatccatgagcatagaatatgtttccatttttttgtgtcctcttcaatttatttcatcagtgttttacagttttctttgcaaagaccttttacttcttcattaaatttattcttaygtgtgatatatatttttagctattgtaaatgttaytgctttcttgttttttattttcagattgatcactgttagtttgcagacacactattaatttttgtgtcttggttttgtatcctgmagctttgctaaatttattgatctattccaagaattttttggtataataggcctttctaaatataaaatcacgctatatacaaacgaggataattagactttcttcctttttaatttggatgccctttctttgtttcttttgcctagttgccgtgactagaacttccagtactatgttggataaaattggcaaaagtgggcatcgtagacttgttccaggtcttagtgaaaaggcttagagttttccccattcactatgattgctataggtttgtcacatatggcctttattgtgttgaggtatatttcttctatgcaaaatttgttgaagatttttatcataaagggatatggaattttatcaaaagctttttcagtatctattgaaaggatcatagggtttttgtccttgattctgttgatatgctgtatcacattttttgatttgcacatgttaaaagattcttgcatccctgggatgaatcctacttggtcatggtgaatgatctttttaatgtattattgatttttgtttgctaatattttgttgaaaatttttgcatctatgtgtgtcagatatattggtctgcrgtttcctttttttgttgagtctctctggtgttggtatcagggtaatttttcaatattgccttttgtcttcagaatctacatagtgcagtaggcttttaagcaattctagcagcattttctaaagtatgtttttatatagtgaactcaagcttgtggagctaaatattagtatgagctttcactgattattaatcagtaagtaaataagatatcctggacttgtaggtggttcacacttagattaaccttaaatacataaacagtttttttaaaaaaagctttaaaacttaagatacttttatgtaattcagaaggtaatgttagtgctgaaaaatattttgttcataacattatttttaaatgtcattttaaatgtgaggctgaaatgaaatgtcatttgtagtaggatgtttaaccaaatggagaatgtctgactatttcttcccagaaccttgtcttgagggttaatatgaaaattacccatgcccatagatcctaagaacttctatacccagtcatgacaagttttccaaccaaaagaccttatacaaatctaagcaatcattcatcctcttccttgtactacaatcaagattacaaattgtagttctataactgaaagtctctgcactctcattttatgtgtcataactgacaatgctagtgtcccctacatcctaatttagatttagagaggttttctgtatttcttttcaagaagagagtattctaatttcatatctacactgaacctaaaagtttaggactggcagttcactccagatttcttggagtatataagctggttggggcgacgatctgggaaaggtagtgttaaaaagcaatgaaacagacttaagcatgaatgtcactaagtctattatatgtacaccaatagtcattattttttcatcctatactttctatttttttctgttctaaggctgcgtttgttagcaatattctgtaaaataagatttgtcattttggattacccaaggagaatgtgacaagggtaatttaaaacagtctaagcagtcctcccattacagatggttagtataacagacagtgtgcagaaacttggtctagggagctgaaacagaactacattgagatccagaagctataaggtaattgctccatagaaagaatgaactggttttggagaacttgagagtcaaatgttgtttctagtaattagcaagctatcaatatgatattgcatagtttattattttaaaaataactttaatctctgtcatgcttatgcagaaataaaataactgtacttatagcacaataaaattctactttttgcctaatggagggcaacatgagttagatatctcacaaaataaactacttttttttcaatttctcaatttctgctcgttgaatgctaaattaaagtcatgaatctgcttttgaacatgtagataccttctgggcatgctatggttgtgcgtttggtaagaaagtttataaaggaaaagatgacctcttctcatgcatctgagatctggcaggtactttcctagagctaccatatttaattcttgcaatggtattgtgacatacacattactgggctcattctattataaagaagaagaaattcagagattttaggtgactactccaaagttaaagaacaaaaaaaaatgctttaggatttgaacactaataattttcttggttttagaattatttcatcagagtttaatttactcataattgtgtaattctccaaagaacatagacttttctactaccccttgctgtaaaagacgtgataaagaaaatatcccaggaatcttacttttcaacatttaagtctgcaatgcttttgactgtcatatatttagggcttgctatttcataattgaaggccttagctccattagaaaggatgccaatattacttgacatttatgtatcactttattattaaaacaggctttacaatttctgtatcatacttggtaagatttgataccaagagagattttgggggttctgtaagattacacagcaaagagggggaggaagttaaaatacagttcttgccaaatcatttaacatccttatttacttaacaggaactccctcaggtaaaaaatgatggatcagtgtgttatgcaattttggcataatattttcaaaaatctagtagtcaaagcttttgactaaaaattaaaaggctgatttttatgggtggtgtttgggtataaaagtgtatatttcaaggtattagagcaatatatggtcccttgaacacgcacatgagtgatactggaaaaaacaatttgactgaattttaaaaattacattatttcaaggtatatgttcttattttctttaaaataatattttgtattaaaactttctgcttaggatccagggcaatatacctaatttttaaataatttactatcatgaaaaaccatttttctgaatatcggatctttaatcattaaataaattatataacttaatgtgttcctctttaggttgttattataggtgagttcaacataaatttgaggttctatctcagcaactgtgttagcctggttgttaaatatgcttcttttgtctactttgttttttattatttatttccatatcaacaatgactttgtactatcttaagtcatttttctaatctggcaagttattagctaaaaatgaataattgaataagaagtgaacatttcccaaagactttagctctaggtaacatagtgacctaagagaatgtacacttactctgtctcacatataggtgctattgaatatttttggtggtgatgttgaagatatttgaattaygttggtggtaagtggaggccagagagttacttaatatgtggactggcatggtgtaagtctggaaggaactgtggtgaacagtttctttgcttatggtgcagtttcttttgaaggacttaaagcaaacactggaactcatttcctaagacactttgaggtcactcattcccacccaattaaaaaaaaagtagaagaagaaaagaaaaacacctgtratgagttttcagaggcttatatggtgttactgtattttttcagaatgtattgttgtgtaacaagaaatatttcatgggtaatccaaagtataggagttctgggatagaaaagcaaactctagcatgggggcagcctaggagaaatgggccaaaaattgaagggaatagtacagccatgactgcaaaactgtctgtcagcattccagaaataattcatggtttttctyttaagcgaatacttaagtttatggcctgtgcctatgaaccaagctttgtggatgttaataaagagttgacagctatctttccattgaagtctttgcctctctgagtggaatatactgtcaactgtcaataaataataatcattatttcagtttctgccagatgctgcctagaaatcatggaattcaaaggcaaatatttgaaagcctgaacaaaagtatgatttcagtcatttgttgcagttctttgtagctttctcaagcttttataacaaatgtgtatatgcaagggtttatttctggggtctctaatctattccattggtctatgtgtctgtttttatgccagtaccatattgttttgattactatacctttgtgatataatttcaaaatcagggagtgtgatgcctctagatttgttcttcttgctgaaaattgctttggttatttggtgtattttgtggttccatatgacttacagtttttttctctttctgtaaaaaatgccactgggattctgataaagattgcagtgaatttatagatcacttaggatagtacaaatatttcaacaatattaattcttccaatcattgaacacagatatctttccatttctttatatcttcttaaatttctttcatcaattttttctagtttttagtatccaggtctttcatctttccagttagatttattcctaagtattttgttctttatgtagctattgtaaatataattattctcttgatttgtagttcatcattagtgtatagatactcaactgattcttcatatgttctgaatcctgcaactttactgaatttgcctattagttctaacagtttttggtggagtttttctggttttctatatataagaccatgttgtctacaaacaagaacaatttgacttcctcatttccaatttggatgccaattatttctttcctttgtctaattgctctgggtaagacttccagtacaatgttggatagaactgatgagaatgggcatccttgtcttattcctgatcttagagtaaaagctttcaaattttcatcattgagtgtgatgttagctgtggatttgtcataaatggactttactgtgttgaggtatattccttctatacctagtttgtcgagagtttttatcaaaaaagaatgtcaaatattatcaaatgcttttttcttcatctattgagatgttattttttttgtccttcattttgtaaatgtgatatattacatttacagatttatgtattcttgaattcctgggataaatcccacttcttcatgttgaatgttccttttaatgtgctattaaatttggtttgctagtaatttttgaggatttttgcatctacatttatcagggatattggcctctgattttcttttctaacggtgtctaatagcggtgtaatagtgtttaatactttcatatatttaatgttgctaattaaccttcttttgtttcaaataaaatattaaataactcccatttcttgtaaggtaggtctaatggtggtgaagtttctcagattttgcttttctggaaaagtctttatcttttatttcttggaaggacagcttttccaagtaaagtatcattgattgacagatttttttgtctttcagtacctggagtatatcatccgcactctcctgtgcctgcaagttttctgcacaaaaaccaactgataatctcatgagggttcctttgtatgtgacaagttgtttttctctttctgtgttcagagtttcttgtaactgatttttattatttatttgttatttttaaaatttttaataaatatatatatatatatatatatatgtatgaaataaaatgccatgttgaccaggctgacctttaactcctgggctcaagtgatcctccctgcctcagcctaccaaagtgctgagattacagacatgggtgtcattcaattttaataatatgattataatgtgtcccactgaataatatgattataatgtgtcccagtgaaggcttttttatgaatcctttgggcttcatagatctggtgttcattttactccccagattggaaagacttctgttatgatttctttaaatatgctttctgcctttttctctgctgcttatagggctcccataatgcagctattagtttgcttgatggaatcccataattcccataggctttcttcattctttttcctttatttctgtgactggagaattttaaatggtctgtctttgaattcactggttcttttttctgcttgagtctgctattgaagcttactattatattttttcatttcattaattttattcttctgctgaatttgtcttgttcttttttattaatatgtttccatctttttgttgaacttctcattttgttcatgtattgttttcttgattttatttaggtatctatctgtgttctctggtggttcactgtgcttttttaaaacaattattttgaattctttgttagacaattgttagatgtctatttccttgggattagtcactggaactttattttgttcctttggtggtgttgcgtttctttgactctttgtgtttcttgaagctgtttgatggtgtcttcacatttgaagaaggagtcatctccttcagtgtttactgtctgatattaggaaagaaaaaccttgaccagtcagccccgttggagattttgggggtctttcagacctttttgtatgtagaggcacccactctatttctcttttctcttcaaagaggtaagtatttagattttgtatattctcttgatcatgcaaagccaggcttgttgctaagagactctcacttattttccttaagacagtgtcctgaattgtttaatatagtatgactcctcccaatccagcagagtcaagccagctgctggtatttgcttgccatctttgggagcttgcacatgctgtcttgcaaaggctcaatgttttgtctgtgggtgagcatagggtaccatatgtagtagacagcagggctctaaccattttagttgaggggcatggaatcctgggaatacatatcagttagctgggggagtccacaggggtcatgggtagagatcctagtggagaccatcatgaaccagccagtgggatttatggccagttgttgagatattcatacaggctgccacggcccctacccccttaccctgttcctagtgtccccaagattatttcattttgctaatccccttagtattctgggtgggatgagacagaagtgggtctccttggaaggaaggaagctgctcccacttttcttcatgagagaaattgtaggacgagggtcagttgagttattgagtcaccatatcttgctgcacttgaaaaatgagtcaaaagtcaacaaggaggctgggcatggtagctctcatctgtaatttcagcactttgggaagtcgaggatgacttgaggaggatgacttgaggccaggagtttaagaccagtctgtgcaacacagtgaaacccgtctctacaaataaataaataaataaataaataaattagctaagtacagtggtgcactcctgtagtcccatcttgtcaagaggctaaggggggaggatcatttgagcccaggagtttgaggctgcagtgacacatgatcctactacttccctctggcctgggcaacagattaagactgtctcttttaaaaaataaatcaacaggctgggtgcggtggctgacgcctataatcccagcactttgggaggctgaggcaggcagatcacctgaggtcaggagtttgagaccagcctggccaacatggtgaaaccccgtttctactaaaaatacaaaaattagctggatgtggtggcatgcgcctgtaatacccaggaggctgaggcaggagaattgctggaacccgggaggtagaggctgcagtgagccaagaacgcgccactgcactccagcctgggtgacagagcaggactctgtctcaaataataataataataataataataataaataagatcaatcaatcaacaaggaatatttaacagcaataactataaagtctacattcaaactaaatgcatcttttatgggtctctcttggcacttggtgagataggtaaagtgaaattgtttttcttgtgctttttaatgcgtctattcttggattttggttgttgttgtcgttccactgtgatgctggaacagtggaatcttagctggattcttgagctcacataaaggtatttttgaccatgggtgtttgttaaaattgttgtttcttctgggggttgagggctgggatctccagttccacaatctcgctgatatcactcaaacgagataattgtggataataattgctaacatgcatgtagttcttatatgtgccagatgcagttataaataatttttatatattaactcatttaatccttacaataaacttatatggcagatattattatgtatacatttttaaagataaggaaagtgaagtacaaaagattcttgtaacttgcctaatttagagaaagaagctcaagagttaagattcatacttagatgatctggctttataatccatactgttgcctaccatactacatgctaccatatcaggaaaatcagataaattatgaaatagaaaaggactgtgtgcaaaaaacaaaaatgccttgctacagatggtgacatttgaattgacagttttatagcataaaggaaaaaaccgtgtacaattctaggagaagagcttttcaggcagaagaaacaaatgcaaaagcatccagatgggatgactgcaacctgtttgaatgaagagatgcagacttgagtagggaatagggaagatagggcaaggaccaggtcatgtagggctatgctttggaaggagatttcattctaagggtactgcagtaaaacaggaagaatttaatcagatccatgatggctgtatgacaaatggattataagggtacaagatggaagtaggaagctattgaaattgtctgggaaagaatcatagtggactaaccaaaggtggtggttgtggaaacaatgaaacttgtcacattgagaaaatgttttggaaagagtggtaataggaattagtggatgtagaatgtgctaaaagggcaagatgaggtgtagactctctggggttccaggtcagagcatcacagtggatagtgttgccatttactgagctgggaaagatttgaggagatgtcatgaggtgcaggggagaaacaaattccgtttggtcagtattgtttcagatacccaaatggaagtgtcaggtggaagagatatttctactttgaagttcagagaagaactttaggcaggaaaacttggagttgttaacattttgatatttaaaaccattggatgggatagggataatataacatagagggaggattcagccatcagaaaaggaaagcaatgaggcctagttcaaaattcagctatcagggaaggagtaatctacagaaaacaactgagaatgaatagccaaagaaggaaaaagagaatcacgagattgtggatagtggaacactaaggaaatagtttcaagaaggatatgtttaacctatggcaattcctgcttgagaccttaagtatgatgagaacttgagactgcttttttggattttggtcacaaacagaagtaataaaaacactttgattcaatgtgactttggcaattacggctctgtatgctaattaaatttctaaataaggtggcttaagggacacttaaagtagtgatattcaaagtgtggtccccagaccaggagtatcaaaatcacctggaaacttagaaatgcaaatattgaggccctaccctagatctaaagaaacagaaactttggtgatgtggtccaactgtgttttgatcatcatccagctgattctgatgcaaactacagattcacctggagccagtggtgtgcatgagtggcctagtagagagtctggggagcagaatgtgcacttttattcacaactctatgtcaccagtgacttgaaactggccatggtgggagtacaaaaatcagaaaagtcagaaatcttcaacg

SEQ ID NO: 6993 - DNA, 13115 bp, Homo sapiens
gggagtctgaggcggggaaatcacctgaggttgggagttcgagaccagcctgaccaacatggagaaaccccatctctactaaaaatacaaaattagtcaagcatagaggtgcatgcctgtaatcccagctactcaggaggctgaggcaggggaatagcttgaacctgggaggcagaggttgtggtgagccgagatcatgccattgcactccagcctgggcaacaagagtgaaattccatctcaaaaaaaaaaaaaaattagccaggcgtggtggcgggcacctgtaatcccagctacttgggaggctgaggcaggagaacagcttgaacccagaaggtggaggttgcagtgagccaagattgtgccattgcactccagcccgtgcaacaagagcaaaactccatctcaaaaaaaaaaaaaaaaaaaaaaaaaaaaagtagagctacttcaggaaaactcaggctataacagtaagaactaagataagcaaaacaactgaatatggggggaaaatcacaagaagaaatgggagaaaatctgtttgtttgttttatttattttctttttgtttgttttgttttgtttgaggcagggtcttggtctgttgcccaggctggagtacagtggcacgatctcagctcactgcaacctccagctcagcaggccaagcaattctcctgcctcagcctcccgagtagctgggattacaggcacctgccaccacactggctacccctttttgtatttttagtagagatggggtttcaccatgttgcccaggatcatctcaaactcctgacctcaggcgatccacccgccttcggcctctcaaagtgctgggattataggcatgagccaccacgccggcctcaatccttctacttttaagctatttctgtctttatattaatatgagtttcttgtctatagtatataaatgggcattgctttttttaaaatccaatttggcaacatctgcctttggatatttggggcatttgtatgtaacgtgaatactgatgtgactgtttaagtctataacttatttgtttctatttttcttcttgttccagctgttctttgatcttttttctctttttaagccttctattggatttagtattttttatgattcttccttcaggactttgctccaatgtacctttctcagtgaaactaaatttttgcctaatttatcatttttgacattacaagtattcccatttttcttccatttctacttggaacttgttattggctaacatgtttaacatttgtatctaggccaggtgtggtggctcacgcctgtaatcccaacactttgggaggcggaggcaggaagattacctggggtcaggagttcgagatcagcttggccaacatggtaaaaccccgtctctactaaaaatacaaaaattagccaggcttggtggccggcgcctataaactcagctactcaggagcctgagacatgagaattgcttgaacccaggaggtggaggttgcagtgagcmgagatcacattattgcactccagccagggcgacagagcgagactccatctcaaaaaataaataaaaataaataaataaataaatgtgtatctaattacctgttagctagtgactttttaaatttttttcacttttttagaaatggagtctttctatgttggccaggttggtcttgaactcctggcctcaagcaawcctccttccttggcatgagccactgcacccagcctagtgactttcatataattctgtattcaagttaaatatgttgatgtagtatctccaagaagttggggagtgtttttgttttggtttttctttttgagccagggtctgtctctgttgcctgggctggcgtgatcactgttcaccacaccattgacctcctgggctcaggtgattcttccgagtagccaggactacacgcataggccaccatacccagctaattttttcatattttttttttgtagagacaggattttgccatattgcccaggctggtctcaaactcctggcctcaagcgatcctctcacctcatcctcccaaagtgctgggataacaggagtaagccaccactcctggcctccagtaagtttcttattgttgaagtagccatactttctttgatataaaccctacttggtcagtcatttattcagtgaatatatattgagcatgtgctgctacagtgttggaaagattgttgtgaacaaaattactactttcatggagaggatattctaatagaacatcctgtatttattcgttggtataatcctcgatgtagtctccctatattttttgtgattttcatttgttgtgttacaagattttgttattaggtgtactttctcaaagctgtttatatttttgttttattaccttgcttccttattaatgccagctttagatttaatcacttttatgaccagttgcaacaaactgcttttagttttacacttagctttgctccttattatgttttaattatattcatgattttatcctaaccttgtcctgctttgctttttttccagtttctttgagcaaatatataattcataattattttcagtttagttttaaaaataagttacactattctgcaataaatttacttgttgccctaaagttgtcatgtattctccttacaatttattccagataattaataatttggattttgatatttatcttaagtccaaagttttatttaagggatgatttcttttatgattatatatcataagtaatttatctatttagttttaaagctcacaattaaggatgtaatatcttgaaattctttttttttttgagacagggtcttgctctatcacccaggctggagtgcagtggagccatcttggctcactccaaactccgcctccctgtttaagcaattctcctgcctcagcctgagtagttgggactacaggcgcctgccaccatgcccggctaatttttttttttttttttttttttttttgtattttggtagaggcggagttttgccaagttggccaggctggtctcgaactcctgacctcaggtgatccacccacctcggcctcccaaaatgctgggaatacaggtgagggccactgcgcccggcctcaaaattctacttctaacaaatttctactttttagtattaaaaatgttcgggccgggcacagtgactcacgcctgtaatcccagtactttgggaggcccaggctgggggatcacctgaagtcggaagatggacaccatcctggctaacacagtgaaaccctcatctctactaaaaatacaaaaaattagccaggcgtggtggcacatgcctgtaatcccagctactccgaaggctgaggcaggcgaatttcctgaacccgggaggcggagtctgcagtgagcggagattgcgccattgcactccagcctgggcaacaagagcaaaactccatctcaaaaaaaaaaaagaaaaaaatgtttctgggccgggcacggtggctcacgcctgtaatcccagcactttgggaggcggaggcaggcagatcacgaggtcaggaaatcgagaccatcctggctaatacgatggaaccccatctcatttaaaaacacaaaaaattagccaggcatggtcgcacgcgtctgtaatcccaactaatcaggaggctgaggcaggagaatcgcttgatcctggaaggcggaggttgcagtgagctgagatcgtgccactgcactccagcctgggtgatagagcaagactctgcttcaaaaaaaaaaaaaaaaaaaattcttagtgactagaatatgatctaatgatgaaaaatgagtgatgaaaaatttgttgacctagatcccataataggcatggcacttaatctttttacttcagttttattttgggaaaacaatgatatctatgttacacgtttgttgttgagattagattttataagtttaagatatttagaaaaccatctgacacagaataaataccactgaattttaggtatgattatctcttcaatctttgcaatttttccttgaagagtaaaatattccattgggtagaatacaggctagctggctatctttccttatttttaatctctttgatctgtcataagctgaaagaggtttcttgcctctcttaatagttttctataaccaaggtagcagctgcttttgtatttggctatataaaaagatggcttttatcctcttgcctaattttgctatttaccattgtgtgatatctattttcataccattacgggtacaagttccactttgatataaataaaggtgctcttatttgccttttaattgcttttgccaaaaatattttgcccatttctttgctttccttccttcatctcttttagactttttttttttttgagaaggagtttcactcttgttgcccaggctgtagtgcaatggcgcaatctcggctcaccgcaacctccgcctcccaggttcaagcgattctcctgcctcagcctcccgagtagctgggattacaagcatgcaccaccaagccaggctaattttgtatttttagtggagacgaagtttttccatgttggtcaggctggtctcgaactcccaacctcaggtgatccgcaccctcctcggcctcctaaagtgctgggattacaggtgtgagccaccctgcccaggcttttagatttcttaaaagcatgtttttaagaaacaatatggctgcattttggttttttaaaccagtataatagtctgtcttggataagaaattcagccattcatattttttgtaatgtgtgtattttggttttgctctgaatcttggtttatcaactattatattaatgttggaacataacatatccatttcaatttataccattaatcacactttctcagttcctttacctcttctggtttgttcagaaaagaaaggtctgaaatgtgaaatagaattacaggcacaaatgccagagagtgtaactgcgaactgtctayactaccccataaatacagcctaaatggggaaaaaaaatgatttactgaaatagtctgaagatgcacttgatttcttcctccagatactctacattttatccctgtatcaagcagcaacaccagaaaatggcctagagcagtgctgtccaatttggtagccactagccacatgtggcaactaagcacttaaaatgttactatgtgacttatgaaatatattttaattatatttcaatatccacatatggctagtggttactctactaatctacataccacactagactacaatattttgattctctgaaaacctatattcactgagttttctcatagctcttgagtcctttgttcccactgaagaactactgaaagaggttgaatttctaagttattggaaggttgtacacttcatcgcccatacagagtgcaaaaagagaacaattttagactcattgccaggaagtcttcatgccccattcataatcaatatggtttttctttatggaaatgtaaatcatgtgacagatgtctgcattgtgcaatggctatcaaaaagattcaaatttacagctcaattttgataactatgaaagaccataaaacttgtacttacctatgtattaaatcatgctatcagtctgctattgtctattttcctgttgatttctatatttccattctaatgagccttaaaagcctcatacattgcattataaataaagctgataataacaactaaacaactcacctgggatctgttcattttctactgatcttggaaaaatgtgaagagtaaaggtaatgctgggaaagaggaggtaagaataaagttaggagaaatctggcccgccttgctgctcctggatccaacttcctaaaatgctacacagaagagaccatttgaacaatgtggagacatctctatgaccagattgtgttgagcttagacatgcaatttttcactgggtgaaagtaaacacatgtatcccaatgattaacaatttatgtcgctaagacacaaaaaaatttaaaatacaaacaattcataaatgacaggatcctaatatagaaagtgtcttcattaaaattgatgtggtaggaaacactcatgttgtgctgtttatctgttttcctatgaatataatactgggaatattgttgaacaattcacagaaactctaaaaaatagaatgaatgcttcagtacaagatttttttaaatatttgttctaatttgattacagtttcacaatcttttgataagacttgtttcagctatgcaaaggaataaagaaatcacgaaactttttttttttgaaacagtcttgctccgtcgcccaggctggcatgcagtggcatgatctcggctcactgcaacctccacctcccaggttcaagcagttctcctgcctcagcctctcgagtagctgagattataggtgcccgccatcatgcccagctaattttttgtattttagtagagacagggtttccccatgttggccaggctggtctcgaactcctgacctcaggtgatccacctgccttggcctcccagagtgctgggattacaggtgtgagccaccgcgcctggaccaaattcttatcttgatcagtaacaaaggagtgacctgtaataattcattgattctctcaggctccatacattttatctttcaaatgaggcagaaatagttaaatactgtatactctacctgcactaccatcttgtgattctaaggtgagaataaaggccgggtgtggtggctcatgcctgtaatcccagcactttggggggccaaagcaggtggatcacctgaggtcaggagttcaagaccagcctcgccaacatggcgaaaccctgtctctactaaaaatacaaaaattagctgggcctggtggcacacacctgtaatcccagctactcaggaggctgaggcagaagaatcacttgaagccaggagatggaggttgcagggaggcggacgttgcagtgagccgagatcatgccactgcactccagccttggcaacagagtgagactccatctcaaaaaggataataaataaaaataaaataaaatatcaattattggtcaggcatggtggttcacacctgtaatcccagcaatttgggaggccaaggcaggcagatcacttgaggtcaggagttccagaccaccctggccaacatagtgaaaatctgtctttacaaaaaatacaaaaattagctgagcatggtgacacatgcctgtagtcccagctacttgggaggctgaggcacaagaatcacttgaacccgggaggaggaggttgcagtgaactgagattgtgcacctgcactccagcctgggcaacagagtgagattctgattcaaaaaaaaagaagggctgggcatggtggctgtaatcccaacactttggcaggccaaggcgggtggacacctgaggtcgggagttcaagagcagcctgaccaacatggtgaaaccccgtctctactaaaaatacaaaattagccgggcatggtggcgcatgcctgtaatcccagctacttgggaagctgaggcaggagaattgcttgaatccaggagacagaggttgcggtgagccaagatcacgccattgcactccagcctgggcaataagagcgaaactctgtctcaaaaaagtaacaacaagaaaagaaaagaaaagaagataaaatatcaattatttgctgttcaatgaaatatcacttctaggcaaaagatttctcatctttattgggtgttctcaccccaacctgggttgtttctgctatggaacgagtccaagaaggtgaaggtttctgagccttcaggatgttgacaagggtttcctctatgttgtctctctgacatttagtgaagttgggattctggtaaaagctttcattatattcatagggttgctcccttgtgtgtgttctctgatgtgttgtgagggatgacttctggtagaaggttttcccacattcactacatgcatagggtttctctcctgtgtgggttctctgatgtactgtgagggatgacttgtggtagaacattttctcacattcattacattcatagggtttctcccctgtgtgaattctctgatgttctctaagttttgacttcacagagaaggatttttgacattcattgcattcaaagggtctctctcctgtgtgagttcactgatgattaatgaagtttggcttctgggagaaagttttcccacattccttacactcatagggtttctcgccagtatgtatcctctgatgtacttttagagctgacctatcaccaaaggctttctgacattcattacatccatagggtttctctcctgtgtgtgttctctgatgtacatgaagatttgacttctcacagaagttttttccacattcattacattcataggttttgtcccgtgtgtgttctttgatgtactgcaaggcatgacctatatccaaaagttttcccacattcagtgcattcatagggtttctctcctctgtgtatcctctgctgtaggataaaagaggatttatggctgaaggttttcccacattcactacattcatagagtttttcttctgtatctgttttctgatatacagaatgctttggcttacagcaaaatgtactagcatactgattaattttataggcattctttcctatatgtgtttcttgatgttgagtgaaatttggcttcttgcagaatacttccaaatgtctactacagtcaagttttctctcctctgtaactttgtagaatgaggagtgatttcttgccaaaactattctcactcgcattacactcatagtatttcatctccataaccctgtggtgtttatttacaggtggcctctcaccagacctcctctcacattcattgaattcatggtgactcttccttatgtgagttctctgatgaacaatgaatattggtctatcggaaaaggctctcacatgttcattatattcacagggtctcccatgagcacactctcttatgggtactgcaggctgcctcttcatgaaaagccttcccacactgattgtattcaaaacactgcttaagagtttgaatatactgatgcctaaataagtcctcattctgagagacggctttcccatttccatcatattccaaaggtttccctctggcataaggattctcacgcttcatacagaggagaaatttcccacgtacattacactcagcagggttccttacaaaggagcttctattactaataattaattctgaaatattattcaaattcattccagatgagtcacagttgccacgtatttttcttgatagaatggggtttgtgtcaagagaaaatgtttttcctaatacaccatttctgtccatagtcagtgttttattgttgacaaaatcaactttctgcaaatgctggtcttgattttcctgtctcttctccatcaggtcatcatctatgcagcagtctagaaataataataagttatcacagattataaatgttaacatatttttcatgaaaaagagacatattcacatgctttttttttctttttttttttggcacagtgtctggctctgtcacccaggctggattgtgcagtggtgtgatcatggctcactgcagcctcaacctcccaggctcaggtgatgctcccacctcagcttctcgagtaaatgggattacaagtatgtaccaccatgcctggctaattttttgtattttttgtagagatggagttttttgccttgttactcaggctggtgtcaaactcctgttgcccaggctgtaatgcagtggcagcatcacagctcactgcagccttgacctcctgggctcaagaaatccacctgcctcggctcccaaagtgctgagattacaggcatgagacactgcacccggcccaggctgttcttataacaggatcatatgcatacctttattcatctagaatatcatcatctaactcatagtctgagatttcacttatgcgatcaattatactgtaattattagagtctacagtggttctgcttcatcttctgatttgcctaataattgtgaagagtcttcctcttgtcaattttctactctttgcaattaatggaagaaaataaaagctctgaactctcaactgtgcccattgaattattaaaaaaaaaaaagagagagagagagaggtgggcgcagtggctcacgcctgtaatcccagcactttggaaggccaaggaaggtggatcacctgaagtcaagcgttccagaccagcctggccaacatggcaaaaccccatctctactaaaaatacaaaaattagccaggtgtggtggtgtgcatctgtaatcccagctactcgggaggctgaggcaggagaatcgcttgaacccgtgaggcagaggttgcagtgagccgagatcatgccactgcattccagcctgggtgacagagtaagactccatttcaaaaaataaaaaaataataataaaaagtggccaggtgcggtggctcacgcttgtaatcccagcactttgggaggctgatgggggtggatcacgaggtcaggagctcgagaccagcctggccaacatggtgaaaccctgtctctactcaaaatacaaaaatgagctgggtgtggtggtgcgcacctgtaatcccagctactcaggaggctgcagcaggagaatggcttgaacctgggaggtggagcttgcagtgagcctagattgtgccactgcactccagcctgggcaagagagcaagactccatctcaaaaaaaagaaaagaaagaaaagaaaagaaaagaaaagaaagaaggaaggaaggaaggaagcaaggaagaaagaaagaaaagaaagaaagaaagaaagaaagaaagaaagaaagaaagaaagaaagaaagaaagaaagaaagaaagaaagaaagagagtcaggtgcagtggttcacacctgtaatcccagcactttgggaggccgaggcaggaggatcacctgaggtcaggagtttgaaaccagccttgccaacacggcaaaccccgtctctagtaacaatacaaaaaaataaaaaatagccaggacacagtggtgggtgcctgtagtcccagctactcgggtggctgaggcagtagagtcacttgaacccgagaggcggaggttgcagtgagatgagatcacaccactccagtccagcctgggcaacagagtgagactccatctcaaaatgaaatgaataaataaaataaaaacaacaaaaaaaagaaagaaactacaaataaggtttctccaggcttcttttatatttttgtcacaagtaatgcttcaagcagctcaataagaaaattgaaggatgatgtaatagtgacagtgttctttactattctattatccttacaagcaattccatcattcttttctattttagtttattttaccacagttggacataattgatgagtaatgttgaaataattgctaagaaataacataccaaaatgtttcaaacttaagaaaaatagatcactaaaatagtatcatgcttcttagattataaatgggaccaattcactcaaatgataacagcaaaaacagaatgagtttcattcaattaaaaaataaaagtaggccaggtacagtggatcaagcctctaaaccagcactctgggaggcagaggtggaagaattgcttaaggtcaggagttcaagaccagtctgagcaacacagcaagacctcatcagtacaaatttatatatatatacacacatatatatgtgtatatatgtgtgtatatatatatacacacatacatacatacatatattcacacacacacacaaatatatatatatataaattttctctttgtttatctaagttagaaaaaaaatttttttgagataggatcaaaagagatcggctactgcactccagcctggaagacaaagcgagactccatctcattaaaaaaaaaaagaaaaaagaaaaaagaactgcatcaaaaataaactcaaaagctaaatttgggtccactgagaggtaacattctattttgtttattatttggaccatatatcatttatattccttttatattctaaggtttcatgttcacatttcatatatgattctcaaactccatatagcttgatttttgttttgtttttacagacaggctcttactctgtcatccagactggaatgcagtggcatgatcatagctcactgcagcttcaaactcctgggctcaagcgatcctcccacttcagcctcccaaaactgagactactggtgtatgaccatgcctggctaattttttttttatttatttttgagacagagtttcgctctcgttgcccaagctggagtgcaatggcgcaatctcagcttaccacaacctccccctcctgggttcaagtgattctcctgcctcagcctcccgagtagcgggattacaggcatgtgccaccacgcccggctaattttgtatttttagtagagaaggggtttttccatgttggtcaggctggtctcgaactctcaacctcaggtgatccacacgccttggccttccaaagtgctgggattctaggcatgagccaccgcgcctggcctaattttttattttttgtacagatgggtcctcattgtgctgcctgggctggtctcaaactcttgacctcaagcaatcctcttgggttggtctcccgaagtgctgggattacagcagtgagccactgcactgagcctatataacttggtttttgaaaatccaatttgacaatatccatcttttaataagatggtttagcccctttaactgtattatgatttctaaaatatctggattggttttctctttttcacttaagagtttccagtttttctaatttttacctgcctttccccactttttcattttttttttttcttttcgagatggagtctcgctcttgtcacccaggctgaagtacaatagtgcgatctctgctcactccaacgtctgctgccccagttcaagcttctcctgcctcagcttcctgaatagctgggattacaggcatccgccaccacacccggctr

SEQ ID NO: 6994 - DNA, 12646 bp, Homo sapiens
  misc_feature (1)...(12646): n = A,T,C or G, or insertion/deletion polymorphism (see Tables 1-2)
aggctcaagcgattcttctgcctcagcctcccgagtagctgggactacaggtgcgagccaccacgcccagctaatttttgtatttttagtagagacagggtgtcaccatattggccaggctggtctcgaactcctagacctcgtgatctgcccaccttggcctcccaaagtgctgggattacaggtgtgaaccactgcgcccggccttacctgttaaattaatgttagtggaaacacattgccaaactcaatttttcaagtacatgtatcttcaaaatacaaatatacttcaaagctactgtactttgaaatatgttatcttcaaaaatgacattatcactaagaatataggaagccttaagaattgaatatggtggttcaaaattagtatttttcctctttgtaggggaaatcacccaaaagtaacaatcagaactgttaccacctgactggttcttgcccactgcacagataaaaccaaaacactgagccagcaggagttgcagcagagaaagagtttgattattgcaaggcaatagagtgaggaggacgggatacatttcccagatccacctcaccaagaattcagaggctaaggtttttaaggatgatttggcaggtagggcattaggaaacagatgttgtggattggttgggggatgaaatcataggagtgttgaaactgtcttcatgtgctgagtcatttcctgcaggggagtggtcagaggaccggttgagtcagttcctttgttgcagtcacggtcactgttcaagctggtgtcagttgattcacctgaaggcaaagtctgaaaaatatctcagagatcagtctcaggtttcacaatagcgcttgtgactgcctgttacataactcctgagcaataagcaattatagaaaagcaaacaagagaacaatgatgggctatcattcaactacgcctacagcttaagaggtgagctccctggtgattgaaactgcttgcactcctcagttgatccaacttctggaaaatacaaaggcagtctgcatgacttaaagatcattggttctttttctttttttttttttttttgagacagagtnnnnnnnnnnnnnnnnnnnnnnnnnnnnnnnnnnnnnnnnnnnnnnnnnnnnnnnnnnnnnnnnnnnnnnnnnnnnnnnnnnnnnnnnnnnnnnnnnnnnnnnnnnnnnnnnnnnnnnnnnnnnnnnnnnnnnnnnnnnnnnnnnnnnnnnnnnnnnnnnnnnnnnnnnnnnnnnnnnnnnnnnnnnnnnnnnnnnnnnnnnnnnnnnnnnnnnnnnnnnnnnnnnnnnnnnnnnnnnnnnnnnnnnnnnnnnnnnnnnnnnnnnnnnnnnnnnnnnnnnnnnnnnnnnnnnnnnnnnnnnnnnnnnnnnnnnnnnnnnnnnnnnnnnnnnnnnnnnnnnnnnnnnnnnnnnnnnnnnnnnnnnnnnnnnnnnnnnnnnnnnnnnnnnnnnnnnnnnnnnnnnnnnnnnnnnnnnnnnnnnnnnnnnnnnnnnnnnatcacaaaaaaaaaaaaggactatgttacgtaatcatgcctggtagatgaaaatgtcaaaggggaaagaaagtaagtgtaacaaacatctattagctgtgcctctattttaacaaaatttaggcctctctaaattacaaagtaagtggaatggttgagtgtgggagggcattaggggtgcagattttagaagtattttattagatttagggtttgggattagattagatgaggggtaataaatgattgctagggagaatgactggatcagggaacagaaattaacttgtaggtagttctctttggaatttaaatgatccttggagagagtcagtcattatcttgaaaaagggtctgtttaggtgtggttacattttcggtcttacagatgttaccaaaacacccaagattcagtctaggtcctgttgctcccctcacagaaagccaatcattaagacaatgagtattgccagggaagaaggctgtaatccagtgctgcagcagaggagatgggagatcagtcccaaatccaactccctgactgtctaaaatttgggatttgtatagcagggaagaaatgtaactatgtgtggaaaaacgggaattttagggaggggtaaggaagagaaaggggtcaacaggaagcaggcagtcatgattggtgaggcgtctggctccctttgtccagatgtgatgatctggtaagtttcagctccttgatactgtctgggaggactgatggtttcttttctgagaaagcaactcagataagacagatgtaattttctcaagttttaagaccaggaggataaatttctatgtttattaaaaagaaccataaacatcacctctacaggacaattgggcaggtttcccagggaagggaagaaaactattgttctccttggtgggtctggagcttaggcaggtaaaggaacttgagcctctttggaagagctggtgaggggtgggtagatcagagagaccttgagtcttcttagttcaggatgtaaacatgccatattttggggaattggtttctaagcctcaacattacagacaggaatgaaaaccgaccttgtctggaggagaactttccaagtttggtacagaggactcccacagattatgatgaagccatcaactcacaaactggattaccaaacacacaagaaggcaatcactgtgagagtcagcagaaacaactgatttagatttctcaaatatttctagtattagaattataattacatatatacgacataaaacagctgtgtatgaagtgtttaaagaagtatataatttaaaaagtgagccttcaactagaaacaggaatgaacagaaacattttggaaacaatccaaaaagaaccaggaattaaaaatataatggggtgactcacatctgtaatcccagcactttgggaggctaaggcgtgtggatcctttgagatcaggagtttgagaccagcccagtcaacatggcaaaaccccgtcactacaaaaatacaaaaattagccaggcatgatggcacatgcctgtaatcccaccactttgggaggccgaagggtggatcatttgcggtctggaattcaagacaagcctggccaacatgatgaaaccccatccctactaaaaagacaaaaattagtcaggtgtggcagtgtgcgccttataatcccagctgcttgggaggctgaggcaggaggttgcagtgagccgagatcgcaccactgcactccagcctggccacagagcgagacttcgtctcaaaacaaaaaaaaaaaaaatgaggtcggggatggggaagtggtggtaggaactcagtggagggatgaactagcagattagataactcaagtgagaatttgtgaaccagaaaatatatctaaataactgatccagaatgcacagggagaaacaaggaaatggaaaatatgaaaaaaaggttaaaagatatgtaagataggatgagaatgagacaggatagttcatagttcaaggtcaagtcttgaccttgaccccctttgtgggcaggaactggagtggcttgtttcactcagcctgcagtccgtggatggctaagtgttaacagcccaggctgacagccttctgcacctgcccttcttgacacccgaattcttattcagagtccaggaagaatcaggtcacataaactttttgaagggtagtgtatatggaagattttactgtgtgataaaagtggctctcagcaggatggggaattggaaaggggatggtatgggaagaaactgctctttctctgaagccgtgtctatctgtagtttccgatgctcagctgcatgtattcctgatgctcagcagcttgtatccccgaccacttgcatcagctgctgaggttgctctttttcttccttttgttctgctagctggtctggtatttataggcatatgacagggggtggagcgggccaaaaaagcaatcatttgggtggaaaaaatggggtcagctgtttcacttaggactgaggttccaggcttgagggtgaagtttagcctggagcccagcagttctgcatcaagaagatttaacatacacttagtttcaattagaaagatagtgagaaaagagtagaggcaatgtgtaaagagataatggctgtgaatttcccagaactggtgagaagcatatacccacagatcttgaaagcaaagaaaaaaaaaaataaggaaacagggaaacaaatttaaaatataatttttaaaaaattgcagagaaaaaggaaacgagtctaaaaatgtaaaatggcatattactaaaaaagattccaagtagtcaagagcaatctatgtcctgataaaattattagatttcaaaaagaattatttaaaagccagagaataaatcacttataatgagaaaaacaggctgatttcagatttctccacagcatttgttcttagaagacattatgtatacataccaataaaatcctccagcaaagagatgtgacccaggaattttgtatgcagtcaaactgttgcttaaatataaaggtaggtggtgtggtgcctcacgtctctaattctagcactttgggaggctgaggcaggaggattccttgatcccaggagttcaagaccagcctgggcaacatggtgacaccttgtccctaataaaaataaaattaaaaaaaaatttagccaggcatgatgatgcatgcctacagttccagctacctgggaggctgaggtgggaggatcgcttgagtgcaggagattgaggctgtggtgagccatggttgcaccaccacactccagcctaggtgacacagtgagaccctgtctcaaaacaagacaaaacaaacacacacacatatatatatttgtttatatacatacatatgtatgtatgtatataaagccaaagagttttgaaaacacaacatcttaagggtattgtttgtattaactcacatgaagaatccaccaatggacaaatgttgtcaaaccagagatgactagaaagcactgggtagatagcataagcgctgctggtaaattggcttaaaactaaaataaatgtgggattgttgttattaaacagaacaaatataaacattaagaaacataatataattaacaaaaattgagaagttgtagagagaaaaaggaggtggaaggaagaagaaagctactaatttaattattagcaattatcagaatagggcattgataatagtggttaaagaaagaagatcagggccgggcacagtggctcatgactgtaatcccagaactttgggaggccgaggcaggtagatcacaaggtcaggagatggagaccatcacggccaacatggtaaaccccgtctctaccaaatacaaaaattagctgggcctggtggtgtggcacacacctgtaatcccagctactcaggagcgtgaggcaggagaatcgcttgaacctgggaggaggaggttgcagtgagccaagatcgcgacactgccctccagcctgggtgacagagcgagactccatctcaaagaaaaaaaaaaaagaaagaagatcagacatttgacaaaatacaaacatgcataattatcagaagaaatggacatacaacaaaaacatctcacatacgaaaacatctcacatacgaaaatatttttaaccttgaaaccatgaattataacatgaaataacatgatatagtcatgaccaaacatgtctttcatatcaaaaattttaaacaattgtaataattgtaaatgagtttaattcatctagtaaaaggggaaaaagtcagatagaaccacaaataaaaaataattcaataccataaaaacaaagacaaacctaaaactaatagattcagaaggacagaaaatgaagagaaaaaaagataaatgggcaaacctgtactaggctaatgcaaacgaaagtaattgttatcttaatttcaaatatggagaaaacgaaactactggggaaagggagggtccactgagaaccatcccagtaactcaaccacggctggtcttcgctggacaccatgaaycacactgtccaaaccttcttctctcctgtcaacagcggccagccccccaactatgagatgctcaaggaggagcacaaggtggctgtgctgggggtgccccacaaccctgctcccccaacgtccaccgtgatccacatccgcagcaagacctccgtgccccaccatgtcgtctggtccctgttcaacaccctcttcatgracccctgctgcctgggcttcatarcatttgcctactccgtgaagtctagggacaggaagatggttggcaacgtgactggggcccaggcctatgcctccaccaccaagtgcctgaacatctgggccctgattttgggcatcctcatgaccattctgctcatcatcatcccagtattaatcttccaagcccatmgatagatcaggagacatcactgaggccaggagatctacccatgacctgtatcctttgtactccaccttccattcctcgccctgctcccggagccaagtcctgtatcagccctttatcctcacacacttttttacgacggcattcaataaagtgtacgtgtttctggtaaaataaataaataaataaattcaaatatgactgagtttgggggaataagtgctaaataagacacagacactttatatgctaaaggttgaaattcacaaaaataacagttatgaatatctatttacaaataacatggcattgatataagcatagcccttaaagcaaaagttaaggtgttggaggccatgggctgttgaccccctaaaggtttgctaaaaaatcaccgacatgaagcagattgacgaatagaagaaaaagcgtacaaatttatttaacatgtatacacaggagccttcagaatgcggacccaatttcccaataagtaacagaagcttatataccaccttgaaattgcagaaacaatgcggactcagagtatgtccaaaaacaggatttagtggcaaggcaggttatgggaggaagaaaggaaggaagaggctttgctagcaatggtggccttgttgtacagagaagcctccctcagagggaatacatggtaaaagtttatttccacacctttaaaggtgccagactgccagtctctcctggatcgggaaaggaatagaaaagagaggcagggctgcattagtggagattctgtacagatgcaaattttccccacaaaggacagctttgctaggccacttccgttttctgaccaaggggcagccatttcaaaatatgtcaaagaaatatatttggggctaaaatattttaatttccttcaaggtctacaacagaaaagtagagagaaatacattaatggtgggatactttaactcttctcaaaagtatgcagaaagccaaacaagggtatagtgaatttataattagtaaggtagatatatgtcaaattctgtgcttctgaaaacagaaaatacatatttttatatttccaataaaaaaaccttcaataaatttcaaaaagataaaacagtacagctgggcacactagctcaagcctgtaatcccagcactttgggaggccaaggcaggtggattgcctgaggtcaggagtttgagactagcctggccaacatggtgaaaccccgtctctactaagaatacaaaaattagccaggcaaagtagaaggcacctgtaatcccagctactccggaggcgaaggcaggagaattgtttgaacctgggaggtggaggttgcagggagccgagatagcaccactgcactccagtctgggtgacagagagagactctgtctcaaaaagagagaaaaaaaaaaaaaaaggataaaacagtacagacaactttatctagtaccaaggcaataaaactagaagacaataatataaggaggaaaccaaagcccctacgtatttggaaataaaatatcttggttttaaatagctctcgggcccaagaggaaaatccaaatgaaattgcagaccatctaaaaagtaatgataacaaaaatattgcacatcagactctatatgatactgctgaagcagtgttcaaacattgtattttaaatatctttattacaagttatgaacaatgaaataaatttctgaaattcttttctacacttatcttaaagaatattatatagaattactataatcacctgttgactccttccagcccactgcacagacaaaaatcgatttactgagacctcagcattgcagtagagaaaaatttgacacaaggccaggcacacagaagatggtgttactcctcaagtcagtttccttgaaggctcagagattagggtttttaatggacaatttggtgggcagggagctagggaatgggtactgctgagtgatcagggaggaaatcacaggggtgtggaaaatagtccttgtgcacttagtccacttctggtggagccacaggaccagctgagtcatgagtcacgagtccaggtggagtcagtctgagaaaatctcaaaaaaaaaaaaaaaaaaaaatctcaggttttacagtagtggtgttatctataggagcaattggagaagtcacaaatcctgtgacctctggccacaggactcctgagcaataagagattgtagaaactatgcctacattttagcagaactcaggcccctcccataaccctaatcttatggcctttcattagttttaaaaaggcagtttcagcccctgaacagggagggaattcattttagggaaggattattataatctttgcttcaaagccaaactatatatttttatttttgagacagagtctcactctgttgcccctgagctggagtgtagtggggcaatcttggctcactgcaacctctgcctcctgagttaaagcgattctcctgcctcagcctcccaagtagctgggattacaggcacccaccactgtacccggctcattttttgtattttttgtagagatggggtttcaccatgttggccaggctggtcttgaactcctgacctcaggtgatttccccgccttggcctcccaaagtgctgggattacaggcatgaaccaccgcacctggcccgaagttaaactattgacaactacattcctcccagagttagcttggtctgtgcccaggtatgaccaagaacagcttggaggtaagaagcaggatggagtcaattacatcagatttcttttactgtcataattttgcaggggcagcttcattacaaatgcagaacttagtaataaaagtcatattgttggctgggcgcagtggcttatgcctgtaatcccagcactttgggaggccgaggcggctggatcacgaggtcaggagttcgagaccatcctggctaacatggtgaaaccccgtctctactaaatgtacaaaaaattagccgggcgtgatggcgggtgcctgtagtcccagctacttgggaggctgaggcaggagaatggtgtgaacccgggagacggagcttgcagtgagccgagattgcaccactgcactccggcctgggcgacagagcgagactccgtctcaaaaaaaaaaaaaagtcatattgttagatatgaattctaaacttgttttcaaagaatatgtcagtatgttcaattatttaccttctacttttaaacttcctcataaagcaacctttttcaattacctgctccaccctgactcattttgatcacctgctccaacctgactcatttcaatcacctgctccaacctgactcatttcaatcacctgctccaccctgacgcgttctgattacctgctccaccctgattcattcccattacctgctccaccttgactcattcccatgacctgctccaccctgactcattcccattacctgctctgtcataaccatttttcccgccaaaccactcaccccatcactctctttaaattggccaatcggaattagtttagcctgggcggtctaaccctagccaataggggaatgacacagcagcaggggccacctgaatcagggataagaaccccctccccttccttgtccaagtgtgtgctcaccattgctccatctgtaagggcgcacccttctatagaagtaccttgccttgctgagaattaaaaagaaaattttatattcgagtgctatttcttttgcggcactgaaactttatatataacaatattaataaacaaagcaaggccgggcgcagtgactcacgcctgtaatcccagcactttgggaggccgaggtgggtggatcacgaggtcaggagatcgagaccatcctggctaacatggtgaaacgccgtctctactaaaaaaatacaaaaaaattagccgggcgtggtgacgggcgcctgtagtcccagctactcgggagctgaggcagaagaatggcgtgaacccgggaggcggagcttgcagtgagccgagatcacgccactgcactccagcctgggcgacagagcgagactctatctcaaaaaaaaaaaaaaaaaaaagaaacaaagcaaaaaatttgactgggcatggtggcacacgcctgtaattccagcatttggggaagccgaggcgggtaaattgcttgagcccaggagtttgagagcaacctgggcaacatggcgaaaccctgtctctacaaaaaaattagcctggcgtggtggcaagcgcaggtagaaccagctactgggaaggctaaggtggaagaatcacgtgagcctgggaagttgaggctgcagtgagccatgattgcaccactacactccagcttaggtgacagagcaagactctgtctcaaaaaaaaaaaaaaaaaaaggaagaaacaaaacaaaaaatgtaaaaataaatactttaataatatgccataatgacatgtatactgatccggatttgtatctagggattgtactgtgggagtccaaaaacctgctgcatgtgtaaaatagttatactatttaataagcaaaagtcactagcagcaaaattatccaaaaatcagtggagttctaggaataaagtatctcttgtggtgccaaagcaaaaatgcaagtctagacctcagcaaggcaagactttatcaaaggaggctatgacaataggaagacactcaaagcctaagctagaaacctctcagggaaggggtgtgtgagcagaaactgtggcaaaggcagctgtggaaagagaaaagagaaaagggtgtattcagtttgctaggggaagtcttgaacttaatgaactgtgtcaaaaaagaaaaggaaggacaaggcagcacagtttagttggtggataggtatatggagtggggtttgggtctgagagagagcaaacaagttacaatgcagaaagtttgcataaagctgagggcctagctgtccttgtcaaagcagactgaagttacatgaagcactaagtttaaccatccctgttactggctatctgtgcacacttaaatgattttggcttttaagcagatataaattgcatatattccaagtcatgttgacacaaacgtatcttagaatctggctctacaaatattcaaagtaggtcacatccacaggtgaacaaatcgtaaggcagctggaaaacttcactgtattagttaataagagaataggccaggtgcagtggctcactcctataatcccagcactttgggaggccaaggtgggtaaatcacttgaggtcaggagctcaagatcagcctggccaacatggtgaaatcttgtctctactaaaaaagtaggtgaggaccgggcacggtggcttatgcctgtaatcccagcactttgggaggctgaggtgggtggatcacgcagtaaggagatggagaccatcctggctaacatgctgaaaccccgcctctactaaaaatacaaaaattagccaggcatggtggcacatgcctctaatcccagctactcaggaggctgaggcaggagaatcgcttgaacgcgggaggcagagcttgcagtgagccgagatcgtgccactgcactccagcctgggcgacagaggagactctgtctcaaaaaaacaaacaaacaaacaaacaaaaaacagctggacatggtggcaggcacctgtaatccccgttactcacaagtctgaggcaggaaaatcacttgaacccaggagacggagattgcagtgagccaagatcgtgccactgcactccagagcgagactccatcaagaaagaaagaagatgaaggaaggaaggaaggaaggaagtaaggaaggaaagaaagaaggaaggaagggaaagaaagaaagaaggaaagcatcaaaatgaatgaagttaaagatcagccaaacaaagctaagaaagcaaagaaattgaaaaaataaaaatagaaactacttaattagaaaaaaagtagaattaaatatataatccaagagctggttacttgaaaaataaaaaagataggcttttagctaagttaactaggaaaaacagctaaaatatacttgatgcaataatttggaaattctagataaaatggattatttttaaagaaagtatgacttgccaaaactgatcttaaaaaaaaaaacagaaaatctaaataagcaaataattaccataaaagaagtataaagagctattccac

SEQ ID NO: 6995 - DNA, 31162 bp, Homo sapiens
ctctatgaaatcatgtcctttgaccccttttgttgctttctaagcactttttatttattaaggatattacttcatcttttcctatttcttttgatgctaaaagttttttcctactgattaccaatttgccttttcattaatgatttttaacatatagaagtttaaatttgtatttaacaaaatacatcaactcctattatgtattatttctttgcgtttaatctttttttttttttttgaaacaaagtttcactcttgttgcccaggctggagtgccatggcacgatctcggctcaccaccacctccgcctcccgggttcaagagattctcctgcctcagccttctgagtagccgggattacaggcatgtgccactgtgccggctaatttttgtatttttagtagacacggggtttcaccatgttggtcaggctggtctcgaactcccgacctcacgtgatccaccctcctcggcctcccaagtgctgggattacaggcatgagccagcgcgcctggcctgcctttaatccttttttaaaaaaattataaatttagggggtgcaagtgtagttttgttacatggatatattgtgtagtggtgaagtctgggcttttggtgtaaccatcacccgaatagtgtgcaatgcactcgttaagtattgcatcatccctcccttcctcctacacccccacccttctcagtctcccatgtctatcattccacactttatgtccatgagtacatattatttagcccccacttataagtgaaaacatgcggtatttgactttctgagttattttactcaagataatggcctccaacccatccatgttgctgcaaaagacatgatttcattctttaaatatcctttcctgycttgagatcaaggaaatattgcctacatcttccccttaacattttctttttaatatttaactcttcaatacatttgggacttacttttatgtatgatgtgaggtaagacacagccttgatattttctaaatatttacccaaatttacccaaggctttctgttgaataattaacagaattaacagaatctcccctatttgagtatgtgatatccttcaaatgtctggcacatttttttttggcattttccaaggatcaaatcttcgatttatttttttattcccactgttttctaatttattattttatcttttctttattgcttttctcctgatttccttaggatacttattaagtttagtgctcaataatatacttttattctttctgattaaaaaatgaaagtatttagaaatggaactttactttgtgtaatgcatccagtaagttttgctctgtactcatcttttaaaattgcgtatttgatttcaatgggaatttagaataatattcttaaaattgcctgtaattgttttttttaaaaaaaagctttcataatttcattattaatattgctctgggatcagaggatgtgacctgtaaaatgctaacattaagctctaattcctccagattctgctgtctgtagggacgggtcatgactaagtgacactttcacaccaaggtcataaagctattagggggttcctggttgaacggagaggtaggacacacagaatttacttcaaaaggaacggaaaagtaggcaacagggttaacatggagctcagagttcagagggaaccagggccagcaacagagaagtaaatgaagaagcagaggatctaagaatgaggatatagctacaaggggtcaagggtaaggctgcccaaataccgggtgagaggccagagacgggaatgcataagagcaaaaggactgggcaggctcatgtgttggtgctaagtctggtgggccactgaggtgctttcctgccctggggcctcgcctcttcagaggccagggaagcagcacactgaagagtgaatcaggaagcctaatataaatttgaccataccttctgtgtcctagagcataccacttttctctatgttgtaaagcgaggagactagactagatcatttgtgaggtcttttgtagctctaaagatgtgtgagtctatgcttatagcactgtagccttcattcatgaaagagtaggcatgtggaatctggggagcggggaggctggtctgcagatggctgaatggttgggggaagggtgactcctgctaagaaaacttcccattgtctcaaactagactgctcatttggtcccgtgccaggcaccctggctctaatgacatgtacttcttcagactctctccagtcacctataatatcttgattgccattagaattgtatctggcccatgagtggcctacatcccatgtttcagcctagagcagattttcctggctatggaggggagatgatctaggaggctcttccagatgattcccaactccacaaaaaccactctgattaagaagggaaaagtgagtagccagtgcctggttgtcacttggagaatgaattgattggattcagaatagagaatcaggtttctaagcttgtaactgccagttattattgtatgtttacacatcaagtaggtaaatctgtttcatcatctgttaaaataggattgaggatgcaaaaagacttcctggatgattttaagaattatgtgagataatgtgtatgagcatgtctccaatgcttctgccaaggaatagctaagtaaagagcacagacatcaaatgtcagagctggaagagctcttacttagatctaggaaaagaacacgtgtttaactgctaaggaaactcaggtcccgtgaggatgtcacctgccccaagaagactttgatggacatctaggatattaggtaggacacggacagtgtgtacaaacatgagtgtgcacactcccaagtgaacatgggtttatttgcatatgtatatgtatatgtaaatgaaagagcacaggatgcacaggttatagctgttggaagatatggagggacagctggaggggcttgccaaattgcttagagctggctttgcttaaatgatccaaaccctttggtttttactaacactctcctttatccaaaagaatagggctggttaaatgataattaataataggctgatgattcactttagttaaatgcacacattataagtgcatgtgccatgtgaataattcacatttgaatatttaaaaatatgctcctaacacagaaaagcattaaaattggaagcatcacacacaagtacattatttgacagttctttttgactctcaaccttgaaaattcagctgatccttaattagattaccaactcttcaacctggattgattggaataaccttaatttggttccacactaatctgagggttgggggtactccagagagatacgtagtccaactcctctttttacagatgaggagactgaggctggcagaggttaagtgacttaaccaaggtcacatcttttgtcagtggtggggctaggatttaggatgtggatttcagatttgcagggatgtccttgacatgcacactagcaaacattcgagcatggaccctctccttttggagtggtaacccccttttggtaatcctcaatcctcctgggattatctctcatcccagagcagtggaaactcttcctttctaggaattggcacagctagtcagcagcccaccctccccatgtgtttataaaatcaccctggatctccccggtcctggaacatcaaggagaagggtctactccatgccaggcctcatcttcaacagcttgacatctgattttaatcctcaaatgaacactaagatgtaggttttatattctccacgtaagagataaagaaaaccaaggtgagggaggtgaagtgatttgaagcttgtaagtggcagagctgggattccaggctcaggcttcctctctccctccccgacttccccaggactggtgagtggccatgaggaagccagctccctctttttagtatcagctctgcctagtatctgctgcaaacctgcaacagtcttgcccagaatttcccagagtgtattccctggaacgcacgatcttcaaagggttgagaggtttatgtacacaaaaactggcagatacatttaggaaaagtgggttaaagaagttaatcagggttcttaactgtgccttttctatccttaagtaaattgagactcttcaaaatggaattaaatatacagtttcctggtctcattgacaatgcgactcttttatcattgagcttcctacaaaatgaatattccatggaacatacccagggaaatgcttgtttagccatttagaaaatagctgtgatgaaatctgctccaaataaaaacagtgacagtgtatatttacacactcagaagccttttcctgttgaatgagctgcaagaagtcatctccttcctcccaaagatggagatctactgggaggtccctaaagaaggggtgtgtgctaaattgcttgaccaggtagagagcctactgaggagcctgactcccagaggtcacatcaacgaatccacactaacaaaatggtcttgagttgctccttatatggagacagaccgtttaatgtatccactaggatgagattctttccacctgcgtatcctttgctatccaacctctctagaatgaggtggggtacaaatagttaagctaaaaataagatgaattatcacatgcatatatttccaaagtactgtatgttccatagaaccaatattctatgggatgttaagaaaagtgaaacaattttgaataatttcagagatgtttctatgccaaggtaacttcattgtaaataaccaagcagggatagaacgtgcagtttcccaaatttatttgagcacagaactcttctttcaggtcaactgctccacaggacacaagtttagacaacagtagtctaaggtgtaactttaaagtaaataaggcctttttcttttgcttttttcttttctttctctctatttttgtttaagcaaggagatcagagcttacacatataaatgagagttgcaacctagggaaactagctgctcttgccagcaatgcggccactctttcaaagggcttttgaaactcctttcagtcattgtctccaggaattagggcacattctcctgaaaactcttgttaatggcaaaggttgaccctttgagaggggatttgattttgggaacaaaactatgcaaagtgaagcatgatgattcatgttcaggaggaagtagacagaagtggttaaaagtgaggacatgggtttaaactccaactctgctacttaataggggcgtgacattgaggaggttatcttttaggactcagcgcttcatttgcaaaatggagataattatatctacctcaaaaggttaccatgatgatgacattaaaaatgagatctataggccgggcgtggtggctcacgcctgtaatcccagcacttcgggaggccgaggcgggaggatcacgaggtcagtaaatcgagaccatcctggctaacacggtgaaaccccgtctctactaaaaaaatacaaaaaaattagccgggcgtggtggcgggcgcctgtagtcccagctactcgggaggctgaggcaggagaatggcgtgaacccgggaggcggagcttgcagtgagccgagatcgcgccactgcactccagcctgggggacagagcgagactccgtctcaaaaaaaaaaaaaaaaaaaaaaaaagagatctataaaatgcttagcaccaagcaatacaaaaataactaatgtctctaataaaaccttgcctggttttattgcgtggcttgtaaactggcaatgaagacaattctcaaaggagggtccagaaatctttagccatggaagcacagttgggcaaaatctatggccctctgtgaagtcaagagttatttgtatgtatacattctagtttgtatttttaaagatttattgccttttgatcacattttacacatgcaagcacctgccatcttgctatataaaaatgggcctaacaatttttttccaatccttgctccatgagagggatactgaaacatcattttatcatcaaccaccacagggagagcctggtaaggtccctttggacctgtttgggagattgggaactacaattattgtattaataaccttataacagccagtttcatattatgagtttctttcaatgaacaacctaatgtattggtttgttagaactgattcaataatctttgtccatttcttttttttttttttttttttgagacggaggcttactctgtcgcccaggctggagtgcagtggcgcgatctcggctcactgcaagctccgcctcctgggttcacgccattctcctgcctcagcctcccgagtagctgggactacaggcgcccgccaccacgcatggctaattttgtgtatttttagtagagacggggtttcaccgtattagccaggatgttctccatctcctgacctcgtgatctaccctcctcggcctcccaaagtgctgggattacaggcgtgagccaccgcgccaagccatcgttgtccatttctttaaccatgccatttctatattatattaacgtaactgtttgtagaatacaacagaattttaagataggaggagaccttagatgtaattgaatgcaagggtctcaaaatgccaacttatatttgtttggtctttatcctgtttaaaaatctacttccagaattccaccttcccctaaaaatgaggaagatagggctccatgtgcatgtaccacawtcccatcagcaatagtcagttggagcagaggatttttaggtaagacatgtcttctctggtttacctcagtcaccactactccttattgtcttatactcaactgcttccttcattggtcttaccgccccaaaccccactagcatttgagtttcagaaccacagtttaatctacctctaatattttatgcaataaaagctgaggtccagtgatattttgtgacctacccaaactattaggtagttttgtgacctacccaaactattggatcacgcagcccaatagtggccaaactgagtttcaaacccatgtttcctgatttctagtttaggcctctttctatgctaccatagaaccactcatctgaagactgccaatattaattatttaaacaaaatctggcatgttttacaaaacgtggtgccagtcattttattcatgaggaagaaaggagagggttatgacttttttttgaaaggtaaatagttcatgtttcctgtaagaagtatttaaagaaaagatttctcagcaagttctgctggggaactgtgtgtagaaccacaaaatgtttaaagctgagattatcggcaaacccagattatacaatcagacactaatctgatgttatggtagttccaattaaagtgattttcagatactgtaataaagctaatgtgtattgagttacaggaaccttgcaaagcatttttcatgcattgttttacttaatccttactgtaattctgtgcaataggtactacggttcttcctcattttgtagatatagatatcaagacttgattaagcttgccccaaatcatacaactaggaagaagcagagtggggatttgaacccatgcttatctgcccacaagtctgtgttgtctgcctcattgccagctcaccagggtcagctgttttgatattacagctgatgctgtaaagcccttgcagacattctgtagcccgtattagccacaggatcaacaaccagcaagcatcaccatcatcactaatcaactgaatctcattttgaacaaaatgagaatgcttatcaagactaccttataatacatttaaggaggccaggcacatacccataatcccagcactttggaagggtgaggtgggaggattgtttgaggccaggagttcgagaccagcgtgggcaacatagcaagacctcatctctacttacataaaaataattttttaaatgaaactaatgcattcaaatacaggcaaagtataatttaccatatcaagaatcactaccagcttggagctgccatatcagggtgaaaagtgacagcgtgtcactcatctttgtgtccttcacaaagcccaacattgtacctgctacccagtagagcctcaaaacatgtctgctaaaatgggaggcttttgttttcattttgttgctgcttgcaactatacaataaataaatacttattttggcwaagcagtacttaaatcaaaaaggaaattatctttgtgttattgatttttcttttcatattaataatgcttaactaacatttccctctggatgtccggtcaggctggataaaggagcatcttacccttcccaggacagactagtcggcctctgcagtctgactaaaaaccaaggagaccaaatgtgaagtcagcgtgsgacacaagagattcgagcggtgggtctaaggaaaggcttagatgctttgcctttgaaatctggtatgctggaaatctctgctgaggaagtttgaattcacaacttcatgagcaaatatctcctcgagtttttttagttcggctcacttcccagacctccacaccattagtccacgtgaattcagatagggtgcaccaaacatcagaaagagtgtgaacatgaccagcattatctgctgagagtaacacaggagtcttcagcacaaaatcgatggaaacataaactggattcaacaaatacatgggaaaacatgtctgggtttttctctgggaccacagcttattggtgatcctccatgaaagacacaaggcagatacaagcaccataactctagcaaatggcacacagtgccagacatcagtaaagtctagagaatttgagaatcaacagaggtcatagaatgagatcctgcagaacttgtttgggcacgtgtgtgtgtgtgtgtctgtgtgtgtgtgtgtgtctgtgtgtgtagagtcaatgatgtgagtgataaccttggacaaatagaaagggccaaacactatggatgccagctcaggtgtctggactttctctgtttctagggagtcatgaaagcacggagagctgtgtctcaggaaaggcagcgctaatggagatgggtcagatgggaactgaaagcagacagtgaggcgtggaggctcctgccacagcctgtgaaacagtgaatgaaatgcagcctcagtgaaagcagtggtgctgtggtgaagaggaggaggcagattctcatgctgtcggacaggatgcttgtccaggtggaagtggagagtgaaagagaggggtcaggtaactctgaagtttcttgcctgaataactgaaaggatgaaatacactttcagagaaaacaattgtggtgagtgctagtttgtgcagttacgagaattaattcacttcaagtaacaaacctgtacatggaccctcgaatctaaaataaaatttaaaattatttttaagaaagtaaaaacaaaaagaagtaattaattaaaaagttaaagattagatctatggatcattgggcaaactgtagacaaaacagcctagatgactgaaatttttgctttttggtccatcatgggggcatcagctggatacaaaccaaaacgtgctcacctataaccagctaataattcctccaaaaacacccttggctgataggtttggcttgagtggtcattgaagactgctaaattgtaggcttctaatataaggaggaatagaaaaaggtagcaattgctttaaaggtaaaggaggccatggatattttttcctggacagatcatattttgaaggactaaatgataaagccttagtaaggatggacttattccttcttttgttcatgccttttgcttttccatttgtttttagtttttaatttcttatggatcaggtatttatgtgttgattgtggattaatttttaaaataacgctattcccctcctttgaccctgaaagatcaattctgtctttcaaacaagaccacatccaattggaatactaagaaattttttctggtcatgtcggattcttacgtgcagtgtttttgttttgtgttgttttatttgagcatgatactaaaactaccctggaaatcactccctgaaaatagaacactctcgggaattacaggggtttataattaaaatatgttataagtgggtggcgaagtggccacattttgtcctcttaaatttgaatttcacttccatcatgagcccatatcattggggacttcagtctgtagttgagaaggaacagggctgtaatgtgtgaaaacacatttctctaaactgcattcactaaaagtaccactttctatcactaaaagcaagctagaacgcataatcgttgtcattggttatgtttcgaaactggccctatgtaaaacatgaatgaaattgcatttgcttgggaaaggtttttattgttatgtttaaacccataaatgagatttttaaaaaatgtatattacaactaatctaatgaatttttattgaataattttattctttctctctcttctctacggaatgtgggtttttgtttttcttgttctccaacacaaactgccagccatggcctaccaggatcttttcccaaacactgcatgtaacttcagataccatgtctattttcctcagtaccccagactgacatttcaacaagtacttctcatcatagctttttcagaagctctgaaaaagcatctgggggcatactgacattatcagatttttagggtggatratggaaataggacatttgctttaacccttcccaacaataaagcaagaaaccaacgaactgtcttcctacgtcaatcaagccgaattgattctgaaatttatctcttcacagtgtatgatgggtgagtgtggcaattcacaatcacaaatgctgttggaattcattgcaaacctcaatggcttgtgtgatctaggcctaatctggtggtccaatgccattggtcttcatgttccaaagggggattggcagcccatatggggttttcagggcactggacagccctgtctcacagaagagatctttctctgtgggatccatgcattcccacaattgttatgatcgtttcatagttcatattcagagccttctcatatatttcctacacaccgcacatgagtttattagaccttttcctgaggataggcggaagcagagaatattgggcaagaaggatggagagcagagtcttcaggcacagggtcctggagattagggacaaactttggcccctgacaattttgcataagttcagctctggcacaagtctaccatgttgaggttagccaatctgagttaaccgagaacacactgggagagaattactcgccttttgttatttctgaaacctgaactgcttttagaaataaaggctggaatgttccataggaactcggagcatggggcacgggcatggcacacactcggttgggctatttaaaaaccagtcccttggcttccctctgtgattctaaatacgtgaaatcacattaccctgcagcagccggtaactatttctataacattgtccagcatctgtgcttgccgtgactgggtccacccaacaaaaacaaagtggagatgtggtaattgattaggttaatcactccaggctttctgtgccacagctaatgtccatctagtgtctactgacactactcctggaattttaaggactgatctatgtaactagatctatgtaacttcctaggggaagggaggtgccttagcatatcaaaaggatgctttttaaaagagctatttattcatttaacaagtgagsaccagaaacacaatttatcactttctcagagacagcaaattcttatcctatggaaggatcccagcattagagactctgcccctttctgtgggaaagaatctatcttttttggatttgtttgatgtgctaactaacactycccccagtcacaccactagccatcaatcaaacagataaaccccttaggaatatctagtcaattgctaatcatttgaagacatcagccagtagaagggcattagccaacatcattacataatgtcaaaacaactgatcaagtttgtgaatccaatgaaacagtcaaaccagtttaggaatttcatatacacaaaacaatagatgagtgacttttagctttttagcttgatataaaatttttaaaccctaccatttataaatgtgtaagcatttggcacaccctatgccaagtgttttatctacttaaaccttggaagtatgtgttctcacttccattttaaagataagaagactgaggcttagtgagatatactaatctgcacaagactacatgtttaggttctatgagtggcagggtgaggtttaaacacttgtctctccaacgtccactccakgctgtttgcctctgtgtatgtaacttcaaacagccaaaatggccaagtaaggcaagaaaataaaaaaataaaaaacaaacaagtgaaaggcctgggtcctgaatcatgcagttaagatagccaagactcagctgatccacaattgtctaattctgcccatatccgtccagctacaaaccaagtctgcgacctgatacctgagtcctgggagacctcttgacccccatgtgataccgctgtaaggactaggactccaattgccaaacattacacatcagaacaaattttatgtgttccattatgcctgtgaacagatctgatttcttagtcaaatattatttttttgaatattttcaggcatagactgagtatgtggttcccttgtggccaactcaaaacatatagcagagagtaatcctttgcactatcctatattaatattttctttccctccttgtaatggaactagttataaattagatgagattaaaaaacagtctcttgagaattaacattttaaggaattacctagaaagagctgaggtgttttttttccccacatggtaaatcatacagagtagcagcctgccccagatccccggagacaacatcttgagcgcatatgttatgctgggttctgtattgactaattcaaaaactccagggcaaaagaacccaagttcccaagttaaaaatgaaagtaaaatagtggaatggaattgggatcattgttgcaagattccaacaacttcataaatagccattaaagtagacagcatgacaggttaacagatttaccattgtaagaatcaacctgcactgttggtgtgaagtcgcaaacaaacccatctacctctcactttacggatattctgttttctcagaaatagaatcacatttgacaaaattaatattgagatcattttactagaaggcttatccaaatatatgccatattaaaaatagtcatgatataaatatttctcacaagagctgcagcgatggcgtgaataaaaaactcccttctgagatttcagtaaaaccagatctcacaaaggatctgaaagaaaacaaaaaagagaaaacaaacaaacagacacacacaaagagacacacacacacagaacaaaccttatgttaatccggtttagcataacagtgactattttgacactattttatgaagtacgatactattccttcccagatgaagtaagagaaatgaatcggctacaggtttctcatgataatgttcagggctgggggtatctaagcatgttcagtagcagctaaaaaaatcaaaaattctaaatgcagcaaatgttagcactgtcaaatggccaagcatgcaagaggaatctctctctccatgcccttctacaaatacatgcaaagccccaaatccaccggctggaatttttaaatcgtaaattagatatcaaaatgcttacgggccttacaatgagataacatcaggaggaacggtgcgtggaatggatctggcattctcacataaagcattatctttggtacaagtacrcacggcagggcattttggcttcgctggtttcttcccctcagtcagcaaaagcgcagataagagacataggaaataagcaattcttttcaggggaatgcaggcatttcccatccttttgcttctttctgattccatgcagtcgagaaaatatccccaaccatgaacagggcttctggaattcagatggtgattgtcttgctctaagaacaggtcacataggagtccacccttttcctctgcctctgtatctctgctttttcaaaacagagacctgcagctgattcgtgagcttctcctcgctccagcaatgcactgctcgggggaagagacctgtgaggtactgtgagatgggagggatccaactgctggaggagagagccgacttgcatcaccacgaaaacactgagcacagaccagccttcgaaggcaaagtgaagtgatgtcacagaaaataaacagctttctgctttcaccgggaggccctttaattgttaccaaaaataggacggcattatgtcttattagtgagtgggtgggcgggtgggtgggagcagtcatcttgcataggatgtcggcaatctcagaaacctctgggagtctgcttttcatgtagcaaacaacctagtaagaaaaactagctttggagccagccccggctggaaaaaatgaagctaaatgaaactctctccacaatattgggctaaaaccttttgatgtttcttgctgagcctacctggctaatgccatcagtgaaagacaaatcagaacagatgaagaatgtgactttcaggggatgaatgtgagtacatacttttctgacacttattaactgtcatgaatgattgattttcctatccccctgggtyccccacgtaattcattctctccttccatgacaaggaagggaaacagaagtgcgggaccctctctgtgtataatccacctccctctcttctcccaccctcccttctttggcagtagcaccagaagcctggaaggaactccctgccagcaggaggcggccagctctagcttcctggggctttgaaaaaggcctggctcagccccgaggctgtgacatggtgggggaaatgctggactgagaaccagacacctggctttgagaacgcaggtctgctgtgaacttgctgaatctattctcctgtctgtaaaacggggatgatagtaaagacattctggaattaaatgaaaatgataggctatgttactcgtgtacttgatgtgagcggatgggcccttggaaaagaaaattcatttaaagaagcaatcaagagcccctggccttggggtgggatagtttagtccaagagagtaggaagacccttgggatggaggaagatgaggaaaacagacccccggttatctcactatggcgaaggcggccatccttcaagctggcacgaacagcctgggatatcagtccacgttcctttctcctctagcttcttagactgaaagtattaaaaggactgcttgagcaaaggcgattttgacataacctcattctgcatcagagctgaaagcattgccattctaccctttcgctcatgtagctggccccatgctaacttcaatcccttgttcagttctctgtaaactctttgcgggggacagtgccattcacgtgcattctcacatttgataactgtctgtttaccccagaagattgcaaggtccacgaggttagagaccccgctagggaacccagggcctgtgtagcattgtgcatgtagtgggcaacctggatggctatgccagcaacagcagagtgtacagtccattcatggtcatgcccagccaaataaacttacagttgcaccttgcagttctaataaagagatctaacctagtcaaggaagtcaggggccaattccctgaagtagcagtgattgagctgagttcagaggtaaggaggagttacagagagggttsgtgagaasactccaggtagagggaayggcatacataaagtctggctcatgatctgcagagcaatgggacacctctgtagaatcaggcaggggagtgatattaactggtttgtgtttcaaaaggaccagtaggttattatcactaagtcagtttttgtggggttgtaaatactgtgtgttgttttttacggaagggaaaaagaaaaactcttcgttgacaagaagtcatgattttaaagtgtattctacgaatgcttcactgtcaaggactctgtggaggagggaatggagggcagtgtttttagaaactgtgacctctgcgcaagcctcactttaaacagtaaaagtgtcacttaaaagttggctgcaagtcgggtttttgtaaattgaaccctgcttcaagtgcctagtggaaacttgctccgtaaaataattatgtggtaaaagttttatggaggattgtttttattcaaagtcaccctctaaatcaactgacttgtaaatgatgtgttctgtaactacaaaatgaagacatcgagaagattcagggacctcaaagatcctggattygatccctgcatattacagatggagaaaccgaggtacagagaggacacacagagaccaccactctgcatggggtaagccccatggcagaaacttggttacaatgactaatgtaatccatcaggctaagtcactccctgtgtttcactttcaaatgtttcaaatcatgaagattgcttgactagctgttggctttgtggtatgaagacacagcygaagaaagggtgagcggtctttttcttttgacttggtaaagctaggaaggcaaatgaatgaggggaagaaatcatatccatactattcactttgcagctgtatttatctggcagttcagtttgtcagttcaagggggaaaaggaccwttggggaggggaggggaggagaaactctaaggacaaattacaatgggcattytgaaaagacagtaactttttatttttctatggcatttaaaacccagacttgaattctttattcaattaaaaacacccactaaggtcagrcaaaatttaaccatgtaatgcaggatgctggyggcctttttgggaggagaaaccacttcctggctccagaattggatctraggagagactcggggagatgagggcaggtcgctgcattgaagtcttgagaggcctgaagaggaggccccattgctgataatgcttcccatcttactgctccaggaagccccagggagcacagagatgatgtaggaagcaggaggtggaagcttaggggtttccaccatcttggaggccttcagataaggtgtggccacccacttgtggatcacaatagggaccctggggagaggggcttggaaaggattaaagcagagttggaaggaggcccagggaagccaggaggcctagctgaggcaggctcaatgcccagtctgagctgtagaggagtagctgagctctgcactttgccagccatatgaccatgggccgatttacccttcmtaagtcacaattttctcctctgtaaaacgaggataataatagtatgtatcacatagagttgttgagaaaatgaaacatgataatgtatctaaaagtgcttattgtgcagtctgatacrtgtgaaagatttagtatcatcttcaccgtcatcaccatcattctcatcatggttgcaacaggacttgaattctgaacatgtgacttctgggacctgggaagcaaagctctcaaataaaaatgaggttagctgaagcgtatattcactctgggaagcaggcacttctgagcagtatgacacactgtggccttgtcaagggttccgccatgagaaggaaccaagctgcctcctggaaaaaaaaaaaaatctcaccagtttgggtgagagtaggagcacgcatgcttagcccaaggacaaggtctacaggtggagaagattaaggtggttgtgaatacaggatgaagacttttttcagcctactgcccttgaacacgtgtaagttagaagggagtaagaggaatctcttttgggatccctgtaaaaaagtgggacttctctctaatgtggtgggcaccattgcatggcatgcaggtgctataaggaactatgcacagtggtgacaccagaggctgctgaagaggtgagacaaacaatgctcccatccaggcctgggagtcagactaaagtcatggaatttttcaccagcagcagctcagccttggtggcccagcagcagtgacagccctgcagacatcaaaggcactgggaaaggatcccagcagggaggcagagcagaagagaaggaaaatgagggacaaggaatgatgtttgggagcacatgtacagtgttccctggacatcctcagaaagaccagaagggggttctcgtctgggggcttctggtggttctggaagagctgttgaaagcagagtgagaaaggaacagcatgtgcctggttatgatcccagttttcccctcaggctggtgtggcctaggaaacacacattgtacaagtaaacaaatcactattaggaggcttagaagatcaagcttggccttgcctccttttacaaacactcagacatgcaaactggtgtcattttaagcagctttctcaacagagcagggtttgcaaagctgcgtgtcagatatgatagtggatcgggacatcaatatcaatctagtgagtacaagtagaatttgaaaaataaatcatttcaaatacaaaattggagcatattgcaccagtaaggataactattgccttgtgaagcctttgtttccattctttgtgtgtgtatgaaggcacagctgtgatataaatcatgcttctttcagtttacaaccaaaaaaaaaaaaagaagagaaaagaaaaagaaagggaaaaaaaaactgcatgagaggatgctaaagatcctttcccaacccaggagtccaaaatggcagggaagtgatcttgactccaataaatttcacttactggttgaagttagcaattagacctgtcggaatattgtttctgttcttcactgactgtgtgaacttaggaaagttgattagcttctctgtgcctcatttgcaacaaggaagtaaaaataacaatactatctctgcattgttgatattaggattagtgatgatgtacatggaaagaatgttgcaaaaaaggcactggactactgatagttccactggaaataagtgggaaggggattgagggccaatctttaagattatttrgcagtagtgtgtcattaggactctttggtagcaagtgacagacactgactctgccaacataagtgtaaaaggaccttgttgccatggtgattgagtgactcacagaatccaaggaagggttgaccaagcaggatttagaatgaaggaacttgtgaaagcttgggaatctatgtggcaggagctaatggatgatgccctctggcaaattcagtccaacctgttcttatccttatgttcctccccaaaagatgagtatggtggactgatcttgggtcaggcacccctgcccattgccctgggaaagtggggcaccttgactggcaatctcaccaagagtgcacatggtgggagagaggtggttccacaaaagcaagttgggtactgctgtcagagcagagagaacaggctgggcaggtgaaatccagcgatgctcatttgggtaggagtgctgggctctgatagctaatatcattggcccttgcccctaactcaaccttatggttttaaagagaaatgaccagaagacaatttagacaaatagatatgaatactttctccaaggacagctaaactcgcatgttctaactgtggaatcaggggattttyaccttttatagtccatgagaatagaacttgggccaagaaaggggttgagaagtaataataatgaaagctgactcttataaaatgcgtattatgtgccagctgccattctaaagcactttacccatattaactcacttaatcctcataacaatcccatgggctagatagatattactattatttcccctatattagcagaaaaggaaacagagggtcaggaggttaagtcgtgtgcccagggtcctgtagctagtgaaaggtggtgctggkatcgaaattaggtgtcctggctctgatgtccacagcattagccactgctggacactgcctctctgatgggctgtgtggaatgagggataccgtgagctgcttcggagctggtagcacctcactggctgggcgctactattgtactacaattcccagcatgcaactgggctggctatcatcttaaccccttcttcaccaaaagttcctcactgtcttgggtaaaatcttttttattggcaaaatctgatctccctcatggataattatgcaattgaggcataaatgtagatataagtggcagcagataggggagagggtaagattctaagttaaagtaccctccacattttttagtatttgaaggaagacattggagattactatgggaaagattttttaacttagaaatgtgtactatgaaaacgtcgatggggatgttttaaagcacccattctcaaagttggctacactttcgaatcacctggggaattaaaaaaaatacttaaagtttgggtcacattcctagaggttctgatttaattggtctagggtatggctgttaaaagctccctatgaaattctaragagttccccatgggtataaaacaggaggcacagcttgtcatgcagtgggggcatatggggaagcatcagggctggtcaggggcccragggagcaaggggaaaatgcagacaagagcctttattgtgatttctgcaggaatggtaatgcaagacagggtaaacaggctcaggattggctcctttgaataagttcagtgaactttggggcacagggactgtccctagttgtctgttactggccctggggtgattagagtaggtggatggtggccccgagagacggcccaataaaggaagtgattgggggtatggatactggatcggttggtttgcataggaaaggtgsgcyctcccacgtgagtcatttactgtttctcggaattggctaaccctgggagtggcagtccctccagggtcatcagcacagccccaggtgtcaaagcatcaggatacagaaaatttaaaaacatgttgaatgtatccttccactcttcagcagaaagcagctgaccgggcttaaagagaactgggaagagcttgaagcctggggaaccatcccattaggaatggtggtctgcagggaaggaagcaggagggctagtgaaacaaggagaatttcagccatggctctatttagtttatcaagattccaaacctgtcacggaatgacacccaagcgaatgggaagaaaggcggcaagttctgcctttaaaagcctccttgtagagacctccgcactcccatgtttactgcagcactattcgcaataatcaagatatggaatcaagttagatgtccaacaacagatgaatagatagagaaaatgtagcatatacacaccatggaatactatttagccattaaaaaacagtgaaatcctgccattcatggcaacatggatgttggaactggaggacgttatgttaacggaaataagccaaaaacagagagttaaacaccacatgttctcattcatacgtggaagcttaaaaaagttgatctcataggagtaaaaagtagaacagaggatactagaggctgggaagggtagggggaggtggagggcatacagaaagttttgttaaaggacataaaattacaactagataggaggaataagttctagcgttctataccactgtagaatgacaatagttaacaataatagagtttcaaatagctagaaagaggatattgaatgttcccaacacaaagaaatgataaatatctgagatgatggatatgctgattaccctgatgtatcaaaacatcgctatgtgccccatgcatatgtacacttattatttgtcaattaaaaaataaatatttaagaaagcctccttgaaggcagtacccacaatttatttatctttttatgcccttgattaaatgatcattacctagcagaaacagttaaaatggtcttataaaagagaaaagttagtttagagatgtgggctggtactttgctcttaaaaaatagagtttttcttaatttttattaccaaagttaagtatgctgaatttatacatttctatacctgcctttaaactcaagcagaacctgaattaaccattgattggagtttattgcttatgtccccaagggaagcgcctcctctggctcatgctggtgggagaaaatgaaccagccctgctttctctccctggttcaattcccagcaaaggaaaaacaatgtaattcatgatgatgatgacaatgacaatgacgacaacaacaataaccaacctttaacacatccttataatgtgccagaccctgcggtaggtgcattagaataattacctcatttaattattgtaacatagtttggttaatttgcccccatttttcatatgagcaaactgaggcatggagaggctaggcagcttgcccaagaataggaggctgtgctggcttgaaagtgaggcattcagacattagtgtcacatgctcttaatcgctccacagcaccatctccttggatcggagtgatttcctggagcaaaggtaatctgatcttattcacacaggagcaggcaataactgcctgagtacagaactcctrtgaggcgattggtgttggaaccctgagtagtctagttacataaccagcataacccttggaaaagctgtcgcataagggaaggctgcctctgggactagaagaaagactatgccaagatctggttctgcaatagatgagctgtttgaccttgggctcaacgcttcacatttaggctctgattttcaaaggaagttcttgggctgggtaatctctggagatcctgtcatgtaagcagcccctgccagcactcctactggggagtgattaccataaagacaaggaaagtgttaagcaggttcttgcacctcccaaagtaagtagcaaatagctgtttgggtgtcctgaggagttctgaaaacactgggcctagttgcctcctgcttcatcttgcaccatatgcctgaagctagtgaatgaataaacatcactcgtggctatttctggatgctcaagaaactttgaaaaaaaaaaaagaattattatttttgaggagagtattatagaagacccaggggaagacagggtagggaggagagtgaggattctctttgttgtgatcctagaattcccattaggtggactggaaatgctagacttaccattgttggactggaaatgctaacatcctgaaactcttaggacctctgcatgaagaattgtcctgccccaaatgctcttagcacccccactgagaaggagtaaaagagtttctcacagtggaaacactgcgaacctctttatgcatttttctgaacatcagtcaataatccattaactcggggaagctgaatgctcttcatacaggaatccaaaataaattgacagatatcctctgggaagaactgtagaaaggctctgtgggcttgaacaaggcatttcatttccttgggcctcagtttctttatctttatagcactaacattctatagcttcctaatttctctccccagaaaggagaaataatttttaaacacagaggcttagaaagagtttgttttccaattcggggcatgctaggtacatgtactgcagttaaccaaaatgcacatggtaaagtttaagccaaaagaatgcagaatcaggccgggcatggtggctcatgcctgtaatcccagcactttgggaggctgaggtaggtggatcacaaggtcaggagatmgagaccatcctggctaacacagtgaaaccccgtctctactaaaaatacaaaaaattagctgggcatggtggcgggtgcctgtagttccagctactcaggaggctgaggcaggaaaatggcgtgaacccgggaggcggaggttgcagtaagctgagatcgtgccactgcactccagcctgggccagagagcgagactccatctcaaaaaaaaaaaaaaaaaagaaaaaaaaaagaatgcagaataaaattatcccagaatatttttaataaggtatgatcttaatgacttagcatttttttctggaaatatatttgaattttatcagacctaagcaccaaaaatttaggcaaggtcatggaaggccaccctttttactggctagacttgaatagaaatctactcaagaaaagaagtttgttagggaattaaaaaaaaaggataattctaagtcatgggcaaggtggaaataatctagccagaaaatatatttgggggtggtactaaggaaaagcagtggctctaagaggtattgccctagagyggggcatggttattggaatataaagttgaaaatatgattactcttctatcttcctcttcttctttatggctgaatcactcccaagatagttcttagcaggtttttatttatttatttatttatttatttttatttttgagacagagtctcactgtgtcaccgaggctggagtgcagtggtgtgatttcaactcactgcaacctccgcctcctgggttcaagcgattctcctgccttagcctcccgagtagctaggactacaggcctccaccaccatgcctggctaatatatatattatatatatatatagtatttttagtagagacggggtttcactatgttggccaggctggtctgcagttcctttttttttttttttaaagatacttcttcattctttcgaggaagctattaactgcttttgttttgttttagttttttggtttaagattctgaagttaagaggaaaatcatgcaactaatctgttcatgctttggaaacttgaacttcatgatgttggatttcagcctttttgcttttgtcttatccctttagaagggatctgttttgttttgtttggctttatactgtcgttctggaagaactcagagctttccattgctgcccgtgacttatggcctgtgttacacccattggtttctgtaggaatgatgacccaagaagctgggaatgtgaccgcagaaaatagcaaagcaatgaggaaactggttatgaccataggattagtgccctgagggtccagggcagaaatgggtgttaacagcagagaagcacaaggcttctgcaccagcctactgctggctcacattcaacactgcccctattgctcccagcagtgcagcaaagaagacaaaggaacccatgcttgctgggccccctgcaggccaggtgcttcccatacattgtctctgttgatcatttcacctgccgtgtgagcaaggcattatccccactgaagcttacagaggttagactcgtccaagacaatatattttggcttcaaactgacttctgtctgtttccaaaaatatttttcatgtgacttatttttgatgtatataaacttatagacagttcttgaattcttgtctatgtgaagcacatattgtgtgaagtatttgcatggggccaggygcggtggctcacacttgtaatccagcactttgagaggctgaggtgagcggatcacctgaggtcaggagttcgagaccagcctggccaacatgacaaaaccccgtctctactgaaaatacaaaaattagccaggtgtggtggcaggcgcctgttatcccagctactcaggaggccgaggcaggagaatcacttgaaaccgggaggcagaggctgcagtgagtcgagattgcattactgcactccagactgggtgacagagagagactctgtcaaaaaaaaaaaaaaaaaaaagtctgcatggtattgtttgcttatatgatgtttagaacaaggaaatgactgaggctgaccatgctctggctctggaggctctctggggatacctggaggagtctttgggtcacaccaaaacactaggatgcagcctaatgtgaagattacaactcaagtcttggctttgctatttagcagctgagtgaccttgggcaagttttcattgtctctcagcctcagtttcctcatatatagcatggaaataatactagtgtttctcttacaggatcactgtgaaaagaacatgagatgccctttgcagggacatggatggagctggaagccattatcttcagcaaactaacacaggaacagaaaaccaaatactgcatgttctcacttataagtgggagctgaaccatgagaacatggacacagggaggggaacaacgcacactggggcctgtggagggcaggcggggggagggagagcatcaggataaatagctaatgcatgctgggcttaatacctaggtgatggattgataggtgcagcaaaccaccatggcacacatttacctatggagcaaacctgcacctcctgcacatttaccccagaacttaaaataaaataaaatttaaaaaggacacgagataatgtaagaaagtagttagcccatagaaagctgttactattccagtatgtatcctactacccacggtgccccttatataagagcgccctcctgaggctgtcagaataactggggcgaggcagggaatgagaggggacaccaggcctgaggagtgaggagaacagactagaatggcttcctgaccgaaactacacccgctcaaccccaggcctgtgtaataggcacttccactttagtgtgagggtaaatcccagaacactgaagaaacacagcccagagctggcatccttttggccatttcctgaagtggagctggatttcagagggctgtctcaaatgacagtgtcagcactaggagctgatggttaaagctctgcaagaaaacagcatccagcattttcttttgctactctcatgggccaacatgaaagtgcgtaatgatggacacaggctttgcttaagtggtgagtctatcatccaacctttgactataattatgttgctcagattagagctaagtaaacactggatttgttttttttttttttttactacgagcaaatgaattttatttcttactcagcatagttgtcccagtttgtttattcaacaaacgtttaagcgtgttctccatgcgtggtgcttgtggcactgggcattcagtagaaagctagaggccaggcgtggtggctcacgcctataatcccagcactttgggaggccgaggcaggtggatcgatcacctgaagtcggagttcaagaccagcctggccgatatcgtaaaaccccgtctctactaaaaatacaaaaattagctgggcatggtggcacatgcttgcaatcccagctacttgagaggctgaggcaggagaatcgcttgaacccgggaggcccaggttgcagtgagctgagatcgcgccattgcactccagcctgggaaacaagagcaagactgtctcaaaacaaaacaaacaaaacaaaacaaaacaaaacaataaaaaagaaagctaaacccacagagttcctgccttctagtggaggagatgagcaattaaacaagagaaaacaagtgcggtgagggtgatgtgcaggctggcggagcagcaacaacagcacagaatcctgactacggtttgaactaaacctaaagggccccgactctgccttgatctctccagaaagcctcccagggccctgacttccctgtgcatgtcaggtgaccacggtggtgggcagcttcccacctcagcctcttccctcagtgagatctgggaaacctcctccctcctttgcctctgaattctcacaaagaggaccaagggttttgaggcatagtttttaggaagaaaacagggaacaaggagaataataataaagaagaaaaaaagtacaagaagtaaaaggtatcttgccttactgggccttggttaggtgctgaacattgtgctaagaatctttcgatgtatattacaatgtgttgttcatttctctgaggttgatattgttgatatgtccatttttcccgataaggaaactgagggtaaagaggagaaagaaataggtcataaacttcaccaaaggcagagctattatttgaacccaagaaaatgtgaaagttaattgatcatttcttaagggcaattttattttgttttttgcaggggcagtagagggagacgttgttgttcccagaaaggggcctttagggagaataaagaaaggaatccttgataggggtgctaaatcctccagtacctggtagtgctggccacaggaggagctcaataactattgaataaggcagtgagggagggcatgaggaagggagtgaggggatgagtgtggcccctcccagcctaccaggacctgtatggcttttctctcatgaatcccagtcacgagccagctgcctgcatcctcttttcttccatcttgcagctgccaggcgtttagggtagcttggtggttggtttccaccactctcctcagtccttgaaatcctcattcttacaacactcgctgtacctgggacttggtctccatggcttttccagatgttactgccctggaagtcaatcccacaggaccattttattttaagggtcagagggctatagtagttcaagaccccggtggatgcctgaaaccatggataatactgaaccctatttaattgtgcttatatgggtattgatgatataatattgcaaaattactgcagacattataattacataaaaaaaatagtaagttgaagaataattccatgacagtaaatcagtctaaaataaattaaaatagaaaactccaaattaatggcagcaagtatatttaaaaaataagaatatgagtaaaaagacaagacctgacaaaggagagtttcaacactacagtttatgtatatattatactaagttttgattttttgttcgtttgtttttgagacagggtcttgctatgttgcccaggctggagtgcagtagctattcacaggcatgatggtagctgattgcagcctcaaactcctaggctcaagggatcctccagcctcagcctcctgagtagctgggaccagggcagcatactctttttgatctgataactgagacggctactaagtgactaacggattggtagcgtatacattgtggatacactggataaaaggattattcacatccgagggtggagtgggagggtgcaagatttcatcatgctactcagaatggtgcttaatttaaaacttacaaattatttattttttagaactttccatttaatatttttggacctcagttcaccgagggtaactgaaacttcaaaaagtgaaactgcagataacagggaactactgtatgacaaacagtaaatatgaggaagttgtagaggttatgaaaccttcccaaccactccacgaatgacctacttttagctctggctatcatatagtctccccagagtcagacgacagtcttgccacttgccacctgggtagtggtgatctttagcaggttacttaatctccctaaccatgtctgtaaaatggtccccatctcctcaggttggagtgagcattaaagatggttctgtatttgaaatctcttagtacaaagaaaatgctaaataaatgttgtcaaggactgaattttatccccccaaaattcatgttgaagccttaacctccaatgtgactatatttggcgatagcgcctttagaaagtaattaaggtcaaatgaggtaaaaaagggtggagccctaatgcagtaggatttctgtccttaggaaaaagggggcccggcgaggtggctcacacctgtaatcccagcactttgggatgccaaggcaagcagatggcttgagctcatgagttcgaggccagttgggcaacatagtgaaaccccatctctataaaaaatacaaaaattagcctggcatggtggtgtgcacctgtagtccagctacttgggaggctgaggtgggtggatggcttgagcctgggggtggcggagattgcagtgagccaagatgtgcctctgcactgcagcctgggcaacagagccagaccttgtctaaaaaaaaaaaaaaaaaaaaaaaaaaagaagaaagaaaagaaaagaaaaatggaagagacaccagaggtgcacatgcacagaggggaaaggccatgtggggacacagacagagagtgactgtctgcaagagacctcaggaaaaaccaaccctgccaacacgttgatcctggacttccagtctccagaacagtgagaaaatatatttctgttgtttatgccacccagtctgtgatatttcgttatggcgacctgagcagactaatacacatgttcagtctacttcctttgctttccttgttgtttgaacacatttgccaggcagtgtcagagcccctgtattgggaagtggtcagtgtgtgggttggtaagaagaatttaccaaaaacagtatagatttgaaaaaggaaagttttagaaagaaagaatgctgcaaaagggtgcagcggggcacctcagtgagagaggactgagcacacagtggtggattttccttaggagcatttatggaccttaaggcgggagcttaagggtaattttgaccatattagccaggtaggtcatgatacatgattacatctgtagacattttggtgccttactgtcagcaagggttgcacaatgagttttgacatgcatgcattctggaggtgtatagaaattctagttatgacatttttgaaagagatctagatgctgactttagatactagggaagtttaattacttctaaattcctcagataaggagtttttgtctctggagactgctcgatggtcaccaggtgattttcctctcctcatttgctccctgacaaatatcttggtcatatctttgaccctttatatttatattcccccatgttcatgtctacctgctgcctactggggtctcaagaaagggaaaatggtccagtgaagaggggtgatgagtctgtctggctacttcctcctgaaagggggctttgaggggataagttgcgtttttctcttttttgctctgtgtcataaaggaaatgaagggtcatgaaaaactcagtcacgaggggtggggactggattctatcaagaggccccgtataaatggaagttgctgttgcagg

SEQ ID NO: 6996 - DNA, 33271 bp, Homo sapiens
tgcagtgagccaagatgacgccactgcactccagcctggacgacagaccgagactccgtctcaaaaaaaaaaaaaaacaccaaacaaacaaaaaaaacacgtaattttagaaatcatagtccttcctgcttcgtggcactattctgagatcagctatgttaacagatgcaacatgctttgaagagtatagaatgatatgcaattcaagtgactgtgttattgctagtatcgaaacatttgtggtaaaccccatcaagttgttctcctcctagcccaggctatttgtagcatgggactgtgatactccagcatcttatacaagtagattgcaccagacttcaaactctccagttagaagtagcaaatgcacagcaaatgaaattgccaattctgaagaagaggggtcataaaacctttaataaataggggaaaattgacctggattcctcctcaccaaaagcaacgaaccaaagaaattccacacgttcaaaactccccatgaacctagattcaaatcttctataatttccagcccctctcagacttgtcagagtgagtcccagggatgccgaagaagagttaattctcttcttcatcaattccaataggcctcaacaaacaaattatgttttagagattttaggacccaaactggtaaatttttatcactatcactctaatggctttcaaagtgtaaacagattgcctataaacacagtgattctttttacacacacattcaggcttttaaattgtgcttaacttcatgggcttaaacatgggttggtgagtttggagaggttaggcttttcccaggcaaagcacattcattgagtctgtcagtcagttatggatctaaaacttaattattttatctcaggaattttaaaccctgagatatcctcagggtgcctaagatccaagagtttactcttgaacacagtccaagaaaggccactaaataaagcctgttcatggcagaaggcattatattgactctctttgtctcagaaagtgacccacacatcacaataagccactaaattactgcaggcaggaaggtagatccgggataaaaactggcagtgggttgaaagaaaaacttcacaataatgtctaatattgagatagcatggctctcaataattcaaggcacatttatccttattgtttcttcttatcccagctatataagcctagagtggcaggtatggcaagagctagtaatttcattttagaaataaggaaagaagttcaaagaggaaaactgttgacttggtcaagtttacagaggtaattaatgaaagccagatttataacccagtttcccacctaggggtagtaatgtgcctacaaagatgaccagttgcaaccaagccagttaggacaattcagaaaccagcagctaagtcaaagatgttaattgggtttccaagactcatccttgagactcaaggatggaggttggaccaagcaagtggggttctctcaagagaaggtagaaactggaaactccaccttcctcagaatgcagctgcaagtacttcacctgccttctgaaaggaggcaggaaagagtcataaactactccatacgcctactagttccttcttgctttactccactgcaaatgcttgggaactgctcacagggcagctgccctctgaagctcagcagatatgtctcatttttattcccatctatctggagaatgggatacaacattctaactctccaagaaaagtttacacccaaatataagcattccaaaatatataatggaaaatataaatggaaaaaccacccagataaagaaagatcaaaagagaggtatgaagcagccacattcatttctttgctcttgaaaatttaaatgactactccttgagagcaaactacaaaatgctaaccttgaagtgttgagtggcaggaagaattatgggttattgtactgtcaaaatgccagacagctgtatgttgagttgctgcgttatttagacaatcagaaacttggaagctaatgtgacatattttttcggtgtgaaagctcttgacatgcgtcaggataatttctaaaaggacaaaatgttatataaaaaacacggtgacttcaggagatggccttataggtagaacagccctgaagaggggaagcaggacatcaacgacttggtctttccagaggtgagcgcgattttctttctgtctcttagtccaaagggtggtggcctcaggcaacatggagtgtccagcctccctctcctgctcccggcacctaaggaatgttctcgcagagtcaggtttctgactgtagcctacactgtgctaagcaaagcccactgattgcaggatcaccttccatctggaagagtgatacagtgatcatgttcagagcatgctactggagactgtggcactgtacaatcctagggtgcagaaggagctaaaatgctgcctctgttcacctttcatatgtcttcctgattggcttgtagacaagtccaaacagatggaatggcagacagtttaagtgaattcctagctttgcatctcaggttagcttggatatataaagaccatagagtgggaagcagcacctggtcagttgcacctgaaattccatcttcacttcttcgactacaatgaaaatacaaatattgctgggacaagaaacacattcatcttctgtcattcatctataacttagggtgaataaagatttggagaactgttcatgacagacaaagaatagataggccttaggggtttaggtgagggattggggcctgtggagcaggcaggtagatgaagccagagaaaagccctgataaaaggggcctgcaaagatgctccatcaggattttccctctctcttctggatttaattttgatcaaaaagaaaacaatctccaagaagaggagagtaagcatctggagactgacagggaaagggaagtgttcctctcctaagacactcttccagtcaccaagcacagactctattctcaggccagctccaccacgtaccaataatatgaccctgagggaataaatgagtcatggtttctttttttttttttgagatgaagtctcgctctgtcacccaggctggagtgcagtggcatgatctcagcttgctggaacctctgcctcctgggttcaagagactctcctgcctcagcctcccaagtagctgggattacaggcacccaccatcacgcctggctaagttttgtatttttagtagagatggagttttgccacattggccaggctggtcttgaactgctgacctcaagtgatctgccagcctcagcctcccaaagtgctgggattacagatgtgagccaccaagcgggccaagctattgtttaactgcaaaatggggataacaataacagcaacttcaagtctattgaagaattatgttaattacttagaacaatgcctgccaggttatgatgattctactcaaatgctaacatagtatcctcctcctcctcctccatcatcatcagcagcaatgagagcaattctcattgctatcttggggagaagtgaaatccttctgggacccctttcctaggacagaaaagtagctttggatcaaagaatttcctgagcttccttctatgtgacccaggcagggcagcaacccacacccagcccaggaggagaccagtagtttgctgactgcaccatgcagagaagagcccattttctagacaggaatcacaagggctgagagggagcccttccaccagctccaataaaagttgtaaataaagacactctcttctttttttccaccttattaattttcatttttatttttatttttatttttatttgacagttaacctaaatgttaagattataccctgtaacctgaatatttaaaagccaataggcagacaaaggataagcctggtggatgaatgaatttggacctgagtccaagacctgtgttatctggctatagttaactcaggtaaaattaggaatacaatgaccaggtcttctgccttcaccacacagtaaacaggctcaatgcaagccagccaccagcccctggagcaccatggggaggagcccagagctcccagaatgagactgtctactcaggctcctcataacttagggacaagagaggcaaaatttgttagggggaaaggttgtccctttctccagcatcagggctcattttcttctgaagtcaggaaacgtccatgcccgttagcaaaacagcatggcagacatgctcaccagaaatttaacttttatgagtcattatgcaattagctacagggagcagaaataaagaactggagacttgatctccccaattccatccaactcttgctggagtcacggcagcacacacagaaatagggaaactctgtatgagatggcaaggacattcttccccgacgcctaaatgttgtctgtcaggagcatcgaccacccactgaccccagcttcctttgctactttacatgtacatctttcttcatggtactcggaggatgcatctatgctacctctagggatggcaccattcacaagcacaaaggagatgtccagtgattaaaaacacatgctctggagtctgtgagactttgagacttgctagcttgtgactctgcagagtttaacctatctggacccctttttcctcatgtgcataatgaagagattgtcacccactgataagattgttgtaattaaatgagaaaacaagcatcaaaggcatggtataggaccagggacatagaaatactaaataaatgggttatcattaacacaatcatcatcgatccaaatagtctcttgggccttggcttcttggctctctgtgaaggccatcagacacgtcaaggagatgtcaaacactatgtccacttgaagtggtactctgttaagtcaggggcagctgactgctgtcctcctaggaggtctgtagtaaccacaccagtgtggtgtggcctcagtatcacttgaattggaagccagagatttaactctgtgagcttggccagttgactgtgctaggttttagtttccttcttaaaacaaacaaacaaacaaaaactatgagaggatgtgagacacaacatcactacttcccactcatcaactctagtaggtaccactcatcagtcacgcatctttcctgctaaacacggctatgggtcagaatttttctcaattcagcacttctagaagccaccactatatagctttcatatgcaataaaatgtatttgccatccctaaacaagatgctccttgagattccttcctgttatgacatgttgattttacagctgattaccagatgcttacagatgtagagattcaaccaaaccctttagcttctaacaggaagaggtcagaaagaagctcagttggactagaaaaagatcagggaacattaacccaataacagattccacgggcagaagagccctggtgggtaagaggtactcaatgcattttattgtattctgagaccgtattttttaaaatgtccatattaaggtcatttcatacccattctatattccctatcttccactcgacagccagcaattatgcacacacaccaaaaatacatgtatctctatatgtgtgtatatgtacatacatatgtatatgttttttccaatcctgctctgagatgcttgccatacccgagttctctctttaggcctcatatacagagatctgtagattatttattacaattctaagtctacactgtttaccatcttgacaattttgtgagatatcaccttcactttatggaggaggaggctgaggtccagggaagttcaactgctatcaaagagctgtactaacttagggaagacttggaatccaaacaagcctcccagatccacacatcttactatggtcccacgatggcctccacaaggcttcccttcctgcaagtccccagaagtcctccacacccacagtcctccagccctgatctttcccatccctcattcgagtcccagcagcccctggcatttcctaaacacacacttaaccaaactggaccatttcctctttattatctacacaaatattcttaattatttctcctccaacccaaagtacttattttttatttatgggtgtaaatataatgccagaagggctcatatttcacagggagccattccaatggcatccagagccttccaaatttaaggagcaagagagctgattctctgcccgtttcattataaaggggtttaccataaatattagaatttgaattccacccaagtaatgcattaatagctactaaaccattaataatttctgtactttttcataaatgggcaaagtccaataaataaaccatatctctttcacagcagagcagggttaacaagtaccaaggagatttcaaagacaaactactggtaggggctgccaagggtaagattcataatgaaactacaaattctggaggcccatttttttctgtccaccatggcaagtatctaaaattaaatgctaagcagaaatccatcctggaatctgacacgcagcagtttaggtaaacaatctctgaaattaaaaacagattctggataataaataagtccgtgtgtgagacgctctgataacagatacctctccccgataaatcaaaggctctagccctacagagcctttctaaattaggccagatgatttacctaaaatatttcatcttgtgtcacctgtcttaatgaacggcagaatggatagcttcttaccagttattgtatcaaggccggagacctctaggctaattatacccaaggcctaaggaggccggcctgtctgggaggagcctgtggggtctcaggagcrggggggatttcaccatgacactcgtttacctaggtctcctaacttcagcctactggggtcacctgcagctgccctagaattctagaagcctgaatcagccatgtcagatatcaaagataaacagcccaggggacagaagaaataagttcaagttcactgttgctagctgtttgaacttgaacagacccctggctatctttgggcttcacctttctcatctgcaaagtgggataataaaaccttcctagcctacctcatggggttgtggtgaggaaagcaagaaaatgcacacagaggcactctgtaacccatgacaccctctgctgctgttactatcagtcattgatacagtttggatctgtgtccccacaaaatctcgtgtcaaattgtgatccccaacattggagatgggcctggtgggaggtgactggatcatgggggtggtttctcatggtttaacaccatcccctttggagctgtggttgataattaattcttgtgagatctggttgtttaaacatgtgtggcacctcccccttctctccctcctcctccagccacatgaagtgccagcgccctctttgccttcggccatgagtaaaagcttcctgaggtctccccagaagcagaagccagtacacttcctgtgcagcctgcagaaccattaatcctctttataaattacccaatctcaggcatttctttatagcaatgcaattagcatggactaatacagtcatagtaacagtcagtcatttactcaccaacatttattgagcatccctgtgtgtcagatgccagggataccccaatgactacaacggatgggaccccagcccttgtggagttggattcccgcaatggaaggcaygcaacctgcatgggaaatgagggctgcagagtgtcgtggaggactctgaggctgtagagagaaagcaagaagcagaggtagctggggtgggagaaggggtcattctcaacagggaagactgtgcaaaggacacatcttttaagcaaagatgcaaaggaagaaagagatactgaaatagaaatagaaggaacatcaaggaaaaagacatccaataggtccgaggagctgcaaggacaggccgcacccactggcatggagggagccagggccagggaggaggcttgagggcagaggtcaggggccaaggggagggcaaggtctcctgggccttgggagcacttgggccttcaggagatttcttagcagaggagtaacagggtctcatctaacattttaacagagcactccgtggctgctctgctaggaataagagcaaacaaatgtattattattatactaacataatagtatattgtcattgaaagactctgttccggtctgcgtgaatcttggtgggaaagggagaaatgaaaagagagctgggggtgggggtggtcttatgtttttctaaatgctcaaaattaagcctagagaggcatgtgtgcatgttgggggtgggacatggaggcaagagtgggtggcaggtgagccccatgctgaatgtagaatggggaaccacctggacacccagacctgtctctgggtcccctgttcggactcacggccttcaaggtggtggaggctggagggaggaagaagggtggtggataggaaagagaaaactgacttctcccaaatcccacacctttgcagccatcagtatagctgcccagtgtcccatgcctttcaagcctgggatctgtctctttattaaaaatgaaaacaaaattttgtttttaaagcggggagcaaccatattttaccagcatttggtgtcagcgcaagtggcaaacacaacatcctaagaggagctatcgtgcctcctgcttcagaatggaaagygacacagaggtcattccattagtgatcgcagctgcttttaaacgaaacacatataacctgaatccaattaatgaaagtatctggccatcctcacagatgctaatgccaaatgaatatttaaaccttgctcattcaccagctctgcattgcactgtagttcaaaatctcaaaagcacatgctaattcctgaatgaaggaaattatgactcagcattcctcttttgatttctggtgacttggcatttgtcatggggctgggctgcccagtgctccctccctggacttctgctgcttctgcaaaagaatggacagccccaaatgcaacagggtccaaagctcattctcttaccaacaacccacagagaccacagattttcactgatttgcccacacagagccatctggaaagacttcgaagtggagagggtgatggggtggggtgaaggtgcccagctcttatggcagccagtggcagtccagcccactaaccataatacaggattcaaatctggtcatccacacgaccttcacaactattgctacacttctatatcactctgctttaaactggtggtttacactacttggggcattcatgctatagggatacttatgtctggaaatgttctgtgttgtcacaactttggtgggggcagcttctgctgggtagaagccagggacactgataagtaacctgcagtgctcaggataactctccacaacaaagaattatctggttcaaaatatcattagtgccaagattaagaaaccttgatctaagttgacccactcctccttatatttatttttaaagggaattttatacaactatcataaagaccaggatcatctgtcataagcagaaggtgcctacagtcataagtaaaaagtattcagagaaatatgtacagtgaaaacaaaataatttaaaaatgtagttcagacatagtgacctactgaaggctttgagcctgagggctgctctcttaaaaaaaaaaatccacacgtaatagaaacattaaagacacagcagctccaaactaagactttctcctcattgtggccaaaaggacagaaaggagaactgagagggaaaaagcatttcttcacacaattaatgatgtagctatgcacctccaaaatcatcttgggtaccaccagtagatgatgatrccagtaaagtgaatctcagtcagtcttcccagactccaaagaacagaattactgtgactagttcttgaggagaaaacccaaagaggcaaaagacaggagaagctggtgttatctgatctgcgttataaacctctcaggaagctgggtgtggtgagaagcgtggcctaggcctggggaaacactcaataggtcccttacaacatccaagactagactgggtaacaggtctttccagatggctctgcatgtgcaaatccatgaagatgtggctaattctgtgggctctgttttatgaaccatgttcaatactatactagtgtcatgaaagaagtacaccatcatcacataagctagttgtaatgccaggttaaacaacatctaaaagctttcattaytgccaaacttcttggagccattcatatgacaacgagcattgcaaatgccaatcctccctcccccagtggaaagaaggtacaacatcttttaatctgtcaagacacaaattgttgtttctgtttttgttttcccacgaaacacctaagtcaatcctggtattccaggaagcacagcctgagtaacttagtcctggaggaagaaaatatttccttttcatcagagaatatgagagtttcacgagattgtagttgttatattacccatacctccgccagaaggcagaaaccatatcttattgatctttaaaccactggtgtctgttaaatagtaggtactcaaaacatgtttattccagctcatgactctctcctcactaactctcagagctctccaaaataataggttctagcaatggttaagatccataggcccaaacaaccacattccttcattctaaagcctasaataaaagggatgctctgaatttaaaatgctgtctagaaaacatcttgaccaactcctgttgatacaagagcctttctaccatgttggctttrtcatccagtctggccacccaaagcaatgcacaggtttgattttccttgtttctccatcttcattgaaccatcacatcaacagctcttctccaggaccccttttygcttcatcrcatcttcctttggcgggtcttttcctgcccagtgtgcattcacatcctcctgtacaagtaccctgatgtgccccagggaaactcctcccacctccctccatctctgagttctgtggagccaactccacctaggctccaggcaggcacagaaactgactggccaaccagggtgtcatctctcacagactgctgaggttggtgggtatgtggcccaatcagggactggaagacccagtctgggatcttgtggaactgctggtragaggaaatctctcttttttgactgaggttgatgagaagagaatatgaaagccttgtggagttcacagccacgttgcctcccttaggggaagtttacctgggtgtcagcagcagggaagtagagctgtgaggtggcaggagagagatggcagcaactgtgttatttgagcctgtggctctagtcaggcctggagtcttatccactcctcagtttctcagacatgtgaactaataaatttcctttttgcttatgctaatttaagctgagattctgattaacagaacatggaaaacgctggatgccatggttggtatctctaatacttcctcttatttactttctctccttcatttttatacatttccctttacttttcctactcacttcctttcccatttccatcgtttctcagaattctccctcaaagtcagaaaaaaataaatatgagaagttctgctaactgctcacacccgctccctccaacaagccatttctcacaaaagaccactatctaggctctcctcatctgggagacaaggagttcagccacagataagttcatataaagcctatgtacctaggctgctgttgtattaatacaaataattagacaaaatattcatcctactataatgcatcaggttttcaggccttggacttggacacttcattttctgaattgaggctcrttaagaatgccttttgagcagagggtgaggaagagtccaacagcttacgttcttgagcccacttctctcagactgggggtttgaacagaaaaatgcagcagctcctcctgaaatctgagtttcaaaatgcaaaacgcatccccaggaattgagaatcatggccttcactttcagcattgccaatgaaagggcaatttggttggcatgccacgtgagccctctgcctggctgtgacatgcgctgatcttatgtaggatgatgcggtcccttggtcccccacacagggccacggacaaaagaggtaaacactatctgctcctgctcatgcagcatgaaggaggtgttcttcccgctttaggccctgtgagtgggacacgttcccttggaccgtgaccagccacatggctgcttgtctctgcaggccctggcaggccttccctttcccttccaggaggacacagggcagagaagttgacggctccatggccttgactgttccttcccactcagcagaccaggccccagcagggaagctctgcgtaggcctgagctcttgtctctttctcctcctccacctgctggtttggatatcctccccgcagggcacagatccccaagaattccaggcagcctggccttgcaggacccagggcagctttctccagccatacggccagtacttagtgtcctcttgctgcagggagattagctcagcaagaacccaggtaaatcatgatgtcgttgaaggaaagacttgccatgtgatatgcccagacactgacattctcacacgaccttgtggtgcacggctagttccttccctgttcactccccctgccctagagctgcctggccggctccctgcatggggagcagcattgtgaggaggaaaggaaactcaggacaaataaaaacacactgggggccgggcatggtaactcacacctgtaatcccagcagtttgggaggccaaggcaggtggaccacttgaggtcaggagtttgagaccaacctgaccaacatcgtgaaaccccatctctactaaaaatacaaaaattaaccaggcatggtggtggatgcctgtaatcccacctactgaggaggctgagacatgagaatcgctagaactggggaagcagaggttgcagttagccaagattgtgccactgcactccagcctgggcgacagagcaagactctgtatcaaaaagaaaagaaaagcattggagacgtacatgtacgcatatgtatatgcacacatatacacatacctattcacatacatagacgcatattatatttgaaaatgtataacttgtaagtgagagctaatgaaggaaaaatgaaaatgacttggggatattacgtatgcatgtgtatacatatatacacacatatatgtgaaggattcaatgacaggtaagaccatcatcatcgtcagaatcacctctccctcacagaacccccgccacactcagccacttcaaagtaaactgggatcatgtttcgagagaagagatggaaagatatacagcaatgcagtaaatgagaaatgaagaaagactttccaagttagtgaatgtgaaatttttatttggctcctgtagccctttccttgttcctgctatggttttagctgatcaatgggacctactgaacaactaagtgctttcacatggtaaaaactgtcctggcaggcttcgatggctggatgcccacattactcacatctaggattgtttactacaacccgagctcccccctgccttcaagtggaggttgacttgcaaaggaggcaatgtggtcctgcagagaatgcacaggatgcagagtcagaccctatctacatttacatccctgcctggtccatgtgggctatgtgaccttgagcaagatatttaccctctcttgaatcccagttttttcacccacaaaacagggatatgaatgtgctccttgcgaggctgctggaaaggctggaagataacgtatgcaatagacctgtctagaacaatgcctgccacatagtgggtgctcaacaatagaagctgctagaattaagctcatgcccggtcctgtgtctctaagttctctctccttttctgttctgaataaagtaaggcaagaacccaagtaccatgtaataataatctcaggtgttttggatgcctttttgaagacatctaccaaactccagttcaaagccacaccttgatgagtcctaggtcaccactatcttttagataacaaataagctaaaatcattaaggccagcttcacctttagcttgctttacagaatctagtcattgtagatactttttgccacccaaccaattcacagagaccaagcccaagcattgtggaatactggccactcaagctaacagggggaatccacacaacccccacaactccacaatggtctcgtgtatgggaactctggggacccagagaatgtgagtaacccaactggcattaccctgcaaggcaatgcggggtccaaggatggtcaaccatatcacccactaggcaccccagaagtgagagggaatgtaagggggaatcgcccctttccaagtgagagaagacagaggcaatctgaaaaccccaatcagttcagctttcactcagcctactgtctgtgtagagtaccacagtaaattctggttcacccccaaaggcactgtgtttgtagagagtcttcaataaagtaaaaaatgccctaaggaaaagaagagatcagttcactgtttcccccagttgagggtggcattcactggcatgagagtgctggatatcaggggagatttgacaggtcacctgtagcaaaaaggggggcacatatgtaagaagagaaacactggaggccaacttcaccaacatgattttatgtcgggcaaatcaacactcccaaactttaactgtgtgtgtgcaccagctgtacctggtgtatgaaagaggagctggccaatatttatctttttgttccatcctatcactcactcactttttttttttttttttgagatggagtcttgctctgtcgccaggccggagtgcagtggtgtggtctcggctcactgcaacctccacttcccacgttcgagtgattctcctgcctcagcctcctcagtacctgggattacagatgcccaccaccatkcccagctaatgttcgtatttttagtagagctggggtttcaccaagttggccaggatggtctcgatctcttgacctcgtgatctgcccgcctcagcctcccaaagtgctgggattacaggcatgagccaccgtgcccggcccactcactctcaaagagcttaaaatgtatggataatattgtccaatcaaagccaaagaaaccattccagtagaagagtaactattgcatctgaaaacccaccctgttatatgttatttcaatagatgaagatgaaaagggaaaaagagtctttgctgatgaaaagatgcatacagaaaccaagtctgctcaacctctgcagtgtttgcccaagtcagcaatactccacggtgccctgcatggcacctggcagagagtagagcccaataaacattagatgaatgaatgatacaacccagaaaacatatcttccaattgtcagacaaatggacttaaatgtctaaaaagcaaaccagcagacacacagacacacaccaagccagcaaagaaactattttgttcaaaaagtgaaagtaacatgtgaaatagtcacagcaaatttcaaaagttaagaatgtaaaagtgaaccactttaataagcagacaatgtgtataacttataacactggaacttgctaacatttataacaacccacaaatatatccttgatgtttgtgatttgacataaagttgagctgccaactttagatgaagttctagtttaaaacatgctaggggagagttctataacacatggattgggacgcacacacgttaccaaagggttaatattagaagcagtattgactagtttcattctggttgctaagcaacatttcttccttcccccaatggtctgagagagaggataaaaagggcagaaaatgagaaatgttggaaaaataggaaagtgaaattcaatggatcatgaggtacaatttgtaagaagagtaaaagaggaaataattctttcaggatgtagtaagacatcagttgctttgtgacatcatgagagtaacacattgagcctccagctccaaagagaaagagtggaagatgaatgtcccctaatccctgcatcatgctgctcatgttcagttcacacttagccagacacgcacgggtccaggatgacagcaagctgacctgcatgacagaacattatagcccccctgccaaaaaaatctatcaagttcacgaggcccaaccaaaccttacccactgtaagtcactgtcccattccttaaaggaccttccattccctgcatatccgaagggcccctggtaggcgattcatgtattcaacagtattgactgcgtgctctccatctgccagacacagggctgggtgctggagaagggggagcagggcccttgactgatcactcaccagtgtgcttgatccctttggtcatcatctcagtgtcccatttttgtcaggatcctatgatacagcaattaaaaaaccttaaagaataacctaggagacattctaggacagacccacaaggctactgaactgtttgctgcctttaatctccatcacgaattatccctttgagtgaagacctcaagtccatgttgagagtgagagaggacatgccagtgtgaggacagtgggtatctgggaagttgctgtaccttctgttcaatttttgctgtgaactataagtactctaaaaaataaagtctattaaaagaagaaagagagagaaaagtaaattattcagaagaaaaaaacaaaaccttgtcaacaagcccattctaaaataaatgacccagagagggctacatattagtctattaatgtccattttcatagattagttcattagactagcttttgcctgttgtgtcctgcaggaacacagatgatggacagggcagttctgagagtgggaagggacctgrgaaacagctggcacatatggactagctggtaattggggtgtgggaagaaacatggggaggaggggaaatcagagggtcctgagtggaatgaaggggtccttgacatccaaacagagaaggggaaaagggaagaaagggcaccaaaaaggacataaacaagatgcgtttatcagcagggaccttgatgctggtccccacgggatgttgggaaaattacttaaccctatcctagactaagtttctccatctatagaataaaaagaacacttagcttacagcactggaaaaattaaaagtaatatatttaaagcataccccatggtacctggcaccatgttcaataaactctaatcaatgttattatcatatatggagccactttaaacataaagcactagttttaattgttaataaagtcattatttatagctgtgtctaagactctcctgattaactgccaatctcactcctctaagccagtgtttccctaatttcagtcacgcatgtaccacccttgtaatttctgctctattcaaatgtcatctattgtaatcattattattaataatagcagtaatataagccataataataacaataacaacagaaataataacaataagaacaatgactaatgttcacgggctactcatcacatgcctggcactattcttagagctttataagtactaacccatttggtccttatcacaactctgtgagatgggtactattattaatgccattttacagataagcaaagtgatgcatggaaagtccaaggtcatttggccaataagtggcaggttacagattcaaactcaggccccaggacccacatttagccactgcacagattgcctggctcatctctatatgccggcatttacttaattttttaaacattgatgcagttaaatttagacttaaagaaaaacattataacattgtatcacactgtaggagatctgtgaaatcctgggtttgatatgtaattataatatggttgcatacaaaaaattataagattattcaaataaaaaatgtatttgtgccacctaaaatcatctaggaaacaaaatttaatactgctttatgtacctgggaattccttcaacctcaagtcacaaaaccacaggacaatactggaaactcattgatagttcactgcgtccacacccattctccacctcctgctttgtaacagaacctggatttttatttggcatgtggctgccaagctaaacgattccattttcctttcagctagctgtggctctgtgactaaactctggccaatgagatgtcaaagaatgtcttacgtgggacttgctggaagtttccttaagaggtaatgagactcctgtttgttccttcctcctccctgcttcttgagggaggaatgcgcacagaatgacaagagcacaagctgccatcttgaatcatgagaaaatatgctaagaatgtcagagctacaaagagagggaaccagggttcctcatgacaccatgaaattatcacaccagccctgcaatacttccatactccttttatgtgagagaaataaatctctacaatgctaagtcactgttaacttgagctcttctgctacatgcagctaagcctcattctaatgaacacaccatccatcccttgctccagtgccctccatctccaaccaggaataactcactgagaggatctgtcccctaagttgtagccaatgaactgaatagccctgggacaatcagcatgccatttatgtgtccatttataaaccactctcctccaaacgctttatatgcagtattccatttaattcccccaacaaacttacaagacagggaccattatgaccattatctccacagatgcggaaactgaggcacagagaggttaagtaccttgtccaaggtcacacgactaataagtggcagagccagaactcaacccgacagtgtgacaccagaagatgagttctcaaccctgaggctctctacctgaaatgaaacaggcatcagacctggaccctcagagggactggcttcttcgaagctcaaagggcttcaccatcataggccgtgggcagctccccaaaggctaaagtgactttagcctctctagagatcaccctgggggccctagcaaatgctttctgtcatcctattaacactactttctaattaggaccagtgcaaacctgatacttaggcagaaatgtctgtttattkatttattttgcgtgtggaaaaaaatattaaaaagatgtccaaaaagaagattcagaaaatctttgctcctgcccctcaggaattcgactcagctccccagatgccctggacagagggggacgtgtggcccccaacagtcaccatggagttaactcatatttcccaggcctggcacatgttcagtcaaaaacctggcggagtgcctgttgtttactgaagctggggaagaagcatctgcaacattacgaaaagcatattgtaaaaggcaacacatgcaarttaaacctcttgagctatgagtaaattgctgggaaaatttataactcatttaataaaacttgaagtaaatacatagtctggctcccagggaaaacaaaatatttcccacaattctcttctctttaaaaaaggaaaaaaaaaaaaaagggaagaaaagaaccatcgagctagagggctctatctagtataaagtataaatagcaaatgtggtgtgagcagaccccatttacrgttatggggcatttcatacccacgtagacagtgccatgccctctgctcttggaggttgacaatgttcaggcctaagacatttccacaataatccatgattgtgtttacccaacaaagctctactgagcatcttctattcattaattcacccaacaagggtttattcagtatctacyagagaggcattgtaatgtggcgattaggaacacatgctctggagccttgaatccagactctgccacttactagctgtatgcccttgagctactgcattcataaaccctccatacctcagtttcctcatcagtaaaatgggaataataataatatccacatcctgtggtcattgtaaacactaaatggcttaatatatgtgaagggcttgggacaatgcctggcaaatagtaatactttgacaaatattaactgcttattagttattagctggcattatggttcagcccctctgccaggtgcagggggcataggattgaaagaacaaggtaggtgaaggccctggctcatggagtttatactctactgggggtagacagacaatacacatttaggcaaatgaataaacagcacttgtgaagataataatacgtgatctgaagaaaacaaaaaagcaacagaatagagagagactgccagttataagtgggttatatgagtgttcgagaaggcaatatttgagttgagacytaaaagataagaagggaccaacttaaccaagaatgttgtatacaaaaggaatagcttgttaaagattctaagatgaatgaacgaatgaataggtttgttctttttgagtgaccacacaaggccaaggggcctggcatgtacagagtagagagagttctgcagggatgaagtgggagacgttgataggaccagaccagaccaggccttgtaggccatggaaggactttggattttacaccaagtgcaacaggtaactgctggagggaattcagcaagagagtgacaggagctgattgacaatttgaacgcccactctggctgccatgtggcaaatagattgtaggaagaaaagaagaaaaggaagagagcagtttggaagctactactgttgtcccagaaatatgtaatggtggcttggcccagggtggtggtggaagagattcaggaaacattttagaattagagctgacaggactctgtgatgaattggaaacggtggtgaaggaaagaaagaaagaaaaaatgactctgattttggagaggcctgggatgctcatcagcctgagacagatgctgtagaatattgagcagacatgatttctattctaaaagaactttagagatagtcacagcagcctaatacacacaacatagaatcaaaggaagatgtgacagaagtgcctctgtgcatcgttcagagttcaaggcccaaagaaaggagagcatgccatgggcagttttcatggaaggccacagaaaacagggtacccaatctgtcctcgaaggacacagtccctggcactccacaaagagtgtcacatgagcacatgtgtaaaggaggaaagcccagaatggtccaccccaaagaaacaaggaaagtcactccacagagacgattcctctatccaattcactgctgttttactgaaccatctcctggagatctggtgctgaagggagaatgggagggaggtaatgacctcactcctattgggtcgtctttgtttccatccttcagaaaaaaatcaggaagtcctgggaaacaaccatcagtgtagaggcactcaggcaagttgggcagtaggacagtggcttagagcccagggccttcagccccctagagctgcgtgacctagacaagttacttctccagtcctcagtgtctacagaatgggataattatggtacagcatctaccatgcaggattcagtaaaataactccgtcccaaaggacttagtacaatgcctgacctaagatgaaagttaccagtagtttttatttaaagaaatgctggtccttccatagcatctgtagatcatctgtcatagcttgtacatacttggtggtcatcgctcattaaagcatccatcttcctcattggtttttaaatacacaagtgaactttttggggattgtgcatcattattatcagcagctaatacagtgccttgcattaatcctcatcatgttaataatactgcaattattatctatggtatatatttagtaaactctcactatgtgccaggtattatgccaagcatgttgtaggtatgaaattttaggggacaggatggcagttaggagcatagaatccttccttttgaatctctgttccattgctcactacctgtctgacttttggcaaataacttaacctttctacaactcagtttcctcattggcaaaatgaggaaaaagcaatacttacctcattgagctgctgggaggattgaatgagttcatgaatgtgaaactcttagaataggcctggcccttagtgtaaggctataaaagcaataatcatgattatcaataacagcaaccctatgagttaggtgctgctatcctcattttacagacaaagaaacaaaggtacagagaagttcaataaccacccaaatggccacaggtttactaagaggtagaatcaggatttgcactcaagcagtctaactccagaaaggaaatgactaacaatgatattttggaggtagcaatgttgagcatcccactttgctgtgtagctcatcccctgaatgctttgggcctgaacaccatgagtcatggtcaaagtcaggctcagcaaggtgtgtttgcctcccctccatgttgccccagggaacagttaggtggaaccaagacacatttgtggatggcagagatgctatatctgcaggggaaattaacagaagaaagaagaagaaaactggggacaatggaataccacagatagaagatgcaaaactggcccctttaaaagtgaaaaatgtgttgtttgtagttttgccaacatctataagacgactactggggttgttcaaactatgtgccaagccctgacaggagagctcagaccaataggtaagtttggctccacaaaagacctatatcaagctcacatggtcaggcattttggggccccttttgtagagattcactctaaatccaggttgctttcaactatagaacttttccctttgagttcaggtggcctttctcctccacctcctggggtacttstgacccccactaccccaccgcccccaagtcacggtgctgtcattattcatcttaattcagctgccataatactgcataaaggatgagggccgccaggcatgatggctcacacctgtaatcccagcactttgggaggccaaggcrggtggatcacctgaggtcaggaattcgagaccagcctggctaacatggtgaaaccctgtttctattaaaaatacaaaaaattagccaggcgtggtggcaggtgcctgtaatcccagctacttgggaggctgaggcaggagaatcgcttgaacccaggaggtggaggttgcagtgagtggagatcatgccattgcactccagcttgagccacaagagcaaaactccgtcccaaaaaaaaaaaaaaaaggacaagggcacaggcctcacctgtccagcaggtcattatgatttctgtgtctccttacacagtggaaaaaaagacaatgatggcatatgagaactgcacatggcttaaggccttgaggcaacagtgtcacatagtcctgagtttgaatcccagctctgtcacttacttgctgcatggccttaggcaagttacttgagttatttaatgaatctgagcctcagatgcctcatcactaaaatgggatgaaaaatagtacctactgcaagactactggaaaatgagtggagagtggatgtgaaacacttggcacagtgcctagaacataagaacacgtaaacaggagtabctgctgctgctgctgctgctgctgctgctgctgctgctgctgctgctgctgttgttaaagtggttttgtcctgaaaggacttactcccaatatagtcttaatttccccagtgtagcacacagggtagaggaactcaacacaacctcttaactggaacttgcagaagtgacattccaggaagccccagccccagccccagcccctcacatgcctatttgtgtgggctgtagatggtggcagaggagacttggagatcccagcacaggagaactttataaactcctgacaattcctctaagaataaaggcagaagatgacggcttctgacgcacactgctgcaggcctctctccgatctctcatgtatttggacatccctcaggcccatcagaatccagagattgctgtctgctgactgacaacagaaagagaaatttagaggtgtgagtgaaatgacagagctgtcacggctgcctctgaaacgactcttttcttaaagagagaaaagataacagtaaaaaaaaagagaaaattctcagacagctgctatatcctgtcacagttgcagagagaggttttttgtattgtttttcaaaaacgcttcagatgaatttttaaaatgagaaggggaaaataacccaaattttaatctcagtcttttatatgaataggataggatttggggacaagttttttccttgggacaccatagaggaaaatgtcagctagatagtcttccctggggttaaggagaggttttctcgctctttaaaaaatattcattaaaaaaaaaaaatcccaaactccaaaatccagactccaaagtctccttctttcctttcactgaaaccagctcatgaattcagatgctaattcttaagtggacttataaccaactaatgccatattagtcatcatccctgggctgctatgattctagcacatcgaagccatgtgtttgtcaaacattcagaaaacagctgaagcgatacatccaagagccagatctcactccccctttcttgccagccaatatttcctctagtgttagttattttaaatgtcttgtttctttctttgacatctgaaatatgaaagactgatcatttggagggttttcttaaaaacaaaccactctccagatggaaatccacaggctgacgacatccagcaaccctttaaccacacagaagtcgttggccaaaaagatcatgtttcaaaggctcccattttgttgggttttctgagaaccctaacttcactataaccatgagaagaaacagattcccaatctcacccacaggtcaagcacagcccagaaaggaatgcctttattaagataatgtcttgaaatacccaataattctaatagcaactaaaaaaacagatcataatagatggaaggaaattgcagttggagtgtttttccaagagtccaagagggccagaataagaaaccccatccttgcttgtaaaatgctccaggagaaccacaagcctacactgaattgctgattgatgtaacacttggattagaaatataccacatgaaatacaatttccagagaggaaaaggaagttcttgatgagcctggtgaaagagtgataaaagcttcactcaaggcttccactttagtatcagattgtgggaaactgtcattgaaacaacccaactgagtccattagccattcattgacaagcactacataaacccttaacacctccgctaagagaaggccccataatcaccctgttttcctgctgcgagaggagagaagggaaaacagcagacggggaggctgtctatagctaccccaagaacaaaagacatttttcttgatggggagagaaagggaagaaggaaatgtccaaaggaaggagaaaacagaccaatgtgaatttcttctccttttcaccaatatctctacatggcagtactgactcaggggtgctgagaaaccactcactatggaagagcaaagggaatagtattggaccaggattgaaaagcctgggtcctggttttcacatttactgtcactgaggagggctcattggtcacctcctccaggccttcacatccccagctctagacccagggcaacaactactgccctttctaccttctcaggttatttagaatacccaatataacaatggctgtgaaagtattttcaagatttttaaacactgaacaaatagaaggtaccactacttctttagatgttatggaagttaggactcaagagcttcttgtgcaagtcagctcacacggagctgagattaggatggataggaataagaagacacagtaaaaaggatgtggtcctctgtgcccatcctcttccaagcccacactgggcctgcccatcttcaacccttcctaagctcttcaacaagtttcccagctttctcctaacttttggtccccaggggtacctgagagagaaggagggttgggcaactagaatacaatcccataagctggcctcataaaatgcacaagctagaaagcaccatgatgcacagtgggacccaagcaattaaagtaccaactagatgggagagaaaatgaaggtggctttcaagaatgtttgagcagcagaacttttcccccaaatgaaatcctttgcagaatgcagatacaagtagataaaggtagaagtgctggggcttaaggggaggtaaagggctcagagtccccatcacagctcacctgtgtggtggcaccatggaaaggtctgaaatcccatgaatgtttcatctctttcttttatgggtgaggagactaaggcccacacaggagaagagatgggcccaaggccccaaagctagctgttggtcaggccagagctcaatctaatagtctccagcccactccttttccacaaatcacactacccctaaaggtgaaactagggggaagatcagtgtttgattagagagaagtggatacaagtatccagagagctacctattggacacctcaaaaaaagtagatgtgtcttggggtcatcaagtggcaaaggtcaaaccagccacatgatcaaggttgattttatctttcaacctgaatctcatggtagcatgcacaatctttgaggtctatctcagacaattccatttgtacagagcccttgataaacacagtagatatcccaaatactgtctatgatatcagcattggagcaaagtttcaccccagtccatcaccatcccaatgtacaagctaacttttggaagacattatatttaaatattgggtctgaggactcagagctcaatttcctcaagaaataatgtcactgatggtggtgagtttcctaaaaaamgtccagggaagcctatttgacacatagtttaagatgctactaaaggcatcatccttctttcagaaagagaaaattaaagcattgggctgatgcttctaaaggtgtcaaaactgatgaaaggtaccaagaagaaaaaaggaaacatggcaaaattatcataataagcgtgagcttgtgaacataaattgatgtaagccagaagctttaccagctcagctccactgtgctgaacctcagtatgcccatcacatcaggtgtacatgccagtgggggagaatttttgactgaaactgtctccttgcttaggaggaaagagaacccaaaaatggctgttaacatgattaaacacatgtgaaaattctttgagaacagtaatgccaaatacatgtcaaagggattctcattattggtaaggttattattactggaccgacaacataagtagttgctcaatcgagcaacaagcaaggaaaacagactttagactcaaagaaaagaagcagctgagagccagatgaccacaggacaaacctccaagtgtctttgtgggattttcccctaaagatattaaggcaacatagacaaccatctagggaagcaccagattcacccaagaggcaaagagaaaagccagagagtacaagtcctttcttgcaacagccaacagtggctgtcagtgtggcttaggaaagccattggtctttaaaggcctgggctttattatattacccaagttgaagggttttttttaattgtttaatggttatttttaatgaggggctgagggctaaaagcaatcagtataaaacagaaacaaaacccatactcacctaattacaaatttaccaaactcaatagccacataaacagctatagtaccctcaaggttctaggtttgttttcatgttcaaacaatttttccactcacttgctgcacttttttcatattccatgctctaattcaccctccaaaagatacctaagggtatgaatctctagtgggacaggaatgagaggaaaaacaacagtttttaatgatagccacttcatcaatttggcccttatttccccagattttagcccttaagctgacttatccctgcacattatggtggctcctagtttaattggataagtattttgcccacattctctggcaatgctgttttttagaaagtatccggcaagcccctaatgctacagaggcacttgagcatgcaaggccacagggaacattctagaatgtgcagccttccctctatcactctggaacttaagagcttagtagaacctcctctcatgactgaagctttagagagaagcctgccatggtacagcccttgcaaaacttccttggtgaaagatgggctggtctcccggccaaggaactgtagctgcttgtgtggatttttgagaggaagagaaatgcctcccttttccatgctgctggggcacagatcagccccacaacttctatgagcagccactcctccggaagggtccctctgtccttacagctctagtggggctcacaagagctccccactaacatgattcacaggcctgtccttttgagcctgcttgaccctgtccaccaagaccacagaccaggtggagagatgctgcgagcactcccactgcagagccaacaagccccctccctcaccaccatcagaaaatttttaggttaatgcaaaactgtcaggcctactaggcttctcatcattcactcagcacttcgcctttaatctaaggaatacccacagagttagcaggaggcagtagtagggagtggaagggggtctcaaatggaacgggacacattacaggttcctcctgacctccctcaagaacaggctcttcacggggccctgtctccactgatgtggggaaagggttaactcgtgggcctcccagggaagctgctggtcctttcttcttcccctcctcagctcctcccccacccctgcccgccgcctccctcctctcccagctctgtgtcctgaccttgccggttctgtgccccatccatcttgggctgcttagccatttcgctggcttcatactgtgcagattaacacaattcatcaccacaatcatccccgattcatcaccctctccaatgaatgttttgacatccagttaattttctgctgatgatttatcaaattataattaccatgctctgaaggactcatttattatgttgatacatgataatgatgccaaagtggattgaattttaagtaagttctttgcgattataacatatgcgttattgtgagtaatgttatacaatttaggtttttacagcctggaaactcctgggactctcttaatgttataataatcaatgcaaaaaaaagtcagattgttaattcaatttttttttgtacaaattgtttggctagggagcaaggagcatgaaaaagttcaattaaattcaaagctacagtttaagatgctatgtaattaaagaatacagtaatttaattgggagttcagcaatagaccaagtgaattagacatacctgaaaatgcctgaggctggaaaatctagaagtgccacaaaggagggacgagggattggagagctcagctctaccgcacaaaacctgaaactcctcctgcaagtcgagggcaaaccccaacacctcaaggaaacttgtactgactaccccagtctaaagggagctcagcctcctacaaagtccctaccatatgcctgatctgaacaactcactggctttgtcacacactgtgtgaaggcaacagccttgcctcctatggggtgcaaatgctaagggatactattagttgggtgtatatctactgggtgccaggtgctaaggaggtaccttccctatcttgtttgatctcataatagcctcgcagggcattatctccattatataaacaaggtaagcatagcctgaaaggcagggtaatttgcccaaggtcacaaaaccaataaatagcagagccatgatttgaactcaagaatctctaacttctaaggatctgctctttcctacattcccctcagccccacaagtatttgtccactgctcctaaagcactgttgcccatgccaggtgaccaagggacaactgtaatttaatggattcactcatttgttagctaacttttggagggccttctaggttccagacactgtgtagttacccaaatgatgaataacaaggacccctgccttcatggaatgaacaatgtactgggtaggacagcaagatagaggaccaaggagcagacttgctgcatgctgttcccaccacccagaaatgaccatttcctaagcacggtgctaggtgctttccgcgtatgggttcgttgaatcctcaaaatcacaccataaagtaggaggtattttcaccctcattttacagatgaagaaactacattcagagtcatgaagaaacctgcctaaggtcacaaagctagtgagcgggagagagcagaaatgctgggattcacacccaggctctcgtccacccacatctcccaaaacatggaatatatatatcccatcagtgggacacaagggctcttttgctgatacacagataaacatttaaattttcacaattatgtagctactttagtggatgataggaagacatgaaactagcattgcaccctgggattttccagatcttatttcttaggccaagacaaggtaataagcaatgatatgctagattagaattgcagaagatattaaggagataagggtacaggtggtatgaagcaatacagcaaaagcagaaaaggttgctacatgaatggctgatgtttgggcttcactgagcttcactccattgcctccctataatgtgtataaacccagtgtcaaggagccagggatgacagatgattgggcaccatagctcaggtacaacagccacaaaccctcactttggagaaatctaggattctggatttctgtttcactaagcccaagactagagtttgaagttacctaaagacttactaaataaatatttttagagaagtcaagatgccatggtcctgaaattgtccagaaaagaagagaaaggaaactgagccgggccaagccataacagcaccacagagcccaacaagtagagttttggtttttttttcttttcacagtggccttcaaattcactagtggagtgcggagaagtaaagagcccactcatggaattgggatgccattcatctaagcatacctcatttacaaagtttagaagtcctaaatgtcagttctaaactagtcatgctccataaacataaaatatatttctaaagatacattctcataatttagaattgatttcaaatggttatgaatccaaactctttacttgtcttattccctgccacactgcccctacctagtttatgcaacaggtaatgtttgttactcagtaagattactaataattattgtaacagtatagtaatataagcaacaataattaatatttgacagcttgttaggtaccaggtgccaaatacttcagatgctgcagtgcctcacttctttctatagcccttagagttaggtgctattgttttctccattttacagatgaggaaactgaggcttaaagaggctaaagtaacttgcttaagggtgccaaatagttcatgttaaaactaggcttcaggctgggtgtagtggctcacacctgtaatcccagcactttgggaggccgagttgagcggatcacttgagatcaggagttcaagaccagcctcgccaacatggcgaaaccccatctccaccaaaaaatacaaaaattagccaggtgtggtggcacacacctgtaatcccagctacttgggaggctgaggtagaattgtttgaacctgagagttggaggttgcagtgagccgagattgtaccactgcattccggcctgggtgacagagtgagaccccatctcaaaacaacaacaacaaaaacaaacaaacaaacaaaaccactaggcttcaaacgcatgtcttctggctccggatcaggcactcttaaccaagatcctatctagcctctatacatgagagtttactgagaaccttctctgtgcatgtacgggggtaacgccttctgcagagatctgctttatggtcatagaactgtcctcctaattccaccagtttgatcatcttatgtataaaactttgcttaaacctactagtctaagaacagattttaaaaggaaacaaaacataaggctatgccaacagagcctggcctcaaattcactctcatattgatataaagacagtttattagttcaattcatctaatgtctgattttattaaatggtagaaattaaataaaggttttaaaataagtaaatcaaagaaaatgtttcctgtctaccttgaccccccaatctgtctcctctggatggtgtgttaattggatgctttccaaagggaggaaccaaacatttcttaacatccaattcttgagagtccagtaacatattttctgcataatagctataaataatgaacacagggctacattcattttaatccatgttaaacatggtttctgggttgagtttatttgtaacgcattccttctctgtgctatttccctcctccccaccatgtcactatgtagctcgaaatttcataatatgaacgtgaaaaaaacaaacccaatcctaattatctcctgcaggatcataaaaatcacattaataaaatgtggtaaatatcagtagtgatcattaccaggtctgcatcaccagaaaataaaatgcagaaccccaaagcaagaaggattaaagcaagcctgccaccattaagcacacacatatttgcatatttgctctgtaagcagatttaatggtaataataaagttgtctttaatctgaactggacaaaaatttcaaatgtgtgtggatatgcatagaattcctggcatcagtgcaccactttgtattgttcaaagcactgccatctccacaatttcatttttgcatctcttttgccctcactcaaaagcaggtacaacaggtctcattccacctcacaactcagattgaaagaagagaggaagatgtaaccttcccagattcaccaagttagtcaacaagtggaggttggaacccaagctccctgccacccacatctatgatcttcccactaaaataatctttcttttgcatagac

SEQ ID NO: 6997 - DNA, 67697 bp, Homo sapiens
  misc_feature (1)...(67697): n = A,T,C or G, or insertion/deletion polymorphism (see Tables 1-2)
gctaactggggcatgtcctgtaaactttttgtcttgaaataattttagacttactacagtgtttccaaaatagtacagagttcctgtatatcttttacgcagcattccctggtgttaacatcttacacaatcacagtacagcgatcataaccgggaaattaacattcatacaatactattcttcagccattattcaaatatcgccagttttctcactcaaaggaaaaactcctaaatcttcgttaaaaaaatcacaggaacaactgtgtgcagtggctcatggctgtaatcacagcattttgggaggccaaggcgggcggatcacgaggtcaggagtttgagaccagcctgaccaacatggtgaaaccccatctctactaaaaatacaaaaattagccctgcgtggtggcacgcacctgttaatcccagctactcaggaggctgaggcaggagaatcgcttgaacccaggagttggaggttgcagtgagctgagatggtgccactgcacttcagcctgggtgacagagcgagactccatctcaaaaaagaataaataaatacatacataaataaataatcgcaggaacatatcggaaattattgtctcttgaagcaagaactgtcacaccgttccttcaactcatagttcttttcttttttttattatttgtttgtttgtttgtttgtttgttttttgagacggagttttgctctttattgcccaggctggagtgcagtggtgtgatctcggctcactgcaacctttgcctcccaggttcaagtgattctcctgtctcagctgcccaagtagctgggattacaggcgtccgccaccatgcccggctaattttttgtatttttagtagagatggggtcacaccattgttggccaggctggtcacaaactcctgacttcaggtgatccacccgccttggcctcccaaagtgttgggattataggcgtgagccaccatgcccggcctcaactcatatttcattagtcaaagtaactcacaggaaatacatcccttccctagtggggagaactgcaaagtcacatggcaaagagtataaaggtaaaatttggatacagagtatgaaaaactaagaatagtcatgtgatctacctaactgaccttgtgttttttcaaaagtgacaagttgtgaatagtgttgcaacgaaaagataaataaaatcaagtgacatgatctttgacatacagtagtcgcccctaaagtaattggagaaaaacatgtgtttcttacggtgaggatagatctaagggctatggctagattaagagagtactaaaagaaccctcggatagtcacatagtttaacataatttagtcatcccttctctctgttaaacttaactttttctcagtacacctaaaataatttcaaaaagatatgttcttcctcacctacttctaacttgtttcaaagaacataatttgaggcataatgtaaatattgacttttaaaaatagaagttatattactttttctggccgggtgtggtggctcacgcctataatcccagcactttgggaagctgaggtgactggatcatgaggtcaggagttgaagaccagcctggccaatatggtgaaaccccggctctactaaaaatacaaaaaattagccaggcgtggtggcgtgtgcctgtagtcccagctattcgggaggctgaggcaggagaatcgcttgaacccagaaggcggaggttgcagtgagccgagattgtgccattgcactccagcctgggcaccagggtaagactctgtctaaataaataaataaataaaaacagacgttatattacttcttaaagtgtatctaccaaatctaattagcatagggttttggtatattccatcattcatcatacaagagagaaaataacactcttcttcaatagacagacattttatataatttattttatctttgaaaaatttttcattccttttcctcacaaaatttgattttaatatgtgttcaaaagtcttttattaatcatcttatcatatttctctgagcaaaaatgtgtctaagaattgaaattattttaaattgtttttatttcctgtcatcttaaagttctttttttttttttttttgaggcagagtctcgctctcttgcccaggctggagtgcagtggtgtgatctccactcactgcaagctccgcttcctgggttcacgccattctcctgcctcagcctcccaagtagctgggactacaggcacccgccaccatgcccagctaactttttgtatttttagtagagacggggtttcacagtgttcgccaggatggtctcgatctcctgacctcgtgatccgcccgcctcggcctcccaaagtgctgggattacaggcgtgagccaccgcacccagccgatcttaaagttctaagtggtcaatgtttcttctggattaaatgatcactacagttattagtaataaacaaacaatcacaaaaagtaaatacacttttaaaaaataattgttaagcattgtaagagaaacaattctcagagaattgaaactcttggtccaggtccagggacacctgggaagctgaccctgaatttactttcttgcaaaattagttctcaaaatgtactaagttacggtaagtgtagaatgttgtgtggaccatgctttttccacctgaagtgtatctggttgttggggctatttgttgtataacctttcattgaggtgctacagctgctcccaaagaatgttatttatggccgggcgtgatggctcacgcctgtaatcccagcaacttgggaggccgaggcaggcagatcatgaggtcatgagtttgagaccatcctggccaacatggtgaaaccccgtctctactagaaatacaaaaattagctgggcatggtggcatgaacttgtaatcccagctactcaggaggctgaggcaggagaattgcttgaactcgggaggtggagcttgcagtgagccaagatcgggccattgcactccatcctgggcaacagagtgagactctgtctcaaaaaaaaaaaaagttatttattaagttatacacaccctgaggaatgatatgactaataagttataaaaagtcaaagagcagatagtagaagagcttcgcagtgccaaggtggtccatcttgctttaccttcatcccttgtaactgagcatgacccatgaaatgataagcttggaagctgtgcctgggatattgcaaggccttttgctcaaagcagtgcttgcttggatgctgaactacctgtcctgcatcctttgaataaaataagtaaactggtattgaaactgtgtcgttttgatctgggcgcagtggctcatgcctgtaatcccagcactttgggaggttgaggctggtggatcacctgaggtcaggagatcgagaccagcctgggcaacatggcaaaaccctgtctctactaaaaatacaagccaggcatggtggcgggcgcctgtaatcctagctacttgggagactgaggcaggaaaattgcttgaacccgggaggtggaggttgcagtgagccgagtttgtaccattgcgctccagcctgggcaacaagagtgaaactccatctcagaaaagaaaaaagaaactgcgttgttttgttagtctttccatcaatccaggtttgtatcaaaagtggcgattgattccggtgctttgggagtgatgaaaaagaaaaattaaattaaaaataaagtggcaattgatacgaagacctctgaccccgtagaggcaaaaaacccttatgttgtaagaagatgaatagggaacaaataattttgatgcctgaaagattgcttaaccatcatgttgtttgatatgactccatccaagaattgctcttatcagtgaaatttaaaaaaacattgatctaattcactaagaactgattaaatgggttgaaaaaagagaagcaagcagtgcagggaaaagctagaaatactatcccatgttcgtttcttatggcttttttggaaatgaaagcattgacaaagagaagggaaaggaaagccaagagctctaagcctagcaaaatctgatcttcatagcttccctagtacctgtgagggaaagggagggacaacatagttaaatcacactgccatcccactgagatccctccttaatcaaactagcccagatcccaataggggcatgcaaggcgttacagaggacaagcattatagtataaagaagttgagtaattttgttgaaaaataacagcaactgcttaagaaatccttgtgatcttggatccttagataaaatgatcaggatgccaaaaatgtaattgtggattctgcataatgaagcagtttgcatggaataagcatctatattatggaaacaaattgtatctaatgagtccttctgtcattcctgaacttaacactaatagctgagttagtgggtgctccaatatggaagtaaaacattactggaaatacttattttagtgaaatggatgtcgtatggatgctcatgactttttaataaaatgcacagggttcagcatcaaatccatgtaaacctttggcaatgggaccaggcgtggtggctcacgcctgtaatcctagcactttgggaggccgaggcaggtgaatcacctgaggtcaggagttcgagaccagcctggccaacatagtgaaactccatctctactaaaaatacagaaaattagctgggcgtggtggcagacacctgtaatcctatctgctcgggagcctgaggcaggagaatcacttgaacctgggaggcggaggttgctgtgagctgagatcgcaccattgcactccagcctgggcgacagagcgaaactccatctcaaaaacaaacaaacaaacaaacaaacaaaaaggttggcaatgttgaactttacctgagcatcatactcctggaaaatagcaatagtttaaaaatccctccactcttttgcggtcctgaaaatggcttactgcaaaaatccacccttccctatatgatttagataagaccaatggatgacgacccccttgtttacctaagacaaagacaacacaggctctccaaattcccattattttatctcataaatgattagatgaactgtttgcactgaccagtctggacaaaatacctgctaatctgacctgaccaaactctagttaggcttctcttttcccctgaggcccctgaactttggcctactgttgagtttaaacaagcattggaatgtggaacaacctccttaatgacccttccagaattggctgactgcaaagaaaaattgtccaatgtgccactctctgattccatttcccccatactctgttccttctaaccttgtttgctccagtggagtattctttcacaatagctttccccctgccacccccattacataagtctttttgaaaaaggcctttctttatctaagtatggatttgtttttattggactccttgtagcataaataggtagaatggaatagaaggggttttattatagtgatttcattcaattatttgaactctttctgaagtatatgccaaaacccacatagttactgattatcaaaagttgatttttaatgaaatttggtatgtcaactttctcagctctctttcaattttgttgaaagcaaagaattgggaaacatctaacttgcaaaagatgcattactccatcatcagagtcatccacttcctcactggccagcactgatatttagaaatgtatctttcctggagccctggaggttcctcctcccataagcaatgcaccatagtgggtgtatatcagtagcaggagcttggatataaatggggagctggaagagtaggactgggtaacatctgagagctagcatgatagaagatctcttttaagaaaaagcatagacagaagttgagaatctagaaactcattttctaaaaactaactgccaatggtccattctctgtcttcatcagagctgccattttgctgttgccacttgctagtgttgaaaaagcctcctgcttcaggttcactatcagcatgaatgaagaaaaggtggccagatttcaggctcagatccagaatggwgataagggtaccttcccttacagaaagaagataacatatagaatagcaacagctgatgtcaaaaarcctcttttcttttttaaartagyggtgagtaactattactggaatggaatagataaacctaaatagaggtaaaggggtaatcccaggactcaggcttgcctctcttatagcattataattactcatcatgcaaaagccaaaacagtgtcagcaatgctccctggaatattaaggtagctgggcactgacaatgttacaagttctaggaagttagccaaatagtctttctcgtagcaagtattgaatagcaaaacatgaaaagtaggagactagtggctctgtcctcaattactggcttcgcgtttcctttattattttttggattttaagcttgcatacacttactaaataattgcatgtcaatcttatcccgtgtcctaactcttcttactagcactgcagaattctgtcttttcagcaaggttgaaattgtgaatgccctttttgtccctaacaactatgtcaagatataattcacatgcaatacaattcacccatttcaatatattttggctaattcgttattcatttacaaattgtggtaaagtatgtataacataaagtttgccatcttggcttttttaagtgtatagcttagtggtattaatgaatgatattcacaatgttgagcagccaccaccactatttacttctgaaacttcaacatgcccaaaataaactctaattattaagcaataactccccaacctctgataatctctaatctacttttgttactggaaaggggtcctgatcctgactccaagagaaggttcttggatctcgtgcaagaaagaactcagggcgagtctgtaaattaaagtgagaacaatgtattaagaaagtaaaggagtgaaagaatgggtactctatagacagcagccccaagggctgctggttgcccatttttatggctrtttcttaatatgctaaacaaggggtgggttattcatgcctctcatttttagaccatatataataactttctgaygttgtcatggcatttgtaagttgtcatggcactggtgggagtgtagcagtgaggatgaccagaggtcactcttggtaccatcttggttttggtgggttttagctggcttctttactataacttgttttatcagcaaggtcattatgaactgtattttgtgctgacctcctatctcatcctatgaatcagaatgccttaactgtctgggaatgccacccagtaggtctcagccttatttcacccagccccttttcaagatggagttgctctggttccaatgcctctgacatttcccaccttccttttataagagaacccttaatcctaagggctgcagagggacaaagatccattttctgtaacttctttatgctgaataggggcaatgatattcctgcctaactattagggtcttttgtgtttacggtagagaggagcttagttagaaagcattggcctgggygcagtgactcacgcctgtaatcccagcactttgggaggccgaggtgggcagatcacctgaggtcaggagtttgagaccaacctggccaacgtggtgaaaccccgactctactaaaaatacaaaaattagccaggcgtggtggcgggtgtctgtaatcctagctattcaggaggaagaggcacgagaatcacttgaaccaaggaggcagaggttgcagtgagttaatatcgctccactgcactccagcctgtgtgacagagtgagatttttgtctcaaaaaaagaaagaaagaaagaaagcattggtatgttgagggccatttataacttttgagttccaacaaaaggtgatatttggaagattaataagtgtttaagaaaacattgagtaagcttattttgcattgctatacaaagagtacaacagcaatatatttcaccacactaaaacaacataagcaaaattatcccaacttaactaagttagaaggctttctatcaactgggcaagtgttagaaccaagctgatagggggttgctagatgattccagtatgtgcccagaattagatattgattcagattttgacattacccatcctctcgtttcttttgagcagcagttagagattactggttgatttacaggaataagcagagtcagtttaatttgcagggaaaaaaatttaaagcaactgatgagactagaatttaataacaagtgtaccacagttcttgaaacattaagttttctgtctccagtttcccatttttattaaagacaaattatggtaacaccaacttgctttattatacttggcctgattgtttgyataaagtgtagcaagaataattatttttcacataagctttttgtaaattggaactctgttccatagaaggaatcttagataagatttttttagatccgagccctgccattggtttgtatgcttaaatacctatgagctaggtaaattcctctcctcttgaggttccaagataacctggggcttctgggcctgttagaaagtgacattctttacttatcacaggtcagaaaccctgtgcagggactgtgtaggcaaggtatgaggccagttctcccaagggacttgtattggccctataagttaaatttaattccttaaaggaaaacacaccattccagttaaagccttggtaaaataaccagtttttccaattgcatcctgttacaaaagaaaatggatttttattgcacttatgcaaataactatattgccataaattaagaatacttacaaatagtttccatattttagagaaatctggtagagagaaacaaatatgatccacgttttgtttacaggagtatacttaattgttaaaagctgtaaatagcttctattagtttagtccatgcagttaattcctgtttgatatttatgaacatttcagctttccrtgagtccgaaagttttttcctgtattttaatattacagtgttcaaaggtattagaaacctgaatttaagagcacctgttagagtcctatagctgattataaaccatttttttaaagaggaataaaacaacaagtgtccgtggatgacaaaatgtcttaggacagtcacagttaaaaacacaattgacaaagaaatttggttacctctgtggcatacaatgattttatgtaacaattataattattaataatatacactaagttatattagaattattttggaacacataccaataacatatttatacaaatatagcccaaagaagctaaacattattttatatttgacagtgcttcttgtatgatttttatataaaataagccaaatgtcacttttacattagtgtactattactgtcaaacccagtttttaataaaaccttatagacaaatgtatttaatcagtttgaccataaggtaagatttttataaacctcttttataactacctttacaatatttgttaaagagcagagtaaaagcaggtttttgctttaagaaaaacctgttgtgcttttattccaatgtttagtttaaaactgaataatacccctttaactttagccaatctgttcacacatagattttttttataattaatttttttataaaacgtttacaacttgtttaaacctttagaattttcctatttcacttaaagcaatcctttaaccctttaggcaaaaaaaatacatgcccatgcctttttataattttttactaaaaacaaagtttacttttcttacacaccttgcatgtaaaactgtttcttcagtagtcacaaatacatgttacactgttaactcttagtgactttaacttttggtgaaaaccttggtaagttcagggttttaattaggtatggagccgaggacagcagacagaagtgcagataaggtctgatttttttttagcatttacgtgtcccaggccttacctagctgtaaagcaggaaagttttacagttacaagttatagtggcattttatgacacatttaggaagcctaattacctttaaattgtacaacattttttgcataaattattttcatatttttatgacttacacagaccatttatgacatgcttggactttyggacttgtcctaaacatacctcttgtcaaacaaccattttactttagaacaagaatttaccatacaagatcctttgttatataaaatctttttctttataaccttctttgtatagctagggggcatggctaatcccatatatccccaggccttatctagaatttaatgctttaaaatgaattgaggctgggcatggtggctcaggtctgtaatcccagcactttgggaggccaagtggggcggatcacttgaggtcaggagttagaaaccagcctggacaatgtggtgaaaccctgtctgtactaaaaatgcaaaaactagccaggcatggtggtacgtgcctgtaatcccagctacttgggaggctgaggcaggagaatcacttgaatctaggaggtagaggttacattgagctgtgattgtgccactgcactccagcctgagcaacagcatggaactccatctcaaaaataaataaataaaatagaataaaataaattgaacaatttgtaaaagtcaaagaagcagtttatgacctgccactctgcttagcacccaatatcaaactggcaaggctcaaacttgccccctgttggrccccatcatcrttaatccaacctctgaccagagagttttgacttgtgatctctgggaargatggttaccctgagtaatagaaaaaataagaaagggaaaggagagagagaaaagccttgcctgtggcaggatggggaaggtgaagatctcagggagttgagagaaagacccacccattccagcaacactgaatcaaaagttcaggtggccgcttgtcagctgtgaagggatatttttcagcagtcccatcagctctcaagtttccccttttagggaagaaaaagctccccatgtcccacgatcctgttcatgcctaatcctgtcacccatagctgtcagcaaagagtgcaaggcagattatttgaaagagaatagcagttaatagtgtcaaacccattcttagccragaaggactttactgagagaggcctctaactccctaaatcttagaagggataactcttctaatttgggcctctaacccaaggttggttaagcgttcttgccttttattaagatgagtctctaacccactctgtttcaggagagactctaactcccctaagttgcacctctaacccaatcccatcctttacttgggtaccccaattacccaaagttggccaattagtgctgcagtctgtttcctttgggttgagaagtattttcagtattgtcccayttgtggttcatgagaaagatgttatcagaccccaacacttaaccaaagttagcctttgagttgggagtttccacactatagtcccctctgggtcgtcagaaagatgttactggaaaggggttccaatccagaccccaagagagtgttcttagatcttgcacaagaaagaattcagggcacattcatagaataaagttaaagcaagtttattaagaaagtaaaggaataaaagaatactccatagacagagcagccggctgctggttgcccatttttatggttatttcttgacgatatgctaaacaaggggtggattattcatgcctcccctttttagggccgggcacggtggctcatgcctgtaatcccgcactttgggaggccaaagcaggcggatcatgaggtcaggagatcgagaccatcctggctaacatggtgaaacccgtcactactaaaaatacaaaaattagccaggcatggtggtgggcgcctgtagtcccagctactctggaggctgaggcaggagaatggtgtgaacccaggagttagagcttgcagtgagccgagattgcgccactgcactccagcctgggtgacagagcaagactccgtctcaaaaaaaaaaacaaaacaaaacaataacaacaacaacaaaacacatacataccaaaaccaaatggcttacaacaagaattcctttttttttttttttttaggagtcttgctctgttgcccaggctggagtgcagtggcgtgatctcagctcacttcagcctctgcctcccgagtagctgggattatagcatgcaccaacatgcccaggtaatttaagaatttatttttcttttattttgagatggagtttcactcttgttgcccaggctggaatgcaatggtgccatctcagctcaccacaacttcttcctcctgggttcaagcgattcccctgcctcagcctcccgagtagctgggattacaggcatgcaccacccgcctggctaattttgtatttttagcagagatggagtttttccatgtttgtcaggctggtctcgaattcctgacctcaggtgatccacctgcctcaacctcccaaagtgctaggattacaggcatgagccaccatgcctggccaagaatttatttatcttactggcagatctgcaggtcagctgataattgtgcctcagactgacactcagatgcctaggctctggggttcaggttgtgctcatatctgtttcstgagtcttattctgggacccaggctgaagaagcagtgctggtgggacatgttgttcttatgaacaatggcaggactaggagagctatgtcaaaccaagagccaagtcaaacatattcaaggtctctctcctgtctttccattagtagtacatttgccagagcaagtcacagggccaggcccaagaagtataatcttccyacagtagaagggagaggggagtggatattcattgaacaataagccaaactactgatcaacctatcaatcatgctcatgttattaggttggtgtacagatcttacattggtattttggttgtacttacatcgatgttatccatacacaagaaattacatatatattctctcttcactcccttttcaacacataaggtaacattcaatacaaatacctaatgtaacaggtcatctttaaaataaattgtttcctgccagcagaggtgtgctaaatmatcatcatcatcatcatcatcatcataatttatgagagatttggggctttcccaccttcttctttaattcaagattgctgtcccatacatcatcgataattatgctttctgctgacatagtcagattcaacactttaagtttgtcacacacattgttttgatattgagtgcttgatwtggaaattcttacaactgaaagtgttggaaaggatgagatttttaaaaggaaaatgaaggggaatgtccaaaaggagaagtttaagggaaaaaaaacttcagagacattgagacgactgtctgtgaatcttcagcactcctacatgtttcgctcctgtgtgccaggattatctttctaggaatgcctagtgcaagcaggcagccctggagarataaagacaaggacttcccctgaagcaaatgtatttacattcctagataaataaagatcaaaacggtaactttcaccgagagatttacagacatctttccccagaaatatttgctcacattccagtgtagaatgtttctctctggaagggaggatgggcagattttcctgcagccctatgcaaaatgtgagcctcctaaactcagacttcgcctcctgtattgcacctgaaagcacctgtaagtaccatctggccctccctatgttgccttatgggaattggggctcagggaayccaagctctgaagtcaccttggctgctgcttttactgtgaatacacgtctttgtctctgactcagagatctcctgttttctaacacgatgtatataaaaatttgtgggccaggcgtggtggctcatgtctgtaattccagcactttggaaggccgaggtggctggatcacctgaggtcaagagttcgagaccagcctggccagcatggtgaaaccycatctctactaaaaatacagaaaattagtcrggcatggtggcagacgcctgtaatcccagcttctctggaggctgaggcaggagaattccttgaacccaggaggtggaggttgcagtgagccgagatcactgcattgcactccagcctgggcgacagagygagactctgtctaaaaaaaaaaaaaaaaaattgtggcacggtaacttgttagcttgcaagtagcagaaaatctcagacttttcagtttctgacttcacaagaaggaattaagaaaagtcaggaaaaatgtraataaactgaggtatctgtcccatccgaaagtgaccgggtgactctcttagtttaagaggatttatggaactgaaggcagaaatctgagaggccaggtagtttgctgtatttccactcggtgacataagacataaaatatacgtcctcaattaaaaaataaagcatggtccctgcccacataatgtttttattcaaagaatacaaggggcaaacacttacaagaaaaaaaaaaaaggcttttgaaacctccagggaggtatgactccagtgccagattggtgctgggggaagaaaacaacaagaggaagcagctggcaccaaaaataaaccagtacacactaaaakgaataatttscttttcattggaaaaatggcccattccaggtctggggcacagaaatgtccaataaaaataaatctggacttaaggagatcattttttaaaattattttattttwttattawtattattattattattattattattattattattatttgagatagagtcttgctctgtcacccaggctggagtgtagtggcatgatctcagctcactataacctccgcctcctaggttcaagcgattctgctgctgcctcagcctcccaagtaactgggactacaggtgcgtgccaccaagcctggctaatttttgtattttcagtagagaaggggtttcaccatgttggccaggctggtctcaaactcctgatctcagatgagccacctgctttacctcccaaagtgctgggattataggcgtgagtcattgcacccggcctatttttaaagttttatttatttttttgagactgggttatgagactggctaatttttatttttggtagagatggggtttcaccatattgcccaagctgatcttgaactccttggcctcagatgatccacccgccttggcctcccaaagtgttgggattagaggcgtgagccactgcaaccagcctagggaaataatttaactagagagaaagactattgtaatagtgtattagtcggttctcatactgctatgaagaactgccctagactgggtaatttataaagaaaagaggtttaattgactcacacttctgcatggctgggcaggcctcaggaaacttacactcatggcagaagacatctcttcacagggaggcaggaaggagaagtgctgagcaaagggagatctcgtgagaactcactcattatcatgagaacagcatgggggaaccacccccatgatccaattacctccacctggtctctccattgacacatggggattacggggatgacaattcaagatgatatttgggtggggacacaaagcctaaccatatcaaatagggagagcactctgaactcagaaatgtataagcatctcaaactcaaacagaaaaaagtttccttttagggtaggggagaggaagcagagataagagcctcttttaaggggaagctagataagtaagaagaaatgaccagtagatctgacaggaaagtgggctcgatgtgattagccgactcccaggagaagctgataaagggcaagttctacttctttttgctcagatctggaggcaagcagagttcaggggcccataggaaaaagagaaggctttggttaagacaaagcagagggtaagaaatgggcaattgtgaatgcttagttagaaaatacaggctgggcacagtggctcatgcctgtaataccaacactttgggaggtcgaggtgggtggatcacgaggtaaggagattgagaccatcctggctaaaatggtgaaaccttgtctctactaaaaatataaaaaattagctcggcatggtgacatgtgcctgtaatcccagccactctggaggctgaggcagaagaatcgcttcaacccaggaggcggaggttccagtgagccgagatggtgccactgcactccagcctgggcaacagagcaagacaccatctcaaaaaaaaaaaaaaaaaaaagaaaagaaaagaaaaagtaaagaaaatataaggtatgcctggaacatcttgttgtgtccctaaaattagattttctagttacaaatgatgactctaccacttgcagtttgttaaaatgagcctcccaaaattacgtacacaaagacagatgttaagacaaatatgatgaaattaacagtgatcgagtctaagtgaaggacatgtagctaattcattgtattattatttcatttatttatttttttaagacagggtctcgctccatcgcccaggctggagtgcagtggcacaatcatagctcattacaagcttcaactcctgggctcaagtcatcctctcacctcagccccccaaaattctgggattacaagagtgtaccactactcctggcttccattgtacttttaaaattttccttgcatttgaaagtttataataataaaatattgggggaaaatacacacagaacagacatattttacaagaaatttcaagtgcttaggaataaacctaacgaaaggcatataaatccttctttggataaaattataaaatcttattgagctgcattaaagaaaacctaaataagttgagagacataacctatttttggataagaaggatcaatatctccagctgattctgaaagtattgtggaattgctcacagtctttcttttcaacttgaacctggcagaatggcgctggcaaagaaaggagaggtgaagaagggccattttgccatccacaggtggtgacctaagaatactgccatcaatattcataattgcatccatgcagtgagctccaagaagcatgcccctcaagctgtctaagatattcagaaatttgccatagggtgatggggactccaaatgtgtggatggacagcaggctcaaggaagctgtctgggccaaaggaataaggagtgtcccataccgtctccatatgcattgtccagaaatgtaatgaggatgaagattcaccaaacaagctctctaccttggtaactcatgtacctgtcaccactttaaaaaatctacagtcaatgtgaatgagaacaaactactgattgtcaaagttataaaaccacctaaataaacaataaaaagtgttatacaggaataaagggccaagcacagtcaaacactcttgtttgtaagatttagtaggccgggtgctggtggctcacgcctgtaatcccagcactttgggaggccgaggtgggcggatcacgaggtcaagwgatggagaccatcctagccaacactgtgaaaccctgtctctactaaaaatacaaaaattagctgggcgtagtggcatgcacctgtagtcccagctactcgggaggctgaggcgggggaattgcttgaacctgggaggcggaggttgcagggaggcggaggttgcagggaggcggaggttgcagtgagccgagattgcgccactgcmctccagcctgggcgacactgcgagactctgtctcaaaaaaaaaaaaaaaaaaaaaaaaatttagtattagctatagggtttttttaaaaagtaggtctatgaaacagaaaggaaaaccaggaatgaagtcctatgcatacacagaaacatgactggggtggaacaccaccacagatcagaggagaaaaaaagatggctcctgggaaaatggttctgaaacaacagcaacaaaaacacagtttcagagaattaaagccctaaatgtaaaaggcaaaattataacaacttttagaagccaaaataggaaaatattttaagacactagagggggaaaatatttattaaacaatgtgtgaaaaacacaggacaaaggaaaggattgagaaattgaactgcaataaatgaagagcatctatcaaaagataaccataaagtaaatgaaagatgatgccaaaggaaatgaccaacaaaacgaagatatctgcatatcatatcactggaaggattattacccataatatattttatttaacttcaataaaaatggaaaaataaatacacagaaaaatgggcaaaaggcaattcatagataggactcaggaatgtatttttaaaagttcacatggggcgcagtggctcacgactgtaatcccagcaccagcactttgggaggccaaggcaggcagatcacaaggtcaggagctcgatgtattgttgaggaatacatatacactataaagattctagtgtacattccagattggtggtgcaatcatagttcacagcagcctcaaactcctgggctcaaacactcctcctgcctccgcctcccaagcagttaagactacagcatgcactatcatgcctggccaatttttcacctctgtggaaagaacgggtcttgctatattgcccaggctgatcttgaactcctagtgttatgtaatcttcctaccttggcctcccaaagtgctgggattacaggcatgagcctggccagtttattttctttctttctttctttctttcttctctttctttctttctttctttctttctttctttctttctttctttctttctttcttctcttctctttctctctctctctctctttctttctttctttcattcttttttctttttttttttttagacagggtcttactctgttgcccaggctggagtgcagtggcatgattatggtgcccgcctgtagtcccagctactcgggaggctgaggcaggagaatggcgtgaacccgggaggcggagcttgcagtgagccgagattgcgccactgcaatctcaaaaaaaaaaaaaaagattttggaagtttggccgggtgcgatggcccatgcctgtaatcctgacactttgggaggccgagacgggcagatcacaaggtcaggagttcgagaccagcctggacaacatggtgaaacccccacctctacaaaaaacacaaaaaaattagctgggtgtggtgggcacctgtaatcacagctacttgggaggctgaggcaggaaaatcgtttgaaccctggaggcagaggttgcagtgagccgagatcatgccattgcactccagcctggacaacagggtgagactccatctaaaaaaaaaaaaaaaaaatttggaggtgagatgtttaccattttagaacacttcaagggatgacaaagcccaaagctgcactgtccagcagaaatagaatgtgaactacatttgtaattttgaattttctaatagccacattttctttaaaaaaaaaaagtgaaaaggctaggcacagtggctcatgcttctaatcccagtactttgggaggctgtggtggaaagatcgcttgagtccagggcttcaagatgagcctaggcaatatactgggacctctacaaaacaaacaaacaaacaaacaaaggcaaagaaaatgaaagaaaaaaaattagccaggtgtgatggtgtgcacctgtagtcccagctacttgggaggctaaggtgggaggatcacctcagcccaggaggtcaaggctgcagtgagccatgatcgtgccactgcactccatcctgggtgacagattgggaccttgtctcaaaaataataataaaatacaataaataaggaaaaagaaacataaaattaattggaaataattttaataatatattttcatattatatatatgtgtatatatgtatatacacacacaaaatatgcttttaacatataatctattttatttattttttgagacagggtcttgctctgttacccaggctggagtgcagtggaacaatcacagctcactgcagcattgacctcctgggctcaagtgatcctcccacctcagcctcccaggtagctagctagaactacaggtgcatgccaccatgcctggctaacttttttttcttttctttttgtggagaccaagtcccactatgttatccaggctggtcttgaactcctgggctcaaacaatccttctgcatcagtctcccaacatgctgggattacagacatgagccactccacctggcctataatcagttttaacaatgggtatatccagtgattgacagcacagactctagagtcacataaaactgggtttaaatccctggtccatcatttgctatgctccaacaacttaaatcatttatcccttacaatgatatcataaagaactattattatcctaatttcacaaatgaaaaaaccgaagcaaaaagaagttaaacaacctgccaagggttctagagctagctaagtgtagagctgagaaatcacccagtcagcctggctcctgggcgcacaccaatgactgctatctctgctcttctgtacagagcctgacctggtatcccaatggagatgcccaggaggccactgagaatctgtagctagaaaacgttggtgtcctcaaccagtaaccattttatgagtctcaactcagtggggagtatatatgaaaaaattatttttcctcaaatcagtgctttcaaccatattmtactaaatccccttttcctatactttaacaacatgctggacagatatcatgattttccatttagattcctcactttcagtgtgaaaactgagttcagtccagctgaaaaccacaatcacatacctaattcaaaacttccctatctgctatgacctgaatgttgacgtccctccaaaattcgtatgttgaaatcctaactgccagggtgatggtgttaggaggtgagagctttggaaggtgattaggttatgatggtggggcactcatggatgggatttgtgcccttatgaaagaggcctcagagagaccctggccttttctgccacatgagggttcgtggaccagggagtgggccctcaccagacagaatctgctggtgccttgatcttcaacttttctggagaattgtgaggaacaaatttctgttgtttacaagctaccctgtttatgatgttttgttatagcagcctgaatggactaagacactatccttcattccttgcttagagctacagcttgaggaaccaaaagaggtggcggtcaggaggcggggatagagtcaacttcattatttcctctaccacactgaggtgaaatctggctttcattttcttgactcccattccaccccacccacaccctgcctagcctctgactcttactgctggagttcccttacctgaccaactatgtcttggggccagctaaggtccaagaaaacatgtgtatccctgccacccaaccagcaagcagcagcaactactccaaggttgccctctctcttgtgctgccatctcgaagccaaggttcagttgaggcaagaaatgcctgtctggccgggcgtggcagctcacgcctgtaatcccagcactttgggaggctgaggggtggggggtggatcacttgagctcaggagttcgagaccagcctggccaacatgatgaaaccccgtctgtactaaaaatacaaaaaattagctgggcgtggtggcgggcgcttgtaatcccagccactcaggaggctgaggcagaggcagaagaatcacttgaacgcgggaggcggaggctgcaggttgctgtgaaccgagatcgtgccactgcacctgcactccagcctgtgtgaaagagcaagactctgtctcaaaaaaaaaaaaaaaagaaaagaaatgcagccaggcgtggtggctcacgcctgtaatcccagcactttgggaggccaaggcgggtggaccacaaggtcaggagattgagaccatcctggctaacacagtgaaaccccgtctctactaaaaatacaaaaaaaaaaaaaaaaattagccaggcgtggtggcgggtgcctgtagtcccagctactcgggaggctgaggcaggagaatggcgtgaacccgggaggtggagcttgcagtgagccaaggtcgcgccactgcattccagcctggacaacagagtgagactctgtctccaaaaaaaaaaaagaaatgcctgtctacttgttgcaggcacccccagtctctctcagcgtttctactggaggcttctccctcacttagttttttgttttttggtttttttttttcctttgagacggagtcttgctgtgtagtccaggctggatggactgcagtggtgagatctcgactcactgcaagctccgtctcctgggttcaagcaattctgcctcagcctcccgagtagctgagattacaggtatgtgccactatgcccagctaatttttttgtatttttagtagagacggggtttcatcatcttggccaggctggtcttgaactcctggcctgaaatgatctgcccaccttggtctctcaaagagctgggattacaggtgtgagccaccgcgtctggccaccctcacttagttttgtgaaggaaagaaataccacatggccaagggcaactctcatttcctctgtctgctccacttctccccagcctcttttctatagacgggagttgaggatagggtgaaagctgccatgaataaggctcattctgctgttcgttagtaaacccaggggtagaatctagctccagtgatgggtggctctctttaaaacatatctttcttggttcttctttgcctcggcttttgacgttagtccttgattttgattcaacagaagcagccacttttggcatcttgttatagatgcacaggtggtaattgaagccatgagagttaaccaawatataaagaactgcagacagctgagaaggagtgctatcttcgtcctttattaagagtcagctattggccaggcgcagtggctcacgcctgtaatcccagcaatttgggaggccaaggcaggcggatcacgaggtcaagagatccagaccatcctggccaacatcgtgaaaccccgtctctactaaaagtacaaaaaattagctgggcgtgctggcgggcgcctgtagtcccagctactcgggaggctgaggcaggagaatcatttgaacctgggaggcagaggttgyagtgagccaagattgcaccactgcactggtgacagagtgagattccatctcaaaaaataaataaaaagtcagctattagcaccttcggaggctgaggtgggcagatcacctgaggtcaggagttggagacyagcctggccaacatggtgaaaccctctctctactaaaaatacaaaaattagctggatatggtggtgcatgcctgtaatcccagctactcaggaggctgaggcatgagaatcacttgaatctgggaggcagaggttgcagtgagcagagatggagtgactgtactccagcctgggcaacagagcgagactcagtctcaaaaaaaaaaaaaaaaaaaaaagaagattaaaaaaatgtgattatgcactggtgaaatagccattgtagaatcatgtcttgaaatgtcctatgttgactaaatgtatccagaattgccatgtgaaatgtgtgaaggacaagatgttctgtgtttggtaaatgtgtatgaggaagagagaaacaattagaagttctctgtcacacaayctacacactaccaggaagttattctagaaaaaataacgytctctaaaacgaaccatgcaatctgacacccgtcttcyacctctcagggaagagaaacttcaaaggcaggaggcagggccaatgcatgatgtgttctattgtcccaaggagacctgcctgagccttgaccctagtttctgatggctttccgtgttgagtgtagcctaagaagcagaaactgaatctactggaacctttctgaatagggtttatttaatcacatgcactgtttcctgtttaaagcatttcccaaaatggcatagcacctcctctccaatggtggtcaaattgcgatgtgtacccttgggggaacttgaagaatttctatgatgtacatgggcaggaacagcttgaaaggaccaatttctgagtctcagcttccatttgcactccgtaaaattgacctacctgggaatgtgtctatggtctgctagtattccagtcccccttctcctagcatacaaaataaggcagacttctcacccatcccaaaacttttatgttgtgtagggtgcaggggtgaggggctgtacaaactctctgaaacacaaaataaaggtactattcagccttatttcatccagatacccagattcataccttgattaattagctatctatctattgctgcatagaaaattagcccagaacagccaggcacagtggctcccacctgtaatcccagcactttgagaggccgaggtgggcagatcacgaggtcaggagatcaagaccatcctggtcaacatgataaaactctatctctgctaaaaatacaaaaattagctgggcatgcgcctgtaatcccaactacttgggaggctgaggcaggagaatcgtttgaacccgggaggtggatattgcagtgagctgagattgcaccactaaactctggcttggtgacagagagagactctgtctcaaataaataaataaataaataaaaataaaaaaaataaattagccaataacatagtagcttaaaacaacaataaacacaaattccccagggtcrttatggtgggatgcgacttcatcaccagattgacctatcaagtgcaaggaaacttggcttcaggagaggctaacttacttctgtgtagtgtagggggaaaagagaaaamacacacacacacacacacacacacacatgtgcgcgcacgcacagcggtaaagcagaagtttccagctgggttttctgtccctttggccacataatcaagtcaggtgatctaacttgttaaaaccatcagtaaagaaattgaccctggggtttcccagattcagtttttatttttatttattttatttatttattttttttgagatggtgtctcactctatcacccaggccggagtgcagtggtgccatctcagctcactgcaaccttcgcctcctggattcaagcgattctcctgcctcagcctcccgagtaactaggattacaagcgtgcaccacaacgcctggctaggttttgtatttttagtggagacagggtttcaccatgttggccaggctggtctcaaattcctgacctggacagaggcctggcaggtgatctacctgcctcggcctcccaaagtgctgcgattacaggtgtgagtgactgcgcttggcccagattcagattttaaacagcacatgacaaatcttgctgcccttctatccgctaaaggtaaaaaaccaaacgtccataattctccaaaggcaaagatagagtttttccartacagatgtaagtcagcctattatccacacattcccaacaaatggcctttaagagcctttggtgccaaattcaacaaatggaagggttttacacaggttaggaagatcaccagatgcatgtgagtcatgtttacttgaagatcactcttcatgacacatattaaatattcttagtgcttacatacttaatgaagccttataggtattctgtaagtatttattgagaaataggaaagaagaaggaagaagaaaaaatacaattcttgtgggttctattttcctttctgcctctgcgctttccctatactaagcatttttgcttcctcatctacattgtagttctactctcagctgtttacacttcactttcctaaaagcaccagtgtgaccttgatatctggccctaatttagccttttgatgtccatagtttctgttttctccatctgacacatgttcgtttctcttattcttggatgcctaggttctgggctcctattgggttatctttcaagtcatcccaagatagaagatagacttcctgctgagagagaaggcagttagaggctggttaggcagatagagagggagggtctctggagaagggcagtgttcacaagaacgctagcaggacmgtacctacaccgcctctgcagctaatgggaagaaatgtggttaagaacttccccttatgccaggatgttgctcagaagggactgtcctaacttaggcacaggcggaataaatcaacctaagtgtccttggcccagmtcatcatagtgtcattaacatgacatttttgtggttttagccccttggtgggtttcacttaggcactcgtgggtaacaaccaagatggagtcactctggccaatcccaggcatgtgcagatgcaacacccttaggagggaactttacccctcccattttgggcagaacccacagaagacttccttccttcctcttccacataaaagacccagaactcagccccatttctgaaaacttgctttcagggcacctctctttgctgagagctttccttttgcttaataaatcctactctacttactctgtggtgtctgtgttccttattcttcttggtcctgggataagaactcggatgtagctgaactaaggagtgatttagactgcaatgctgctccagaagatagacttcctgctccagaacatagaaatgggtgtgatatcttctcccaaattcaaaataaatgacaatggctgagcacggtaaattatgcctgtaatcccagcacttcgggaggctgaggccagcggatcacttgaggccaggaattcgagacaagcctgaccaacacggtgaaaccccctctctactaaaaatgtaaaaattagctgaacgtggtggctgatgcctataatcccagcactttgggaggcagagatgggcggatcacttgacgtcaggggtttcagaccagtttggtcgacatggtgaaaccctatctctattaaaaatacaaaaagaattagccgagcgtggtggcacacgcctgtaatcccagctacttgggaagctraggcataagaattgtttgatcctaggaggccagatcatgtcactgcactgcagccttggcaacagaatgagactctgtcaccaaagaataaattaatacacaaatgaataataaaaagtaaaataaaataaaacaactcaataagccctacttaccactcttttctaggcaaataggttaaaagagttgtgtaacctttcatatttatgtgatacctttcacgattgatgccattcacttcttttttttttgagacagaatctcactctgttgcccaggtaagagtgcagcagcamgttattggctcactgcaacctctgsctcccaggattaagcgattctcgtgcctcagcctcccaactagctgggattacaggcatgcgccaccataccctgctaatttttttttttttttttagtagagacgggtttccccatgttggctgggctggtctcagactcttggccttaagtgatctgcctgccttggcctcccaaagtgctaggattataggcatgagccaccatgcccagccacttcttctttttttcttttatttcaatagcttttgggggaacaggtggtttttggttacatggataagttctttaatggtgatttctgagatatcagtgcaactatcacctgagcagtgtacactgtgcccaatgtgtagtctttcatccctcagtcccctcccaccttttcccctgagtccctaaagtccaatgtccattttatcattctcgtacttttgcttcttcatagcttagctcccatttgtaagtgagaacacacaatatttggttttccattcctaagttacttcacttagggcctcccactccatccagttgctgcaaatgccrttatttcattcctttttatggttgagtagtattccaaggtgcatatataccacattttctttatccagtcgttggttgatgggcacttaggttggttccatatctttgcaattgtgaattgtgctgctgtaaccatgcacatgcaggtgtctttttcatataatgacttcttttcctttgggtagatacccagtagtgggattgctagatggaatggtagttctacttttaattcgttaaggaatcgccatactgttttccatagtggttgtactactttacactcccgtcagcagtgtagaagtgttcccttttcaccacatccatgccagcatctattagtttttgatttttaattatgggcattcttgcaggaataagctggtatcttattgtggttttaatttgcatttccctgataattagtgatgttgagcattttttcatatgtttgttggccatttgtatatttcttttgagaattgtctattcatgtctttttccctcttttggatggggttatttggttttttcttgctgatttatttgagttacttgtagattctcaatactagtcctttgtgggatgcatagtttgtgaatattttctcccactctgtgggttgtctatttactttgttaattctttcttttgctgtgcagagcttttttgtttaattaggcttcatctatttatttttgtttttgttgcatttgcttttgggttcttggtcatgaactctttgcctaaaccaatgtctagaagagttttcctgatggtatcttctagcactttttttttttttttgaaacagagtctaactctgttgcccaggcttgagtgcagtggcacgatctcggctcactacaacctctgccccctgagttcaagtgattctcctgcctcagcctcctgagtagctggcattacaaacacctgccactgggaccggctaatttttgtatttttagcagagacaggattgcaccatcttggccaggctagtcttgaaatcttgacctcgtgatccacccgcctcagcctcccaaagtgctgggattacaagcatgagccactgtgcctggcctcttctagcatttttgtgctttcaggtcttagatttaagtggtttttttttgtttgtttttgtttttgtttttgacagtctcactctgtccsmaggctggagtgcagtggcgtgatcttggctcactgcaacctctgcctcccgggttcaagcgattctcctgcctcagcttccccagtagctgggattacaggcacctgccaccacgcccaactaatttttgtatttttagtagagacggggtttcaccatattggccaggctggtctcaaactcctgacttcaggctatccccctgcctcggcctcccaaagtgctgggattacaggtgtgagccaccgcaccagccagatttaagtctttaatccatcttgagttgatttttgtgtaaggagagagatgaggatccagtttcattcttctacatgtggcttgccaattatatcagcaccattggttgaatagggtgtcctttccccactttatgtttttgtttgctttgtcaaagatcaactggctgttagtatttggctttatgtctgggttctctattctgttccattggtcctatgttcctatcttcataccagtaccatgctgttttggtaaccacaggcttggcacatagcttgaagttgggtaatgtgatgcctccaggtttattctttttatgttgtattgctttggctatgtgggctcttttttggttccatatgaattttaggatctttttttctagttctgtgaagaatgatggcagtattttgatgggaattgcattgaatctgtagattgcttttggcagtaagttcatttttgcaatattgattctactgatccatgagcatgggatgtgtttctatttgtttctgtcatctatgattcttttttgtttgtttgtttgtttgtttgtttttgagacagagtctcactctgtctccctggctggactgcagtggcacaatcttggctcactgcaacctccacctcccgggttcaagcaattctcctacctcagcctcccgagtagctgggattattggcatgtgccaccatgcccagctactttttgtatttttagtagagacggggtttcgtgatgttggccaggcttgacttgaactcctgacctcaggtgatccatctgccttggcctcccaaagtgctaggattacaggtgtgagccaccacacccagcctatgatttctttcagcagtgttgtgtagttttccttgcagaggtctttcacctccttggttaagtatattcctaagtattttattttatgtatatattttttgcagctgttgtaaaagggattgagttcttgatttgattctcagtttggtcgctgttggtgtatagctgtggtactgatttgtgtacatggattttgtagcctgaaactttactgaattcatttatcagatctaggagctttttggatgagtctttagggttttctaggtatacaatcatataatgagtgaatagtaacagtctgactccctcttttccaatttgggtaccctttatttctttctcttgtctgattgctctggctaggacttcctccattaacttctttacaattatctttgcaatctgagtttactccttattaaatttgttctcaattctttaggaagattgaattttagtgtataaatcctgttgacaaatgaggtwctagaatgatgagaattctctttaagaggccatttctgagataaatctacatagcaagtaggtctagttgctcagtccttacacctccaagggagcctggaatcatgattgacccttggcaaaccctcggaaatgttcttaggatgttctttatgtcactaattgatgattttgttgtgtacacttggagcaatgtaccatgccatrctggcttgctaatttgctttgcacaaacattgagattgatgatgtacccctggtctcattgttgtgatcctgagttttggttgctatggctaatcgcataacaggatatgtctttgtgattggtccctgataaaagccttagactctgaaacctgaatgggcttccctgagcagagacatttcacatatgttcatttctagagagaaaatacatcctgtgtgacttcagatgaaaaaagacttgaaatatatgttggatctctctaaatactgctacagtctcatcaatataccataatgtagtagtctcttgttgtgtagtatcaccaggagttctttgtcttatgaccatgcaaattaaggaatgtggatgcaaagcgtgaggttggagtgaaagtttaataaatgaaagaagaaagctatctatagtggagaggggagcccaagtgggctgccgtttttacagtttaatttaaaaggtttttggkttgtttgtttgtttgtttgtttgtttgttttttgagatgaagtcttgctctcgtcccccaggctagagtgcaatggtgcgatcttggctcactgcaacctccacctcccggattcaagcaattctcctgcctcagcctcccaagtagcgggattacaggcacctgccaccacacctggctaatttttgtattttttagtagagatagggtttcactttgttggccaggctggcctcaaactcctgacctcaggtgatccacccaccttggcctcccaaagtgctgggattacaggcatgaaccaccgcacccggccagaagtttttttgtgtgttttttgtttgtttgtttgttttggagatggagtcttgttctgtcacccaggctggaatgcagtggcatgatcttggctcactgcaacctccacctcccaggttcaagcaattcttctgtcccagcctcccgagtagctgggactacaggtgcctgccaccatgcccggctaacttttgtatttttagtagagatggggtttcaccttgttggtcaagctggtctcaaactcctgacctcaggtgatccacccacctcggcctcccaaagtgctgggattacaggcgtgaggcaccatgcccggcctgattttttaaaagtttttataggaaactcctctcatctctttagttgttgagtaacttatctgtaaagtcgtctgcataactccacactatctacaggtgtgagccactgtgcctggcccaggctgactcttgttagggactaatgcaaccaatgactttaagttggagccagtgctcactgaccattctgaaaatcctagggctcgtaagaattatgctaagttgggccagtcgcggtggctcacgcctataatctcagcacttcggaaggctgtggcaggcagatcacttgaggtcaggagtttgagaccagcctggccaacatggtgagaccctgtctctgctaaaaatataaaaattagccgggtgtggtggtgcacacccataatcctagctactagggaggctgaagcaggggaactgcttgaacccaggaggcagaggatgcagtgagctgagattgtggcactgcactccagccttggcagtagagtgacactacatctcagaaaaaaaaaaaaaaaagaattatgctaaatctactctattgctctataattgtaacaaaaaagtctgaatgacagcacatctgtttacagcatgatttactgaattactattattattattattttttgagacagggtttccctctgtcattcaggctgtagtgcagtggtctgatcttggcttactgcaacctctacctactgggctcaagtgagcctcccacctcagccacctgagtagctgggactacaggtgcataccaccatgcctggctaatttttttatatttttggtagagtcagggttttgccatgttgcccaggctggtcttgaactcctgagctcaacmaatccacctgcctcagcctcctaagtgctgggattacaggcatgaaccaccacacctggccaattgaccgaatattttaatcccactgttgagacctactgctccaaaaaaaaascttcctttcaaaatattactactcatggacaatgttcctggtcacccaagagctctgatggagatgtacaagaaggttaatgttgttttcatgcatcctaacatatccacttagcagcccatgaattaaggggcaattctgactttcaagccttcttatctaagagatacattttgtaagacgatggctgctacagatagtgattcctctgatgaatctgggcaaagtggattgaaaaccttttggaaaggattcaccattttaggtgccatttgattcatgtaagtaggtcaaaatatgaacatgaactggagtttggaagaaattgattttaatcttcatggatgactttgaagagttcaagagttcagtagaagaagtaactgaagatgtagtggaaatagcaagagaactggaattataagtggggcctaaagatgtgactgaattgcttcaatcacatgctaaaaaaagctttaatggatgaagagttgctttttatggatgagcaaagaaagtggtttcttragagggaatatattcctggtgaagatgctgtggatattgttgaaatgataatgaaggatttagaatattccataaatttagttgataaagcacctttaaaaggatttattacaattttgaaagaagttctactatgagtaaaatgctatcaaacagcataacatcctagagaaatcttttgtgaaaggaagagtccaccacagccagcattatactgattggggaaaagttgaaagcattctctctgagaactggaacaagacaaggatgcccacttttattacttctattcaacatagtactggaagtcctagccagagcaatcagacaagaaaaagaaacaaagggcatccaaatcaataaagtggaagtcaaactgtccctgttcagtaaagtttcagaatacaaaatcactgtacgcaaatccgtagcactgctatacaccaacagcaaccaagctgagaatcaaatcaagaactcaatctcttttgcaacattgctggaaaaaacaaaacaaaacaacaaaagcaaaacaaaacaaaacaaaaccaaaaaagccacaaaatacttaagaatatacttaccaaagcaggtgaaaggcctctgcaaggaatatgctgaaagaaataacatgctgaaagaaataacataaacaaaacatgctgaaagaaataatagatgacacaaacaaatggaaacatatcccatgctcatggatcagtagaatcaatattgcgaaaatgaacatactgccaaaagcaatctgcagattcaatgcaatttccatcaaaataccatcatcattcttcacakaactagaaaaaaagctgggcgcggtggctcacgcctgtaatcccagcactttgggaggcagaggtgggcagatcatgaggtcaggagatcgagaccatcctggctaacacagtgaaaccccgcctctactaaaaatacaaaaaattagccgggcgtggtggcgggcgcctgtagtcccagctacttgggaggctgaggcaggagaatggcgtgaacccgggaggcggagcttgcagtgagccgagattgcgccactgcactccagcctgggtaacagagcgagactccgtctcaaaaaaagaaagaactagaaaaaaaattctaaaattcatatggaaccgaaaaagagcccgcatagccaaagcaatactacataaaaggaataaatctggaggcatcacattacccaacttcaagctatactccaagcctgtggttaccaaaacagcatggtactggtatgaagaagataggaacataggaccagtggaacagaatagagaacccagacataaagccaaatacttacagctatttgatcttcgacaaagcaaacaaaaacataaagtggggaatggacatcctattcaacaaatggtgctgggataattggcaagccacatgtagaagaatgaaactggatcctcatctctcatcttacacaaaaatcaacttaagatggatcacagacttaaatctaactcccgaaaccataaaaatgccctagaagataatatcagaaaaactcttgtagacattggtttaggcaaagagttcatgaccaagaacccaaaagcaaatgcaacaaaaacaaaaataattagatgggacctaattaaacaaaaaagctctgcacagcaaaagaaagaattaacagagtaaacagacaacccacagagtgggagaaattattcacaaactatgcatccaacaaaggactagtattgagaatctacaagtaactcaaataaatcagcaagaaaaaaccaaataacaccatccaaaagagggaaaaagacatgaacagacaattctcaaaagaaatatacaaatggccaacaaacatatgaaaaaatgctcaacatcactaattatcagggaaatgcaaattaaaaccacaatgagataccagcttactcctgcaagaatgcccataattaaaaaatcaaaaactaatagatgttggcatggatgtggtgaaaagggaacacttctacactgctgatgggagtgtaaagtaaatgcaaacgcatttaccactacagaaaacagtgtagagattmcttaaagaactaaaaatagaactaccattccatctagcaatcccactactgggtatctacccaaaggaaaagaagtcattatatgaaaaagacacctgcatgtgcatggttacagcagcacaattcacaatcgcaaagatatggaaccaacctaagtgcccatcaatcaatgactggataaagaaaatgtggtatatatgcaccatggaatactactcaaccataaaagggaacraaataatggcatttgcagcaacttggatggagygggaggccattattctaagtgaagtaatttaggaatggaaaacgaaatattgtatgttctcacttataaatgggagctaagctatgaggatgcaaaagcataagaatgatacaatagactttggactttggagactcaggaaaaggtgggaggggagtgarggataaaagactatagatcgggcaccgtgtacaatgctcaagtgacagttgcaccaaaatctcagaaatcaccactaaagaaagtatccatgtaagcaaaaccacctgttccccaagaactattgaaataaaataaaatattttaaaaatgagtccatcaatgcrgcaaacttttttgttgtctgatttgaagaagttgccacatccactccagccttcagcaaccaccactcagatcagtcagaagtcatccatgttgaggcaagactctccaccagctttttgctgatgacacaagatgacaactcaattaaggctcagatgattgttagcattttttcagcaataaagtattttataattagtgtatttatgttgcacatttatgacataatgttattgcatayctagtaggttacagtatagtgtaagcataacttttacatgcactgggaaaccaaaaaatttgtgtgacttgctttatcacaatattcactttatdgcagtggtctagaacaaaacctgatatcacaaaacctgatattcctgatatatgggcttatctctgaagtatacctgtatctcagtgaagatgttattatttatttatttatttgagacagagtctcactgtgtcacccaggttggratgcagtggcacgatctccacttactgcaacctccacctcccgggttcaagagattctcctgcctcagcatccgaagtagctgggactacargcatgtgccaccacaccaggctaattttttttgtatttttagtagagacagggtttcaccatgttggtcaggctggtctcraacttctgacctcaaatgatctgcccacctcggcctcccaaagtgctggggttacaggcgtgagccaccgcgcctggacaaagatgttacttgctttttttttgagacrgagttttgctcttgttgcccaggctagagtgcaatggtgtgatctyggctcactgcaacctccgcttcccgggttcaagcgattctcctgcctcagcttccccagtagctgggattacaggcacctgccaccacgcccaactaatttttgtatttttagtagagacagggtttcaccatgttggccaggctggtctcaaactcctgactttaggctatccgcctgcctcggcctcccaaagtgctgggattacaggcgtgagccaccgcgccyggccaaagatgttattttctataaaggcaaccgttagaaccttcaactcattatttttaggctgacaaaaacatctgttattattatacyacactatgtattgtgaatagtttattttacaagcataatagagtattttgaaattacactctgctagaaccccttgctagttgttaattttacctagaaaagactcacagattctttgttaaaataagaaatctagcaaagtcagacttttctccctaccaccccacccaaccccattatacacaaaagaaaagaggaacagtccagatgtggtggctgacacctgtaatcccagtactttgtgaggtggagagttgggcagatcacctgaggcctggagtctgagatcaccctggccaatatggtgaattctcatctttactaaaaacacaaaaattagccgggcatggtggcccgtgcctgtaatcccagctacttgggaaggtgaggcacaagaatcgcttgaactcaggaagtggaggttgcagcgaacaaccactgcactccatcctgggtgacagagcaagatctgtctcaaaaaaaaaataaataaataaaataaaataaaatataaaaaaaagagatgagaaacaaatgatcagatttgcagagyaatctttcaagaatttatcctatttacacatgcagaaatgtcaattacaacattactatcagggcaacaaattatcaagtaaagctaccaatcagaattataatctatgagaaaggagttcactcagcttatttccaggagtacctggagtcacggtaccaacccttagccaaccacttggggctaagtccttggagttaacatagtcaccaatgaagttgttttgtgctcctgaggcactgaggcatgacatgctcaattgccagcactgcctaacacaaatatcaagatgtgccatgagcacctgcctcctgggtaaagatctgcaccatagattgtcacgtgggaggaatgtgccttgtgcaaccagactcctgtaagaactccgggwcctcagacctaagtggacttacgtgggcagagacatctcatatatgttcgtataatttgtagtcgtgccaaaagcaccttactgtgaccagcatggagggagaacctagaagtctgcacctaatctttcgggtcttcttgtaggcataacttttttctgctgatcctgtataatatcctttgctgtaataggcttttagccatgagaataacctgttactcagccaaatgcgtcctgacaaatctcaaaagtagtatattctcaggacccataaagcacaagcatttttccaaaggtaattttcaaggccagggcaagtaagtttctaagtcttagttttataaaactcttttttcaaagaaaawgacttayaataagaaaccgaagattcacaccactctccatattgcacaaaagagaaaaaagattgatatttttgtcaatatcraccatttgacactttacaaaatcagatattttgaatatgtgttatatctcagaaagacatcctcctctctgtgctataggggagaggagcatatcctttatttatttccaagacttctgttaattacaaaggctcacattgataagccaagctctggattttcattagttagcattataagcaaaaagcaggcctgtgagatcaattttactggcataaatgcagtaaagaatgaataagatataataataactgaaatacagagcctatagcattatttttccacaatatgtaatcacatatttataaatctgaaaataaaagaaatatcattagaatgtcastctgtacaaatttatggcaatatgcacaaaatacactaaaagctgccttatttttaygcagttgcatgctcacatatatatttctgtaacagacaattttactttgatgtgacaggagataatcgatcttgaagttaaagataataaatttgggtgtgactaaggtgtataaatttcagttgatctatatakatttatagcaagatggttaaaatgtgaggttgctcatcagaggyatagggttatcttaattatctctgatatgtaaatcatttacttttcacaaaaggccctctttcttgtgtaaacacaaacaaccataaattaaaataagtagcagatgactagtatgctattttattttgctttatgaacaaaagtaaacctgctttgaagacacaaataatctttcttgtaagtaggtacgtatccggcaccttattacatagaagagagcaccagcaccagaccctgccaaaatgaaacaaaacaagaactggcaaaatgattgtttctaatataagccaggaaattgtttcacaggtcaagaatgaggaaaactttttttttttttcctaagatcttacctcttattgtctttaggagttcctgtttattattgaggtcatgtgttttgttaccaggtcaactagcttactcctgcactgatgatcctggaatgaaagttttttttattgaaagtytatttgcagccaggtgtggtggctcacacctgtaatcccagcactttgggaggttgaggcaaaaggatcccttgagcccaggagtttaagacaagcctgggttacatagtgagaccccatctctacaaaaaataaaaaattagctgggcatagtctcagctactcaggagrctgaggtgggaggattgcttgagccctgaaggtggaggcagcagtgagctgtgattgtaccactgcrctcgaggcttgaggacagagcaaaacactgactcaaaaaaaaaaaaaaaaaaaaaagaaagaaagtctacatccaatagccagargtatgtctctaaggtccttgaccttccaagtataatgcaaaacacagaagagattgttttagaatgataaatttgactactaagcaaaaaattatgcatggcataagtcacaattaacaaagccaaaagaaaaatgacaaatatttaataagaatatctggaagcactcaagatccattaaggcaattggagtgtaatatcaggcagaaagaactagaatgtaactgaactcaatatattgattgggttctaatcctaaaatactgatttttatactgtccaaagaaagtttgcaatcaaaacaaaggtcagaagagataagtaaaggmcagccagagagcaagattttgcactgattagctctcactattcagagtccagagaaatttactatagtggacacaaatactctagttgttccatagttatatactattgtgggataagaatggtttatttcagtttggataaagtatctcttaaaactatataactcctgttattccagtttcactctcctttaagtaaactgattctgtcaatacttaccagttactggacaggcacagcagctcacacttgtaatcccaacactttgggaggttgaggtgggtggatcacttgaggtcaggagttcgagaccagcctggccaacatggtgaaaacccgcctctactaaaaataccaaaattagctgggtgtggtggcgggcacctgtaatcccagctattcgggaggctgaggcaggagaatggcttgagcccaagaggtgaaggttgcagtgaaccaccaagatcacgccactgcactccagcctgggtgatggagtgagactctgtctcaaaaaaaaaaaaaaaaaaaaaaaagatacttaccagttaccaaaaagagaacatgaaaaatatatgtaattttcactataaatttttctggtagatatcctggcttacatagtttcttatgagtttggttatcatgaattctttggttatcctggtattcatggaatctcatcaattctggattcattcacaattttgaattttcacgcctgagaactggggaccagactataagttgataaytcttaacattttcacctctgagcccttgcccaagtagccaaatgatctcaagatatgtctgtttcagttagcctttgttgtataacaaatcacctctagccgggtgcagtggctcatgcctgtaatcccaacactttgggaggccgtggcaggtggatcacagggtcaggagttcaagaccagcctggccaacatggtgaaaccctgtctctactaaaaatataaaaaaaaattagctgggcctggtggcggatgcctgtaatctcagctacccaggaggctgaggcagagaattgcttgaacccaggagatggaggttgcagtgagacgagatcgcgccactgcactccagcctgggcgacagagtgacaccatctcaaaaacaaaacaaaacaaaaaaaaacaaaaaaacaaaaaaaacaaatcacctctaaaattagtagcctataatggcatctgtttattgttcatatttctgtgggttgaaatttggactggaatcagctgagtggtgcttctgctgatctyccctggaaccacttgacttgtcatctctctaagatggtcttttgtttacatacgtagcacttggtgctatcaacttgtatacttcaggcygtggcctcatctttaatacgctatactgagcttctttatacaatagtctcagggcagaattctaagagcaagagcagaagccagragaccttttcaaaatgaaattcagaagtcatcacttctccattttattggtcaaagtcacaagaccagcccaagattcaagaggtgggtaaatagacttcacctcttttcaggaggggatacaaataatctgtagctttatttatttacttatgcgacagagtcttactctgttgcccaggctggagtgcagtggcrtgatctcagctcactgcaacctccacctcctgggttcaagcgattctcccacctcagcctcccaagctgggattagcccgccaccatgcctagctaacttttgtatttttagtagagacggggtttcaccatgttgaccaggctggtctcaaactcctgtccttaggtgacctgcccacctcggccacccaaagtgttgggattacagacgtgagccaccttgcccagctccctgtagctatatttaattacccacaacttgtaacaccgattcacaatagtcccaataatgttctttatagaaaaagaagattctctggtctgggatccaatctaggttcacacagtacatttagttgtcatgtctctttggtctcaatctgyaacaattccttagtttttctttgtctttcatgatgttgacagtttaaaattttgtcttttggattatgtgatgttttgaattttgtaacatgtccctcaatttggctttgttrgatatttccttgtgattagattcagattttgcatttttggcaaaaaactatataagagctattatgaccatctcattgcagtacagcaggagaaaatgatgtcagcttgccccattattggtggtattaactttgattaactgttttcactgtcacattactatttttcttttktaattaattagtrgtaattaattgtgttatgataagatgctccttatcaaactttcactgactagttgtagtatcaattaattacatttaaaaatttaaagaagggccgggtgtggtggctcacgcctgcactccaycctgggcgacaagagcaagactctgtctcaaaaaaaaaaaaaaaatttaaagaagaaacattgttttaaacttarattcaaacatcagtttgctacttatcagctgtgtgaccttagggcaactcaccagatggctctgagcctcagtttcctcaygtgtagattgtagataataatatttttmtcataaaattgatgtgggtaatacatrtaaagtacttagcagagcgattaccatttattttatttcactagtttttacggaaattctttaaattttagtagtgtgtaggaagagatcatctttgtcctaatagagattatactctagtctagagtagaggtgagcaaactttttctgtaaagagcagatggtggctgggcaccgtggctcacgcctgtaatcccagcactttgggaggctgaggcmggcagatcacctgaggtcagcagttcaagaccaacctggccaacatagcaaagccccatgtctactaaaaatacaaacattagctgggcgtggtggtgcatatctgtaatctcagctattcaggaggctgaggcatgagaatcacttgaacccaggaggcggaggttgcagtgagctgagactgcaccactgcactccagcctgggcaaaaagagcgaaattccatctcaaaaaaaaaaaaaaagcagacggtaaatattttaggagccaaatgggcaatacataaatgaatgcattttactgtattccaaaaactttatttataaaacaagtggtaggctggacttggcccatgggctggagtttgctgatctctggtctagagcaaacagaccaacaagaaaatataattacaaacaaacaaaaaacccagccaaacaaaaataaataaaaataattacaaatcataagtgttctgaagggaaaagataggttttaggggattatataacagtgacctcaccttgtctagaatgtcaggagtagcaacgctaaagcagtagcatttacactgagacctagaaagcaggtagtcattaactaaatatgtggtggcagggagcttatcaggcagagcaaatagcatattctaaggaaatgagggagaaagttacataactttttytttcttttttttttttgagacagggtctcattctgttgtccaggctggagggcagtggtgcaatcatggtcagctggagccttaaactcctgggctcaagcaatcctcctacctcaacctcctgagtagctgggaccacaggcgttctccatcatgtccagctatttttgtatttttttgtagagatggagctctcactatgttgcccaggcttgtcttgaactcctggactcaagtgagcctcctgcttcaccctcccaaaatgctgggattacagacataagccacagcaccagctgaacttttttttctgagacggagtcttgctctgttgccaggttggagtgcagtggcaagatctcggctcactgcaacctctgtctcctgggttcaagcgatctcctgcctccgcctcccaggtagctgggactacaggcgcatgccaccacgcccagctaatttttatatttttagtagagacggggtttcaccgtgttggccaggattgtctcaatctcttgaccttgtgatccacccgcctcagccttccaaagtgctgggattacaggtgtgagccaccgcacctggccagctttgaattcttaaaaaatgttcagctgaggccagacacggtggctcacacctgtgatcccagcactttgggaggccgaggctggtggatcacaaggtcaggagatcaagacatccctggctaacacggtgaaannnnnnnnnnnnnnnnnnnnttagccaggcatggtggcgggcgcctgtaatcccagctactcaggaggctgaggcaagagaatcgcttgaacccgggatgcggagattgcagtgagccgagatggcgctactgcactccagcctgggcgacagagccagactaagtctcaaaaaaaaagaaaaaagaattcaaagccaatgtaactagagggcaaaaaagaaagaaaaatgatgtggggaatctmtgaatgaataatcatttgttaaaagattccccacatcatttttcttacttttcttgctgtgtgctaggcattattctagctaaaaggaatacactggtraacaagactaataaggtccctgcctctatggagttgacatttgggatagaggtgggtgttggagatggacaataaacacgtgaatacataattacatatttaatatgtaattatatagacgtatgtgcatgtgtaaatgaatgtgtttacaaattacaagtaccaagaataagatgcattttgttctttgaaacagggtcttgctctgtcacccaggctgaagtgcagtggtrcaatcctagctcactgcagcctcaacctctcaggcaatcctcccacctcagcctcctgagtagctgagactacaggtgcacgctactacatccagctaattttaaacaattgtttgtaaaggtggagtttcaccatgttgcgcaggctggtcttgaactcctgggctcaagtgatcctcccaccatggtcttctaaattgttgggattacaggtgtgagccactgtgcccggcctggagagggctttctgaggaagtgacatttgatccaagacttgaacactgagaaaaggccaaatacatgaaagcagaaagaagaatgttaacaactgtgaaacaacaaaagcagatgccctgagacaataaagaaccactgctgaggaaggaacctagagggagccaaagggagagggctgtgaaacaaaatgggagaggcaggcaaaggccagatcacacagcactggagttcatggtgagaactttggacttcatttgaaatgcactgaaaatcaaaggcaagattttactgaagggagtgtgacattacattttaaaaagattattctgggtgcagtgtgaggaatgcaatagagaaaaaacaagattgaaagcagaaaggaagttaaaaggcttttggactaatcaggtgagaaactataaggtagttaaaatgagggtggtgacagtatagatggaaggaaatgaacagattagaaagatacttaaatgataaaattgatggaacttggtgatttgttagatatgaatactaaaagagaaagatggtccccaagctcctgaaaggagaaattggatgaatgttggtgccattcaatgggatattcaagtggaaatgttaaatgtgcagttgaatataggcgctcaggccgggcrcggtggctcacgcctgtaatcccagcactttgggaggccgaggtgggtggatcatatgaggtcaggagtttgagactagtctggctaacatggtgaaccccatcgctactaaaaatagaaaaactagccgggcatggtggtgcatgcctgtagccccagctacttgggaggctgaggctagagaatgacttgaacccaggaggcttgaacccaggagccgagatcgtgccactgcactatagcctgggtgacagagtgagactccgtctcaaaataataataataataataataataataataataataataataataataaaaggaaaataggagctcagaggctgggcacggtggcttgtgcctgtaatcccagctgtctgggaggccgaggccagtagatygcttgagctcgggagtttgagaccagtctgggcaacatggcaaaaccccttctctacaaaaaaatacaaaaattagctggtgcttggtggctcatgcctgtagtcccagacacttsggaggctgaggtgggaggatggcttgagcactggaagtcaaggctgcaatgagccatgatcgcaccattgcactccagcttgggtgacagagtgagaccctctaaaaaaaaaggaaaataggagctcagaggagaactggggacrtatttatccacaggtggtaatcagagccatggatgtggttaataacctggccaacgtggtgaaaccccgttgctaattaaaaaatacaaaaattggccgggcatggtggctcacgcctgtaatcccagcactttgggaggctgaggtgggcagatcacctaaagtcagaagtttgagactggcctgaccaatatggtgaaaccctgtctctactaaaaatacaaaaattagcctggcgcagtggcgcacacctgtagtcccagctactcgagaggctgaggcaggagaatcactggaacccaggaggcagaggttgcagtaggccgagatcgcaccactgcactccagcccgggcaacagaggaagactccatttcaaaaataaaaaataaaaaattagccaggcatggtggcacacgcctgtaatcccagctactcaggaggctgaggcaggagaataacttgaacctgggtggcggaggttgcagtgagccaagattgcgacactgtactccagcctaggggatagagtacgcactccagcctgggggatagagcgagactctgtctcaaaaaaaaaaaaaaaagaagaaaagaattagctgggcctggtggcaggcgcagctactggagaggctgaggcaggagaatcgcttgaccccgggaggctgaggttgcagtgagctgagatcgcgccactgcactccagcctggactaagagcgaaactccgtctcaaaaaaagactggcagaagagcataaactgacaaaggagtctaaaaagaaatgagcagagatgcaggcagaacaccaggagagcatcatgtcacagaatgctgctgagagttaaggaatacgaggattgaaaaacagccactggatggaaagacaaaggggtcattgatagcgttgggaagagtcattttrggggagtggatgaagctagattgcagtgtcaagggaataagtacaagtgacagggagtgkagatgactgtgagaaacgtagacataaaagggaagagagataggccacagactcatccctccataaataacagttttgttattactatttactagtcatttttcaaaagcaaaactttgagacatttatttacttccccacattaccaattattacatcataattctgagtggctgtcttatatcttctcagaaaaagtgcactattgagtggctggcatctcatagagagcttcagtctttggtcatagcattaggagcccttggtttcacaggtcatttaatagattgtttaggtacttacacttaagattttctttctttttttttttttttgagactgagtctcgctctgtcgcccaggctggagtgcagtggcacgatctcggctcactgcaagctctgcctcccaggttcacactattctcctgcctcagcctccggagtagctgggactacaggcgcccgccacygcgcccggttaattttttatatttttagtagagacgggttttcaccatgttagccaggatggtctcgatctcttgaccttgtgatccacccgcctcggcctcccaaagtgctgggattacaggcgtgagccactgcacccggcctacacttaagattttcacctaagtatccaatttacttgtttagtggattttttgattaattaattttttttggaaacagaatctcactgtcacccaggctggagtgcagtggtacaatcatagctcactgcagcctcgacctcccaggctcaagtgatcctcccacctcagcctcccaagtagctgggaacacaggcatgcacgaccatgcccggttaatttttttactttttgtagagatgaggtttcaccatgttgcccagtctggttctcgaactcctgggcataagtgatccacctgcttcggcctcctaaagtgctaggattacaggtgtgagccactgtgcccagcsttaattaattattttaacattaattttatttttttaaaaaataagcaggccaggcatggtggcccatgcctgtaatcccagcactttgggaggccraggcaggcagatcatctgaagtcaggagttcgagaccagcctggccaacatggtgaaaccccatctctactaaaaatataaaaatcagccgggcgtggtggtgcacgcctgtagtcccagctactcgggaggctgaggcaggagaatcgtttgaacccgggaagtggaagttgcagtgagccgagatctcgccactgtactccagcttggtgacagagcgagactccgtctcaaaaaaaaaaaaagcaatacatccaaatgcttcaaaattcagaaagaggccaggcacggtggctcacacctgtaatctcagcactktgggaggccaaggcaggcggatcacctgaagtcaggagttcragaccagcctggccaacatggtgaaactccatctatactaaaaatacaaaaatkagccgggtgtggcgatgcacacctgtaatcccagctactcgggaagctgaggcaggagaatcacttgaacctaggaggcggaggttgcrgtgagccgagatcgtgccactgyactccatcctgggcaagggggagactctgtctcaaaaaaaaaaaaattcagaaagaactaaaagttcagtgaaagtttacttttcaccgtattcctgaacccctagtttccttcctggggcagctgtactttatttaaccaggagcctagtgatgaacatttgcttgttaacagtcttctattatgaatgaarcaatggataatcttgtatatgtcattttgtgcatacgtgagtgtcttcagtctatttccctagaagctgagactggtggagcttcgtaggcaagtgatttattaggaaagtagtctaggtagaaatctaggagggtgagggagggaagcaggccaggggaggggaagaaggaaagcaagaatggtttcaggggaagtctagactcagcctattcctaccgggagccctgaagcataaagtgcaagcagaatctgtctgcccttaggcaagggaccagaacatttgtaccctaccatagacagtcactggttaaagcagcacataactcccatgaacttcatgtccaggtggctctaatcatccaagtccagtcccctggggttgtaggtacaaaccattaccagcagcacccacagctcctgggggaatgggcaccacaaaatggtagcagggatccccagggattgaggtggggacaccaacaggtttctgccacagtggatatgttgatgaaaagagtcaaactctgttaaatatttgaagagatttattctgagccaaatatgagtgaccatggcccatgacacagscctcaggagattctgagaatatgcgcccaaggtggtcggggcacagcttgggtttttttttttttttttttttgagacggagtctcgctctgtcacccaggctggagtgcagtggcgtgatctctgctcactgcaagctccacctcccaggttcacgccattctyctgcctcaagcctcccgagtagctgggactacaggtgcctgccactgcgcctggctaattttttgttttagtagagacggggtttcaccgtgttagccaggatggtctcgatctcctgacctcgtgatccgcccactttggcctcccaaagtgctgggattacaggcatcagccactgcgcccggccagcttggttttattcattttagggagacatgagtcatcaatcaaatacatttaagaaatacattggtttggttcagaaaggcaggacaaygcaaagccggggcttccacgctataggtaaatttaaatactttctggttgacagttggttgagtttatctgaaggccggggatcaatggaaagaaaatgttcaggttaagataaaggattgtggagaccaagttttattgtgcagaggaagctctcagatagctgacttcagagagagcaggttgtaaaatgtttcttattgaacttagaagggtgcctggctcttagctgattatctcctggatctggaaaggaaggaaggaaaacaaagggggaaaggggattctctacagaatgtggatttttcccacaagagactttgcagggctgtttcaagatatggcagagaaacatgttttgcagtaaaatattttgattttcttccttgttatgccagagtcagattggaaagtaagtcacaatatacaggattaaataaaacccatctgatgagaattgatgatttgtagggcatgactccccagaccccttagataggaatttgggcaaaaaaaaaaatcagagcttagtcctcatatatcactataggatacattcctggaggtaaaattgctggatgaagtcaacactattagttgcctatttaaaaaatatccccctctacacatacacacacacacacacacacacayacaccccattttttgtaatagaaccctgcttttatttgaaatagccatgtgttcaatttaaaaactcactttcccatcctcatttgcacttgtgctggtcatgtgacgctgctyttagcaataagatgaaggtggtggtttctgagggtagtgtccttttcagaataaaaagacaaagcytatttgccttcttcttcctttactttatattcctctttctgccaggaatataaatgtgactctgtggtgtcacgcgcatccgtgtgaagagaccaccaaacaggctttgtgtgagcaacaaggctgtttatttcaactgggtgcaggcgggctgagtccagaaagagtcagcgaagggagataggggtggggccgttttataggatttgtgtgggtagtggaaaattacagtcaaaaggggtttttctcttgcaggcataggtgggggtcacaaggtgctcagtgggggagtttctaagccaggagaaggaatttcacaaggttaatcgctcagttaaggtggggcagcaacaaatcacaatggtgggatgtcataagttaaggcaggaatgggccattttcacttcttctgtgattcttcagttacttcaggccatctggatgtatacgtgcaggtcacaggggatatgatggcttagcttgggctcagaggcctgacatgtgggtacagcagctatcttgtgaccatgaaacggaggcaggaaaatgaagacctgtgcaccaaaatgcaggaagtcaacgtcatatgtattaaaatacactgcggtaagtgtcttctctttcccaagtctcggtgcataattatgtcaacaaaaagagtcaaactctgtaaaatatttgaagaaatttattctgccaaacatgagtgatcatggcccatgacacagccctcaggagatcctgagaatgtgtacccaaggcgaatggggtgcagcttagttttatacattttagggagacatgagacttcaatcaaatacatttaggaaatacactggttcagttcagaaaggcaagacaactggaagggggctgccaggttgcaggtagatttaaaaattttctggttgacaattggttgagtttatctaaagacctgggatgaatagaaaggaaatgtctgggttaagatgaaggattatggagaccaaagttctgatgtgcagaggaggccttcaggtagtgggcttgagagagaataggctgtaaaatgtttcttatcagactgaattctgtgttgatattaatgccggagaggtataacaaggcatgtctgaccacccccttccatcayggcccgaaccagtctttcaggttaaattttaaaagtgccctggccaggagaaagtccattcagatggttggggggccttagaattttatttttggtttagaattattacacaactttactttcatttatatggtattttatgaattacaagtatgctttcacagaccttttccttccacctcactttatttttacagtgtctcccatccacatgacaagtattggtgagaggtgacagcgtgctggcagtcctcagagccctcgcttgctctcggcacctcccctgcctgggctcccagtttggtggcatttgaggatcccttcagcccccccactgcactgtgggagcccctttctgggctggccaaggccggagcccactccctyagcttgcagggaggtgtggagggagaggcacgagcgggaaccggggctgcctgcggcrcttgcgggccagctggagttccgggtgggcgtgggcttggtgggccccgcactcgggcagccagtcagccctgctggccccaggtaatgggggacttagcacgcgggccagtggctgcggagggtgtactgggtcccccagcagtgctggcccaccggygctgcgctcratttctcgccgggccttagctgccttcccayggggcagggctcgggacctgcagcccgccatgcctgagcctcccaccccctctgtgggctcctgtgcggcccgagcctccccgaygagcaccaccccctgctccaaggcgcccagtcccatcgaccacccaagggctgaggaatgcgagcaaacggcgcaggactggcaggcagctccacctgcagccacggtgcgggatccactaggtgaagccagctgggctcctgagtctggtgaggacgtggagagtctttatatctagctcagggattgtaaatacaccaatcagcaccctgtgtttagctcaaggtttgtgagtgcaccagtcgacactctgtatctagctgctctggtgaggacgtggagagtctttatatctagctcagggattgtaaatgcaccaatcagcaccctgtgtttagctcaaggtttgtgagtgcaccagtskacastctgtatctagctgctctggtgaggacgtggagagtctttatatctagctcagggattgtaaatacaccaatcagcaccctgtgtttagctcaaggtttgtgagtgcaccaattgacactctgtatctagctgctctggttgggccttggagaacctttatgtctagctcagggattgtaaatacaccaatyggcactctgtatctagctcaaggtttgtaaacacaccaatcagcaccctgtgtttagctgaaggtttgtgagtgcaccaatcgacactctgtatctagctgctctggtggggccttggagaacctgtgtgtggaaactctgtatctaactaatctgatggggacgtggagaacctttgtatctagctcagggattgtaaacgcaccaatcagcgccctgacgaaacaggccactcggctctaccaatcagcaggatgtgggtggggccagataagagaataaaagcaggctgcctgagccagcattggcaaccagctcgggtccccttccacaccgtggaagctttgttctttcactctttgcaataaatcttgctactgctcactcttcgggtccaggctgcttttatgagctgtaacactcaccgcgaagatctgcagcttcactcctgagccagcgagaccacgaacccaccagaaggaagaaactccaaacacatctgaacatcagaagggacagactccagacgygccaccttaagagctgtaacaccgcgagggtccgcagcttcattgttgaagtgagaccaagaacccaccaattccggacacattggtactcttgaaaaaaaaaatctccygcagtactaaaagctaataattcattgatgactaattttgacttagtttactttccttataacaactagctgagatgagctactctaaaagtataggatgtaaaatatgggaaaagtaatcttgtaacaaagagtcttttgggaagggatccataccccaaaatagaagtacagggtagagtccggtgagagcaccaaagatcaaaaaaaagatgcagtaaatgggagggaaggagggcagaagggatacccatgtgttactgaagtcaacttttatytattctgaagttttgcactatagtctgtgggaaatacattttctctgtattactgagtgttcctgcaaactcaggctcttgaaccacagatattaatctactatgaaaatgaaaatgcttgctttcatttcccccataaatatttgttctctacaaccttcattatagagacactggcttccacttaaaggataataaaacttctcttacctggaggcagagccttacattccaggatagggaacttcccctcctccctagaaagatctctgaaagaatgtagagaactatctctccatgagtttgcaagtcaaaagtggagaaaagcctcaaagaggctgattttatcttcccagtagagatagatacttagattccaaaaggtgagaatccacaaactcctttcctttttgttcctaaggaaaatgtgtttaccttagggaacaaagcttttccctctcctttgaggagagtctctttcctatatgaattctcaggcttgaggacaactcagcaatgtcgctgtggctactcttattgctgtgagtaaataaagctctgatctttgactagacgaaacctgatgtttcgtctagtatctatttatcatctctatctatgtgcttatttatgactatgcaagtggggtaagatctcacatccatcacagttgcctttttttttttaagagacagggtcttgctatactgcccaggctggtctgaaactcctggcctctagcaatcctcccacattggcctcccaaagtgttggtattacagacatgagctaccttgcctggtcccatcacagtttttgatttgacataatcctcctttaaaaaattggtaaattatgcttgcttcagcatatatatgtgtatatgtgtgtacatatgtatatatacacatgcgtgcatgtatgtatatatgcacatgtgcgtgcacgtatgtatatatgtacatgtgcgtgcacgtatgtgtgtatgcacataktgtgtgtgtgtgtgtgtgtgtgtgtgtgtatttttttgagacagagtctcgttctgttgcccaggctgcagtgcagtggcgtgatctcggcccactgcaagctccgcctcccgggttcacgtcattctcctgcctcagcctcctgagtagctgggactacaggtgcccgccacggcgcccggcttattttttgtatttttaatagagacggggtttcaccgtgttagccaagatggtctcgatctcctgaccttgtgatctgcctgccttggccttccaaagtgctgggattacaggtgtgagccaccgygcccggcctagcatatatattaaaattggatgttacgaagaagattagcatgcctcctgtgaaaggatgacatgctgacgtggaaattcgtgctccatattttttcttaactggtaaattactatttaatagtgaatcacccaacattgtggggtttttttgtttttttgttttttttttttgagacagagcctcactgtgtctcagcctggagtgcagtggcatgatcttggctcactacaacctccacctcctgggttcaagcgattcttctgcctcagccacctgagtagctgggattacaggccggcccatgccaccacacgcaactaatttttgtatttttagtagagatgtggctttgtcatgttgcccaggctagtctggaactcctggcctcaagtgaggcccacctcagtctcccaaagtgctgggactacaggcataagccaccgctctgggcctgtatttctaatatatatatatacaagatcatttatgtagtttactgccaaaaatggaagaaacctcatcatgaagagacatttagaaaacctaaattgatgaacattctaaaaatctatttgtctgtgaagactaagctctgatttttttttttcatcttgcctaaattcctatcttaagggtctggagagtcatggcctacaaactataaattctcatcagatgggtttgatttaaccctatatatcgtgacttactttccaatctgactctggcrtaacattatgtgacaaagaagaaagtcaaaatattttaccccaaaacatgtttctttgccatattttgaaatggccctgcacagctgtcctttggaggggaagattcacatctgtaaagaatctctattaacatagctatatctttttcttccaggccctccgaaccctgaagagatcatcatatatatgtgctgccgaagcgagcactcctgaagagattaactaagagtctagcaccttttaaggtctgaataggaaacatctgtcatctattctctctaagggcagccactataagagttcaaaagaaacttgctcgccacaatctttttttttttttttttttttttttgagatggagtctcactctgttgcccaggctggagtagagtggcaccatcttgtctcactgcaacctccacctcccaggttcaagtgatcctcctgcctcaggccccctagtagctaggattacaggcacgcatcaccatgcctggctaattttttttttttttttgagatggagtttcatgctgttgcccaggctggagtgcaatggcgccatcttgactcactgcaacctccatctcctgggttcaagccattctcctgcctcaacttcccgagtagctgggattacaggcgcctgccaccacgcccagctaatttttgtatttttagtagagaagcggtttcaccatgctggccaggctggtctcgaactcccgacctcaggctatccgcctgcctcggcctcccaaagtgctgggattatagatgtgagccaatgcractggcctaagtgctgggattacgggagtgagccgctgcgcctggcctaagtgctggggtacaggcgtgagccaccaggccagcgaagtctccacaatcttttttttcttttttttttgaggcagagtctccctctgtcaccaggctggattgcagtggcgatctcggctcactgcaacctctgcctcccaggttcaagcaattctcctgcctcagcctcctgagtagctgggactacaggaacgcaccaccaaccccagctaatttttgcatttttggtagagacagggtttctccatgttggccaggatggtctccatctcttgacctcgtgatctgcccacctctgcctcccaaagtgctgggattataggtgtgaacgaccgtgcccagcccccacaatcttttatcttaacctgagcatttcctttctatggatcccaggtctttagacaaactcatccaattgtcaaccagaaaatgtttaaatttacctatagcctggaaggccccccgaccgacgccctcccgcccccgcccccgccgcccctccactgccttatctgctttgagttgtcccgcctttctggaccaaaccaatgtacttcttaaatgtatttgattaatgtctcatgccctccctaaaatgtataaaaccaagctgcacccaaccaccttgggcacatgttctcaggatctcctgagggctgtgtcacagaccatggtcactcatatttggctcagaataaatttctttaaatattttacagagtttgactctttttgacaacactgtgcacttaaaaaaggtcatgtcataaaaaccaagnnnnnnnnnnnnnnnnnnnngagttcaaaagaaacttgctcgccacaatctttttttttttttttttttttttttttttgagatggagtctcactctgttgcccaggctggagtagagtggcaccatcttgtctcactgcaacctccacctcccaggttcaagtgatcctcctgcctcaggccccctagtagctaggattacaggcacgcatcaccatgcctggctaattttttttttttttttgagatggagtttcatgctgttgcccaggctggagtgcaatggcgccatcttgactcactgcaacctccatctcctgggttcaagccattctcctgcctcaacttcccgagtagctgggattacaggcgcctgccaccacgcccagctaatttttgtatttttagtagagaagcggtttcaccatgctggccaggctggtctcgaactcccgacctcaggctatccgcctgcctcagcctcccaaagtgctgggattacaggtgtgagccaccacacccagccaaggaagcctattattttggagtatgattatggacattttcttcacttggcctctgcaatatcattgtatttatttatttatttatttatttatttatttattgagatggagttttgctcttgttgcccaggctggagtgcaatggtgtgatcttggctcacagcaacctctgcctcccgagttcaagccattctcctgcctcagcctccagagtagctgggattacaggcacgcgccaccacgcccggctaattttgtatttttagtagagacagggtttctccatgttggtcaggctggtctcaaactctcgacctcagctgaaccacccgcctcagccacccaaagtgctgggattacatgtgtaagccaccgctcctggccgtctctttttatttattttcatttttttatttttgggacggagtcttgctcttgttgcccaggctggagtgcaatgtcgcgatctcggctcaccgcaacctccacctcccggatttaagcaattcttctgccacagcctcctgagtagctgggactacaggcgcacaacaccacacctggctaattttgcgtttttttgtttgtttgtttttgtttttgtttttttgagacggagtatcgctgtcgcccaggctggagtgcagtggcgtgatctcggctcactgcaagctccgccattctcgtgcctcagcctcccgagtagctgggactacaggcgcccgccaacacgcccggctaattttttgtatttttagtagagacggggtttcaccgtgttagccaggatggtctcgtgatccgcccgcctckgcctcttaaaatgctgggattacaggcgtgagccaccgcgcccggccagggacactttcatcacatatccatatggcttrctctctcatttctattcagataccaccttgacagcggagctgtcccagactacccttgtgtaaagcagtatttccacacccctcccctggactacctgtcctccttacactataataattttctcccataacacctattatcatttctataatagacacattatctatctattgtagtttttgtgtcacccaattaaatgtaaactccttgacagtaaagacttagtttcattcactgatacagccctagacctagaccaacacctgttgtatatactagacactcaaaaaatatgtgttgaatgyatgaatggttatagtatgtaaaaaaatcccacaaaggatttacacagaattgtaaataataactgtattaggttaagaaccttggaaaataaagaacaaggtcatatagagcgggtatgtggaggatttttagttccatggaaaagtcgccccagtcagcagtgagggaggaagttgaatagttggttctcggacatgagataagagaatgaaaaccgaattatgtttcggccgtaagactaccagatctccagtaagtcaagaacactggaagctggccaaaaaggtgggtaaagggccccacacaatgggacttcccgggcatgtcctggttactgtagaagtgtctcctcctcaaggcaatgttataacgacaagtgagggaaatagtcaacaagggctgcaaagcacgttggtctaattagtgcccccttgcctagagatctggggagaagtctgaggagggagtatccaaagatgacataacctgagtgcagattttcaattgtaagtgaaaagtgagctgagcctgtgctcaaggacttcctgcgtgctgagcacccatgctgagcactctctctcactagcttgctgattggggtttgggtttataaatttcatgttttactcaccaacactaactcattttatacttcaatcgaaacagaatgtgtgagtccaggcgcggtggctcatgcctataatcccagcactttgggaggcagaggcaggcagatggcttgagctcaggcgttgtagaccagcctgggcaatgcagcgaaacaccatcttcaccaaaaatacaaaaatattagccaggtatggtggcatgtgcctgtagtaccagctactctggaggctaaggtaggaggattgcttgagcccaggaagatgagggtgcagtgagccaagatcgcgccactgcactccacccagactctgtctcaaaaaaaaaaaaaaagtgggttttttttttctggaaggaaatagaacatattctctaatattctctaagtggtttgtgtgctttggcacacaaaagaatgaaatgacgatggcctttctcactggttggtttgctgttcccgcagttagaagagactgcccacatagggagagtggcacagaggagagtaacatcaatcaacagcgaatatgcacttgatcgcggtctaatcagcaccaggcacctcagggcagcagtattgtcagacgcattggaaccagagggactccatcttgaataaggtctgggtaaaatgaggctaacacctactgggctgcattcccaggaggttaagcattcttagtcacaggacaagataggtcagcaggacaagatagaggtcataaagaccctgctgataaaacaatgccataaagaaggcagccaaaacctgccaaaaccaaggtggtgatgaaagtgacctctagttgtcctcactgctcactatacgctaattataatgcattagcatactcaaagacactcccagcagcaccacgacagtttacaaacgccatggcaacattaggaagttaccctatatggtctaaaaggggaggaaccctcagttagggtaaatccctgcccttttcctggaaaactcatgaatgatccaccccttgtttaacatataatcaagaaataactatacgtgtactcagttgaacatcccgtgccactgctctgcctatggagtagccattcttttattcttttacttctctaataaacttgctttcactttactttatgaactcgccccaaattctttcttgtgcaggatccagaaccttctcttggggtctggattgggacccctttcctgtaacagtattagtcataactattatctgaaaaagtatatttatatggtactttacaaattcaattttgcacaatagactctgacttatgtcattctcacaatcaccccataatgtcaatcctcccatttcacaataaagaaattgaggctcaggctggagacggtggcccacacttataatcccagcactttgggaggctgaggcaatgggatcatttgaggatcggagtttgaaaccagcatgggcaacatggtgagattccagttctacaaaaaaaaaaaatgtttttggccgggcgcggtggctcacacctgtaatcccagcactttgggaggccgaggcgggtggatcacgaggtcaggagatcgagaccatcctggctaacatggtgaaaccccgtctctactaaaaatacagaaaactagccgggcatggtggcgggcacctgtagtcccagctacgcaggaggctgaggtaggagaatggcatgaacccgggacgcggagcttgcagtgagccaagattgcaccaccacactccagcctgggcaacagagcgagactccatctcaaaaaaaaaaaattgtttttaattagttgggcttggtggggcgattctagtcccaggtacaagggacactgaggcaggaggattgcttgagcccaggagtttggggctgctgcagtgagccgagatcacaccattgcactttagcctgagtgacagaatgagaccctgtctcaaaaaaaaaaaaaagaaaagaagaagaagaagaagaaattgaggctcaaggaggttagggtgaattgctcaaagccattctgatgtgaccgacacctagagtgaacatatgtcctgatgtgtccaggacagcctcagtttatgcctgcctattgtcctggtgtaattattaatagcaccttttcactccccggagtatcctggttggatagtaaattatatggtcactctaccaaaacctgtttctttcattcacttaaatccaatcttttatttcattactgccttatttcctccacttaggcagcttcaggatgattataacagctgaaaaggctggcttcagaccatggtatcacttctatgagagaggacatttcaagttgcaaacaaacaattcaaccagtgacttttaaatttgaaaactaccagtatagtacggcagtgaagagatcagggtctgaatctccattagcatagacattattcaaaatgtcaggcctgagaaggagctaaaaaacggcctgtcttgggggaagaaacggcaagaattttatcgaacttcagctggagtgggagaggggactgtcagccagaatgcggctagtttggggaagagttggtcaaagagattcttgaaagagggaggaattgttgttgcagatgagcagccactgtttgggcactttggattgatcagcctggacaggaggaacagttaggggctaagatcctgcacaggaagaggtggaaggaacaactacaggcaaaggggacctgcaggggaaaatgttccatgtggaaaatgctaggacttcagggtctcttaggttagttaactcttctgagcctcattttcctcatctgtaaaatgaggatgttaacagtttaaggttgattctgaggatggaatgtactcagtacataagtgttcagcaaacagtagtagctcttattgtttgagtctcttccccgccttgtgcccctagtgtagtagtaagggtacggattttcttttttttgtttgtttttgtttttgtttttggaggagtctcgctcagtcgcccaggctgaagtgcagtggcgcgatctccgctcactgcaagctccgcctcccgggttcacgtcattctcctgcctcagcctcccgagtagctgggaccacaggcgcctgctaccatgcccacctatttttttttgtatttttagtagagacggcgtttcaccgtgttagccaggatggtctccatctcctgacctcgtgatccgcccgcctcggcctcccaaagtgctgggattacaggcgtgagccaccgcccggctgggtacggattttctttacgctgtatataaaagtctgagaaactatcaattgtttataataaagaatgaaaactccaaaggcatctggggtgaggttgagggtctgcacagagattatgggggaaggggacgtccaaagctgtcattggattcaggcactcaacagattggaacacagtgtagagatttatggtagtgtgaaggtgctttatttgttatgaattactcagagattttactatattttaacctggggcggggaacccttcctttttttgcccttttgaaaataaggtagatttcttcagatgtggaaagtatcaatggtcaatccaatagcttttcgttattttatttttttatttttggaggcaaagtctcactctgttaccctggctggagtgcagtagtgcaatctgggctcattgcaacatttgcctcctaggttcaagcaagtctcctgcctcagcctcccgagtagctgggactacaggcgtatgccaccacgcttggctaatttttgtatttttagtagagacaggttttgccatgttggccaggctcgtctcaaactcctgacctcgtgatccacctgcctcggcctcccagtgctaccattacaggcggagccaccacacctggctcactttgtggcatatttctagaagttaaaaaactcacctgacaaaagagatactttgtggccaggcacggtggctcactcctgtaatcccagcactttgggaggctgaagtgggtggatcacttcacgtcaggagttcgagaccagcctggcgaaaatggtaaaacccccgtctctactaaaaatacaaaaattagccaggtgtggtggcaggcacctgtaatcccagctacttgggaggctgagacaggagaattgcttgaacctgggaggtggaggtttcagcgagacgagatcgtgccattgcactccagcctgggtgaggacagtgaaactccatctccaaaaaaacaaaaaaaaaaaaaaaaaaagagagagagagagaaactttatgatttactccatggaacaaatatcatatagaactgtaacatttaaaagtcagatttctgtttctaaactttaggtttatacctcttggcagatgactagatgattctttccccattccaagagtaacagatattcagccaacttgtgtgtgtgtttatcacatgtgattccacatttcagtttgtttctctatattttttgtattttaaattggacaagtattacttttataataagaaaaaagataattactaaaaataaatgagaaatacatatacatgtagaatttgcatagtgtcaagtaaatgataagggtagaaagagtgcagagaaaaaaaggatgaaaacgaaggtggctgaagaatgctttgtgacggaggtgggattgaaatgagctttgaaaggccgggtgcagtggctcacacctgtaatcccagtaatttgggaggctgcggcgggcggatcacctgaggtcaggagtttgagaccagcctggccaacatggtgaaactccgtctctactaaaaatacaaaaattaaccaggtgtggtggcaggcgcctgtaatcccagctactctggaggctgaggcaggagaatcgctcgaacctgggaggtggaggttgtagtgaaccgaaatcacgccactgcactccagcctgggcaacaaagcgagactccgtctcaaaaaacaaaacaacaacaaaaaacgaaacaccgaaatgggctttgaagaatggaagggatgcagataaaagagaggagggcgcagagcggtttggtcgttcgttggaccagtgtcggttcttcgctcgcgactgcggctcttcctcgggcagcggaagcagcgcggaggtcggagaagtggcctaaaacttcggcgttgggtgaaagaaaatggcccgaaccaagcagactgctcgtaaatccaccggtgggaaagccccccgcaaacagctggccacgaaagctgccaggaaaagcaccccctctacctgcggggtgaagcctcatcgctacaggcctgggaccgtggcgcttcgagagattcgtcgttatcagaagtcgaccgagctgctcatccggaagctgcccttccagaggttggtgagggagatcgcgcaggatttcaacactgacctgaggtttcagagcgcagccgtcggtgcgctgcaggaggctagcgaagcgtacctggtgggtctgttggaagatactaacctgtgtgccatccacgctaagagagtcaccatcatgcccaaagacatccagttggctcgccggatacggggagagagagcttaagtgaaggcagtttttatggcattttgtagtaaattctgtaaaatactttggtttaattggtgactttttttgtaagaaattgtttatatgttgcatttgtacttaagtcattccatctttcactcaggatgaatgcgaaaagtgactgtttacagacctcagtgatgtcagcactgttgctcaggagtgacaagttgttaatatgcaaaacggatgcgtgatatttcttgcttctcatgatgcatgtttctgtatgttaatgacttgttgggtagctattaaggtactagaattgataaatgtgtacaacagggtccttttgcaataaaactggttatgacttgatccaagtgtttaacaattggggctgttaagtctgaccatacatcactgtgatagaatgtaggctttttcaagggtgaagatacaaaccttaaccacagtgtaacttatagtttcctttaaaaaaaaaaaattaaacctggcagctatagaatacaatatgtgcatttataatagctattttatatattgtagtgtcaacattttcaaattaaatgttttacattcacaagtggtggggagtcttgtcattaaggtgtgtgtaatttagagtccagttggttttcttctgactgcacttgttctcatagtagtaaaatgctatgtgcatttataccttgcataaatcctcattctaccacatgttaactaaccctctagctgataatggaaacactaactgggggattttatttataagggctctagaaaaaaatatgagttattcacaccagcatcatctgttaactaatattctgaactagtgcagcttttcattgtgttgtgtggttggtctcataactaggttgagttttctcctctgctaagaggaaacagtactgaagttctttttcttgtggcatttgtattataaaaacttggtgtaggggaggagcacaaagctctagcccactgaacctctgctggttaagatggtgttaggttagg

SEQ ID NO: 6998 - DNA, 71634 bp, Homo sapiens
attcagtctcaggtatgtctttattagcagcatcagaatggacaaatacagcacactttattatacacagctatacaaagttgattcacatttgttgcatgcatcctggaaatctcccagccagatccgtgagtttaagaaaagtttctactttccaggttgcagcaggcaacattttgctgattctttggccactatataacaagggtggccctttctccaccctccaatagaaatttccttattaacttcccagtatctactaatcattgtttcactgcctctttagctaccaatcactcccatcaccaaagccaacagtatatgttttagatttttattatgacagcacctgacctctatgcaccaatttctgttttagttaacaatttcaatgtaacaaaccacccaccaacccagtggcttaaaaaacaatgatttcttatttcctgtacagttcttcaggcaggctgggatattcatctgctggtttcatatgctggagggtcgtctagccgagaggttcaacatggctttattcacatatctgaccactgatattgcctgttggctggggaatcttcattctcctttatgtagcttctcatcctcagtaggccagactggctttctttaatgatgatctcagggcatcattataagactgcaaagacagaatctccaagacatcttgagtcccaggctctggaacttgtaaaatgtcacttacgccatattctgttggtgaaagagagtcacaacatcggtccctattcaagggagtgaaggaacatatctaattctggatgggaggaacagcaaagtcacaatgcaaaaggatatccttactggaatggaaggaatttgtaatcattaaagaacctaccagagtaaatatctatcagatgcgttcatgtttgatttttatctgggatttgaacttgaccttagtcttcgacctctactgcttgactctggctgtaactccatggtagtgtattagtgatctactctgatatcaaactcaaaatatgagatttcccaatgaccgtttattctctaatttccccacttgctcaaaccttgtcaacaatgcagccttgaatgtcccacttttgttggtctctatgtcataccctagtccaatctgatgaagagatagtcctggttttgagtcttggatttaccattaagtcatcgtgtgaccttgaacaggttatttaaattattttaaatatttgccttatgatatttgtaggactaaatagtataatgtattaaagttagtaggttaatgaatgtcaggtttcttctttcttctgtgtcactagatagtaaaggatatccaatacaagattaaactattgatttgtgggcaatggctggcctttgaaagtatgtaaactaggaatttataataatataaggggtcagggtattaaattctcagcaacatgtgacttctacattatagtatgtttttctacattcttctatgttttatatatatagtttctggtattgtaaagtatattaatatagcccccatacagtgatggactatccaattaacctttaaagatatgttttggacactagtaaattagggcattgaacaaaaactaaaaattttgatatttgattttcaaaaaagacattgaaatagtcactaaatgaaaattcaaaactttatcagaatttactacatatatttctttttaattttatgttgtttttacttttaaatatatgacacagaaggtattattgtcttcttgatgctttgtgcctctgatccagcctttctctcatgtaccacataaaattggaggctcagaatagtgatgctaaaaatgaaatggagactaaatataaaacacatttcataataggaataaatgatgggtctcggtggctggtatattataaagattaatggcaagggaaaagttgaagatctcactacaaccatcattcagcttcatgtcacccaaatcacacacgataggtcaaataaattaaatagcttgaaccatatttacatacactattttacaatgtattgaatgttgagctctctctcctctgaattcttcatattttagcatgaagtcttttataaactatatatataaacttttatattctatttcatcatctgatatttgaaggaaattccaaataaattttttttaaatactgctgtgaatgatgcaattgtcccaatctgccacatttccccacttcactaatagcctctatcaccttctgccaccaaccctccatgaggccagaaaagactgagttacagcgggcggggattgagtgttacaagatcaggattaggaggagcctggcagatggaggtggcaatagcagtgtcaggaagcaatgaaggcaaagacctgggaaaacaacaaaatctggagcaagcacatataaacattgagtcctgagaattgcagtagggatgacgctgggatcacagagttgggagtttgcaggcaggtagaagcatgatcaaagtaaaacaggtttaagaagcgaggttggcccaggtaatttttggttcatatatgtagttcccttttatagcagaggggtagagcatggtgggtcagaccttcaaaacactccaggtgaacccagaatagaaattcagtagatacattttttctcctaccatgcttaacgttgtatggctctaggctttgaggacataataaaatttctgtgttaccctttaagatgcttttaccttagtaagactccggggtcagccctgacctcacaggaaaattaaatgtctttgtggttacttatttgacactttagacgtatgtccgtaaaggcagtgggaagaagctagttccttagacagtcatgactcaagtgaacttaactatatggcagaagtaagactcaagttttaagatctgcaatgaagccctctagcaaattctataaaatgaaaaataatcaactataagccaggtgcctctagaatggtatggataagacattcggtttggctttctataaggtactttatccgagtgaaatacaccagcttggtcttccagtttgagctgaatatattctgtcaaacaatggcgtcctcacctaagagtaatatcatcaaagtggtgtttttcttttacacatttttgaggccaggaaccctttcgacggtgtttttaatgccccagaactccaaaacctatgggatctggagctaatggagcagatacaaatgaaacatgtcctctgtgaccatacttttctttcaaaaaccctagagatttgaaacatggtttgaaaaccagtggactaagacaatgaatcccttcttttctcttgagatgtaggtttagctccagtgtagggatccaagggagatagtgtcaactggcctttcaatgtttactgcaagttttctgtttttccaaaggcagatgagtttactgaaaaggcatgaagtgacaatgtctaaacaccaccaaggtgcttaatcttctgggccctcctctggtaaattatatgctattgaaattaaagtgctatgagagctgaaacatgcataaatacacacatttttcccaggagtgacaaacttctatgttatctgtcttttttaaaaaaacacctgatcattatttcattcttcttcagatagtgcatttatgaatgtatcttttgggatgcaggtggtattctgagtcatctaaaaaataattcatgtagcacagacaaattttttctctggcatgaagctcagccttggattccaacagtaattcaacagtaataatccagcataagagtttttaagtgggccacagaaacctcctcttagtaattgctactcttcctcttctatgccttgaataggagagcatgagaaggacccacactttgcaatttgaggcaatgaatgtgtatatcctatttaactctgaatctaaaacactattatacattgttttcctagggcttcatatccagatagattagcactttttaattgatcttatgaaactcaacaaaagctattatgcttgtttaaaaaaaaaagaaaaagaaaatcctctagtgaacatgtaatagtgaattctagaaagccagataatttctttgcttaataatagttttctttcctcttggctgcagattctcataactagcaccatgccaaacattcgaagattggattatggcctgtcgtacttgattatttttgtcagcatgctgacccgggtgcccttttcttgtgttgttccttctgtttccatttttcatgtcatccagcttttcatcttgtcaatcagcttttgacttcctgattaaagtgtctgtcacaggagcagcctggtctccagtcagttgtttaatttgttcctcatggcatccaattgagttattcatctggcccagctgttcacaagtgcttccagcatcactttttcatgtgtttgggtttaacctctatatctatgtacaacagtgtgaattgttccattcatactgttgactgtggattgcttcaccttcctaatgccttgatgctaccaggctggctgctacactgtggccaaacggacagagaagcaatatttcaatctgatgttatggtaacaagtacaactaaacagactagttttcaagaattatagcaggccctctttttaacaattaggacgatgtaatggaaactctagactgttcagatttagatccacccaaaaataatgttgatggtgcttggcagaggaaagaaaacattcatctgccaacattgcggatatcgccatgaatgctccaggatctatttgttgcattaggtgacatgagatactctcttggcctgaattgatgcagatatccaactggaaaaatgaaattaagtaaatctgctgagtttgcaatgctaaaacttgtcttccagtggttagatgatttatattatgcaacattcaagaagccacataatgcaacaggaaactggaggaaaagaaaactagagtacatttccccactcttcccttttagccactcaaacctaatcaattcaaaattccagtagattgtttatgagtgagccattccttcctgctattcctatcatgtttctcctttacctcctacaaacttgaaatggtaattccattacagcagtcatgaaaatagccagagaccaagtgcctaggactcaaaagaatgtagaatgatgagtctaatgaaaatcagacagcaaactgaacacaacttcacaacctacctcccattttggtttgatttcgtgggaatgtttgttaagaatccagttgctcctcaaagaatatgcattcatttccttaggttattaatgaaagatatattaaagcaatgtagaaatcctgaagagaggaaaaacgtttgtagcctatctggggaaggctattattgtcaattaagcagaaaaaagtaaaataattttgctgattattggtttttactatttttaactttctctgcaaagtatgatacatatactaattcatattactaacaataatactgaaacttatttatagaagtttaatatatttcactttttaattagaaaaactttaaatttttacttcaactggtaaaaataataaaatatttggtggtcataaatcatgaagaataatgtagcttaaagtctgtattcctggttttgttctggtcaataggcctcccagtgtaggttttccatgaggcatttctgaggagaatagttttttcaatttcttccttgtgaggttttgcttgttaccttgggtggattcacttttccaatttttaccaaattcacatctttgaaggaatatcccccatgagtctttccattattatcctcagtgaggtgaatacagtgaatctgtactcaatcttcattccatactgctccttgtgtgcctttctgtgctgcagaagctatgaagttaaaaaccacttttgcttgactcctttgcagctaggactccagatatgctttgggtttatcacatcagctatacttgtgaaagatttggaaactgaaattgaggcaaaagtcactattttaccatttctgtttaccacgttggcaagcacagtcctggaaatactgagttttgctgtagtagtgctagcagatattcctgatgtcctaaggcaaggtgagggacaattactacatgctgagaaagcatgattatgaagccaacaggtgtggatgcaatgccctgacctgaatcatacctaaaaagtgtgcctctggagtgtacagtcaaggtggtggattcctggttccctgtttctgattgtggctccctggggagccagttctatgttactgatctgtgagttgttcctgggttctaacacggagcctgctcttctagttagtctactggtttgcaaactcctaattcccagtattaaatccccttcttatttaagtgatttttaaactgaaaatacatcctgattgatgccatttctttccacattttctgaaatcccttgcgttatgatcagtggcatagtgcaaagagtagatgctttggagtcatataattattagatacatgacctaggatatatttatgaacttatatgagtctcagttctctatttttacaaaatgagtaataatacttcaatgctcagttgataacaaggataacataagatatgccaagtgcctggaacactgatttaaacactcaacaaatgtcagcatccttgtttaaatttgaaagtttctgacatagtatttcccactaagctaatcaaggattgcatacagtgaagaagacaaaagctatgggacaatattgttattgttttaaaagcacattcctgtgtcaatctgcagccaatgaaccaatgacttgtgataacctgtactgtgttttacacagggaactgaaaccactgagatttcaggttgctatactcaactttttggaaaatcaaataaaatacatttttatatgtattctttgggagtaaagagtaccaggtgttacatacgtacatgcttaacaccatgaaaaaaagaagagatgatcttcaacctgagaaagagaaagataaagattatagtagaatttgaaccctacctccttacccaaacttagggacatttttcagttagtaactcaataagactgcactcctaatcttttggacaaaataattggattttcagttgtcatttcccttcagaaggaatctatcctagctgcatgatgcgctaagtattccagaaccttcctcaatctttctaaatagatatatgaggaaaaatacatagacacacacacacacacacacaaactcacayatacaaacacaaagaaatacctggatgttagaagtaaaaatgaatctaaaatccagcaagtgcctgtgttagaagatactgttgtgtggctcacgcctgtaatcccagcactttgggaggccgagtcaggctgatcacctgaggtcaggagctcgagaccagcctggccaatatggtgaaaccctgtctctactaaaaatccaaaaaaaaaaaaaaaaaaagatactgttgtgacctggagtttaatacctagaggattaactttaaaactcagtaaatgtcatgaaaagagatggcactttgggcatatttgagtaggaaggtagaaatgagaatcttataagcccaaaaaatcaagggtttcatcttagtgacaatagatactggaaatgcatacccattggcccagggaaatggcaaggaaccttgcctctgtataggaatatgagccaaaaaaaaaaaaaatactactaccatgaaaaattgataagaggagccatgagcaaatggagcttgattctgcgcaatttggaggggcatggaaaccccttcaaaccaggaagtatgcggaaaaaaatcagtcccagacatcttgtgtaaataaatgcaaattcaaaactcctttggagaaactctctctccctatctctctcgctctccctttctctctgtctctctgtctctctctctctctctctctctctctctctctctcacacacacacacacacaaaatccttatttctgatgacctcacaatcaaatatttttaagaatatacacaggaacaatcctgcatcagcaagattaaataaacataatccccaaatttaagattacaaaaaaatctgaaaaatatataaaagtaaatatgtttaaagtgataacaaaaggaataaaaccataaagcaagaataaaacactatcmaaaagcaaattaaaaagcagcaatgacactaagaaataatatatttatagttttgaaatttaaaactcaatggacaggttaaaaagcagatcagttacaagccaaaaaattattaaaatagaaagataagataaacaggcaccaaatataatttctgcgacagattagagataatggtagcagaacactttcagaaaaaatgttgagaccttttctaaatgacatatatcttcagattcaacaatcatgacgattgaagagaagaacaatggtaattcccatctctacaagatgctggaatgctctgcccrtattcccctgatctcccactcccatattagctccaggtgtgacttcattcccaaatccagcacctgcaactttctggcagagtgccgtcctcaggttgtgggagcctaaatacctttgttcatgaagaatcagagtacctggaaattcacattctattcctttaagggcagcctttaacttattgctgatggttcagcatataggaataggatatccaccatgcaccctgattgagacagctctgaagtatgaccaaaactgattccagtgggaaaaatttcctgagttaatgagactaagttatcctgtctggaactttgctagaagtcacagtgttgcttggcgtctatccacttcttgtcttgttattttatttccctattgatttttcctgggatcactcctttaaaaaaagacagaatactactacacaaatccatacccctatatctgcttctgggaaacccaatctaaatacagtctagacacattgtaataaaaatgcaaaactttaaagacaaagataacatcatcgtgaacaattatatttttcaaattatctacacagaaacaagtagactaagagcagactttttccaaaaaaaatccaaacaaaggaataatatccacaaataacaaaatctccagcctagagtttaatacccagctaaactaagagtaggggtaaaatacaactatttccctaagaaaaagaatgatagggtatgtaaataacaattaattatagaaagaaatgctaactacatttttaatgaaaaattggtaaacaagaaaagagaagaatctaagaaacaatacatagcaaaaaatataggaagcatgtagrtcaagttaaatataattaaccacatataattaataataattattaattgaacacatacaaaaagatataaaactaaacttctatagaaaattataatctaagattctaggaatggagttggagtgggtataatgtgcgatgattgtgatgcacttaaaacattctaagattctggtattgattaggagaaggagaaagctattgattagccttagactctctaggtcaagtgtagaaattaaaattcaaaaactgctgtgggaatagaaaaagaatggatatttaacatataaatcaatacagaagaaagggtaataaaataaaatctgatcaattcaatgtaaagcaagaagagaattcaataaaatagcaaggaaaatcatagaaaatagaaaaagtaaatacagttgtaaaactgtatttaggtgtgttagaaataataataaaggtaattattggtggattaaccaatccaggcaaaataaaagagggtccccagaaagtcaggtgttttaaaaacctaactgattttttttttactgagtcacacctaaatcataatacagcaaggctgaaagaaagaacagaaataatcacaagtaagtaatatttaaaaagcctagaatagtcacaacatttgtataaaacaaaacatattttgaaaaataattactgataattaagaagattacttcctaattatcaaggaaagatttcctaggactacataatcctaaatttctataatccttacaaagaaatgtcaaaatatgtaatgtaatgatatcaaaaatcacagggaaaattaacaagtcacatagtgttcaaatttaacagacctctctcattaataaatcaagaagataaaaaagtactaagaatattaaatacaccaattaacagttttagtctaaagaacacgtatagaatcctattacaaaattagagaatataacttaaaatatacttaaagttagagactattctttgtttttaagtatacacggagctatatgaaaattggatgcaaagatacagaaaccaaatcactccatgaagtaacaaaattggtaaaatatagacttcattcttttaatgtaattaagataaattgagatgtattctaaaaaataacctttcaaggaagaaaaagattataatggaatatcatacacaatcatatatcaacaaattaggtagcttaaatgagatggacaaattcttagaaagacatgaactattgaaattgactcatggagaaattaaatatatgaaaagtactataacaaatgaagagagtaggtggggtagccgtagtggctcatgcctgtaatcccagcactttggaaagctgaggccggcggatcacttgaaaccaggagttcgagcctggccaacatggtgaaaccctgtctctataaaaatacaaaaattagctgagcttggtggtgcacctgtaatcccagtgagtcaggcgaatcactggaaccccggaggcagaggttgcagtgagccgagatggtaccactgcactccagcctaggcgacagaatgaggctctgtctcaaacaaaaaacaaaacaagttaagggattagagatttaaataataaacaaaattccctcaaagaaaagcccaagaatagctttgctggtgaattctaaaaacactcaaagaaaaattaacactgatacttcacaaactcttagaaaaatagaagagaagcgatcactttccaccttattctatgaggccagtatttacgtgttacagaaaccagaaaaaaactacctacaaaaagaaaactttagaccaatatcttttaaaattatagattaaaaaaatcctaaacaaaatactatcaaactgaatccagcaacatataaaaagaattatataacatcaccaagtgggatttatcacaggaatgaaaggttagttgaacatacaaaaatctgtctgaatactgtggtgtcataataacagaataaaggacaaaaaacccacatgattgtctcaataatcatgcttttagttgcataaaagcaattgaaaagatccaatatcctttcatgataaaaacaaacaaacaaacaacaaaaaaactaggggtagaatggaacctccgcaacataaatgctcctcaacaaagcacttatgaaaaacctacaattaataaaaattaatgatgaaaggataaaagcattctaagatcaggaattaagacaatgttatccacttgtgtcactcctctttactatcatgctggggattaagccagagcaattaggtaagaaaaggaagtaaaatgtgtccagattagaaaggaagttaaactatctctgtttgcagatgacacaatcttgtatatagaaaattctaaaagttcaataaaaatatgagaactaatagtcaagtttagcaaggttgcaagatacaaaatcaatatgcatacatcaattttatttctatacactagcaattagcaagctgaaaatgaaactttaaaaattctattgcataaaaaaaaaattctattgcattagtgccatggtttggatatgatctgtttggcctcaccaactctcatgttgaaatttgatccctaatgttggagatgggcctgggtgtttcaggatgtttgggtcacgggggcagactgctcactaatagcttggtgccattctcacagaaatgagttctcacttctagttctgcccagaagaactggttattgaaaagaacctggcacctgctccacttctctctctcttactttgtttcttgccatgttatctctgtacattctgatttccctttaccttccaccaggagtggaagcagtctggggccctcatcaggagctgccatgctttttgcacagcctgcagaaccatgagccctgagccaaagaaacctcttttttttccttcaatacattatccagcctcaggtattcctttatagcaacacaagtggactaagacaattaacatcaaaaagaataagatacttagaaataaatttttaaaagaagtataagcctttacactaaaaaaaattgttgaaagaaataaaagaagacaagtaagtcgaaagacattctattttaatggattgagaaactaaatttttttaagatggtaatatgcttcaaaatgatcaactgattcaaaacattcactattagcattctagttgctttttttgcagaacttgacatggtgaacctaaaatttatattaacatgcaagagaatcagaataaccaaaatagtcttgaagaagaatacagttagaaagctcacacttyctgatttcaaagttattacaaagctgcaataatcaagacaatgtggtactggcattagaatagacatttaaactaatggaaatggacagagtctagaaagaaacccttgcatatatggtcaactgaatttgacaagggtgttgaaactaatcaatgggggaaaggattttttttttttttttttgagacagagtcttgctctgttgccaggctggagtgcagtggcacgatctcggctcactgcaacctctgcctcctgggttcaagcaattcccctgcctcggcctcctgagcagctgggactacaggcatgcaccaccacaccaggctaatttctttgtatttttagtagagacagggtttcaccatgttggccaggatggtctcaacctcatgaccttgtgatctgcccactttggcctccaaaagtgctaggattataggcatgagtcatcacgcccaaccaattttttttttaacaaagagatatttatatgcaaaagaatgaaattgaactcctacctcacaccacatacaaaaattaacaaaagatggatcaaacacctcaatgtaagaactaaactataaaactcatagaaaagcacatagttaaaaatcttcttgaccttgtatttggcaatggtttcttaaatatgacacctgaagcacaaatacccaaaaaggaaaaaaaataggtaagttggactttatcaaaatcaacaaatgttgtgcttcaaaagacaacattaagaaaataaaaaagacaaccatggaatgaaagaaactcattatctgatgagacagattaagataatgtaaagaaataaaaaaaaattaaaatctgagaaatttgaataaatatttttcagaaaaagatatataaatggccgataagcacacaaaaagacacacaacatcatttgtcattaggaaaactaaaactgtgatgaaataccacttcatactcactggagtggctgtaatttttaaaatagacaataaaaagtgttagcaagtgtattagtccattttcatactgccatgaagaaatatctcagactgggtaatttatacagaaaaagaagtttaatggactcacagttctacatggctggggaggcctcacagtcatggtggaaggcaaaggaggagtaaagacatgtcttacatgacggcaggcaagacagcatgtgcaggggaattgccctttgtaaaaccattggatctcattagacttattcactatcatgagaacagcacaggaaaaaccgccctcatgattcaattacttttcaccaggtccttcccatgacacgtggggattatgggagctacaattcaagatgagatttgggtggggacacaaccaaaccatatgagcaagcatgtggagaaactgcaaacttcatacattgctggcaagaatgtataatattgagtcactttggaaaataatttgacaggtcttcaaaaagatgaacatggaattaccatatgacagcaattccattcaatgsccaagagattggagacatattttcacacaagaacatatatataaatgtttagagcagcattatatatacagccccaaagtggaaataacacagatgcctatcaactgatgaataaataaatgctgtatatccctacaatggaatattattcagccataaaaaggaatgacatactgatacatgctacactgtggatgaaccttgtgaacattgtgcaaagtgaaagttgctagacacaaaatgccatataatgtatgatttcacttatataaaattaaagataagcaattctatagaaatggaaagttagtggtttcctgggactagggggagggaaaaatgtaaaatgactgttaatgggtacacagtttatttttagagtgataaaatttttctggaattaaatattggtgagttgcacaacctcatgaatatactaaaaatcactgaatagtacattttgaaagagtgaattttatgatatgtttatatcttaatttaaaaattgtaaaaatgagaaaactatatattattcaaaaatttaaaataatttatggatcaaattaaaataatcatggaaatttaaatatgcttagaattaagcaacaatgttttcacttaaagaatacagcttaactgtatttataaaaaaaatatagccttcaaggaaaatattagaagagactgaaaattaatgagctaagcattcaactagacaggctgcaagcccaaagaaaggaaaaaggaaacaaatagtgaggatggaaaaaaagaagtagaaatcaaagaaacaaaagtaaaacaaataaaacaacaaaaaataaaatccaaatgctgcttttgggggaataattaataaaataagaactcttttcccaaaactgatttaaaaaagaaatacttgggaggctgaggcaagagaatctcttgaacccaggaggtggaggttgcagtgagccaagattgcgctatttcacttcagcctgggcaacaagagcgaaactccatctcaaaaaaaaaaaaaaaaagaaagaaagaaagaaagaaaggaagaaagaaaaagaaaatacacatattagtcccgagaaaagaaatattttaaaaagattgaaaaattcccaatattttaaaaaataataagagcatacgatgaatgtctttatggaataagtttataaaaacattaaataaattgaaaattgcatagaaaattataatttataataattgactcaaaaaattaatagaaaccttgggtaaccctataactagaaaaaaatgaataaaggtatttttgtttgtttttaaaatctacttacagaagcagatacaaaattaaattgttatatcatagccatgaacacagtaactggtaccaggctttctcacctaataaacaactagaaaacaacctttctcattgactgggcaatggtcatttcaggattgtattcatgaaagaagtgaaacaaagttagttcagcctagagatggtctacactagacgtgactagcatcatgttatcaatacagtagcctagcatgatactctctgtaatgtcaagatgttgaagtccctgaggattatattgtgaaaaggtgatacagttaatacagcgcttggtcaaaactacaaatatgctctgttttctttcctagaagaaaacaaactattttttatccgcttttgtggtgagcattagaaatcacccattcagtttgtttgtatcctcttttatttcattgagcagtggtttgtagttctccttgaagaggtctttcacgtcccttgtaagttgcattcctaggtattttattctctttgaagcaattgtgaatgggagttcactcatgatttggctctctgtttgtctgttattggtgtataagaatgcttgtgatttttgcacattgattttgtatcctgagactttgctgaagttgcctatcagcttaaggagatattgggctgagacgatggggttttctagatatacaatcatgtcatctgcaaacagggataatttgacttcctcttttcctaattgaaaaccctttatttccttctcctgcctgattgccctggccagaacttccaacaatatgttgaacattctatgctcatgggtaggaagaatcaatatcatgaaaatggccatactgcccaaggtaatttatacattcaatgccatccccatcaagctaccaatgactttctttacagaattggaaaaaactactttaaagttcatatggaaccaaaaaagagcccgcattgccaagtcaatcctaagccaaaagaacaaagctggaggcatcatgctacctgacttcaaactatactacaaggctatagtaaccaaaacagtgtggtactggtaccaaaacagagatatagaccaatggaacagaacagagccctcagaaataatgccrcatatctgcaaccatctgatctttgacaaacctgacaaaaacaagaaatgaggcaaggattctgtatttaataaatggcactgggaaaactggctagccatatgtagaaagctgaaactggatcccttccttacacyttacacaaaaattaattcaagatggattaaagacttaaatgttagacctgaaaccataaaaaccctagaagaaaacctaggtaataccattcgggacataggcatgggcaaggacttcatgtctaaaacaccaaaagcaatggtaacaaaagccaaaattgacaaatgggatctaattaaactaaagagcttctgcacaccaaaagaaattaccatcagagtgaacaggcaacctacagaatgggagaamatktttgcaatctactcatctgacaaagggctaatatccagaatctacaatgaactcaaattgacaagaaaaaaaacaaccccatcaaaaagtgggcaaaacttatgaacagacaattctcaaaagacgacatttatgcagycaaaagacacataaaaaatgctgatcatcactggccatcagagaaatgcaaatcaaaaccacaatgagataccatctcacaccagttagaatggcaatcattaaaaagtcaggaaacaacaggtgctggggaggatgtggagaaataggaacatttttacactgttgatgggactgtaaactagttcaaccattgtggaagtcagtgtggcgattcctcagggatctagaactagaaataccatttgacccagccatctcattactggatatatacccaaaggattacaaatcatgctgctataaagacacatgcacacgtatgtttattggggcactattcacaatagcaaagacttggaaccaagccacatgtccaacaatgatagactggattaagaaaatgtggcacatatacaccatggaatactatgcagccataaaaaaatgatgagttcatgttctttgtagggacatggatgaagctggaaaccatcattctcagcaaactatcacaaggacagaaaaacaaacaccccatgttctcactcataggtgggaattgaacaatgagaacacatggacacaggaaggggaacatcacacaccagggcctgttgtgggggtggggggaagggggagggatagcattaggagatatagctaatgttaaatgatgagttaatggatgcagcacagcaacatggcacatgtaaacatatgtaactaacctgcactttgtgcacgtgtaccctaaaacttaaagtataataataaaaaaaaaagaaattacccattcaggggacaggggtggtagctcatgcctgtaatcctagcactttgggagccaaggcaggcagataactttaggtcaggagttcgagaccagcctggccaatatggtgaaaccccatctctactaaaaatacaaaaactagccaggtgtggtggcgggcgccttgtagtcccagctactcaggaggctgtggcaggagaattgcttgcactcaggaggtggaggttgcagtgagccragatcacactacttctctccagcctggacaacagagtgagactctgtctcaaaaaaaaaaaaaaaaaaattacccattcaccagatcagtcgctgcacacaaagctgcagaggctgaagagatctacttaggaaagatacaaccttagtccagcagctagaattgtagctacatttgactaagtttatgatagtacattttcatgtacaatgatttataagatttttgccagagccatactggtggattaaataaggaaatgataggcaccaccactactacatcctttgtcttttaaggtggcattaaactctgacattccacccaggatgtcatattgcttctaatttatcatcttggcgaaggtgagtggggccatctgtgagcttccacttggccttcctcataagcaccacgcrctaaccaactgcaccactggagccactccacttggcttttcctaccataatagctgttattccataagccaaggaatgatgttagggttctgctggaaagatatagggtgtgaacatattgtgctctcggagactggggaaatgatcataggatgggaccatggacccaatggagcagcatgaggtacactcaggccagattctacttatcactcagtttctgtatctaccctattaatcagcaacaccagggtgccattttgggctccatggtatcagtgttaggtcatacaatgtgtgagaaatcataattttccattgtggtggctgatagctgtcatcccagatgccttttaatttttactttttggcttatatatattaagccattccctcattgtgtgaccctctatcttgcccccaggaacaaaatagtgtgttagccattgccacaaatcccagagggcctaagcaacttggctacctttttggctttcctacttgttatgataattatggccatttgcctctaaaagttaagtgccaccacctggcctcagcagccacagactgtctcatcccctgagtrgagtggagcgaagtggagttctagagcagcatctgctgttattaactctagcctacagaggacagtcacacctgagattgtcaacaatatttgtgtcacattcactagcacagcaaggatcctcaggctcctcctggggaacatcctactgggagtcctttaagaattgttggaatacatctcagaagtgtcctaccaaacagtaaataagtttggtgtattttctacaattcccatcttccawtagttacaaaataatggaaagtagggcctggaagagatatttgtataccacgttcatagcagcattactgacattatctaaaacatgaaagcaacccagtgtccattaaagaataaatggatgacagcattggaatattacaatggaatattattagacaaagtaatacaatggaatattgctcagccttaaaaagaagaaaattctgcaatatattacatatatgaatcttgagaacattatgctaagtgaaataagccagtcacaaaaaagataaatactgtatgattccacttatgtgagatactaagagtaatcaaaaatcatagagacaaaaagtagaataatggtttccagggttggggtggyggggaaatgggaagttagtgtttaatggatgtagagttttttttacaaggtggaaaaagtcatggagatggctggtggtgatggttgcacattgaattgtacaattaaaagtggttaagatagtaaattttatattatgtgtattctaccaaacataaaagaaaggaaaacaatacatatgcttgaatccaacccaaggaaaatcagcttcagtagctctggggcagattcctagaatttttttaaaagttcattgagtgatttcaattcatattcagttttgggaaccactaacttaatatacatttctttatctaagaaatgtaagctayatcctagtttttggttctgtgagcagaagttaagccattcacttttaaacatttttactaagttataacataatgacatgtctttatttttgaagcaatgaagaaatattttggattttctgtgaaatcattgttgartacactgtcaattgtgttattcattatcatttataaactatatcttataagaaattacattcaggccaggcatggtagctcatgcctgtaatcccagcactttgggaggctgaggcaggtggattacctgaggacaggagttcaagaccagcctagccaacatggcaaaaccctgtctcaactaaaaatactaamattagccgggtgtgatgtcgggtgcctgcaattccaactacttgggaggctgaggcaggagaattgcttgaacccaggagatggaggttgcagtgagatgagattgtgctattgcactccagcccggacaacactgtgagaccctgtctcaaaaaaaaaaagaaaaaagaaaaaaaaattacattcatactttagtgccaagaaaaaaatctgtccttctgaataacaggtatctttccttttgtcagtttatatttattatgtaagtaattatgcatacatgtttgcttcaggaaaaaactcagaatgaaatttaatacttctgttttttaaaaattcattattcttattttaatagctttaacatacatgtatcttttaacaaaagccacctcaaatattttataaaaccaaatttgatgtgaataaatgattatgatgatgatgatggcagctgccattttgagggcttttacaatgtgactgtataaacttaataatttttaaaaatttaatactcagctcaacctcataaggcagaaattattgttgttttacagaaagtaagttaattaacaatatagcttttcttcactgatgaagaaaatgataaatatcaaaaaagggagaacttacaaatgtagacaatacatttcttccctctgagtccatctagcaacttctactagttcatagtgtatggtatttttatggttccagttctcaactgtacactttttaaacacaggagataagcaatgcatcaaagatttcctctagtttagggaggtggtctaagtcttaaaattaaaggacatttttagaggtcccttctacttgttcagttctacttgttgatgcatccatgtcataaaaccatatgtcttgaggaacaaatttattctaggatgtgccagaatagaactgaagcaggcctgaaggactggatctggacatcttgggtagtggtacccttctgattttctgattttcccatatgtataggacgtattcaacaattttctgggactgtttgtagttacttctgcttcgtgatgagacaggcatataagcagagctttcagaacattcaggagggctaggaggttataaaaattcttggcagatcagcaaacaagatttttgcaaagagcttgaaagtatcttctcctcttcaaatggtatcattggcagctgagcacttctggaggaatctgagggccacagaattttgcctgattggcctggagtcagatctggatccttgtactgggcaaccatctatgggaggaagttgtgttaccctacctactttattttatttatttatttatttttgccattgtaaaccattttattaaaatattaatcctgctgttcctgcaattcctaaaacaaattaaacaaaataattagcctgaaaaaattttttaacattctcagkaaaactacttgaaataagtcataaaattatgaggcattttcctgtccttatttaaaaaatcttcctagagaaaatggcaagtagctctggcatctaatatatatatttttttatatatgtataatttttttwaattttattattatactttaagttttagggtacatgtgtacaacgtgcaggtttgttacatatgtatacatgttccatgttggtgtgctgcacccattaactcatcatttggcattaggtatatctcctaatgctatccctcccccctccccccaccccacaacagtacccggtgtgtgatattccccttcctgtgtgcatgtgttctcattgttcaattcccacctatgagtgagaacatgcggtgtttggttttttgtccttgcaatagtttgctgagaaagatggtttccagtttcatccatgtccctacaaaggacatgaactcattattttttatggctgcatagtattccatggtgtatatgtgccacattttcttaatccagtctatcattgttggacatttaggttggttccaagtctctgctattgtgaatagtgctgcwataaacatacgtgtgcatgtgtctttatagcagcatgatttataatcctttgggtatatatccagtaatgggatggctgggtcaaatggtatttctagttctagatccctgaggaatcgccacactgacttccacaatggttgaactagtttacagtcccaccaacagtgtaaaagtgttcctatttctccacatcctctccagcacctgttgtttcctgactttttaatgattgccattctaactggtgtgagatgatatctcattgtggttttgatttgcatttctctgatggccagtgatgatgtgcattttttcatgtgttttttggctgcataaatgtcttcttttgagaagtgtctgttcatatcctttgcccactttttgatggggttgtttgtttttttcttgtcaatttgtttgagttcattgtagattctggatattagccctttgtcagatgagtagattgcaaacattttctcccattctgtaggttccctgttcactctgatggtaatttcttttgctatgcagaagctctttastttaattagatcccatttgtcaattttggcttctgttgccattgcttttggtgttttagacatgaagtccttgcccatgcctatgtcctcaatggtattgcctaagttttcttctagggtttataaggttttaggtctaacatttaagtctttaatccatcttgaattaatttttctatgaggtgtaaggaagggatccagtttcagctttctacatatggctagcccgttttcccagaaccatttattaaatagggaatcctttccccatttcttgtttttgtcaggtttgtcaaagatcagatagttgtagatatgtggcattatttctgagaactctgttctgttccattggtccgtatctctgttttggtaccagtaccatgctgttttggttactgtagccttgtagcatagtttgaagtcaggtagcatgatgcctccagctttgttcttttggcttaggattgacttggtgatgcgggctcttttttggttccatatgaactttgaagtagttttttccaattctgtgaagaaagtcattggtagcttgatggagatggcattgaatctataaattaccttgggcagtatggccattttcatgatattgattcttcctaytcatgagcatggaatattctttcatttctttgtatcctcttttatttcattgagcagtggtttgtagatctccttgaagaggtccttcacatcccttgtaagttggattcctaggtattttattctctttgaagcaattgtgaatgggagttcactcatgatttggctctctgtttgtctgttattggtgtataagaatgtttgtgatttttgtacattgatttttgtatcctgagactttgctgaagttgcttatcagcttgaggagattttgggctgaaacgatggggttttctagatatacaatcatgtcatctgcaaacaggaacaatttgacttcctcttttcctaattgaataccctttatttccttctcctgcctaattgccctggccagaacttccaacactctgttgaataggagtggtgagagagggcatccctgtcttgtgccagttttcaaagggaatgcttccagtttttgcccattcagtatgatattggctgtgggtttgtcatagctagctcttattattttgagatacgtcccatcaatacctaatttattgagagtttttagcatgaaggactgttgaattttgtcaaaggccttttctgcatctattgagataatcatgtggtttttgtctttggttctgtttatatgttggattacatttattgatatgcgtatgttgaaccagccttgcatcccagggatgaagcccacttgatcgtggtggataagctatttgatgtgctgctggattcagtttgccagtattttattgaggatttttgcatcgatgttcatcaaggatattggtctaaaattctcttttttggttgtgtctctgccaggctttggtgtcaggatgatgctggcctcataaaatgagttagggaggattccctctttttctattgattggaatagtttcagaaggaatggtagcagctcctccttgtacctgtggtagaattcagctgtgaatccatctggtcttggactttttttggttggtaagctattgagtattgcctcaatttcagagccagttactggtctattcagagattcaactttttcctggtttagtcttgggaagatgtatgtgttgaggaatttatccatttcttctagattttctagtttatttgcatagaggtgtttatagtattctctgatggtagtttgtatttctgtgggatcggtggttatatcccctttatcgttttttattgcgtctatttgattcttctctgttcttctttattagtcttgctagcagtctatcaattttgttatcttttcagaaaaccagctcctggattcattaattttttgaagggttttttgtgtatctatttccttcagttctgctctgattttaattatttcttgccttctgctagcttttgaatgtgtttgctcttgcttttctagcttttttaattgtgatgttagggtgtcaattttggatctttcctgctttctcttgtgggcatttagtgctataaatttccctctacacactgctttgaatgtgtcccagagattctggtatgttgtgtctttgttctcgttggtttcaaagaacatctttatttctgccttcatttcgttatgtacccagtaatcattcaggagcaggttgttcagtttccatgtagttgagcggttttgagtgagtttcttaatcctgagttctagtttgattgcactgtggtctgagagacagtttgttataatttctattcttttacatttgctgaggagtgctttacttccaactatgtggtcaattttggagcagtgtggtgtggtgctgaaaataatgtatattctgttgatttggggtggagagttctgtagatgtctattaggtccacttggtgcagagctgagttctattcctgggtatccttgttaactttctgtctcgttgatctgtctaatgttgacagtggggtgttaaagtctcccattattattctgtgggagtctaagtctctttgtaggtctctcaggacttgctttatgaatctgggtgctcctgtattgggtgcatatatatttaggatagttagctcttcttgttgaattgatccctttaccattatgtaatggccttctttgtctcttttgatctttgttgatttaaagtctgctttatcagagactaggattgcaacccctgcctttttttttgtttgttttccatttgcttggtagatcttcctccatcattttattttgagcctatctgtgtctctgcatgtgagatrggtttcctgaatacagcacactgatgggtcttgactctttatccaatttgccagtctgtgtcttttaattggagcatttagcccatttacatttaaagttaatattgttatatgtgaatttgatcctgccattatgatgttagctggttattttgctcattagttgatgcagtttcttcctagccttgaaggtctttacaatttggcatgtttttgcagtggctggtacyggttgtacctttccatgtttagtgcttccttcaggagcttttttagggcaggctaggtggtgacaaaatctctcagcatttgcttgtctgtaaagtattttatttctccttcacttatgaagcttagtttggctggatatgggattctggattgaaaattcttttctttaagaatgttgaatattggtccccactctcttctggcttgtagagtttctgccgagagatcagctcttcgtctgatgggcttccctttgtgggtaacccgacctttctctctggctgcccttaacattttttccttcatttccactttggtgaatctgacaattatgtgtcttggagttgctcttctcgaggagtatctttgtggcggtctctgtatttcctgaatttgaatgttggcctgccttgctagattggggatgttctcctggataatatcctgcagagtgttttccaacttggttccattctccccatcactttcaggtacaccaattagacatagatttggtcttttcacatagtcccatatttcttgaaggctttgtttatttctttttattcttttttctctaaacttctcttctcacgtgatttcattcatttcatcttccatcgctgatatcctttcttccagttgatcgcattggctactgaggcttctgcattcgtcacgtagctctcatgccttggtcttcagctccatcaggtcctttaaggacttctctgcattggttattctagttatccattcatcttattttttttcaaagcttttaacttctttgccattggtttgaatttcctcctgtagcttggagtagtttgatcatctgaagccttcttctctcaactcgtcaaagtcattctccgtccagctttgttctgttgctggtgaggagctgcatttctttggaggaggagaggcgctctgatttttagagtttccagtttttctgctctgcttttttcccatctttgtggttttatctacctttgatctttgatgatggtgatgtacagatgggtttttggtgtggatgtcctttctgtttgttagttttccttctaacagacaggaccctcagctgcaggtctgttggagtttgctagaggtccactccagaccctgtttgccccggtatcagcagcggtggctgcagaacagcggatcttggtgaactgcagatgctgctgcctgatctttcctctggaagttttgtctcagaggagtagccagccatgtgaggtgtcagtctgcccctactgggggggtgcctcccagttaggctactcaggggttagggacccacttgaggaggcagtctgcccgttctcagatctaaagctgcatgctgggagaaccactactctcttcaaagctgtcagagagggacatttaagtctgcagaggtgactgctgtctttttgtttgtctgtgccctgcccccagaggtggcgcctacagaggcaggcaggcctccttgagctgtggtgggctccgcccagttcgagcttctctgccactttgtttacctaatcaaataactacctcrgcaatgccgggcgcccctcccccagcctcgctgccaccttgcagtttcatcttggactactgtgctagcaatgagcgagactccgtgggcggaggaccctctgagccaggtgcggattataatctcctggtgtgccgttttttaagcccattggaaaagcgcagtattagggtgggagtgacccgattttccaggtgccatctgtcaccgctttctttgactaggaacaggaattccctgaccccttgtgcttccccggtgaggcgatgcctcgccctscttcggctcgcacacagtggactgcacccactgtcctgcaactactgtctggcactccccagtgagatgaacctggtaactcagttggaaatgcagaaatcatccatcttctgtgtcgctcacgctgggagctgtagactggagctgttcctattcggccatcttggttcctccctctaccctacctattttaaagcaagtctaccctttgccttgtccatcagtgcctttacctccatcacatcaccatgatggtttgacaaccattcaaagggctaccaagaaatcagacgtaaactctctcactacagaacttactcatctgagagtgtttgtgaggagtcttaacagcaaatgaacggttgtaaacaactttttgaccatgttatgaaatgtgacatggaagacagaaatcactccttgtctcctctttttcttctttcaggatggatcagaacagtgcaactgaaccaaagttgctcctcggctttcttatcatattctcagcagcaagactccatgtgccccctttctttcacttattcacaccattaccaaatatttattgagtacctactgtgtgtcaaactgccagctcatcttcacacactccatgtgctgtcaggctcatacgctctgctcatgttgtcaccctttttctgaaatgcgcttcctacacccttctttctccattgggttctttctcatcctttaatgccatctaaaagtattccttgctcaaggcttcccaaacccctctaggcagttgggtttcccattccttgtgctagaagagatcacttcacaatcttagtacaaaccttatcacacatgttctcattagactgtgagttccaggaaaaaagggtagtgacttctttgtgccattcattgaacttggtagaactttatgagtatatagccccatatattttttcaaggataagtcaatatatgaatgagagctaggtgatatttttcatgcattggagttttacatggaactttagacaattcactgaattacctttttagcttcaggctcctttgtacaattaattaatcatacttaattcctctctttttccataacatgtcgtaatgctttaaaattttaagtacagaaccctagaagtgtgttactgttgctgttcgattcattgccaccttgcaattgactttgtggccttagtggaaatgaatattagattcactaatttggataacaagggacagtaacaatagagtctatgtactgtgcatcatgtttattatgtgctgaacttcctcactgccttctaattaagcaagaactgtttttggtgaaattacaggacaacaagacaaactgaaggaattgcagaagtgagagatgagaaaatagtgacatcctgacaaactgattttgaggttaggaagagacatagggtgatatctgggaaggaatagggccagactcagcatggtaagaagccaatgggggacacaagaataaggatgttcatggcagcaccacgtgtaataacaaaaagaatatggggaagatacattggcatattcaataacataatgtatggaagaaaactacaatgtactattatagaactatgtgtatcgacatgaatatatttcacaacataatattgaatttaaaaatcagacacagcatgagattatttatttacaaaaataaaactcacaaagtagtgctaggagttggaaaagagaggggacaactgggattgagaaagggaataaagtgtatttgttttacaatttttatatattttgttttttaaggtataaatcagagaaaacattagaaaatattaacaatgtgttaactctgagatgtggtaactgtacaattggttttgtacaatcagttttgttttttaatattctgcatttttaaagcaaaaaatttaataatccccaaaagtcaatggaaagaacccatttgaaagagtgagacattgaattgacagaagtgagaaagacaaaatgcaggtttctcaaaagcaggaaagaaatgggatgcaggcagcaaaagaaactatcatcagagtgaacaggcaacctacagaatgggagaaaatttttgcagtctatccatctgacaaggtctgatatccagaatctacaaggaacttaaacaaatttacaagaaaaaaaaaaacaaccctatcaaaaagcgggtgaaggacatgaacagacacttctcaaaagaagacttttatgtggccaataaacatatgaacaaaagcttaccatcatcactggtcattagataaatggaaatcaaaaccaaaatgagatatcatctcacgccagttaggatggcaatcattaaaaagtctggaaacaacagatgctggcatggatgtggagaaataggaaggcttttacactgttggtaggaatgtaaattagttcaaccattgtggaagactgtgtggtgattcctcaaggatctagaaccagaaatactatttgacccagcaatcccattactgggtatatacccaaaggattataaatcattctactataaagacacatgaacacatatgtttattgcaacactattcacaatagcaacgacttggaaacaacccaaatgcccatcagtgatagactggataaagaaaatgtggcacctatacaccatggaatactatgcagccataaaaaaggatgagttcatgtcctttgcagggacatggatgaagctggaaaccatcattctcagcaaagtaatacaggaacagaaaaccaaacaccgcatattctcactctgaacaatgagaacacatggacacagggaggggaacatcacacaccagggcctgttaggggttgggggaaaggggaaggagagccttaggacaaatgcctaatgcatgtgrggcttaaaacctagatgataggtgcagcaaaccaccatggcacatgtatacctatgtaacaaacctacacgttcagcacatgtatcccagaatttaaagtaaaatttaaataaaaatgggatgcaggaagaatagtgaaattatgaaccttaaaagaagattaggaacagatgaggcagacttggtaaaatctaaattgattttagaaagatgaggaccttcccacctggaaataagtggcaggaaataagggaaataaagttgagaaatacagataatgtttttaaaaataatttgaaggagtaagtgtgagttcaactaaagaaatattgcaagactgccaagcaatggagtttcctttttggtgaacctgaatttctggtgaaacttgtctgtcctattgtgtgaatttttctagcagtttccagctgccagggtacaggtccagagaaaggaggttcatcttttctaaggagtttctagatgcaacaaaaacacagaggggcaagtaaatccacatcttagggtatattgttacttcatgatgtataagggaatctaacctgcataagaacaaaattaataaaagaagaacttattacttagaagaaagcagaagatacatgaggctgatgatctcatcgaagtcatagagaaatgatgattgcaataactgaagtaatggtttaaattagtaatttgagaagtagaacagttataaatgatgacatgagttagcaattggggccaaagggggagatagctaaagtatggtggaaaagaaggtcattgaggtgagaacttcaaggatttgaagaggctattgggtaagaagcaacattaacgcaaatatcttactttttaaatacatactttttttttttaaatagagatgagcgtctcgctatgttgaccagcctgggctcaaactcctggtctcaagtgatcttcccatctctgcctcccaaagtcctgggattacaggtgtgagccaccacaccgggaccattcatgcacatatctaaaccatcccccttgaagacaggatttggtttctctttcactgtagaaattatagctctttcctttctctacttctaattaatctgtcactgttgacatattatctgtgtttcttattgtttttaaagaggaactgtttggttcagtcagtcatcatccagtttgaggttccctgttgtgagccttagaaccatcatggcctaggtgacaggctagtctacagaggttgtctttaagttatctcttgtctagtatgtcagataagattataaagaccatgaagacttgtgcaaactcttcagaaaaaagttgtgtgtgcaacgaatgtgataagcattgtcggggcagacctggggaggattatatcacatgccatttctccctatacattcatgtgtatatactttaattcatccaagyaaaattcaatgaaaataacttttaacttcttcccaaggtactcaccaatacctgtccactggaaaacccaaaggggaaggagaacaagcagagggcactttgagccagcagggcttaggaattgccagtcagcaattacacaaagcaagaacatgctcctttcaaaggtgtccaggatgcaggaactgtgggagcattaaggagtagaggggtagggcctggtagaacaaggacagctatgtgcagctggccagagctatggttagatgcccagtggcacttattctgggtattaggcacttacctatatgcatgactgatttgactaatataaaaagctctgccttatttttgcaccttaaaggccatgaaaaaagaggcaaaataaatccaaaataaatgaataaaatcaatattttttgctggaaaatatgagtgaactatacagtaaagcctcacaatgtttccatctgctaggtaaatgaatcaagaatagttttacattcataattacagarggaaagtgtgaaagacccttattccttttttcccttctcttaaaaaatggtgaatagggcctttaatactcaatcttaaatgaatgttgtatattttggcctggtgtcaaaatgttaacagaacttgtactatggtcttctaaggggaaaaaacaaatagtttaacactgaggtattttgaagcaggtgctctggacaattagagaactttgtggcttttgaaggcacccttccaagaactagaaatctgaaaaatgaataccacactgtcactttgataaaatatttggtttttggttctattggggaaagaaaccagagctcaaagaacacagaaaaaagtaatgcttggtaaggtgtaatgtgtgagacacttcttgaaagctgccaatagcccctgaaaaaatagtacacactcctcagttatgtagattaaacaagaaaacaccagtagtttagccacttgtcaagtttcaacttaacttattatcatcatgatatgaataggaatgtataaaattctcagtttggggtagatgacgctatggttaaaactggaattttgtaatataaagcaagggggaaacaggtataagataacaagtggcaaatgacacaggattaaagaaaaatgagaaaagaaggggagaataaatgaaaatcaaattgaagagggaggaactagaaaaactgtaggacaaagtgtaaatgaaagaaaatagagcsgggcgcggcggctcacgcctgtaatcccagcactttggaaggccaaggcgtgcggatcacgaggtcaggagctcgagaccatcctggctaacacagtgaaaccccgtctctactaaaaatacaaaaaattagccgggcgtggtggtgggcgcctgtagtcccagctactcaggaggctgaggcaggagaatggcgcgaacccgggaggcggagcttgcagtgagccaagatcgcgccgctgcactccagcctgggcgacagagcgtgactccgtctcaaaaaaaaaaaaaaaaagaaagaaagaaaatagaagaatcacttggattgcttaacaaaatccacgttctagacctagatattctcaacagaaggtggcctattattggcaataaatagtgttttcaagtattcctgagatgttaggggactcactgctttaaacatcaatcagttttattatccctaaattgaaacaataacttctcctctgcatattgtgcatgattagtaaggcactgcattagtctgccaaaaagatactgcccaagactgggtaatttataaaagaaagaagttgaattgactcacagttctgcatggctggggaggcctaaggaaacttacaatcatggtggaaggcaaatatcttcttcacaaagcagcaggaaagaaataggagagcaggggaaactgccacttataaaaccatcagatctcatgagaactcactcactgtcatgaggacagcatgagggaaacccgcccccatgatccaatcacctcccagtggtggaaggggaagcaggcatgtcttacgtggcagcaggtaagagagagacagaaagagagaatgagagcatgaaagtgcaggggagaggccagacacttatccaacaaccagatcccgtgagaacttcctcactatcatgagaatagcatgggggaaaccacgcccatgatccaatcacctctcaccaggtccctctctggacactggacatgtaggcattacagtgtgagatgagatttgggtggggacacagagccaaaccatatcagtctttcatgaggaaatgattgttaaagcaccacacagatataaagtgtatattttttatgaagcacagaattctgtgaagggaagcaccaagyaaacaatgcacggtgcactccggggaaagctctgagctgtgattcattctcagaatgagggaaataatgacctcagcctatgcacacttccttatgaatttagaagatgacacggttatactagtaattcatacaaccgaaataccttactgtagcctaagaaattcttggccctatgggtacatagattatcctaaactggatagataattatacaaatatctgtatccatggcagtatagataaagcttttaaaataggtcactgaactcattgaactttcaataactagtataaccagagtagaattgttaaaaaaattggattggaaatttcagtgtttatgctcttgactcaaaatcggggggcagataataaattcattgctaaaattcatttggaagttacagtttaaatatattttcccagccatatgcactttactattttttattactttcgaattcttgtgaagctttctcgagcgatttcatttggtatcttattccctgtttcaattaagcatttgcatatttatcttcattatcatataattatattatataacatttataagtttaacttttctctatgaaactcaaagcagttaatgagttttgtatcatttatcttcctcccacaacattgaattaagaaatcagaaagcatcatagcttccattttactgatcagtggtcagcttacttctttctcaaatcctaatctgggctctatgatacccaagctcttattttccaggaccagtggttcttaaccctgacctcacttaatcacctggtgagcttttggaaagtagctcacaagccacggcctttgtccaaccttagaccaattgaatcaggacctgtgaaggtgagggctgaacatcagtaagctttttaagttccttatgtgagcctagagaacagtcaaggttcagaactgttgctctaaagcagtgcctttaaaactttaatatggtttgcaatcctaagaggatattgtaaaaatgctgattcttatccagtaggtctgggtggcccctgagtttctgcacttccagcacactcccaggtgatgctaatgcatcagaacacagaaaattatttgagtgacatttttctcaattcttgtgacaactaggacmactctcaatgcatgggaaagaagtttacgcatcacatacaatggacttcttaggatattagggccaaaattcttacaaaatcagagttgagaaaagctgctttctatttgtggatacaaatggaattttacagattattcagcacctttcatattttgacagcacatcttggtcatttttacctttataacttccagtaattaacttgctaagctggaattttccagactcacagggcatcaatacttcatccacttccatacttgcagcccctcatttacccaaatactgttcacttctcagatccctgaaatacagcctctgtcccatgacttcactgaaatcatcccctccaagatcagcaacaacctttctgactaaataaaataaacccttttagcttcatcattttatttggcttccttttcatactatgaactacctcatatttgaaagcccttcttcctttcttagtttctgtgctgcagaaatccattcctatctctcagatcactctttctttctctggcatttattcctctttctttctcccactgtctacctcttaaatattggcaatcttttggggttttactgttgtcttctcacttgactcactgttcctaaggtgtcttgcctaatctcatggtcttcttcaatgtgctagtgactttcaagtccgtgtctccaacctggagtaatttctagacccaatttcggttgtttgctacatctgttggcttgaatatcaaattcttcattacccaatttcaactcatatcaacatccccaactctcttccttggattctctataggtaacattgtaagccctaaaaataaaaaataactgagaaacaagagagaggtagtgacataaatgtcactaaagtcaagtcctagcaggaagataatacctcatgaatttctcaaagaccagattctgcccttacaggttcagaagccttattttataggaactgcctcaccataaccaacatcatcaaacccatacatcaaatctgtaagccaaattattttaataaattgcagatctcatattcccctcaatatgaccaggacaggctctttccctatagaaatacctacatgaaaagtcacattatagttaaatgtttgcccaataagcatggaatcagtgcaagggagttgaataatttaaatatataatagaatcaggctaagactcagtacttcatttatgaagtactttaggaagttatacattataattcttaaagtttgtcatacaataacccctcacccaggaagctgctcagaccggccttggtgacacttcttttcttgcttttcagcattggtcaacacccctccacctccacctccacacaaactgcctactaactggcacagtgatcgatgtgttcttgttttcaatctgtatttaaatgccagctgcagtaacttgcttatccctcacattttctcactaggatggctgctatagtatctatctggcccctcaatgtcactgatcattaaagaaatgcaaatcaaaggcacaatgagatgccatctcacaccagtaagaatggctattatcaaaaagttaaaaagtgaccaatgctggcaaggttgtggacaaaagggaacacttatacactgttggtggaagtgtaaattagtgcaaccattgtggaaagcagtatggctattcctcaaagagctaaaagcagagagctaccattcaacacagcaatctcattactggggaaatacccagaggaatagaaagctttctaccataaagatatatgcacatcaatgttsattgcagcactattcacaatagcaaagacatggagtcagccttaaagcccatcagtgacagactggataaagaaaatgtagtacatgtacaccatagaatactatgcagccataaaaaaagaaaaggatcatgtcttttgtgggaacatggatagagctggaggctactatccttagcaaactaattcaggaacagaacaccaaatacagcatgttctcacttttaagtgggagccaaatgataagagcttaggaacacaaagaaagaaacaacagacactggggtctacttgttggggggatggtaggagaagggagaagyacagaaaagtatattcataagaatgcttaagtcaccaagaatgatgagccaggagccaacacagtcaataagtgaagtccagtgacattcctctcccctctaacagccacactctcacgctctctcttgcctctctaactttgaatgcatctttccctctgtggatatccttttactccctacttcccttgggtgactcctgatcacactccaggactcagcttattggttagctcctcggggaaatctggaaagtatggcagcctcctgccatgagttaggtgtacttctaatgcactgtcttcatatctactgtaaacatatttctttgcatttagaaactttttctttgcatttaggaactttttaatgatttcttacttatgcatccctctcatttatgtgttgattttgtagcctccatgaatgcacccaccacatgtctaatttgcctttgcatacgtagcagctaatgtagctggcatataattgctgacataggttttccactccccgaggtggcctcagttgtccttggaagttattacaggaagagcagtcaaggcagcagcctaccccagtttagaaccaccaataagaagataaatgtcatcagccacccctggagcatgtccatgcaatggcaataactgatttgatagtgaccaagccaaccagagacacaacaggcttgcgtcttctttctttgttaatgccctaatgctggttgtttttcctccaagtgtttgtaaataatattatattcttgtatttgaatctatgcaagagctaaatgtacttctcattatctatctctaatgtcagtttgtatgagcttttcttcattctccttaaacatataaggagactacttttcaacagagatctatgttactctgtatatacctaagactacttttatattttattttactctccataaataatcaacattaatacatattgattcctgaagcgattataattttgaagaattcatgctccttgagtggttgagtagtagatggacactcaacctaagcaaacaaaaacatgccaataaacatgtactcccagatcaatgacccaatctcatcagtaagattcacttgtcatttttctttctccttctgctagatataaactcattggagacaggattccatcttatgtttttggcacacttacctccaaatatagtgcctcttagagtgtactctcaatgttagttgaatgaatagatcagtgaataaattacagtgagaaacagcctctctgatacagctcccatatgcaatattgagggacaccatctataaatttatggtaattaacaaatactctcacatatctgccatgttcatattctaaagtttagaccaatggacatttttgtaaaataagaaccctcactcaaaggtaaaaatattaccacttagaaatctcaaagaaatttttttctctgtatatcagtacagaaatatgagactattatatgacagtcattagatacaaataatttacaaggaaatgattttaaaaacccaatttcaaataaaattataagcaatatctattcagagcttttaagaatacgcctctatctatctctcttttgcactccttgtgttgacaaggcacacaatgtggttggatcatgtagattaataaccaatgcaagtgctgacccatgtttctttggttaaaatatagataagwtgttggagagaatttcaaaaaacaagagttttgaaaatgttcacttaaacataatatctcacatttttctaggctctagttatatttttttacaacactatcttaaatggattgtattgacttatgtggctgttaaataaatgtcacatatcttcattttaggcataactattttaaaggatgagtgatgtacagatatactctaagacagagtgttgagaagttgattctttggaatgaaagttgtacacagtcatttaagttctgaaaattccctgttgaattttcttttcagatcattttaataatactttatatcatgatcaaataaaaagttatctctaatatgtttaaatccctaatgtattactctgttctcatgctgctaatatagatatacccaagactggcttgtttataaataaaactggtttagtagactagactcactgttccacatggctggggaggcctcacaatcatagtggaaggcaaagaagaagcaaaggcatgtcttaaatggcagcaggcaagagagcttgtacaggggaatccccatttataaagccatcagctctcctgagacttactcactatcacgagaccagcacaggacagacccattccccatgatgtaattacctcccaccaggtccctcccatgacatgtgggaattatgggagctacaattcaagatgagattctgctgggaatacagccaaaccatatcatctaatttattctagcactcaatttcattattggatttgaacattttaaggaaaggatttaaaaaattctgaaaagatctcaatactgcttccacaattaaggcctacaccaccctaaccaaaattattgaactatcttcttcactacagccaattctttacccattttcttcttcctgatacatttactgagaaaaaaagtgacaatagccattaattattttatttaacaaatatttgttttttatatgccaaacacagttctagaccctggtgatacaacaaataagaaaaacaaaaatggttaaaattactgctcacatggagttcatgttttaatagaaatatttagaaagaaaaataagccaatataaatacagtatcagtaataaaagtgccaagaggaaaataaggcagtataagaaaakagaaaatgatggcgatggcctctctgagggagtgaaatttgattacataccycaataaattaaagaaacaaggtatgtgaatatctgggaagagtgtttcagcaaagggaaccacactacaaaggtttaaggcaggaacatgtttgatatcttccaggaagagccagaaattcaatgaggctagagaagtctgagcaggggaaaagtggtaagcagcaggtcagagacagccagaggacagataaggaatggccccaagggccactgtggtaggactttgaattttaccccaagtgtgagaggaascccttggacgatagactagaggagtgacactacatgattttggtttaaaaaggcttactstggctgctgcrtgaagattggaccattgggggttgaagggagaaaagcagagacactagttggaaggccactgcagtagtccatgtgagaacaattgcaccttgatgaaggtaggtttgwtagttttcagagaaatgaaaccaataggctagagagattagatagatagatagatagatagatagatagatagatagatagatdgataaagagggcattaattatgggaattggctcatgcaattatggagrctgagaagtcccacaaaataccacttgcaaactggagaattagaataccagtgttataattcattctgaatctgagagcctgagaaccagtgagctgatggtataagtcctagagtccaaaagccagagaaactggaattctaatgtcctaggtcaggagaagatagatgtcccagctcatgaaaagagtgaatttgcactttcttaacctcttwgttctatgcaagccctcagaattggatgatacccacctacattggtgagggaagctctcctttcctcagtccactgattaaaatgctaattgcttccagaaacacccacacagacatacccagaaatagtgttttrccaggcatttggatatctcttaatctagtcaagtcaatacctaaaatcatgcatctcagtgggagaaacataagtggttagaggtgatctaatctccacgtgtattctcaaaatttccaatagattggatatggtgtatgaatgagaggggtgaaagataactttgcctaggcaattgatggttctttttactgaggagggaagcactggtgtacgagcaggtttccaggtgagaatagagcaggacaatttgaagacttatcagctgatataaaactgatgagtgacatcatgtcactgattcaaaaagcactatgaaccttaagcaagacatgtacaaagaaaatcacttttgagtccatcacagcagaaagaaaaaccttaaaattaggtgaaatgggtaaaaaagattatcttcaaaagaacaatatttaaactgactgctgtcttttcaataaaaacaattaaagccaaaaggccatgtaatagtttctccaaaatccagcaaaaatatyttgccatcctaaaattttataccgagcaaaaatattatttgggaataaaggtaaaataaatatatttccaagtaaaacaaacctaacagaatttggcaccagaagaaccacactgtagaatatcttcagagaaaaagaaaatgatcccagaagaaagtctgaagatgaaaataaaaagaacctagaaatcaacaaaaaaagtaaagctaaataaaatggatattaactgtaaaataaacaataataatgtcctaggcagtttaatgtacatagaattttttttaagtgacaatgtcattaaagtcagaaagataataattaaggtatttttaatttttgagtgatctgggaaaaggttaatagtatcaaacaacaatatattttaataagaaaaagatgcaccttataatggggtaaccataaaaatatagtacaagaatacatagcttccaacctaaatgaggagggaggaatggaatcataaaaatgtataatcattccaaatataggcaagcaagaaaaatgaaagaagaaaaatatgaaagagttggacaatcagaaagcaaaaatataaatatttaaatgaaatataaatgaactaaatactccaaataaaaagcaaagatctcagacaatttttgaaaatacagcttgaaagatagacttccaaaatgtaagtatacaggtagaagcagaaagaaaacgaatactcctgtaactattaacgaaattgaatccacagtgtgaaactgatcataagaaaaattccagacctaatgaaatcacctgtgattctgctaaatgtttaaggaaggagtaatgtcaaatgtacccaaactctttcagtgaacagaaaaactgagaatacttccgatttgttttatgaggccaatataaatttgatatcagaaatctaattagtatattattagaaaggaaaattgcagtcaatttcactcatgaacataaatgaagcaatactaaacaaatactaccaaacaaatataataatgggtaaagagaaaaacaaaactggacaaagagtttattctaggaaggaaaatttcatttaacattaaaattcaatatttcaccgtattaacaaaatagaggagctacaaaatgcattcatgggaaagcgcttgcaaaataagaggaaaaacatctttcttaacttgacagaaatatctacaaatgtttagagcaaatgttacacttgatatttgctgaaaaccttccgtctgagattggaaaattcagcatggttgacattttgaaaactctccctctgaaattaggaaaaagacaaggatatgtccttattaccttttttttatgccatgcagtaagacatgaaaaaaataactttaatagaagaaaaaatattttatttttttcaggtgtgatgactgaatatatacaaaattcaaataaatctacagataattatttagaaacagaaggttagcttaataaggttgctgaactgaaggtagtcagcaaatgacattttaaagataccatttacaataaagtccacaaaataaaatatctaggaataaatctaaaagatgtgtaaaactctcaaggcataatttcacaaaatattgttgaaagaaattaaagaaaacatacatgttcactgactagaagattcaattgattataaatttgatacagtcccattaaaaatctcaagaagttcgactctgcatgctgtgtgtgtgtgtgtgtgtgtgtgtgatttgacaagttgattctcacatgtatgtaaattgaaaaagaatagagattaaacactattgaaaaagaaaaacataatgggaaaacttcccctactagatgtcaatttaaagctagagtaattaagacaatgtggtatttgtgcaagaatagatggatcaatagaacagattagaaatctatgcatatatttactattaatttatgaaaaaagtacaggcagagcagtgagaggaagataaaaagtgtgactgggacaatacgattgccaaatagacaaaaaacaatgctgaacatcaattcctgcacacgttatctgcaaaaatcaaatccaagtagattataggtctaaatatgaaaggaaattaataaagtttcttgaaggcaatctaaaaaaggatttgtattcctttactgttgtaaaataatttttaaacaggatgcacaaaatattactaaccataaaggaaaagattgttaactgagattatagtaagagtagaacttttgttcacaaaaagacaccaataccaagagataaataaaaccacaaaatgggaaaaggtatttataacacataacttacaagcttaggtctagaatatatgaagaatgtacacagattgatcagacaaaaaatacagtggaaaaattggcaagaggtttgaacagtgttttacaaaagaagatatgaaaatgaccataaccttttctctttagagctattacaaaatatttgagaggtttgccaaaaaaaaaaaaaaaaattgcaggaaaaggagtaaagcttcatcattcttattttaataaaagaataataaatacttggccctttcatctttgttttagaaaaggaataaataattattacatcctttaccttccaagtttttccctccacctcaccatttacccttttacagttctgctttctgagtttttaaaaagtgtttgagtactttcttgagacttgacacacattttatcccttatgttgagctattgctcttagttcactgtaattaccaaaatgcataactacagccaaagtttttcagagttaattttcttcaacctctttttctygggcttcctagaaaagatgraaaaagtgagaggaaggtgagagcttgtggataagcctaattcttattctgtcctagtgatgtctgagctgttaatcttgtcttttcttttaatctaggtaatgataatgggttctttttcaatattgtttgagcttcattaacatgtrtgttgtctgctgtaatttctttttcattcaagcagtactttgaagctaactttataaggctctctcctgctccaggccaaactttgacttccctttttattcgcagattttttttttctccatttgtcccctgcgctttgttttatatctcattgcagctcctggttctttcatttgctgctctagcactatttcttcctaatcacccatattttgggtttcatgtttgacctttcaatatcccattgtcaattcatgcttatgaaaactttgtagtggattttaacaactgtaatcctcaattacatatttattcacttaatatttttgagtgcatatcttgtggctggtactgtcctacgaccatcttgctcatcatctgcattgcccagtgcccctaccacaccagaataaaggatttggggatgtgggcactggtatcaccttcactgggtacctggcacccaagctgaacccgttttaccccctccacaccatcccccaaagctgctttcatacccacaaatgcccgcattgtcccacattctctaaaaatagaacagcaaagtttggggatctctctagaacttattccatagtacatcctgctgtgatctagtttctgcatccctcttgctaaaaggctgagagcatgaggttttcacatatcattcagccaatcatctgcctttaagttttctagataaagcttgctttgtgcttgcatcatatacgaagggtgtttgccctcacctacaactccacaacatggaacataacaacaacaacaagaaaaaacacctgcctgtcttcgtggaacctcagtgagttagagatattatgcaagttgagatcaaatttattttaggttctcaaatattatttttatttttaatttttgcctaataaactggtccagaaacttttagttcattgacattcttggtccccttaacaacttgactgttccatggccataaatggcatctcctgccaagtcatccacctgtgcacctataggttaagaaagtaaatagatagcaagttaagaaagtaatggattagttcccattcacaaaaccattgaagtataaaatatcctcagctgatagtgtcagtaccattatctccttacataggaagcagaagctagtatttgcctcactaagatttcctttttgctttcctacctaatttaaaggaattataaatgagaagaggcaaaaggggttctgaaacttcaatagagagaaactgataaatttatatttattatcaggctactgttttcaagtataacctacaaattaaaatcataaacatagaatggatgtgattaaagataagtaaacatctctggaggaagtaaggtattgattcaatcatgtatttattcattgatcatttcttagacacaaatttcagagaggatcacatgtataaggcaaagtcgaaggacttgggatagggcagagtgaagaagtggtgctggggagtaatgtaaaggtcaatgmgacatgttacttgttctcagagaggtcatgggttaagctgaagtgcagagaggcagcatattattcatattataatatgataaatgctataatagaacatgtagtacatgtttccacctctaggacactccttttgggtgtggyccctctcaggtaaacaggaaaacatagtaacaataaacatcagtatagattataagttcataaagtaagatgttgactgcaacaccataagcatagctttgggtggtaagtgttagagacatttgccataaagcccatgactagacaagtaagtctctgccagcctactcccattatggttggccctattctcatcatggaacaacctgcaaccacaaaacagtactggtccttctctcagtttcttgtatgcacagtctgaactattagcactggaagattccccayctggtaagtggttggtcttgcctatccaggtgtaggagcagaaaaactccacctccatcctcttagggtcctggaattaaattgacattgtaacagattaacaggagaaaagcatagtacaagtcttatgtggcacagaagccctcataaggaaatgaagacacaaagaagcagttaaggtcagttacttatacactcaactggatgaataatagctgtgaagaagcaactaaattatgtggggaggcttaaaagataagagttatttctaacaagatctgcacagaattctcttggtttcgtcttcttgtccttgaggataaggatgctgcatctttctggtatagagagggtgtctttcacatggcaattctatcttctgcttttaagaaacatcacaagggtcaaagtgatctttttgcacgtgctatgtttcgagtgtctgtaacttaaacagtcaatatgccagaacagcatattttaaccccttaacaggcatgaaagatattatgttagatttattcatgtctatctaataccctttctctactgtcaaagttaaaatctcctaaagattgtgtttacaagtctacagagtcaacaggaggaatgtggagaattccagctctgctaacagtatttcaatggtgaaaaataatctgttaaacattctaagagaatacagaatgcgggttcttgagggcatggctctaatcacaggtaaatacataaaggatgttagaaaaagattatttatcataaaaggtactgtccaaaggaacataagagagagcgagaaaagtctacctcacaagacgtacagaggcagaattacctggaagctaatgaaacaactttatgaactctctcttacatggaaccctccaggaacttgagaagggccctggcaatgtgtytccttcatcaaatttaaaacgtgccaaattatgatgttttagcagcaattgtttaagactgctgtgtttttcttttacaactgcatccttcatacattttctccatcttttgagtggctccggagtggtttcagaaatttgggggatctgcctaatgagatgttgagctagagatagtggattaggtttgtaaggttcacgagcacttctgtgcatatctaagtcactactagccatcccagtattggaatagttcaagaatactgctgggagtgttgctcacccaatattgtgggcaaatgtattgcagaacacgtatgcagggttcattcccttaatctcattggagaaaacaatacctcgatactgcttgaagattttgaccactttgatattttagcagttctggtttctttgggttcttcttacattgagctgcttctaaacacacataccaatttgaggttttaaatgcttatattcttaagtgtaaagatgtggtctaccctgataaagatgtttaagctatgagacgatgggtaaaatgccattttagaggctctaaaatatattgagaagacttgaaaaagaacaccaaatacaaaatagtgtgtaatgtttattttaaaagttcatgaagcttgaatacaacattttaactgtaatactaaaaaggagtttgtaatatttccatcaaataagtgagaaattacagactcctaatcagcgtacatgtgaaatataccttctttctcttgaactgagagacaattcaggtaaaataattaatggcatatgaagtaaaatgataaatataagtaataaaatcaatagaaattattctaatataaaaaagtaaatgttaagacaaaatttttaaaatcatttcaagggcaataactccttaagagaaagacaaattttgaacagaagtaatgggtagattcttgaatgtttgctagtccagttaatgaagtggtatgaattacataaacatattttaaaatatggaaattttttgttgctttgatatgaagtgccagcatcgatagatttatcgtaaaaattataatatgtctaataaacaaattatcaaaaacaaactgataaatgaatgccttcaattcagagtatctgaaattagttactacttgagaaaccctgaactgccctgaagayttgaggctaacttgtgaaagaaacttggtagaagttttgacaaataggacctcagtctttaaaatatattagataacaccaaatactggttgtgaagccaaaaggaatttttctaatctttaaataaaacaaacacaaactcaagttcaatcaataatcgtaaagattatcttttttctctatataataatattacaaaaataccatgatataaaatgctattaaagagtatatagcacaaaaataagaaacaaagtattatacaggtatattaggcagttaatatatttttttgtgtgttggtgatgtttgaggtattgccagctcttaaaacttgtgatttttttctaaatgtgtttttcattcaaaataaatatgcattattttagcaaattttatatgtgtaattatgtattctacttgttaaagaaggccctgtccctccaaatgacataagcttcaagctttgccaaaccttgctctgcccctgatgtggtatgyatttaatataagctgaaactcagttccatttctaagcctggcaaacagtagtcgttataagagaggaaacatgtcactttgtaaatgaggtgaccctgagttaaatcctaaaagataaaacagaacttcctagttttggtggttctcaaacttaagtgtgcattgagatcacctagagggctttgtataatagagtgctggaccccgcccgcagagtttctgattctgtaggtttggagtgaggcccaggaattttctaacaggtttctaacaggctcccgggtaatggctatactgttgatctgggaaccatgctttgagaaccacagccacagtcatttgtctgagcttctcctatctgagmcagcccctccacttaggtatttgggcccayggtctcccactcactggaggctccaagaagtctccccactctcacagcaccagttcctgtatctttcctggataatttccactggtttatagtcatcccaagatgaaatctaacaagcatttgtcagttctcatgtcacatggcctacaagcaaagcctttgacatccttcatttctctctctttctagaaacttttggctcctacaataccacaagcccttagttttactcctaactgaatggtcactcactgtcttctttgctagtttcctcctccttctgatccctaaagtatggagtgtcctaggactccatwcttaaatctcttctctatgtgctctttcttcattggtgaggcaattcaataatttagatgccatctttttcaaactcccaaattaatacccccagcccacaattcatctgatatttaaaggtgtatatacaaatactcacttaatatctccattatcaaagttaaaacatcacaaactgaactccttccctctaagtatttttcacctgctctctttttcatatcaagaggcaactccatccttccatgtgtataggttaaaaaaaatgcagggtgctcttctttcataccttacacttctgcaaaacacatccagaatccaactacttccacctccctggccatgagcccagtccaagccacctttgcctctctcctggagtactgcaggagcctcctgcctggtctctgctgttcttaacaaagcaatcaaagtgatctttcaaaaaaaaaaaaaatgtatatttgaccatgttattttcctgctcaaaacccatcaatgtttttcaatttcactcagcataaaagccaaattactttgattttaaggccccatacaatagcccctcacacctccagcctcataatacattacttctctcacatcatcttctactgattttttcctccctcatttccttgtagcccctcctacctgcctgctgttccctctgcctgtattgctcttcccacacggcccactcccccatttccttcatgttattcctcaaatgtcctctcaacattgaaaccttacctgcctatccaatttaaatttgcaagccactttcccagcatgttctgtctgcttaccttgctttattttcttcccagtatgcataacatgctaatacactcaataatttacttacttactgtattacctctctcctcttactaaaataccagctcccttgctgcagggatttttatctgtttgttcagtgatgcatctttacgtacagaaaygataacagtgccagagacatagagggacataaacatcaatgatatctgtggaatgagtgaatgatcagacaattctagatatggaaaacagcatattaccttagaatatatgttataaagcatagtatattaagtgcataggaagaagctcaatatcactaaggcatactgaatgtgatgctgaaattagaggaagccagaagtcaggagccatgtaaatctggaggtaccaagggggaataaacagagcatacaggaatttgtggatggatatagagagtgtcactggatctccatggggagctggccccatagtatatggctggatcgaccacagaggaaggtgtagggcttggtgcatgtcatggagcagagttaaacaaaagaggctgtaaacacatgcaaggacaaagtcctgagtgtgggccagtaagactcaagggcctgctgcctggatagcttcaaatcaccractgttgcagattatcccttcattagaaatcaatacaacagctccagcctccagtgtccatactgtgaggaacccggcatcctctcagttgctccataaacactcaggaggctggagttcagtcatggtgcccattaccgatgttttaattcttgtctggcatccctgcccctgtcctcttctccgtgtaactcaattttgccttcattttctcaaaggatagctcaccaaaggctggtgaaccaaggcaggtatttactgaaagtttagacctagcagatgggattagtgtatagaacaaagagacaacttaaaattaaatgtaagacactactcttttttttttttttttttttttttttttgagacggagtctggctctgtcacccaggctggagtgcagtggcgcgatctcggctcactgcaagctccgcctcccgggttcacgccattctcctgcctcagcctcccaagtagctgggactacaggcgcccgccactacgcccggctaattttttgtatttttagtagagacggggtttcaccgttttagccgggatggtctcgatctcctgacctcgtgatccgcccacctcggcctcccaaagtgctgggattacaggcgtgagccaccgcgcccggccaagacactactcttttagttttttcaagccatctccagccatagaaaattgcctggtgattgtacacaacatacatgtaaacatatawmacacacacacacacacayayayatatatatattagttattaagttaattctggctgaagggagaatggattttagggaaatgagactgaaggcaggcgtactattttggataagcatcgcaaaggcaaaagcctatgggaccaggaaggtaatatagatgaatgaaggagaccagaaagggactgaggcaaaaaagagagcacacatgcttcatgtaacggaagcagccaccaagtcaataatagcgtcaaaggctatcatggtcggcacttgctcctagagttaggcagcacaaagcattctctaccttatttggataacyacttccagctgattgttgccatgggaaaatacaggtccaacgtttccagatcctccaatttttcagtgttttaggacagctgagtattggccattttattgaactctcctatttttaaacaaaggcaacaaattccatttttgctaagctctcaacattagttctcaaacaaaatatttcttccagctggatttgaccttctggccattggtttgctatcccttagctgggacctacatgcagctatccaggtgacagatgatggtggctagacatgagctgtgatggtgggaatagagcacagggacatggtgacctactaaggaagccacagcagctcctgaattcccacaaggagctggggcaccccaaagaagactccaattcttaatataacactgggaaaggaggtgtaatagtgaacactgtggcaggaagcaatgctgccgtggctgaaactttcattggccaccaagcactactattaagcaggggtgctcataatatgcccatgtgttttcctaccatccaagggtacgagtgcactaacgcacaaccaaagaaatgccagtctgtatagctcatttctcacagtggccatggtggatccagcaccttctagacactcagctccaatttattctcattctatattcaccaggcaagcaattttattatctgaatttggtttcccaagaagattttgatatgaaaaacttgtgctaatcaactcacaaggggacttcaagatcacaattcacatttgatgaactgtcattctgatttrtttgtcatcttattttaaatttaacatgagaaagtgaaagaaattgagttcctctttatgcaagtctagtagtcaatagtacggactctgtgttcacactgcctggattacaataccagcttttcgattcactagctgagtgacctcaggcaaatttcataacttctctttgccttaatttccttatgtgtataargtaaaataatagtacttaccacatggaaatcttaggagaaaatgaatcaacatacgtaaagtgtctagaatagcacctagcatagtatcactataaaatgttagctattctgatgattatccttgattcaaccataatatacttattaaagacccagattctagagtcagactggctgaagttgtgttatagctttgtagataattaactttgggcaaggaatatagccttcttatgtctcagttgcctctgctataaaatagatttaaccattgcagctacctcctagggttgtttatatttagagcttctaaatatatattctatattccatagaatattctacattccataaattccacatatatktagaagctgtaagaatagtgatgggtccacagtgagtactagctactgtcttgtttcacacacatttgttgaatatgtacaaattactattaatacaaaatggattaaatgtaacttctgtttttaagaaggataataaatagtgtgacataagtgttttaatttgaaaggccaggcagggtggctcactcttgtaatcccagcactttgggaggttgaagcagaggaatcgcttgaggtcaggagtgtaagaccaacctgggcaaaatagcatctctatgggaaaaaaaaagaaaaagaaagaagaagaaagaaaagaaaggaaggaaggaaggaaggactgggtgaaagtactgcctagggtataaacattatgaagttttagtgttgaaatttattttaatagcccctcagagtggtcctaaaatggaccaaaaaaaaaaaagaagctgaacagttcaatgaataaattgccaatcttgtatttttagtcatttaataaagtgaatcataccaacttatagcagtgaaaatctacaactaatgcagctacaaatgctgagattaaagcaagtctattctaaataccttttgtaactgtctatctggaaaattaaggagttgccctgaagaggactcagctctraccaraattcttagtgagttccttaatgtgtggacatggtgatttcttcacctataaagtggagttgatgaaacttatatgccctacatgctgcaaaggattgttgcaaggggcaaaaaagataatgagtatataagtacagtttaaacattggaagcattgtatgtgataaggcattatcattatatataagagcacatcatccttcaggaaatcatccctgaaaatcaaaatttcctgagctgtgggcccattgattgcctaagatggcttattattatattattcttatatttgagttaactctgaaaaacagatcatggagagtaagttctgctatctaaaggatcatgttaaacctttttaggttgggcctttttgtgacaacacctcaaagtaataaattttccccaaattggttttctgtagacctggctaattttttctctgtaaattgtattgaagtaacattaaaatgtcttccaaaaccagattatatatatgcatacacacacaaacacacacatatacagtaatactcatcaaattcagtaggatgagacattatttatcaggactttcacaaaagcccctcttgatctgtgttcctgttgaattttgtccattaatatcacattgatccaagacttttatccaatacacctatatatatgtttcctctatttttataaagtttgaatattaaatctcccacaactagacaatgtctccagaacatcctctttttgtacaattaactattatccttatttttcccgctttcaattttaatagattatttcataccatatttgttttacattttaccaataatatcaagctgactactgaacagctgacataatctatttggtaaagttagaatagatttgtctggctttttaatatgatttccacaatatggatatattgctataataattttttacatactgatatggatgtttaatagaattgacaataatatactatgaaaggaaaatgttcaatgttattattaaatggttaggcagttttacctatataccacaattttttttgcttcataaaatctggtttttatttttataccactaatttgtagaaagacaatattcactctgatatcattctttttccatgataaaggtgctacagttttttaaagtgtagtgatatgcaaagtatgagaaatacatattataaatgtggtattaacaactaaatactttaaaactatttgtaagcactttaataaaactatactttattaaatgtctaataccttcctacattattttagatactgttaattccttcagcaaccctacaaagtaaatatggtaattccaattttgcatgtaactcattgatactctaagctacattgttattaatatcactgtttatagatgaggaaactaaggattcatgaagattagttattttcccaaggcagtgtggtcagcccagggtagctctggattcaaaggactcctagtcattcatgctctgagtaggggtattacaattttattactcaattagcaaccacttattatgaacttatggcatctagaatccctggtgccccaggtttatttccagaaaaagaaaattgcattctttgaattcttggaaaacccacttacattgtaacaaacttatacttctataggaatatgtgcacacacacacacaaacacatgcacacacacacacacacattccccttctaacttcttaaatctgcaacacgtaagaaagctcaactccatctagtgctttgtagccaaagcaaagtttgaatgatcttcccagatttttgatattagccctgatctatgtgcccacatcattccattaccagaaaaatctctgtcacagatgtggctacaggaaagatgaggttatgatgctaattggaatacagatgttcagtggataaaaagtctgctgatgtgaactggatgcagataaagaaaagtctaactgtgcctcactctactaattagctcctcaaagaccattggaggtaagatgaagaagcctactcagctatttgtctacgttggctaataagaagcatttgtaaaaggttaatagaaaggttaatagagaggttagtgaaggtctttcatcatcaattcagaataaagtccataatattaactttttctcaggtttttttagactttctattataggtacacatataatatagataaaaaatcacaacttgatggtaaaatattattttagaaactaacattaagttcccacattatctgtagctattctaattgtcatgacattaaatatttaaatgccattgaaataataaattttcttctttttaaattgtggctttttaattgaaagaaaaatgtacaaagacattaggatattttatcaatggctatccaacttcattggaagtttagagccttagttcttatttctaactttcctcagctctggaagatgtagattttcttggcaacagttgctgtgtaaaatattctgagatagaattttttatcataattaataatagatgaaaatttctgagtttttgatgttctaaactctatgctgtttgatttatgttgtctttatagttgtttttctagtaattctcagtctcttcctgttgatataagggttagtcatctttttcttctagatggatctgataaatttgtgctttttttccatatctttatgtgttacttctktatatattttaataacacaaccaattctaccacagtgagactgaactataagtttgctaagtttcaaatggaatttttagcatgtcaatagagaaccaccaaagcattcttacttgtacgcatccttgtaatataaacactatagtgaggcatcacgactttcaagatctagttccaaaacagacacccattcttgtgacaattaccaaaactaatctacaaacctcgttaattgtaaagggtttagcacaagtgcttgcacaatattatcactacattatcctttttatctatttaattcttggttgttattcgggaccattaaaaataaaaataacaagtttagataaagtttcaattcatacaatgckgataggaatttataaaaagctttttcatccagagcagtcagagagaatgtgatcccttaaatgtcctgttgttgttgttgttttctgtagtgtttctctctttctggaaatataggctctctaaaagtcagcaacaatataggattttacatgtactcccttccctttgtcttctctcttgctgatgtctgcaatctgccaatttgcacctcggcaatgagataaccttattgttttgatgtccaattatcaatttgcacctataaagacatgcaatgtgtgtcacatttattgtcgcgcttctgtgcatttctgtggagatggataactctctgattagagcatatggaattgcagttaaggcagagtttaggtttttttcagccatctacgtctcaacttattaacactgcaaattttgttaaatactttgataaaaacgatcatgagtcatagttgagtatacttattcttatgaaacctagcatgactgactacctttattttcatcattataacctaataartagccacttatttttcttctgataacctcaagcaataacattcttttgtaaatttggccttgtaaaaactatgcttgggtggtctatgattactgctatgtagtcaggcaattctcagttagtaattctttttcagggattagaaatatgttcagtgagaaaataggttctttgtaaatcactgcatttctgcattttttttaggaaataaaaaattatgcccactttaaattgacttatttccattctcaaaatgtgatcagcattttcctagaaacctgaattggcaagtattcactacagttcctgatacgcaactgcgcttctttgaaattgttgcctgccctaccaacagttattttcacattagtattttgggtttgagtgcctttcagggaatgctctgtcagtcttgaaaatcaacatagttacatagatcaagcccataaagaggtaaaatrcaatgtttccattcttcctcattgaaagagaatgggaccttaagtagtagatgagggcagaaaactctgagtaaactgcaattaattttaaggaaagcagaggcccaactttgaaaaacaacataagccttttcaaaaaatatatgtcaagatctccctatgaggaagtaaattgtgaattgtgtgtgtatgtgtgtgtgggtgtgagtgtgtgcttaaatttaccaggaaaaaaagtaaacccgataaagtgcaaaatacaggccagtatcttgagtctgagcaaataattgacagtttatctaagatttactgtgaagccaatataaatcagtaaatgctaatattaagaaacatagttccctgatatggttcaactgtcaaattattgcatttgagctttaatttttcatttattaaatatatttttatacatttatcctgtacttgtaccctatcccttagccatcaggagcttttaaaaagagaataatatgaaagtttgcaaataaaaatacttaaatattttgtaaatgctcatcctgaaggccctctaggtacgattggagattaatttattgaaaaatgtaagaggacatagtaaagattagaaactttatcagactgtgaaaggggcatgagctttgtgtgaggatgtgtcccagggcaccactaacagcatgatcccgatgactctttcccaccctgaggctctaaactggggctgaacctgaatggcgagttctcattctcaagttctgctattttgtgggatcacagcatacacagaggaaacgcgatctggttagtgaccaaaagtatgcatcaaaataccatttcagcaagttgattactcatctttccaggagagccctccttcagtttctcaaacctcatctctttagatttcccatcaccttggtcaagaccaaagaagagttcaatcatcctaagcccctgtgcttttactcacaccttccccaaaaccagtatagggttcattcctctttaagaaaccagctataatttcaccaaccccaggaagcatgtgtactagggtattaaatgcaactcttttgcttctgaagatttcagcagaggcttcaaagaccactgtaacagcctgtgttctcataaagcagaacagcaggctgaggacttatgtgatgtctctttattagggagctggagtgaggaacaagggcggtgaagcagggaaggagaaagcgaggatgcaagattgaccactgctgaatccaactgcttgcttcatctttgaggatcatctaagaagctgtacaagctgcaccttgggatagtctgtcctcaagggaaagatgaagaataggaaagaaatttatccaccagttcccatctcccactggtcaaaattttgtcacatggggcaagaaatcccctgtacttctgggtggtatgtgcatgagttttgatgagctcaacacatggtttctcacagctccatgtcaataaggaaggaccagcacttggtgtgagtctgagcttaggcaatgggagcctgctcctgcatgaagtccctcagaatccgtgcgaggctaagaggatctgaagttgtatataagaggtgtgtgttacaattgagaatataacactaggacccaaatagtcctacattctaaaccaaggtgctagaccacatacataggacatactaagggattgttaaattatttctgctgaaacttgcccactacctgtcttcaaattagacagaggaatgtgaaaaattcactgggagaggtaaaatacttgggagtaagaaattccttggagaattgttcaatgtgcaattattcagtccaccctaccccactctcccatcatggggaagaggagaggttacatcccttcacctcaagcttagtaagatgtgatgaatagaatatgaagaagttggggagtggctctaacttatcccagagtattctgaagacatgaggctgtgactgaagctgtccctcctcgtggctgttccaagaaagggagagtttcatgaagagttggctgcttctccacctaaggtaaggcaagaaagttcatctcccatgggctgaatgcagactctatggaagaagatcagactgtgctgtcttsaaagagactcatcctagaagtctctctgaatgagacgagtgactccagcctagagtggttctgagaaactagcaagcagaagggaaaaaaatcataagccaccatcaaagaggagaggtctaagagagatccagttaaagagactgggctagctcatatgccttcgccacggccagtgagacgtttcctcacctctaacactgcttccaaccttggatgggatcaaacagcaggggataggagatatatatatatatatgtatacatatgtgtatatatacatgtatatatatacacatatgtatatggatatataaatacatgtatgtatacacatatatacataacgatacttaaatattttgtaaatgctcgtcctgaaggccctctaggtatgattggagattaatttattgaaaaatgtatatacttgtatatatacatatacacatatatatacrtacatatatatatgtatatatgtatacagagagagaaagaagaaaaagagagcagagaggaaagaaggaaagaaaaggagaaacaaggagaaaggaaaagagaggagaggagaggaaaggaagaaaaagaagaaagaaggaaagaaagaggaaggaaggagaaagaaaaaagagaaagagaaagaaaggaaaaaaggaaagaaaaagaagaaagaaaaagaaagaaagaagaaagaagaagggagggagggaaggagagggagagagggagggagggagagagggaaggagggagagggagggagaaactttgcctcctactgtagtctgtcagagaagaagctttcagttggataaaagacaaaagacttaagacttttccggatggaaattcttaattactgcaataagtcctcatgactacaagggacgagaaaaatctatggagctgcccaagatttcgacaaacagtgggaaaaataacaagtccagaacacaggatttgaaagagcagagaatcacacacacatgcgcgcgcgcacacacacacacacacttttttcctacacttgctctctacacaatcaagcttcttcagtaacatgtttaaatcacatgcaacccatttggtcgttctatccagggctatgggctttcttgctctattccccttcttttactctgaatctgctttgttgctctgcatttcacctccatttcatctttaaactagattgcacacttcctagaggctctcgtacctcgcttcccatagcatcttcccaaaccgtagtgtcatattctcctcagtactgtggcggggcacttgctgatatgagtgtctcaccatttattttctttcatttatctgttttctcatcacctacctgcccccagtgtcaaagcccagagattcttcatgttacactttgttaatagtttctgagaattgcataggatcaaagaaagaaactcactgattatttttctacttaaaaatggtggctgaaatggctaacgagcatactttatattatgaagtaatcatccaatacagctaacagctaacgtttattgagaaatgctcatgttctaggaatcacactaaatgctgtacatgtactatctcatttaattctgagagcaaacctttgtagtggatattattaataatttcatccaatttcaatgatgagactcaaagagctttggagacttgtcaaatatcagagaaataacagagatgtaaatctgagtccagagcctgagatcttaaccactagggtctactggtttcttagtgaccataaattttagagcatggaacttggtaaaaacaggaatgatgtatgctttccactgtgtatcagaggtctaccctgggacgcagtaaaactaaaagtttcttgacactgtggtccagatcttaccaacccatatgagaaatttagcctaatgttgagaaaaatcttccaggcatgaaggagagcttgatgtcagttgtatgaccaaaaacaaccctcttggccctgtccatccaagctctactggggatttcatttattttatagtatgtgtgcttaccatatttaaaccatttgtgaagtaggtgtgtggaaagacttcttattctcatttaatcaatcaatgaggaaacagaaacaaaaatattaacagccacagcaaagggcacagcctcaggttccaaatttctgagtttctcatgtttggcctttttgaatattgagcaagaaattgccacttctctatgtgacctaattgtataaaaacatatgcaaaaattaaatggttctcyaatttagctaagcataaaagataccccatgacctgtagaatactataaaaggcttccttaaacacattattcaattaattcaggatatacgcatgaggcctccacaacaagtgagacattgtaaattggatattgagggaaggtaaacacaggacagaagaaaatcactcagagtaagactttggaggatgctctggcttatttatttatttatttattwtttatttatttatttatttatttatttcagattgacccagcctactcctcacccagcatcactatgcttagaaatgtgtagtttatttacatatacttctatgttaggaaatgtataaagcaatgcagaagcaaactgtccctgccttcaggagctttcaacgtagggtaatttatatggcatatgcctcctgtctcttccatttaacataaatatttaaaacagttgaattggataaattattttgtgtacttgttactcatttatattttgctaatacctttctgtaaaacaaccttaatccaaaccgctattattgagtatagcatatagaatgctgtccaaaatttatgttctaagcataaatgtatgttgcttgatttaaatatttgtattgtctcctaagctaattttttaaatattaaaatatgtgttactttgaggaaaaacttgtatgcattacctaaaaatatcattgaaccaagacctaaataatttgactatagtaataccatttttctaaagatgattttctttagtatctaaacctataaatgtccttgctctattagctctcttttaagagaaactggcagaagttgaaattttagtgcatgagaaaaatttaaatatgcatttctgataattgctcatattttaaatttaatacatggagtagttagaaacacaaaaaatggtcaattaaaaaagtgaatgctctttgaagttcctttgtaaaaaagatagycawtatttctgaagaatttaacctgaagttatcttcattaaaggccaaagacttattcataatacttagtattcttgtttcctctttatctttaaaaaaatatcctggagaaaggaagcatgtcgggaccacggaaaaggacagaaaacttggcagagaaggaacacacagctcactggcacagctctgaggagcatgtgggccacagagasagaggtcacttaagagagttgcgtcatatataaagacagcatgaaagaaagctgacagggatagaggggagaccaagcaagctttaaaaaatatttagtgtctttttctgtttgaaatagggtgtgccaaagtcaagaattcttaatttcattgtaatcaggttatatgctacagagagctcatcggaattggggaataaatttagcaaacaagaatcagcataaaatggataagctttgccatatgcagcaataactcatctagaaatttcaatcctgaattgctgataagagcaggggattccccatttctaactgttaaggttccaagatgtcatctataacctgtcaagatgaccctgtcggcaagacaggatagacttctggcaggacagttacaggtcctgggacgctggcctcagtggtggtagagtgatgaccatcctccgggtttcacttgcaatgaccttttctgcttcaacracagacaggtggatattttggtcaatctctttggtatctaaccaaattgcaatcgacatgtacaagcaattcggctatagcaaatacagaacagtcatagagtatgtctgggtcaacaacagagagcccgatggagacgcttacaatgtgaggaaagcgmcttccagagacactgacaagaaatccattgcctcatcctgtgcgccctgaagacgttgaataaccgtgggcagtgttctaggcagatgcttcaggtattttataggccatattattttcattggattgtcttagaattttattaggagaaaagtaatcatttaggtactaaagacttcaagaaaatataggttataaacttatttaaaatctcattatttccaatcagcaatattatacctactaaaactgttcactgtaataaaattcaatccaaaaagggtgtaggtcagaaggaagcattccactatcatggtttttcatattcactacatgctaaggaaaaaaacacttgctcctatctcttcctaaattctgtgcctgaaaaccacggcatacatattttttaaaattttgtattgaactgttaactggagctttaaaagcgtatatgcaatgcataaatctaagacgtataataaaatacattagctccaaaaaaagacatgactaaaatgttaaagtaaagaaagccacaatctgcataacgatgatataacatctttggcatgaatgaacactgctttggatgacaaataaaatggataattttgtattaagaattttccctctttttttagggaagaatgtgctcatgacatttacttgatcaatcctggttctttaagcagaaatattttagaagtgagaaaaacaacttcatatagacttctatcctcacggcggcaatgacagttcgcctgttctagtcaccaatgagctcaatcttgccaaatcaattatatgtcctaaccttacttggactatcagcagcattcaacttcctcccccttgaggcatgctctttcctaagatactatgacactccactctagttttttttccacctcactggctgtttcatttcattttcctttgctgactactgctcaacttctaaatgccaggattccctgtgacttgatactttgtctttttttttttctatatctacgtattctttctatgtgttctcactcagatccatggttttaaacatatctattttcagatgacactcaatattacatttttatgctgaattaaaggtgtatatatccaactgtctgacatttccacttagattggtaatatgtatttcaaagttaacacagctgataacaaacttttcatgtcccaatctgctccatctcagcaaaaagaatcctcattcatcaaggtggtcaagtaataaactaaagcatgtccttgatttttctctctgtgttacacagatacagtctgttagtttaattccaaagcacatcttagtctgtccacttctctcaactcaaacaatgccacagtctgacaccacgtggactactgaattggcctccataattaatccctacttcccctctgcctcccttcatttctttgagatatttcaaatgtaaaccagataacatctcttctctgctgaactctttactgccttcctattgtagtcagaatgaaaacccaggactaaccttggcatccaggaccctggtcccagtgaaattccaagactttattttgacttactctccctctccctcaccagaggtggcctttcctgctttcaaacatgcttagctgttgcctgatttctggattgtgcactagctgtcctctctcccagtagctctatgtcttcagatgttcacatgttcaatttccttatatcatttagctctcctctccaatctacttcctccaagaggcctttcctgacaacccagtctgaagtggtcttttccccatctgagtctctcttatcacattatgttctgttgtctgctcaacatttatcataatctgaaatcatcttgttcatttatttaattgcttattttccatctccctctctatgtcataagctccagaaaagtaaggtccttttgttttttgggtttttttttgttttctgtttttttgagatggagtctcactctgttacccagactggagagcagtggcatgatcttggctcactgcaacctttgctctccgcgttcaagcgattctcttgcctcagcctcccaagtagctgggattacaggcacccactaccatgcccagataacttttgtatttttagtagagatggggtttcaccatgttggccaggatggtttagaactcctgacctcaggcagagtaaggtccttttccatcttgtacacagttgtatctctcctggaagaaaatctgacatagtataaaatatatctaattagttacttaacaaattatctagaatcacatatgtatatacataactatatattatatgtaagtatattgtaagcatatatttatatattatagcaaataatatataaatatacttttaatgtgtgtgtatatatatatacacacacatatatatacacacacacacacacacacacacatatatatatatacacacacacgcacatacatatagaatctactatactggatgggcacaatggctcacacctgtaatcccagcactttgggaggccaaaagagggaggattgcttgaggccaggagtctgagaccagcctggggaacatactgagaccccatctctacaacaatttttttaaattttaaattaaatttgtttaaattgtttttaaaattaaaaaaaaatttatcctcacacaaccttccaggaagtgttatgaagaaaatgttattaagtttacatatatatcaagtttaaagaggagaacaccaaaatcagagcaattagaggttttgaagtttgcttgtgaatgtatgttgagatttaaactctcattttcaaaaaagattattctacaatgtcctcttagaaaattaagcaaaatctagacttttttttgttttggtttaatactagcttagggaaagttaatctgggtggcatatcccttcagtctcgtaatctctaggtggtcaaataactgtgcatttctgggcctgctacatcgcgtctagactctagatgcatcctaacccctcttcaaaactggcattcctagaggcctgatctccacagtcagccaggctctcacaagtaatgttctcaaaatttcattggctttatctctagttgcctctctgtagcccagaaatcatgacaaatctggaacaatgaagatcagcctgagcatgtgagagatcctctaaacccccaagaaaaagacatcaatacaagaaagtttaactctttagcaacagaaaacagcaatatgtcatatcagtggtcctttaagcaatggtaatgatcagagacagataccttcattccagggctgctttacctttagacagtgtcaaaataatttagaggtgggaggagatcatcaggaagggaccctatcctgttacaatgcctagtacagattacttgagagtgtaggttctgaaaaattgctgggaaacataggtggtatttatattttaaagcccttgaagtaaataactttttattttatgtatcttttacaatatctaatagagtgccatgtttacatggaatccctaatttgtgttttaaaaagacaaggaagttgagcatggtggttcatgcctataatcccagcactttgagaggctgaggcaggaggattgcttgaggtcaggagtttgagaccagcctggggaacataatgagaccccaactctacaagaaaatttaaaaattaaagtgtggtggcacatgtctgtagtcccagctactcaagaggctgaggtaggaggatcacttgagcctagaaggttgaggctgaagtgagccatgatcctaagcactgcactccagcctaggcgacagagcaaaactccttcaaaaaaaaaaaaaagtgagtacaaaatggatttgttgtcataactgatatagaatctcatttttaactttaattactggaccaaataaaattattggctagaataaaaggggttagagaggaaaagagaatggagaatcgcatggccaaaaatgtacaatgcaaggttcaggcaaagagcaatggaagtcagtggtaatttttaaaaaaatattgtaatgacaaaaactcaagattttttattgtttaaatatttttagagacagggtctagctctgtcacctaggctgagtgcagcagcatgatcatagctcactgcagcctccaactccagtgctcatgcaatcctctggcctcagcctcctgagtaggtaggactacaggtgtgcactaccatggcctggctaattttattttattttattttttgtagagacagggtcttgctgtattgcccaggctggtcttgaactcctggccacagagatcctccctctttggcctcccaaagtgctgggattacaggcatgagccactgtgtccagccaaaagtgttttcaaaagtgaatcaataagcttcattctcggattctcatagccagagcatgcacatatattactttcaaatagtaacagaagctttggtgagcaagtgaagtttttcagtgtttagttatggatttgcaagcactctgttattaggctgataaagcatttcccataaaaatgacaacacaattatgtacagttagacaaaacttacttttgcttagaacttaatgatataatgaataccaatagtaataaatatattatgtaccattaaaaacaatgaatcataagtactttaaaaataaaaccttgatatacacacaaagatatttacatggtataattcacttttatattaatttttatttttaccaaggacaattcaatgagctcaacactgacacagaaatgcaggtaaatcctatttttactctattgttaatttattccagtgattaagtcatgccttttgcttaagtaaagcactgaattagctcttttaggccactaaaagatgaaatagagaactgaggcagagtctctaaataatacctgatgagtgagtgattactaaatactattaactcttaactcttatcagcagaatgtgaccccaattcaccagaaaaatcagatgcagtgtattcttgagaaaagcacaatccagtcgtatctcgatttccaaggaaattgacacagtagccctatctttctttagtattgatatcagaatcttggggtcaggattaattgagatggaatcttaatgttttgttatgtgataatgctatgcaaaatacagaacagagaactttgacaagacccccttgatgaacgaattactgtctcattggttttaaatatttgtatgaaaaacataagatccatgagctgaaggagctggggaggataaagtcataatcaaaacaaattgtgtactgcaattcgagtcccattcctctaagttccagtggctaggaaaacagaccagggaggagagtatctcatcaatcagatgatgggacttgtgcagtgcccttcatgtaggctgatcacaagacgtttaactttaagacaactcactttcctgactacaacagaagggaggcagaataaaacaaattagttgaagactcaaaaatgccaagggccctattaagtgtaaaaagctaatagggtatgtgcttatatccacaagtgtgtgcatgtgtctcagagagcagaagtgtaaaaagaaattagcagctcaagctgctttagcaagaccatacagagttttcttgattcataaaacctgacttacgagcaaatctcccacaaaactaagcagctttaaaagagttcagatggaaagacaacatggttgcttagatgcagacaataccttttttttacatcatcaaagcaattcatgttatgttttgatgctatattaatggaatactgaaaaaccagaagtaaaacaaaccttccatgtataagtattttgtgcatttggagaacagatgagttagaaggggaagtgcattttagtagcaagatcgaatgaaaacttggtgactatatgcaattctatcttctccattatcttctccttattagtacttcattagtctagtctcctttt

SEQ ID NO: 6999 - DNA, 14441 bp, Homo sapiens
gagtttcaccctgttagccaggatggtctcgatctcctaacctcgtgatccacccaccttggcctcccaaagtgctgggattacaggcgtgagccaccatgcccggccaactttgttttttaatttggtgtaaaacagatgaactttctgctgtgaaagaagagaaaatgacatttcattttctcccccatcctttcccctcacttcttagttatgtaattgtttcactgtgtcagggttttgtgacattctcttctgaggctatagctttcaattctatttagccttagtaaagtcttgcattttaaagtgttcagtactcacccaggttcattttttgcatagcatcttcttattgttttagttcagatcgtaatggtggaggaaccgtttccatgggactgagaagaaagacacttgtgttgacgttcaggcatacagggaatgaaatctcgggggcagcatgggagaggcagccagagccatggctgagcgtgcttccagggaggcagaacagggcagggtgagcacacatctggagttccactgcctaaatttcaaccgcggctccatcatctcattgctaggtgagcttcggcaagatgtttaagctctctgtgcctcaactgctgccacatctgtaaaatggggacaaccatggccaccgcatgtaaggtgttgtgggaataaaatgagtgatttaaaaatgattacagaggtatctgactcactgtcaatgtttgctcttgttatagaatcacactttttggagatcaatagcaggcaggaaagaattctctgagaatctcacagtcatctcctttctttagttgtttgcagggatcttttaaaatgtcaaccctttttcaatctgcttttgtggcccacctctttaaactttttccttcttcttagatggaaaccaagacctccttacggcccataaagcctgccatggccttagagcttctgccttctcctgcaccccccaggcttcttctccctgcctcagcaatggcaggcagcaacccgctcctttggatggcacttgcccctgcgtcccctgatggcccactctctcccttcagttctccactgatctatcacctcattagaaaggcctctgtggccacacagtctaaagtgtccctcactggaatttgtgtgttttatagcaatttatacaagcatttgcttgaagcaatttgtaattagttgtttgtttgcttcattgtttagttgtttcttgatgtgacttgtctgtactactaggccgtaacctacttgtgagcagggatcatgtctgtcttattcagtattttcatccaacacagagcaatgccaggcaccagcaggtgcttaataaatatttattgcatgaaatatctctgcctctatatatctgtatctctatatagatacagatggacattgcatattaaggtacctacctgtagagaggtagctacacagctgtctatatggatatagatactcactaagtggcctgaattattcaggcaacagtctttccatttcatcattctattttctctttatatgacaattatctaagtaatgaagaattggaatcagggctaggggtggttagaggaagaaatttgaaaggcaagcgacattcattgagcattagttggtggctgcacagtgctggatgttttgtgctgtaattcatttaatttctataataacctgtggtattagtccattctcacactactatgaaggaatcctccagaccgggtaatttataaaggaaagaggttgaattgactcacagttccgcatgcctggggaggcctcaggaaacttacaatcacggtggaaggcaaaggagaagaaggcaccttcttcacagggtggcaggacagagtgagttcaagcaggggaaatgccagatgcttataaaaccatcagctttcttgagacttactcactatcacgagaaaagcatgagggaaaccacccccgtgatccaattacctccacctggtcccacccttgacaggtggagattatagggattacaattcaagatgagattttggatggggacacagagcctaactatatcacctgtgaacaacagacattttctcattttacaaatgacgttgggaaagttaataagcaacagagctgggcccggagactcctgtccattaggtaatgctgcctctgagagaagcaggacttggtgagcactcagcaactttgggcagggtgcaacacctgtaaactccaggatgtaagttgctcatgcagctcccataaatgatttcaaatcacacgtgaaaaccattatgaatctgagaaatgcagaataaaaaaatcatcagggtgggtttgggttcattaaaaaaggaggtgaggctgggcatggtggctcatgcctgtaatccagcactttgggaggccaaggtgcttgagcttgtgagtttgagaccagcctgggcaacatggtgaaacccatctctagaaaaaatacaaaaaattagctggatgtagaggtgcatgcctgtagtcccagctatgcaggacgctgaggtgaaaggatcctttgagccctggagactgaggttgcagtgagccaagatggtgccactggactccagcctgggcaatagggccagaccttgtctcaaaaaacaaaaagaaaaagaaaaaaagaagatgaaatcagaagatttgggtgtagttaaggaaacatatttgtcagcagaattttgggggtgagctggaaattatggaatgcttttctgggtaaaattcaccagtctcaggccttcttttcccaaaatgtgcttcatggagtgttggattacactgaaagttggcatacattatttggaaagagaactctgtgctccagtaagtttgggaaatcctcatttaattaaagagtttcttaaccataagaatcctcagagccttccgtatgctaatgtgcattgtcagtttccaaggctaggaagtggcatttctctggatctataaggtctcaagatgcccttgagactgtattctacctgatgcatggctccaggggccttagtggggagcgccacattttccatgttctcatgacagcaggaagccctcagtgaatggaggtacagtgtgcagggtcgcaatcagtcctttccatccgccgcttcatttaagcctcacatcaacctaagacataggttttattattcctgggaggctggccctgttggtgcctgtcaccgcaacccagacccgcttgcccttacctgtagtgcaggtggctagattttgaattgccagcatctgcatttctttgccagaggactttctccagtcactgaagcttgcttgtgggcctgtctacaggtcgtaagtgctagggacttaatgcctcctcaaccagtgaccaacaggaggtgatggatcaatgccccagccccctcaccccttggtcgcaaggctcttctgtttacacataaagccatgtgtagatcctggctgccagagtaccccagtgggattttcctttagttgcccacagtgataaatgcttgataacaaactctttatggatgctttcccatctcctccccactttcctgttcccttactggtgtttcctgagatcacttcccaagttaactatttgtaatcaaatccttttctcaggttctcctgcagaggaaccccaactgagacatcccattttacaaaataatgacaacagcaacaacacacacacacacacacacacacacacacacacacacacacaaaagcaaaaaaacagaagagtctccaagaggttatggaaggtgccctaggaaacagcttatgcatggtagaaccaggacttaaatttcacaacacatttatttagcacctgctatgtaccccttgctatcctaaatgctgagatgacaagatgaaaaagacagtcttggaccctctgtcctaaaccataggcaaaaataaattagtccaggcctgtcttcaaagcctctgcccttaaccacaatactctgctaattctcccaggatggacatttgactctcttttaaactgggagtccatttccataccacccttatgaagagaagctgtggtattcagctcctattctgccctctaggccatgaaaaaactgcatcagatcaagacttttgattcatgaaatatgctagagaaaattgcaagatttcctgactcaatgattttcctgcccagtgtaacatctctcttaattagtgagttgcaattagcatttataaaaagaaatcattgcacaaggtgagtcaactgagatgtaacatcttgctctaaacactgtcctcctggtgtgagtgggatcattcagaaattaggtatcttaatcagctgagtgctccagcattcaaatgtatctggcccagctgggaggccagagtctgtggcatgcataagaagcttacaggagggagggagttttctgtgtacactagcatttgttcatagttgcaaagtagctgtagaaactgcagatttatggccaggtgtggtggctcatgcctgtaatcccagcacttcagaagggcaaggggggcagatcacaaggtcaagagatcgagaccatcctgaccaacatggtgaaactccatctctactaaaaatacaaaaattagctgggcctggtgactctcacctgtagtcctagctacttgggaggctgaggcaggggaatcacttgaacccaggaggtggaggttgcagtgagctgatctggcaccactgcactcccacctggtgacagagcaagactccatcagaaaggaagaaagagaaagaaagaaggaaagaaagagagagagagagacagggaaagaaagaaaggaaagaaagaaagaaaagaaaagaaagaaagaaagaagaaagaaaggaaggaagagaagagagagagaagaaaagagagagagagaaagaaagaaagaaactgcagatttatgagaatgattgttatttttcctactttggctatttttaaagttatatttctttgttattgagtgacctccagaggcagagagccacattataattatagaaatttgatctgaatgggatattaagggttatctattaccaacactcccagtcccttcttcctcccttccttctttccttccttttgatgagaaacctaatcacaaagagagaacatgacttgtctaaggtaacatagtgtgttggaatactcctgaaactagaacctacttagaatcaccagaaacttgaagttcttttgttattattatcttctttatctctctcagcggttctgacagaagaatgatcatgaagggaagtttaaattgtcagccaatgtaaggttttgcattatttatgcacttctgccatgtgggctatgctctcagcacttttaaactatccatagtccatagttggttctgataaatgattatttatttgctgtttttcagttttgcttttatttttggtgattgtttgtacttctttaaagcagggactgtgtcttacagtccctttctggccctaacagctcccagaaaagaacttaccatgtaatagggatgtggtgacttattgatgattaattcattttatatatctggattctttccctttgctcacataaatttcctgggtttgaaatttatgcctgtttatttcttctgttggcccctcatgttgtcagtgaaatggctacaagaacggcatttgatggaagaagaaggaagacagggatggcctatttcattctctaattggataatcagtccagaataatgatggtttgattttatttgcaaacctacacctcaggcagtgggtgaagaacaacagcataagcaacaatgcgagtatggtgttcatttacatcctcagtttgtctgtggcaggaagaaagaatccacttattgctaatgataaagtagtagacccactttatttattttcatataaatcatattgtggcagaaattttcatagcccgagaccaacttctggagtttttcttatctgtgagattgttcctgttgtgtatgagctgttttgcagagatcaagaatccctgctcaagtgtgatccatcttcatcagtgaagtcatatgctgcraggacttctgagatactgtctgctgccacatgaccactaagcagatggttttgtgcctcttgcatgggttctatgaaaagatggagatttcagtgtccatcctctgtcactcaccagtagtatgcagaaatgggtgagcctaacagagttgttaggtcaacaaagcctgccattcaaattcagatcagtgaccttgcactcagggacaaattggggttaggatgcaggctgagattggagacggattatttcactatgcatgggtttgaccaggcagcccaacagcacaggtcttgcccatcaaaatattgtaactgcctaaaagagttggcaaaagtctctaacaaaacaaagggtttatgagctaagcccatcttgcattcatttcctcattccttctacacatatttagtgaaggccactctacactggacattgggatatgaacacaaagaaggagacaagtcacacagccatttatttataggaaaaaaatgttgaaataaatacatgagctgaagactttagaattacaaaatgagacttgctaacttgttttggattggaagaaattagtttatgcccatgacatcgctttattccagactgattagaagcataatgtacatggcaggggcagggagaaggggatgacaatccattctttgaaagagactcttctccccttaggttaaatagatcgtcaagtccttgcatgtcaaaagcagagatgtgaatcactgyccttcagaaagggaagaaaacactttaagcaagtgcaaagttcccagctgtgctaggcacgatggattatacccaaagaagttggacagagaccttgacctcaaggatttcatcgtctatttgaatagaaatgatttctatataactgaattaagccagagcaataaaaatagcatgatattaggttctaaagtgagtgttgcaggaaacagaaggaacttccaaatgttgttatttacagatttctaccttgtgaaatgtagaagtacctgttctcaaattaaacattccttcctcatttcaagatgtcagctacatcagaggttgaccaactatggcctacaggctacatctggtccatcacctatttttgtaaggaaagttttactggaacgaggccaagctcattcatttttgtatcatctgtggctagttttctcactccaatggccgcattgagcacttgcaatagagattgtgcagcttacaaagcccaaaatatttatgatctggccctttacagaaaaaaattgscaacccctgatttagattatccaggttgatcctggtgctaatttagagcttcagaataaaacacagctgaggtgtgcctggtagcaaattaatcccccccaaaacaagtacttcattttccttaaattaatgttgagcatcagaattaaacagagctaaatctcatgatacctgaggcccttgtgaaaatgtttttgctgacccaagattcagtgttatgctttctgtccttacagagagctaaatcaagagtccccttttggaaggagtacctctgttctttgtaaactgtaattgaagatataactcaccgtgttcttcagtctttattcaaagccgctggcacaaaaattctgcttgaatttaattttaggatagatttgatctctgaattggctttataggttttctcagttcacaatartcataacctagttgtttctctcttgccataggtgacaggcaatgcagagccaatttcagaagtgagctcagtagtaaactcatggcaggtgcaggatgaggcaagagagaggcctgggtgcaaacatgagggtggctcattcccagggctatgcaaaggcagggtcagtcccaaaaggagcacctccttacatgttgtgcctgaagtgtccctttctcagtcttttcttggtggtggcaggtgctgcctggcaatccccatcccttctacttttagatggtgggggccctgtcctgctttatccttgtatatggcgcttttattttaaccatgtaaactgattcaggtcctccctgtagtcaacagagataaaagtctcaataatcaaacctgtgggtacttcagtgaccagggaccaccatctgtcccctgtggrtccagacatcaggcaggagraaaagttggggccatgtgtcagcgtcccagctggggctcaccatgggaagtgggatwagggaggattattccagttctcttctttgagttcaggtttttatctacgggaagaagagggagattggacgaggttagattcacttgtctccaatgtcctgcatggggttctgggacagacaatgcctcagaaatgggaggtccaagaggatggtgactttcactgctagctgatgatgaaagggaaagggatgagggaagaatgggctgaattagaggctattccacccctctgatggttagctttcagggggaagggaaggagggagggaggctggtggggtgggagacaaagacgaattggagattaggaaagattctttggaatagtcaaaccagagaccaagcaaagcatctttttcccttgtaacttgagacctgtgcaaatgacacaggcttctagttcccaaacttaataagagtaagtgcgtgaagaagagacctgcagacacttaattcaaacagtctagaattctgggaataagttatagtacaagttatatgtggctggttatagattcagccttgatgtttatgttccctgtttcaagtcacacacatcagattactcacttgtcagctaaaaatagggccatcactggcttgcaagtcgagttaggttttatttctctatgtgcttcattgttcgttcttttgtgctccctcctctgtgcctggccccctctgccatgcccaggtggcttcacagtcccccttccccatggtcaatacttctttctaactgagggataaatgactctgaaaaggaaatgtatttcaatggggaccaatccattacacccgagagagagaggccaagtgcagggacttctggaggagaccaggaatgagtgattatgtagcatattctgtgtgaaaggcattttaaaacacacgtagatcaatttattgtcacagcccctgagaggcataattctcatcttttttctttctttctttcttttttttttttttttttttttttttttgagatgaagtcttgctctgtcacccaggctggagtgtagtggcaccatctccgctcactgcaacctccacctcctgggttcaagtgattctcctgcttcagcctccccagtagctgggactacaggtgcaggccaccacgcctggctaatttttgtattttttagaagagacgaagttttgccatgttgactaggctggtctcaaactcctggcctcaacctatctgcctgccttggcctcccaaagtgctgggattacaggcatgagccaccgcgcccagcttctcatctttattttttacatgcagtcatagacattcaggtttcatataagcagccagggtctctcagtgcatcaggagcagagccagggtcaaaacttacatccatttgaacccaaggcacagttttttcttactgggtaatgctgctgtcttatgggggaattttaggcatcaataaacaaggaagagaagaaggctaatttcttttgggggctggtggatcgtcccctaaaattatgtagatagtcatctttcctatcttagctaaatacaaatgtagattgtaaacagctcctcaagactgtacattttttgaggatagatttagagcaaatcacatttgtatccccaatatggttagcccagtatctggctcctagtaataattatagcaagcactgactgaacatttcctatgtgccaaggacaattttaactgttatagatattaattcattcctcacaataaccccatgaggtaggttactattactgttcccattttatagttggggaaactgagatactttgagttgaaggaacttgctaatgctcactcccaattaatggcagagctgggatttgaatcctataacactgggcccagattccgtctcttttctaaataggtactccatgaaaatatgttgttgaataaatgtactattactttgtacagggttgagggaattagatatgacttcactgaagaggtcaatttcgtctgagttcatttcttggtcaatatttttaaatgaatgaatggattccagtgtcctttttctctgaccacttctgtctcagaaaaacaagcctaatgcagaggaagaggagcaagggagttttcccagtattggtagatgaagatctatgacttcagagacaaatgaagccctcctagaattctttcaggcagacaataccaggtggcaccatgggacacactggtgggaggagtgcaaaatgaggatacagtttatgacagttttttttggaatagacacatgtccagagaaatgggcccacattcacttgtatgtgtgcatacgtttgcatagaattctcttttaaatatttcaaatttataagaaatcctttcttgtgatgaacagatttatcttgaaaagtgtttcccattttaaaagtcagagacttgaggcagggttggaataacttccaagagcatgtggctcgtatgtggagatgccaggaaccaaatcccctgctgctggttccagggaccacatttattgccacacctacagggtcctaggaagaggctggcagatgtgccccatggagataggtggggtttttatttacagtaggagaccagattgcccagtgatgatggggcattcgatggcagaatatagaccagtttgactgggccctagtgctttggcagatttttggaggagaatttgctgagtgtcagaccctgtgcagagctttgcaaacatcgttttctttaatctggatagttcgtctgtgaagtagatgtcataatccctatttcggagatgaggaaatgaggctaggagttacataacttactcagatgtgcagctgctggtggcagagcctgaatacaaatccttcacttctccaattaaaccagccatctctgagttgcaggggtttcatgccatactgcccactggaagttgggagggaatttacagggttacagcagatgatctctgtttaggcatcaggtgaaactttagtgttccctaaattggtacaagcagactctgtttgagtatctctgttgacagggagataccatctaacatggcagcccatctcaatgtttttaataagtatattatacatgcaataaaatgcatagatcctgagggtgcattcagtgagttctgacagagatatgcaccactgtaaaatggtctgtcatccatatcaacatagagaacatttttactatcctggaatgtttctttatgctcatttctgtcaatatctgctctctcctcccttgaacataaaaaaatcactatcttggcttcaatcactatagattagtcttgtctgctctcaatttttgtatgaatggaatcatgcagggtattcacttttctaactagctcctttccttcaaaataaggtttttgatatttgtatatattgttgtatatattaataatttcttccattttattgctgctaatattccattatgggatataccacaatttgtttatcaaaccaccctgttgatggccattaggttgtttccaactttggcttattttgaataaagctgttatgaacatccttgtacaaatgattttgtggacatatatttttttttcttgggtaaatacttagaaattgagtctctgggtcataggatagatgcatgtttaacattacaagaaactgccagttttccaaaggaagatacaccattttacacttctactagcaacgtgtgagggtgccagctgctttgtttcttcaccaacacttgataatgtcaacttttaaattttagccattctaatggatttgtggtgccatcttgttgtagttttaatttttatttctgtaagttctttgtcatataaatgtactgcaagtgtttcctcttaatctgtggcttatcttttaatttattgtctttttatgagaagttttttattttactgatatttaatttatcagtctttttaaaaatgtgagtgccttttgtgtcctatctaagaagcctttgcttatccgagtgtcctcaagacactctgctgtgtttgtttatagaggcttcagatttagcttttacattgaagtcagtgatccatctcaaactaattttgtagattgtgttaggtaagagttgagactgatttctttccctttgtagatatccatttttccttccatttgtggcgatgactttatttttctcattgagttgtattggtgcttttgttgtaaatcaattgattgtatatatatgggtctatttctggactctgtttcattaatcaacttgtctttttggggggcacgacacattatcttaacacaacatagtttcattattttttgatgcctattaaaatgatcatatgatttgtcttttaatttttcaatgtggtgaattacattaattaattttcattttttaaaccaatcttttactcatgggataaactctatttactcgattctaaagtattattctttttatatactgctggattcatttgactagtatttatttaaggattgttgtgtctatgttgatgacatatatttttctgtaattttttttcttttcataatactcttattaggtttcaatgtcatgattattctggcattataaatcaagttgggttctcttttcctccagtccctgaaagagtttgtgtaatattggtattatttccaccataaatatttggtagaattctgcagtggaaactgcctgaacctgaaattttctttgtgggaatgtttttcattgaagtttccatttatttaacagatatgtagctgtttacattttctattttttcttgtgtcagttggagaaaattgtatttttaaaggaatttgttcatttcatcagggtgtcaagttttggagacataatattattcctaatactttaaaattatcctcttagtgtttgtaggacctgtagttctgtctatcatttccagacaactttaggtgttggagagttagtttctcaccaatttctttttaaacacattgagtttctttcaagtcaggaccaggccatctacttccctcttcaagatattcgtcatgctgttccctcggcctaaaaaaattgccatcaccataatttttttacctggctgtctgctactatatcattaggatatagaattattgtgaagcccttttgcgtatgtatgtcacattttccatacacattcactcagatacacatttatgtaacatacacatacacatactcagataactacttggggtttttcctttttcttttttgttttctttttttcttttcttttctttttttttttttaaatggagtctccctctgtcacccaggctggagtgcagtggcactatcttggcttactgcaagctccacctcccaggttcatgccattctcctgcctcagcctcctgagtagctgggactacaggcacctgccaccacgcccggctaatttttttttgtattttttagtagagacagggtttcaccgtgttagccagaatggtctcgatctcctgaccttgtgatccgcctgcctcggcctcccaaagtgctgggattacaggcatgagccactgcgcccggcctacttagggtttttctttacagcactttaaccaaattgttaattacagttatgatatattgtttcactctctgattatactataaatgccaccaaggctggacttgtgcattgttcctgttaatcagcaaatacccagtacccagcaaaacgcttggcacataatagatgctcaatacatcatggtcaggtgaatgaactaatccacattgagaagaaatgttatgctttgaaaattctaccaataattttagccttgctagaggtctgaaaaaataggtggggattaaattatgaggagcctcagctaacaacttgtggaatgtggatattttcctgtttatatttttaatgtttcccctctctctgtctgtgtcatatttttgtttacactcagtaccctgggaagggagactttcatagtcactctgggctgccttaacaagatatcaaaaactgggtggctgaaataa

SEQ ID NO: 7000 - DNA, 13242 bp, Homo sapiens
gttacatgcacaccattaagaagtcagaaaagccctgactaaggacaatctttcaattcattaatgccaagctgtcccatggaggaagtcagggaaggaaatgcctcagtgaagagaaagtatctcctgggttttcagggcattagaacttcactcaaaaagtttggaaggaaaggaaaacttgatgtggcagtgtaacagactgttgcggtaatggctctcaatttgttcagatctccctgtatctgtgtccctggtgatttctcgccaaaacaatcccttcttatgttgactctgggcttggccacataactagctttgagcaataaaaaagtagccaacgtgacagaatcagacttgaaaggtacggggcttgttctttgctgctcatggaactctgaagccaccatgtgaacaacactgagactaacctgctgaaaaaggaaaggccacatgaagagagaccccagccatataagccatcctagggtccccagctgagaccaaagacctgtgagaaagaccagccaagaagagccaggaccgctctgattgcaaagaaccatccaaccgagtccaaactgccaatctgcacaactgggaactaaagaaatatttgctgttttaagtcactaattgtggggagtagttttttacccagcaaaagctaattgatatagcagttctgaagctctcagcagaaacatcggcaccagttttacataggttattggttgatttccaagggctacaaaacttctgacctgaaaaatatttgacactaagtccacaatatcctcagcaaatcatgaaaaatgtatccaacaaaagaagaggtgaggatgagatacagatgcaacataataggctctgagctctactctaagaacactataacaattatggcattgtggctaacagggactcagacatacccaacaagctggacaacggatttggaagaagcagaacttggtatgagacctagctctggtgcttacaagtcatgtgacattcgacaaatcatttcagctctctgtatctttcttcaataataatatagggccactccgggcgtggggctcacgcctgtaatccctgcactttgggaggccaagacaggcggatcatgaggtcaagagtttgagaccagcccagacaatatggtgaaactccatctctactaaaaatacaaagttagctggcgtggtggtgcatgcctgtaatcccagctacttgggaggctgaggcaggagaatcgcttgtacccaggaggtagaggttacggggagccgagatcacactattgcactccagcctgggcagcaagagcgaaactccgtctaaatataaataaataaataaataaataaataaataaataaaaataataatactaataatatggggtcactaagcgttacgaaataaaaaaaattggccaggcatggtggctcacgcctgtaatcccagcactttgggaggccaaggcaggcagatcacctgaggtcaggaatttgagaccagcctggccaacatggcgaaaccccatctctactgaaatacaaaaattagctgggcgtggtggcaggcacctgtaatcccagctactcaggaggctgaggcaggagaatagcttgaacctgggaggcaggcgctgcagtgagccgagattgtgccactgcactccagcctgagcaacaagagctaagccctgtctcagaaagaaaaaaaaaaaaaagaaaaagaaaaagaaaaaatatacacgtgaaagtggttggtaatatgtggcatgctatccaatatcaagtacaatttttatgatgaagtcgattagcaataagactattgctactggtgaaaactcaagaaataagactttacagcatgctgtttgtagatgcctacaaacccatatgaccatcccaccccaatcccctcttatgcaagtaataaaaactcatccaactagatcgatgaatggcatcagaattttaagacagagaacttttatgtttgtgaaccatattataaactggcaaaaagtagacatgaaaggcatttgctgtggtaagaaatcctgtgaattgtttagtaattagaataatcactctctaacgtttctatcattagctccattaaacatgcatacattcagatgtatgcctgccatattttaaaaatgaggtctaagctggatgcagtggctcatgcctgtcatcccagcacttgagtaggcagaggcaggaggattgcttcagttcaggagttcaagaccagcctgggaaacatcatgaaacatcatctctactaaaaataaaaaaaaattagccaggcttggtggcacacgcctatagtcccagctacttgggaggctgaggcaggaggatcacttgagcctgggaggtcaaggctgcagtaaggcaagattgtgccactgcactccagcctgggtgacagagtgacactctgtctcaaaaaaattttttttgaagtggagtcttactccacatatgtttacaaagtatttttaattgatcggtgtaccatactgatattgtaaaatcagaaagaaagaggtttcaatgtgcatcacatgttgtagattcaggatgcttcagagcacgtgaaaaagcagggtagggctaatgcacaaactctctcagccaaactcctgtgtctgccaagatcctggattaaaactcaataatggagatagcttcccaatttgttaaaggatagcactatttcaattttattattgtcctctaatcatttttcttacatcctcagtgcctgtgactattgtctctgagagaatgtgccataagatagcatttctgatttggcagaaaatgctatatttagccgttttaagtttgggttaatactaataatggtctccacgtagcacatacttgctgcatgggtgtcaaggatacaagtaaatgcctgtggttctaagcctcagcatggttctgcaagatagacacttcagtattatccctactttaaggataagggaaaggaggaatagagaagttaagtaacaaggtcacatagccagtccatggaggaaacgggaattcctctaggttgcctaactctagagcctgtgcccttaaaccggggcatatgaaatccatggtatcactcaagaaacaccataattttcaaatgccctgcttcttgaacatgtttgagaacccctggattcatgacctggtaaaaacaggaccattatcacagagtttgacataatgctggcttcatgaatatgaagttccaaaacaaaatttaatattagaacgacacagatgacatctgtatttttaggcacacattcacacacaagtgcacacacacatacacatcccataccctataccttagtcattttactagataacctgcctagatttattttattttggctgtgaatgaagatattcctcttccaattcaataaaaaagcacaacagagccataaatacagagatgaatgtaagaattcaaccatttgattgcattaattcaaagaactgattaaggagtcttcatacaatagtagaaatcagtttgatttattaagctacatcatcctcgaaatctgcacagagtggggaaaaaaataaaacctgtcactttaaagaaatacactctacaataaaaggaatgaggaaaaagaacacctaggataatttataaacatatgcataatctggagaaaccagctcacaactggatagttcattcctccaagtctgtgactgggggcagctcctccttcattccaccctccaactttcaattaggagagtaatatcgctttgttattgtttctccttaacctagaatagggcgatgcaaagacctgtaagttataaacactgctcagcaattaagcaggccattagtcttcttcagcattataacatcatggtgctcaactactctgtcctgacacatggccagggctgagtgtgacagtcaaaggttcccagcataagaggcttgcactctgctccaagggaatggaaaaagcctttgtccaaacaatgccaagagaaaacatgctaagactcttcctcctcaaagtgcggcccactggccttctgccccaggcaccacctgtgagctttttagaaatgcagtcttcctccaccctagacccactgaatcagaatgtgattttaacaaaatctccaggtggtttctaggcacagtaaagtttgagaagcactgtcctaggcttcagatgacaaccaaagcattccatcccaggagcactgctctaactgcaaggtgggtgaccagaaagttaagaaagtagaagtcttggaagaaatggttgacagagggcctggaaaagcttcacctacaaggacatggtcctactgaatcacttttaaagatttgcaagatctcatgtagcctgggatcaaggtctacttcaggaggccccaaggacaaagactgtgtagtttagaccagaatttctcagcagtggaactactaacaattttttttttttttgaaatggagtatctctctgttgcccaggctggagtgtggtggcgcgatctcgactcaccgcagcctctgcctcctgggttcaagcgattcttctgcctcagactcccgagtagctgggattacaggtgcatgtcatcatgcccggctaatttttgtattttttagtagagatggggtttcactatattgaccaggcgggtctcaaactcctgacttcaagtgatccgccttccttggcctcccaaagtgttaagattacaggtgtgaaccaatgcacccggccactactaacattttaaacagctaattctttattgtggaagggctgccctgtgcattgtaggatgtttagccatatccacggcttctacccactaaatattagtgtcacaaccaaccgccagtactgaaaatcaataaggtctccaaacattgccaactgtctccagggagataaaaatcacccccacttgagaaccactggtttagataaccgctagtttgtatgaatcaattcaatggcatgactgctgaaaatgaaatgcaataaaataatgaattgtacagtccccaattataaaaatagtataagcagaaggtcagatggaggaaggcaatgatctgtatctattctgccctgatcattccttcatgaaatactatgctcagttctggctccacgctcattaaaacaaaataaaataatttttttaaaccactggttaaattactatgttgatatgaaagcattaaagatagagatgtattggggaaccatgtcatatgaggaccaactgaggaaactgttatgttaaatatggagatgagaaacatataccaggtgtcttccaatagctgaagaattatgtgaaagaggaatcagaccaaactccacatggcttcaggaggtagaccccgtgatgttacagctgactggatattaaaaagagaaaggaccattttacagtcagagttgcccatagagaaaagggttgcaccataaggtagccaggaccctaccaccagaagacaacgcaagatgtagctagatgtcacaaaggtagagaatggaccctgtgctaagttgaaatacggcaagatcattcattcattctctcattcatgcattcagcacatatttattacacgttggatataatgcaattgcatgcatgtaatgcactacagaattgcatgttctaaggtgaaacagaattggtcttgaccttttaggagttcacagagaggtcaactggagaacacttaatgattaaggcacagttaagtgggatggaggggggatctggcccagtattctgtcctgttctataataactagccacttgataaatcttcctgaatggctggtacagagcaaagcagtgtaaggaagtagcacagggagagatcactgcagaaggagcagatttggactcttttcctgccacgtggcagctctgaaaacatggtcaagcctcaggtgggtgagaacatttctagttcaggattcaaagtgaacagagatttcaattatgctactgtggagtccctgctctctgagagcttctaattgtgcagggcacaccaggtcctaatattgagtaggtactccatgtttgctraagaaattagacaataagcatcccataaccaaagaaggcccaaagtgagctttctccttgtgttgggtaacaatgtcctagctcatgtaaacactaaatgtttcacttcctgttaattcattttgccagttggcaaaacagacagagctgtgcagttacttaaaagaaaacagctaccaccagtayaattcttagtaactcaggcctcacctcgggccaacaatgaaaaggtcctcttagctgaacactaattatcatcacagggacacaattaactatcgttttcatgcaaatgaaggatctaaacccaatttaaatggtgttttgtattttcttgtaatgtggcacaatgctgacaaggagaccaaagtaaatgtctccatgtgtctttaataataaccttagaggaagacatattttatcctaaaagaagtgggtcagtcacatgaccctaccaagcaagtattaaaacagctgttctatgcatagaataacattcctttaatttactgtgtttgctttttagaccctattttgtttttccattttgaagaactaaatgccccagatgaatcagtcaacaatatgtyggctgctctcacattcagccttctgctgttttataatagtacccttatcttatttcaagaaaagaatgacaaacttatagctgcaaatgctaaatttatggggttctttgtggcaggcattactgagaacagggctaaggaaacaggtaagacgtcctggaaagaagaaacctccataaatacaaggccaggcctcaattttcatctgagccctgcaatccaagcagttttcactacctatttgaattttttaaagatgtatggggcaatcaaaggtgctgagtgctaattagatggacaaatgaatggtcaccctcaaaaggcacattatgcctagtcacagctcttctgaatgccctggtcgctactttaatagctctktgactttcaatggtacaaggtcaagaagagttgccttttgctggaaccttcccaacagaccccattctgcccaccagaaccggaagttgtgtctttgcaaaagcaaccagttagaatgggaggaatgcaagcctttgtttcaccaacatgatgtcaaattattagtagggggcaccttttgtttttgctgaatggtctggttttcactccctctggcattttaggaactgagtaggcacaacttttgatgaagggaattccattcaatgtacaattaggaggcctgtaaaaatgaatctcaagagtggctttgaccaaagagcatcccaggaaacacaagtttcacaagatgctttgtagaaaaaaataagttttcacaaataattttaggaaattatataaaattaggacacattccatcattgtcttggagattcatattgtactttggaacattaaaggcttgagaagctgcaaagaaaggaagcttgcttgactttgtttgatagagtattttgtggccttttgataaaaaattcctttttcatataactcctttctggatcatcaagcacatattggactttccatccaagtgtctgacccatggtctgtctgcagagacaggttgatatggtagctagagcacttccagtgaataacttaagcactggagagaacaaagcctaacgttttccaactgcctcataagctaagaagctacatcttacagatccaacatgagactttgcacctttcaggattcccatgtgtgccacaagtattatcaaagcagcaaaataatgcctggacatgtgagcctatgtgagattcaagctcataattctattatgttcatttttctactcttcattcctttctctcttcatcctaccttgtgtacccggatacccaaacagtgttagagcccaggcatccctgactgccccatgacaaaaaaataatggaagcagatgtcaggaaagaagtgttaggagcctcagattttcccttccattttccaagggcatgggatgcaattgagatgctcctgattccaaaaactttttctcaaaacacaaatcttatcctgttcttgtccatccgaaataactcagtggttcccctactacaaacaggccaaatctaagcacttctgcaacagactcaaaattcttcatactctagtccctgtatacctcttagcccagtggtaaccccaacctccttgcaaatgttgctcaagcaatactgcacaccactaattttctgctatatcctgtcccttcaagtctctgtacctttgcactggctctactccctgcctgaataaatgccattatttgtccaccatcaaaatatcaagtatgggttgacgcaagttagtgctttcaagctaaataatgaatacacagattctacctcctcactttacagtcatcatttctcctgaaagctccagttagaattagcttctcctgctgcaggcctctccttatacacattttatcacattttactataattttctgcttggatctctgactccctagggccatgctttactcatttttgaagctcactgcctatcacagtgactggcacattgcagacagcaacacatttttgttttctggtcagtttcatgggcatatattctgttcactgtcattgaagattgcacagctactagaagtacataaaaaataagggcacattcatcttagcttcttctcttcccagagatatgcgataataataacatctggtgtatttgggattaaaaataacaataaaacaaaactcaatattctaaaagagcctaaggatccccagatgaattttctgggaaagttcttggtcaaatgacaccaccagttgttagcctcagaggtgcctttcctttaaataccggatctttccagtcatggacttccgaaatcactttaaaagagaatgattgaagcagggagcctaattattatttaaaatgacacaatgaaaacagtctgcaatcaaagacatgtttaaattttttaagtacagaaacaaaaacagtgatactttaatggagcactatcccctgcgatggcaaatatgcatttccatcttggctccccgcttcctttatcttccatcacattgctaacaggcctgactttgcaggaacagcaaggaaactccgacacatgtacagcttcaagaaacacgctcatatctctaactaaatatttatgcaacctagccttagtccagcgatgaccactctccaaagcattttatatagcatttatagaagccataaatgttttaaaagaggaggggcatacttaaaaacattttataaagtctttaatttgctttcaaatatattgtaaggcattatgagtcacagagttcataaagtagtgggatatatgcataccttttcaggccttcaatttaacttcacaacacattgttcggagcagtgcaagtctgagctctacctaactaaatcacagggtaatagactagagagagcacgcccattcttacctttagcaggaatgactacaaagagttccaagttagtcctactctttttagaaattgctgggaaagatttctaaaaaatttccctccataataggatgtcttaatttatgacagtttaaatgaatcttatgttgctgcttaaatcacatccagccaatgaaattttaactatcaacaagaaacagcaattttcaatacccctcctattttaaccatttcattttctgagatattcagggagccatgcattcaatagctggtatacctcaagatgattggcattgaaatagccagggctgatcttaagatgcgtaaaattactcaaactcaagaagttccatctgcatgttgactagtcgcaggccttttggagggctatttttgtcaaatggaacagctgtagtttcttctcttggcccctggtctgatcaattgttaaataaagaactggacagttgggacaatctgcaccaaaatcaccatggaacttactgaagaaaatgaagagtcccaagctctgtgtcatatctaagaaattagactcactggaggtggttcccaggaatctgcatatttaacaagcactctagaatattctaaaagagcacactagaatctaagaaccaaggaagcaagtgactgctgtttacttttaacttaggagtgttggtaacagacttgggaagcatatcaccctatccaatgccaacaagtttttcacacttacacaaaggactagacgaccctactccatagatgttttccccacaggcataccgcacgcgagacctgggtttgttattctgctgtcttggccaatttgcccacaagtctttttctgtacctcccatgtgttcttgctcattttgaacctggtgccactcccagaagatgtcctggaacctttgtcatgatcagggcctgtgtgggaaaaggctttttctaacgatcgtttccagtgacttggaagtaagttggatacatcacttataaataatctcatgccctttgcaaggtaatcgaaagagtcattttggcatttccttaaccagccactggaatcccttcatgggatttaaggacccaaactgcagacagtctgtcactaaacagctgctttcactgccctcctaaaagggccctacagggtggtttccatgcctcagaaatctgacatttagaagcaaacacctgccttctatccactctccaactcaccagccacattccccaagttgcctagccattagctcaaacacagactctcaattcagttgatttaatctaaggcagtcatgggcatcagcctcttatcaggggctgaggtgtttggggaaaggttagaaggaatgaagtgacaaaggattcaaatatcctgcagttaaattgagtaaatagccgctcatttcaaagcttcagatttggaaagaaaacagctcagggctatagaggaaaatggggaggggacactcaacaccatccaggatctatgtattctgtctgatttatttaaatagaaagagacatagtgcatttataagaatcactttagcttttgtatttatcagtgcaccccatcttaccgccattacagctctgacagaataattaatttcagtcaatcaatcatttaacaaaaactcgcaggtgacctcaacataccatataagccacagagaactagtcacaacagcagtcttcaaattcccttggaaaggaaaattaagcctgctatgtgtggcttggggcaacctaagccgtaaatctctcttttctgatctcttcatatagatgaaagagcaaagccgctcggggttacatacaacaattatgtgttcaccaaacttagggaatcagcttgcagacagccctaatcattaccaattaaccacgtctgctgacatcctgtaagagctgccccagtgctgctgaatacccggccctcccttcaggcaaccaatcccttatattacagcgtatgtgttttggaaggcctattaatgtttgttgacaattccaaatagaggtcacctgttgtcatggtgcaaaataccctctttccccctctgaatgctaggcagggagggcagctttgttagaaacacttcaatgcatttctatattgccaccaacattcagatctgatgaaaagagatttagggtctcccaacttttcaatggcaattcccacctgctaccacacacccatctgggactgaaaggaatctcctccttggataataaacttgacagaatgtgttcaggccctaggcctccaaaggaaaatgtccagtcactggcagtcaaatcaaaacatgaagatttaccaaaattgtcagaaatgtaaaccttgaaaaaggttttcattccactggaggcaaagtggccttttcccatttaaattattctcatttaatccctagacccccagaacttgcatttagggattctgttgccaattttgcacagaagtcttttcctgtacttccagggcgtattcttgttcagcttgaaaatgatgccactttagaaaaatccgagtggaaattttttttttaaatcctaatttaattaaatgtaatcattgtttaattacttaatccagttcaatttctctcatttgtgccgaggaaagagaagcattctgcaaaaatgaccagtttgaattgtgagccttcagacagagaatctttgtccaccttgagcttgtgacagtctccccaagattgcttcttccttgaggtcgaggctatgctagcacaagaaacaagtcccacagtacctgttggagctggctaccaaggaggaacccagtgcagggctactagttgcggtgcgtagccagatttcacttcaccctctagaatcataaaatttgatgcactgtgtgcagggcgcatcttcctttagtggtgggtcagaggtgagcctgaaagccactataaggacaggagactagacaagcactcctttcctccaggttttggattatctgagagcatcttgtgctcaggatctaggctcccagctgtatgctgaagggccctgggtcaccacagcaaacacataggaacactgtgggacatttaaattaatttgaacttaattttgaaatatgttaaattttcaaggaaaatacagcaatacatgacatctgtcactctgcaaaccagtaggtcaatgtagttctcagtgtcaacattagatcatgctacattccttctgattatgccatatcttttcaaaagtgagatttcagtggttgctgtgataaaaagcaagtactgcatgaaaatcagtggggaacacaaaaacagggtggtactgtccaacctgattccaagatttgtgatgctgtgcagtacccaacaggtacacacatctcactggtaactaatttggttatttaagaataaaaacttttttttttttgagacagaatctcgctctgtcacccaggctggagtgcagtcgcacaatcttagctcactgaaacttccgactccagcgtcaaagcgattctcctgcctcagcctcccaagtagctgggatgacaggcacacaccaccatgccc

SEQ ID NO: 7001 - DNA, 21525 bp, Homo sapiens
  misc_feature (1)...(21525): n = A,T,C or G, or insertion/deletion polymorphism (see Tables 1-2)
acttgaaccccagaagtcaaggctgcagtgagctaagatcatgctactgcactccatcctgggtgacagagcaagaaccctgtctctaaggaaaaaaatagaaactgctgtcattgaatttaacattatctatgggtctttagtttgccatgaattgtcatcagcagtcagcatgagatacccaaatacaaaagtacaaaggaaaaaatacttttcactttgtaaaactgaacgcacacagcattacaaaagtgccctttgagggccgggtgcagtggctcacgcctgtaatcccagcactttgggaggccgaggtgggcgaaccacgaagtcaggagttcgagaccagcctggcgagggtggtgaaacccctctctactaaaaatacaaaaattagccgggcgtggtggtgcgcacctgtagtcccagctactcgggaggctgaggcaggagaatcacttgaacctgggagacggaggttgctgtgagccgaaatcgcaccactgcactccagcatgggcaacagagcgagacatcacctcaacaacaaaaaaaagagtgccctttggaaaggtgaatgtctacatagtgtgagtttaatggagtcacatttgtctaaatagaaattcctctcaacctgtcattgcactctcttgccactgtgaacgtccaccaatagtgtcccatttgaaatatacaaaggcagtaacgtaggccccagaaaaatagggttaaaatatactgggattaaaatgttgccgaggagtcaaatgggtaactgaggttagcgttgacccattagtacatgttaggcagagaattagctattcaccttggtgtagaattgatgtttgatttctttgtgggatcagagggcccacccctaacaggaagtgaccaagggtcatgtagagtagaataaacaaagcatgtgaaacagcatgagaggcacagagaggcagcgtgtgtggtgagaacacttactgaacacattacagaaaattattattactgccgcttcctaagctgtaaacttttccaataaattaactaagttttataagcctcagtgtcctcatctgtaaaactagggtcaccatagcactgtcttgagattgttgtggaagctaaatacaaaatatattactgagctattttgccattgaaagtaatggcaaaatccacacttttggaccaacctaaatatataaacatgagcatacaagacctggaatgcactttaaaatgtgtactgccaaagctgggcacagtggcacgtgtctgtagtcccatctgcttgaaaggctgaggtcggaggatcgcaggaacccaggagttctgggcagcagtgaacagtgactgcgattgtgagtagccttcactacggccgggcaacataacaggattctgcctctaaagaataataaacataaaattaacttcctacccactgtctttcagggcaagccataactgtgaagggaaacaagttaaggaggacaactgactgcctaaggaaggttctggagtgtggacaaaggtggagatggctacttccactgattaataaaagccttctaggccaggcgcggtggctcatgcctgtaatcccagcactttgggaggctgaggcaggcggatcacctgaggtcaggagttcaagaccagcctgaccaacatggagaaaccccgtctctactaaaaatacaaaattagccgggtatggtggcacatgcctgtaatcccagctactagagaggctgaggcaggagaatcactttaacctgggaggtggaggttgtggtgagctgagatcacgccattgcactccagcctgggcaacaagagcgaaactccgtctcaaaaaataaataaataaaataaaataaataaaataaaataaaagccttcttcatgtcactattataaacagtacaaaccctcagctgctacttttggcaaactttttttttttttttttcctgagatggagtctccctccgtcacccaggactgagactggcccaatcttgcctcactacaacctccatcttccaggttcaagtgattatcctacctcagcctcccgagtagctgggattacaggtgcacgccaccacacccagctaatttttgtatttttagtagagacagggttttgccatgttggccaagctggtcttgaactcctgatctcaggtgatctgcccacctcggcctcccaaagtgctgggattacaggcgtgaaccaccatgcccggccttggcaaacttttgtaaagggtcagatagtaaatattttaagctttgcagtaaatatttttactcactattgcaactactcatgccagacattgtagcaaaataaaaagcatttcataggcaatatataatatataatgcatgagcatggcagtgctccaaaaaaacttttttttttggagacagggtcttgctctgtctcccaggctggagtgcagttgtgagaccatggcccactgcagtcttgacctcctgggctcaagcaattctcctgcctcaggtcccagaatagctgggactacaggctgcgccagcacaccccactaaattttgtatttttagtagagacagggttcagccatgttgcccaggctggtctggagctcctgggttcaagcaacccacccatctcagcctctcaaagtgctgggattatagtcgtgaaccactacgcccggccattttttttttcttttcagataggatcttgctctgtttctcctgctggaatgcagtggcacaatcatggctcactgtagcctcgacatcccagactcaagtaattcacttcagcttccagagtaggtgggacaacaggcgtgcccactgagcctggctaattttatttttgtagagatggggtctcactatgttgccaaggcaggacttgaactcctgggctcaagtaattctcctgcctgggactcctgaagtgctgggattacaggtgtgagccactgcaccctgcctccaataaaacttaataaatactaacagttacttccccaagcattgaaaactcttctacaacatgagttttaatgatggcataacagtccatatagattttcatgatttatttaacaaagtctttaatgttggacatttagtttctctttatttgcttacctcaatcggtactcataattattttgtaacaatttctttttttagacggaatctcgctctgtcacccaggctggagtgcattggcgagatctcagctcactggaacctccgcctcccgggtacaagcgattctcctgcctcagcctcctgaacagctgggactacaggtgcccgccaccacgcccagctaatttttgtatttttagtagagatggggtttcaccatattggtcaggctggtcttgaactcctgaccttgtgatctgcccgcctcggccacccaaagtgctgggattacaggggtgagccaccatgcccagcctatagaaattatttttaaagtcgggatgagaaaaaaaaaaaaagaaaaaagaaagtggggataagaaaaagaaaaattgctcatagaccatttattcagagattataactgccctcctcattattatatatgcttttcaggcttatgattacctttattatttatttatttatttatattttttagacagagtcttgctctgtcatcacccatgctggagtgcagtggtgcgatctcagctcactgcaacctccacctcccaggttcaagtgattctcctgcctccgcctcccgagtagctcacattataggcacgtgccacaatacctagctaatttttggttttgtgtgtgtgtgtgtgtgtgtgtttgtttttgtttttttttttttttgacggagtctcgctctgtcgcccaggctgtagtgcagtggcatgatcttggctcactacaacctccacctctggggttcaagcaattctcctgcctcagcctcctgagtagctgggattataggcatgtgtcaccatgcatggctaatttttgtatttttagtagagatggggtttgaccatgttggtcaggctggtctcaaactcctgacctcgtgatcgcccacctcggcctcccaaagtgctgggattacaggcatgagccaccacgcccggcctaatttttgtatttttaatagagacaggctttgccatgttggccaggctgtattatcacctttaaataaagctggggttacactgtacatcctatattgtaacctgaattttcacttcaccacagtaatgaaggtcttctccccttctgaggtcctaaacttagaattgctggtctctgacttccattattctagttttacttctgtcttcccactgtctcacatctactcccataagggagaccacactgaccatctgctcctcttggcattatatttcttactataaaactacacattggcacctggcttgcacatctgtctcttaggagtttggttactgttagctctgtgagcctgagtgatcacctcaactatcctagcaaaataggagagttggggccctccaaagctgagaatttgggcattatgacctaaataaagcaacacaatactgtctgagcaactagtcaaacccaaccagcctccttctctgacaactttattttgctttctttaagtgccataccaattattataagtgatgactagtatttatcattttaaatggcaaacaaccctaaatggcttggtggagggcaagttcagacattgtcctggagactggctgagagtagaagcccctctgcagtgttctttgaagtgctgattttagttatataaaatgctaaattgcctctcccactgtcagaatagccttttatttatttatttatttatttatttatttttgagacggagactcgctctgtcccccaggctggagtgcagtggcaccatcttggctcacagcaagctccgcttcccaagttcacaccattctcctgcctcagcctcccaagtagctgggactacaggcgcccgtcaccacgcctggctaatttttttttttttttttgtatttttagtagagacagggtttcaccatgttagccaggatggtcttgatctcctgacctcgtgatccgcccgcctcagcctcccaaagtgctgggattacaggcgtgagccactgtgcccagcccaaaatagccttttatacctcttcctgtttatgttatcaagaagttagtatgtagacttcagaactcaattttgatctgctcttgattaaaccttggtttacagaactacggtagtttttcacattgtagagaaaaagttgaactattttaataatggattttctgtgtgtatagaaactcctacaattgatttaaattttttttttttttgagacagattcttgctttgtcgcccaggctggagtgatctcggctcactgcaacctccacctcctggattcaagcaattctcctgcctcagcctcccaagtagctggaattacaggcacccgccaccacactaatttttgtagtttttagtagagatggggtttcaccatgttgcccaaggctggtgtccaactcctgacctcaagtgatctaccctcctcggcctcccaaagtgctgggattacaggcgtgagccaccacgcccaaccttgagttaaatttctaaaaatctcaacataatgtgtttggctcctcttcttattatgcttagagttaggcactagcacatactagacctaaacttgactgatttgaaaagaccactgaaatccatgatttgctgcggatcctctgtgtctgctgtggccaatataaagaaacttggatgcacttaatttatgaagacaagctttgttgatctggaagttgaatgataaatgtgaatccaatgacgccatacccctgcggataatggcaggctggatgtagcatgttagccgtcatattctgtgtgctccctgcgatgtgggcacttcccttccatcgtggtgaggccaaagcaaaggcacagagasctgaacacaaacatgaaaaacaccttaccacctgggagtcaggggcaggttcaggcacatccattcctctggcatttgagcagctgttttccacagcattaactcagcacggcagggtaagtcagattaaaaaccaataaaagagtagtatcctcataccaccctcaacgtcttcctgcttcaccaaaaaaccaataaaagactgaatgtggccctttatcagctagacctcaaaatcttctttgctttctatgcgtatttccaataaaaaagtacaaggrttgttaaaagtccttatttatttatttatttatttatttatttatttatttatttttagaaccagggtctcactctgttgcccaggctggagttcagtggtgcagtcatagctcagtgcagcctccaactcctgagctcaagtgatcctcccacttcagcctccagagaagttgggactacaggtgcatgctaccacgccaggctaatgcttttggttttttaagagttttgttgagtcagggtcttgctatgttgcccaggctggtctcaaattcctagcttcaagcagtcctcctccctcagcctcccaaagggttggtattacaggcatgaaccactgtgcctggccttaaagtccttttgaaacacaagacaagaaacatttggccgcgcacagtggctcatgcctgtaatcccagcactttgggaggccaaggcaggtagatcatgaggtcaggagttcaagaccagcctggccaagatggtgaaaccccatctctactaaaaatacaaaaaattagctgggcatggtggcacgtgactgtaatcccaactactcagaaggctgaggcagagaattgcttaaaacccaggaggtggaggttgcagtgagccaagatctcgccactgcactccagcctgggcaacagagcaagactctgtctcgaaaaaattaaaaataaaaatacaaaaattagctgggcatagtggcacgtgcctgtcatcccacctactcaggaggctggggcaggcgaatcgcttgaacccgggaggcggaggttgcggtgagccaagatcgcgccattgcacgccagcctgggcaacagagcgaaactcagtctcaaaaaaaaaaaaaarggaaacatttattgaacacctagtacattccatgcactgtagtgtgtgtggttttatttaatttcatctctgcccaaccctgggaaacggtctattagcagacgcagaggataaggcacaggacgatcaggtaacacacccagggccaaatatcataaatggcagaattcaaattaaagccaccttccaagccatgtccctcccatcgtcacaatactgcatgtctacagcacagttgatgggcataacccttcttagcaacagcaagcagctgagcagaaagtaattgcaggaggcagagccaagaggaaaacygctgagagtgctgacggtaggtggagagaacagaagcacacaccgtagggtgcaatcttagtgagctttgttttccttcaatagaggtgagttcagacccaggcatgtctctccaacattcatttcccctgcttcggcaccatagacttgaaggattggactcaggagttggggaggacacgggggaagttgctttcctggtgctgaggmccccggccaccgtggtagtgtacagcaagtacagggtaacagaagggccagcaggaggacacgsygcaatggtgtaccgagggacaggagagtgaatcagagccacaggacagagctccacctgtytccagggaagtgcatggggggctcccggaagccaaaggcagcgcccagaggcagtgtgaagaggccttcctcagacctcagggtttcggcagggatagtgggtgacctgtgtgctggctctccagaaactgaaagcagcaagagacacttgggctccttttttagtttttctggtttgttttgttttgtttttttgcaggcactcggtggttagctggaaataaaggtggaggaactgggcagttcaaaggcagagacggcttcccccacccccacctcacctcccctttcattcagaaaagccacaaaagcgtggccccagggtgtgtgtgaaaggagggaggagtgactccacctagctcctctggagtaaagagaggctgtgggcctggtgtcgtgcgtgcatgcctgcatgtgcctgtgtgtgtgcatgcttgcctggtgctcaagggtcaggggaagctggctgagaagactgaggagatggagggaggtggaggraagtgtaatagaaggaggtggaggaaggtggctgccatagagctttggctctggctggcctgagtctcttcctgaagttgcagctgcactttggggccaggcgctgttgacactgtgggtataaacatgtggccagcagcagaatagagactcagagtcttgagaaagaaagtggtgacttcccactcctccttccttctttcctgtacagagtctgccatctgggggcagagatatgggcaagccctcattataatactagcagtgaagggctgggcatgacaggtggaaacaccactgactctagaactcagagcatggaatttggtatggtggcaggcaggggtccagaggtagtatttgttatctattgctgtgtaacgaattagcttaaggtatagcagttcaagagaagaaatgtttattatctcacaatttctttgggtcagaaatacaggtgtggtttagctgaatgctttctggctgaaggtgtttcaggacgttacagtcatgccaccagctggggctgccaactcatctgaaggctcaacacagggggaccggagtccaagctccctcacatggtcaccagcaggattcagttcctcgaaggctgtcatttagaggcctccctccrtccctccttacaggtccttctcacagggcacttcgtgacatggcagctgactttctggrgaccatccaagtgagaaagagcccttagaaagaagtgacagtctttatataacctaatctcagaagtgacaactcatcccttctacaaggttctattattcaaaattgcatctgtaaatccagctcactcaagggaaagggattactaggagataggggtcactgggggccattctagaggctccctgtcacagcatccaagctgagacctacagaatgacaggagttcaccaggcagggaggcaggagggagttgggggacggcaggtgcagtgaaccatggttgtaactcagtatggctgcacagagagcactgcctgagggtgagcagtgctgtggagaggccagcagggcccagaacttgtaccatcttttaacccaggtttgtaagggtggactttatcctgcaagcatgaagatcctaaagcttgaggctaacggttaagatttggctttagaaagattacactgctggcccagctcagtggctcacgcctgtaatcccagcattttgggaggctgaggtgggcggatcacctgaggtcaggagttcgagaccagcctggccaacatggtgaaaccctggttctcctaaaaatacaaaaaaattagctgggcatggtggtgggtgcttgtaatcccagctatgcgggaggctgaggcaggagaatcgcctgaacccgggaggtggaggaggytgcagtgagccaagatggcaccgctgcactccagcctgggtgacagagtgagactgtatctgaaagaaaggaaagggaaaaaaaagaaagaaaaaaaaaagaaaagaaaagaaggaaggttatcactgctgtggggagaatggattgaagagagtaaaagagcagaggaaggccagctggcgggtgcggcaggtggggggattgaactgaggtgctggagaggctgaatggctggcagcagcgctgctgcagagctggcgtccctgggtgtaggaactgactgcttatgtccgtcttcctcctctggaacataagctcaatgaggacagggattcttgtttgtagtctctggtatccccagcgtttaggacagtggcactagatgaatgactaggacaccccaaggtttctggcttgagtaactgggtggagctattctctaagctgtgaggcacagagggcaaacatggacagaaacttaatatttgagaaatactgagtttgaggtgctttgtaggccatctgagaataaatgcctcgtaggcagttgacatgyggggatctggaaagcctcttaaagaaatggtgagagatggagacttgaaaatccaagcacctagacgcccgtgatgggagtagttaacatggccctgggaccctttcccagagtttctaggacaccttacgcagcaacagtgcttgctttgaaagatagtaaaggaagaaagtcttgccaattgtcattcacaaaagaaagtcaaaaatatgttgccagagaggacaggagaaagccaggaatcacgggaagccagaagagagcttcgagtactatgagaacagcacagtaggttaggtaaggactgaaaggaggccggtgagttgaagcccactgtgggtggggaggaaggagaaaaggaatgttttccagaaatgcaaagcattacttaatatttattttattttatttttttgagatggagtctggctctgttgcccaggctggagtgcagtggcacgatctctgctcactgcaacctctgcctcccgggttcaagtgattctcctgcctcagcctccagagtagctgggattacaggcgcccaccaacatggctggctaatttttgtatttttagtagagatggggtttcaccgtattagccaggctggtctcgaactcctgaccttgtgatccacctgcctcagcctcccaaagtgctgggattacaggcgtgagccaccatacccggcctattttatattatatttattttattttatattttttgctctgttgctcaggccgaagtgcagtggtacaatcatggctcactacagcctccacctcctgaktctcaagcaatcctcccaccccagcctcccagagtgctgagattacaggtgtgagccaccacacctggcctccattacttaaaaatgttttaaaggctggacacagtggctcacgcctctaatcccagcactttgggaggctgaggcaggaggatcacctgcagtcaggagtttgagagcagcctggccagcatggtgaaaccccgtctctactaaaaaatacaaaaattagctgggcgtggtggtgggtgcctgtaaacccagctacttgggaggctgagtctggagaattgtttgaacctgggaggcagaggttgcaatgagtggagatcatgccattgcactccagcctgggcaacagagtgaaactccgcctcaaaaaaaaaaaaaattaaaactgtcacttccaaacaccattaaaaaacaaagtgcctgattcggccgtacatgtactaaaattggaacactggaacggtaacagagaagattagcatggctcctgcacaaagatgacacrcaaattcatcaagcattccttttttttttttttttggagacagtgtttcactcctatcaccaaggctggactacagtggcgtgatctcagctcactgcaacctccacctcccgggctcaatggattcttctgcctcagcctctggagtagctgggactataggcatgcaccactgtgcccggctaatttttgtatttttggtagagacggggtttcactatgttacccaggctggtttcaaactactgagctcaagcgatccacccgcctcagtctcctaaagtgctgggattacaggcgcgagccactgtgcccagcctcatactttttatattcattttgaaaaaaaccaaacatacaaaatatagataagcatttagatcacaagttccccaaactggtctttgtagcagcaatttaggaatcacctgggtggtttttaaaaatacatattctgccrggcacggtggctcactttgggaggccgaggcgggcggatcatgaggtcaggagatcgagaccatcctggccaacacggtgaaaccccatctctactaaaaatacaaaaaaattagccgggcatggtggcgggcgcctgtaatcccagctactcgggagactgaggcaggagaatgtcatgaatccaggaggcagagcttgcagtgagcggagatcgagccactgcactccagcctgggcgacaagtgagactctgtctcaaaaaaacaaaacaaaacaaaaaaaaaccagattctgggtttgccccaattccataaaattaacctctcaagggtgaagcaggagaaactattttttaatgtgccaagtgactttgaagtgtgacaagctttttaaacattttatttggagttttctgcttttattatttttaattgacacataataattgtatatatttatgcggtaccatgtgagattttgatataggcatacaatgtgtaatgatctaatcagggtaattaacatatccatcacctcaaagagttttgacatcactcatttaaacctctaagaaatacttttcagctgggcgcagtagctcacgcctgtaaccccagcactttgggaggccgaggcgggtggatsacctgaggtcaggagttcgaaaccagcctgaccaacatggagaaaccccatctctactaaaaatacaaaattagccaggcatggtggcacatgcctgtaagcccagctactcgaaaggctgaggcaggagaatcacttgaacccgggaggcagaggttgcggtgagccgagattgcgccattgcactccagcctgggcaacaagagcaaaactccttggccgggtgcggtggctcacgcctgtaatcccagcactttgggagaccgaggcgggcggatcacctgaggtcaggagttcgagaccagcctgaccmacacggtgaaaccccatctctactaaaaatacaaaattagccggtcatggtggcacatgcctgtaatcccagctacttgggaggctgaggcaggaaaattgcttgaacccgggaggcggaggttgcagtgagctgagatcgcaccactgcactctagcctgggtgacagagcgagactccatctcaaaaacaaaacaaaacagaaaacaagagcaaaactccgtctcaaaaaaaaaaaaagaaatactcatttttctttgactttaagcccttttagaataaataaagcggtacaaaatattcatagattactaaactgttagaagccaattgttaaatttaagactttaatagggaacttaaagcaatcaagaaaataaactctccacaaagttttaaaaaacaactataaaatacatcctgtaggccgggtacagtggctcaatcccagcactttgggagaccgaggcaggcggatcacctgaggtcaggagttcgagaccagcttgaccaatatggagaaatcccttctctactaaaaatacaaaattagccaggtgtggtggygcatgcctgtaatcccagctactcgggaagctgaggcaggagaatcacttgaacccaggagatggaggttgcggtgagctgagattgtaccactgcattccagcctgggcaacaagagcgaaattctgtctcaaaaaaaaaaaaaaaaaatcctgtaggtttgttatcaagaaaatgctgatgactataattaggaytataaatttagttgagagtgagagctagattagtaaataaaattgtctataaacatttgtaaatcagtcatcctcctgggtacggtttgtaaaagaacccagtgcttaagtgaagagcagggacagctcctggctctggatgggggagaagtcttccttgtttcatagtcaaggaaagctcccagctgaccatcaccctcttctcttggaaaacgccacacctaccttcttgccattcctagagcgattttccagcctgagtggtatgactgcttccatttcctcgccactcttgtttgtccctggcagttcactttgattctcaaaagtccattaaaaccccttccaggtcctccgggatccctggccatgtaagctctgccaccaacagcagcctttctagtacaaagtctctagagctttccacagcctctggcttggtctctccctctccaggctggccacaggcccccagggacctatctgccatctcttggaaatatctttctaaattccccactccccctcctgcctttccacgactttgagttgcaatagtttgcccagttccccttttccttgtagtctttaaagataagtccacaggtttttcatttgtttataagatttactctccatcaggaaatgaaaataaacatagggaagctgataagtcacagctccccacccccagccgttgttccggggaagcctctctagcaaggctcagatgtttccatcttaaggttaaatcacaccaaacaatagaagccctttggtttcacctcagtgggcgggatgtgcctcctttcatggatctcctgccccacacaggatttctctggactccttagagtgtttcttcaaaactagttcaatctcgatctaattagtccccaaagagatgcaaaccaaacgagatgcgatttttgttctattaggagggcacamaaataaaaaataaaaattaagcctgataatagcctgtttgggccagcttgctgggaagcggactcatttttatactgctggaggggttcggaatcaagaatcttaaatatgtgcatccccttcaatccagtaatcccacttctaggaaaatatcctgaggagataatcaagatgtgcagtcaagaatttatgaacaaaagatactcactgcagagccataattgagaagaactggaaaggacttaacatgcctcccaggtggggcttggctctgcaaatcctcatctgactctatgatggaatgggatgcatccggtcatgcagtcatccgtgcgacaaatagttcttcagtacctactctgcgttaggtaaacaatgcagagtattgttaacttggctgggtaaacaggtaagttctcagcccccctggaaaatccatgatctcctaaagtaaagcaatttaaaattgttcacattatttgtgtgtgagtgtgagggggcgctttatcaccctccacctctcatycccccaccacaagcagttgccaaattcaaataatttttccttcaatgcctctcccgtgtgaccgctccttttctttcaaaagtaaatcctatgtctgggaggtaacccgatcaccgcggaaagaacgccgacatggaartcttaggattggtttctcgttccaggaagttgcgctactttgggcaaatcacgtcacctctgggactgtttctaatcagaataaagaaagggctggaccaatctttcagatcctttgaatccaatcatttttggccttatgacggaaccgtctgtagatgagggcatctgaatcctagttaaagggaagggacggtgaagcccttgaagatctggggcatatttcctgaacaccaaaacgggaaagggctgtctagagtgaaagtataagacagacaggccctgttccaggaagctccctgcactctgctcttctccccaagccgaccccaaactcacagccagctttagcaagcaggcccgtcatccttccaggtgctatgtaatattaagaagcagcagctaacaattattagtgctactaggggcaggagatttgcagttccctcgctttcacacaaaagtatgaggtctgttttattattcccactctaaaggcaaaatggaagctcacggagattacagaacttatgggaagtgacagggctatttgccacgtttatactggccagtcttcctctttttctcaaagggtggggtgggagagcagcctcccgtgttatcaccctctcctgcggcagaagacagaagcataggtcattttggtagtacgggtttgttgattaccaactgggagacagaggtgaggtaaatcacaagcatggatgttagcagggctgcagaagtttataaataaatgatcttagaatctccagcagccccgttctttcatttggtaaccggcctcctccctgccctcatccctgtagcgcccttcccccatgagggtgaagggtcagctctaaaaatgcagtcaggaaggaacaatgagagtcctctccccgcctgggagaaatgcaatttgcatctcagatgagctcagattggtgaagcctcgtttggactctgatccttgcagtaaggatctgctctgggaatctcctgtgacctgttgaggtttgctgctccaaaggaataaggagtctttgacattaatgtccatttaactcagggatctaaaaaggcaggttagtgttagagttctataggcaccccagaattgtacctaagagtgtgtgtgtgcgtgcatatgtgtgttttcctggggatggtgtagctttccttagattgtcaaaggaatttatagctgcccaaaggttaaaaacttgtgtgacaagtgagtgtgataaaggaggaacagtggtgcagatcctgtgggaggggagaatgacttaacaaacccagaggtgggggtgggagggaaagaattcaggtgagactgcactcagaggtaggattcctttttcttttttgtaggtaacattttttgttttcttactgtgtgccaggcattgttctaaactaaatatacaaggccaggcgcagtggctcactcctgtaatcccagcactttgggaagccgaggtgggtgggtcacttgaggtcaggagttcgagaccagtctggtcaacatagtgaaaccccggctctactaaaaatagaaaaattaaccaggtggctcgtgcctgtagtcccagctgctcgggaggctgagagaggagaatctcttgaaccccggaggaggatgttgcagtgagctgagattgcaccactgcactccagcctaggcaactgagaagactctgtctccaaaaaaaaaaaaaaaaaaaaaaaagacaaatacgtaaactaaaatctatgagaattaggtaattctctctttttttttttttttgccagagttttgctcttgtcgcccaggctggagtgcagtggtgtgatcttggcttaccgcaacctccgcctcccgggttcaagtgattctcctgcctcagcctcccaagtagctggaattacaggtgcgcaccactaggcccggctgatttttgtatttttttagtagagacggggttacaccatgttggccaggctggtcttgaactcctgaactcaggtgatccacctgccttggcctcccaaatttctgggatgacagaagtgagccaccgcgcccggcctaattttttttttttttttttaagagacggagacttgctctgttgccaggctggagtgcagtggcgccatcttggctcactgcaagctccacctcccaggttcaagtgattctcctgcctcagcctcccaagtagctggaattacaggtgcgcaccactaggtctggctgatttttgtatttttttagtagagacggggttacaccatgttggccagactggtcttgaactcctgacctcaggtgatccacctgccttggcctcccaaatttctgggatgacaggagtgagccaccgtgcccagcctaattttttttttttaagagatggagtctcactctgttgccaggctggagtgcagtggcgcgatctcggctcactgcaagctccacctcctgggtttaagtgattctcctgcctcagcctcccaagtagctgggactactggctggcgccaccacgcccagctaatttgtatttttagtaaagatggggtttcaccatgttggccaggatggtctccatctcttgacgtcgtgatctgcccgcctcggcctcccaaagtgcttggattacaggtgtgagccactgagcctggcctaaattttaaactatttgtagagacagggtctcgctatgttgctcagaatgttctcaaactcctgagctcaagcaatcctcctgccttggcctcctgaagtgctgggattaaaggcatgacccactgtgtccagccttttgtgggctttttgacatccttttatgtttttctttggtgaagtgcctattcaaatcatttgcacgcttttttttttttttgagatggagtcttgctctgtcccccaggctggagtgcagtgatgcgatctcggctcactgcaagctccgcctcctgggttcacgccattctcctgcctcagcctcccgagtagctgggactacaggcgccggtcaccacgcccggctaatttttttttttgtatttttagtagagacagggtttcaccgtgttagccaggatggtcttgatctgctgacctcgtgatctgcccatctcggcctcccaaagtgctgggattacaggcatgagtgagccactgcgcccggccatttgccctttttttgttgttgggctgtttatcttattattgcattttgagggttcattatatactctggatacaagccctttgccagatatgtgtgttgctaatattctctaccagtctgtggcttatctttgcattctcctaaatttctttcagagagcatacattctggtagaagagtacttagtcctgggcctggcagatttatttctttcaggacccaaggcctctgctgcaaacatgttccaccagatctttggtcagaataagaagcatatgagcttgatcattgttatggtcacaacttttgtatcccctcaaaattcgtacattgaaacctaatctccaatgtgatagtattaagagttggggtcatttgagaggtgatgaatgggcttcacgcccttataagagggccaaaggagattgtttaccccttccaccatgtgagtgcacagctgtaaggcaccgtctgtgaggaataggctctcaccagatactagcaccttggctcttggacttcccagcctccacaattatgtctgttttttgttttgttttgttttgtttttgagacagagtttgctcttgttgcccaggctagagtgcagtggcacaatctcagctcacagcaacctcttcctcccaggttcaagcaattctccagtctcagcctcccgagtagctgggattacagccacccgtcaccaagcccaactaatttttgtatttttagtagagatggggtttcatcatattggtcaggctggtctcaaactcctgacttcatgtgatccgcccacctcagcctcccaaagtgctgggattacaggcatgagccaccacacccgacctgttgtttattctttataagtcatcccgcatatggtatttttttcttttctttttttgagacagggtcttgctctgttacccaggctggagtacagtggcatgatcatggctcattgcagcttcaacctcctgagttcaaacaatgctcccacctcagctttccaagtatctgggacaacaggtgcatgacaccatgcctggccaattttttgatatttgtagaaatggggtctccctatgttgcccaggctggtattttcttatagaagcctgaatgaacaaagacactgtccatctttttcttttttcttttttttttttgagacagagtcttgctctgtcacccaggctggagtgcagtggtgcagtcttggctcactgcaacctccgcctcctgggttcaagcgattctcctgcctcagcgacccaagtagctgggattgcaggcaagcgccaccacacacggctaatttctgtatttttagtagagactggatttcgccatgttggccaggctggtcttgaactcctgacctcaggtgatccacctgccttggcctctcaaagtgctgggattacaggtgtgagccactgcgcctggcccatcttttttttttttcttttctttttgtagagagagagagagagacagagttttgccgtgttgctcaggctgatctcaaactcctggcctcaagtgatcctcccaccttggcctcccaaaggatataatcccatgcctggaattacaggcatgaaacaccatgcctggccattcttaattttatgacatcctcacacttgtaatctcagcacttttggaggccaaggcaggtggatcaactgaggtcaggagttcgagacctagccttgccaacacacggtgaaaccccatctctactaaaaatacaaaattagccggtcatggtggcacatgcctgtaatcccagctacttgggaggctgaggcaggaaaattgcttgaacccgggaggcggaggttgcagtgagctgagatcgcaccactgcactctagcctgggtgacagagcgagactccatctcaaaaacaaaacaaaacagaaaacaagagcaaaactccgtctcaannnnnnnnnnnnnnnnnnnnnnnnnnnnnnnnnnnnnnnnnnnnnnnnnnnnnnnnnnnnnnnnnnnnnnnnnnnnnnnnnnnnnnnnnnnnnnnnnnnnnnnnnnnnnnnnnnnnnnnnnnnnnnnnnnnnnnnnnnnnnnnnnnnnnnnnnnnnnnnnnnnnnnnnnnnnnnnnnnnnnnnnnnnnnnnnnnnnnnnnnnnnnnnnnnnnnnnnnnnnnnnnnnnnnnnnnnnnnnnnnnnnnnnnnnnnnnnnnnnnnnnnnnnnnnnnnnnnnnnnnnnnnnnnnnnnnnnnnnnnnnnnnnnnnnnnnnnnnnnnnnnnnnnnnnnnnnnnnnnnnnnnnnnnnnnnnnnnnnnnnnnnnnnnnnnnnnnnnnnnnnnnnnnnnnnnnnnnnnnnnnnnnnnnnnnnnnnnnnnnnnnnnnnnnnnnnnnnnnnnnnnnnnnnnnnnnnnnnnnnnnnnnnnnnnnnnnnnnnnnnnnnnnnnnnnnnnnnnnnnnnnnnnnnnnnnnnnnnnnnnnnnnnnnnnnnnnnnnnnnnnnnnnnnnnnnnnnnnnnnnnnnnnnnnnnnnnnnnnnnnnnnnnnnnnnnnnnnnnnnnnnnnnnnnnnnnnnnnnnnnnnnnnnnnnnnnnnnnnnnnnnnnnnnnnnnnnnnnnnnnnnnnnnnnnnnnnnnnnnnnnnnnnnnnnnnnnnnnnnnnnnnnnnnnnnnnnnnnnnnnnnnnnnnnnnnnnnnnnnnnnnnnnnnnnnnnnnnnnnnnnnnnnnnnnnnnnnnnnnnnnnnnnnnnnnnnnnnnnnnnnnnnnnnnnnnnnnnnnnnnnnnnnnnnnnnnnnnnnnnnnnnnnnnnnnnnnnnnnnnnnnnnnnnnnnnnnnnnnnnnnnnnnnnnnnnnnnnnnnnnnnnnnnnnnnnnnnnnnnnnnnnnnnnnnnnnnnnnnnnnnnnnnnnnnnnnnnnnnnnnnnnnnnnn

SEQ ID NO: 7002 - DNA, 12957 bp, Homo sapiens
aggaggcagaggctgcaatgagcaaccatttattgcattccagcctgcgcggcagaatgagactccatctcaaaaaacaaaaaaacaaaaacaaaaattagctgggcatggtggcgcatgcctgtactcccagctacttgggatgctgaagcacaagaatcacttgaacccaggaggcagaggttgcagtaagcagtgatcccgccactgcactccacagcctgggcaacagagggagactctgtctcaaaaacaaaaaaaattcagtaacatttctatatgccaacagggaacaatctgaaaaagaaattaagaaagataattccatttacaatagctataaataatataaaatacctaggaataaactttaccaaagaagtgaaagatctcaacaataaaaactataaaatactgatgaaagaaattgaagaggacacacaaaaacatgaaaagagatttcatgtttctggattggaagaattgatattgttaaaattccgtactacctaaggcaatctacaggttcattgcaatccctatcagaatactaatgacattcttcacagaaattctacatcctaaatcttaggacttttgtaaaaaaaatcataaaatttttatggaaccataaaagacctaaaatagccaaatctattctgaacaaaaagaacaaagctggaagaatcacattacatgacttcaaattatactgcaaagctatagtaaccaaaacagcatggtactgtcataaaaacaaatacatagaccaatggaacagaatagagaacccagaaacatgtctagggtgaactcatttttgacaaaggtgacaagtgtatacactggagaaagcacaggctcttcaataaatggttctgggaaaattggatatccatatgcagaagaatgaaactagaccctcatctctctccatatagaaaaatcaagtcaaaatggatgaaagatttaaatctaatacctcaatctatgaaactattatatataagaaaactttggggaaactctccagaacattggtctgggcaaagatttcttgagtaatacccaaggagcacaagaaaccaaagcaaaaatggacaaacaggatcacatcaagttaaaaagcttctgcacagcaaaggaaacaatcaacaaagagacaacccacagaatgaaagaaaatatttgcaaactacccatctgacaagggattaataaccagaatatataaggagctcagacagctgtataggaaaacatctagtaatcagattaaagaacgggcaaaaagatctgaatagacatttctcaaaagaagacatacaaatggcaaacaggtatataaaaaaggtgctcaaatcattgactgtcagagaaatgtaaatcaaaactacaatgagatattatctcaccccagttaaaatggcttttttccaaaagacaaacaataataaatgctggtgaggatgcggagaaaagagaaccctcatacactgttggtgggaatgtaaattagtacaaccactatggagaacagtttggaggtttctgaaaaaaactaaaaatagagcttccatataatcctgcaagcccactgctaagtatatatacaaaagaaaggaaatcagtatatcaaagactatctgtgctgccatgtttatggcatcagtattcacaatagccaagatatggaagcaacctaagtgtctatgaacagatgataaaaaatggattaaaaaatgtggtacacatacataatggagtactattcagccataaaaaagaatgagaccccatcctttgcaacagcctgaatggaacaggaggtcattatgttaagtaaaataaaccagacacagaaagacaaactttccatgttctcatttatttgtgggagctaaaaattaaaacaattgaagtcgtggagatagagaatagaataataatttttaagtgtgtggaaaaaaataaggtaaaaggaaaaaaatttttttgaaagagagagagagaacagaatgatggttaccagatgctgggaagggtaatggtgggcaggatgaggggtggggtgggaatggttaatgggtacaaaaatatatttagctagaatgaataagatctagggatcttgtagtttttagcacaaagagtgactacagtcaacaataatttattgcacatttaaaaattactaagagagtataattggattgtttgtaatacaaggaaatgataaatgcttgaggtgatggatacacatgtaccctgatgtaatgattacacattgtgtgtgtgtataaaaatatctcatctaccccataaatatatatacaccagctatgtacccacaaaaattttaaataaaaaaataaaaaaaacccaaacatagtttcttttcagggtgcctgactttgaaatctcagaatgaagtgcccctgtaaggacgaatgaacaaatccaaaaaaaaaaaaaaaaaaaaaaaaaaccccagtagctcaagccaaatgccctcagtgctttcttagccatttacaagcagtttgttgtaaggcccagcaacccagttatacttgccaaattctattccagaagaaatgtgtacttttgttttagatacacaaactcagtagcaacccccacctacttctcttgcttgtgtagcgcagcatgtattcaacacttgcactacttaatccccccagattttcctctcctctgcactcctttttttccaaagcctactgtcaaaccacaaatcccctctttacccctgtgcacagcggtttccccaggttttagtcgaaccccaaatatgtgactcttaccttgctgccctggggtgtagagaggtttgtcagtctgtacaaaggtgccgttcccctgcctctgaattagaacctttttcttctcctcaaagctgatgttatttccaactcccgacacccggattgtggccacttcttctgtgccaccagcaggaggtggtacctgaccaagaaaggggacttctggggaggggtaagggattgggggaacagaatcaactggtctcaacccaacagtgagttaaaggaaagagctgagttagatgggggtagcaaggatagagacataaaacaaattaccacgaggaagaattaaggtcaggaactaaagggagaaatcctaggtcgaggaaaccgtgggtgagttatagccggggattgaggttaagttgagaaaaaataggtttagaggccgtggcaaaagataacagaaattatacttaaagtagattatagtgagcctagggaggagaataggcaagtaagggattcgagtgagggctgagtctgtgcttacaagaaaggagatacaatgtaagtgcctcttcttcagtccagagtattctagcaacttctgggtcttgtccttggtctccagagtaaccgtgaatttaacatcactgtacccagggctcaggtccaaacaaaccttctgaacggaggggaaatttagccgggctggtaatgtcaccaggtagtttctattaaaggagcagaaggatttcagggcaataatgattcattcactcgaaaaatccagcactctcctaagcgctcagcaagtagcagtgaattagacagaccaagcccctgccttccttatgcacctcattttctacaagaagcagaggggcaacgactcagtgcacagtcctcaacttccgccatcaggaggccctcaccgagcacacatgcctagagcaccaaggaggaaattaggcctatttcagaaaacagggcacattttaatatttatcttttttaaagcttcctcttcatgcgtcagcctccctctctgggtaaaggatcagtggaaccaaagaagagaaaaaaggaggaggaaattaagataaaccaaagttgatctccccatctccatataaatgtttgagaaagttaggcgaagaagccgctgccctaataaaccaattctgacaccaagcactcacggaagttcttctgcaatggctggtgatagggccaacattcctagaaggagctgagcccacatctttgtgggtgagacagatttttccagggtcaggggcagagatcgctccgcgtagctttatatactaattccaggtagggtgtgcagtgatgactgatgctatagtcagtcacctcctggcacctggaacacaggaggactgtgttcctccttctgtaaccaccaggttaggtggtggaccagggtagggccactattcacttctttaaagttgtttctgcctggaacatccatactggttcagccagttttgggggaaaaccagagctgagtattcataatggtaaagctctcagaacatattttgaactcctccctttttttctggtctcattccaattcctgttctcatttaatgtccttattttcttttattattcaattaaggtgtagttgggaacacgggtatgagaacagtttcaatagaaaagcggtaaacttggccggtcacagtggctcacgcctgtaatcccagcactttggggggttgaggtgggcagatcaccaggtcaggagttcaagaccagcctggccaacatagtgaaaccctgtctctactaaaaatacaaagaaaaaaaaatcagctgggcatagtggtgggtgcctatagtcccagctacttgggaggctgaggcaggagaatcgcttgaacccgggaggtggaggttgcagtgagccgagatcatgccactttactccagcgtgggtgacacaacgagactctgtctcaaaaaaaaaaaaaaaattaatactactcagtattgttgtgactgtatggaaatagggacacacacagtcctagagaaaatagaatgtggataactttctcatggcaattttgtaatacacaccaaagcctttgagatttgcatattctttcactcagcaactcctactctggaaatgtttcttaatgaggaaaaaaaggacagcatgcatgtatgcacaagtgtaacactgagttttttcacactgttctttcttttttttcttttctttattttttatttttttgaagtagagtctcactttatcacccaggctggagtgcagtggcacaatctcagcccactgcagctttgacctcctgggctcaagcgatcctcccacctccacctcctgagtagctgggaccacaggtaggcaccaacactcctggctaattgttttgtatttttaatagagacagggtttcaccatgttgcccaggctagtctcgaactcctgagctccagggaccacctcagcctcccaaagtgctgggattacaggtatgagccaccgtgcccagcccacagtgttctttatgatggtaatacttagaagtcacctaaaatataaattagtctaagtgcagtggctcatgcctataatcccagcttttgggagtcagaagctggaggattgcttgagcccaagagtttgagaccagcctgggcaacatagtgagaccccgttttgtaaccacccaatggattcaccttgcttgctgcctagacagagccgatttatcaagacaggggaactgcaatggcaaaagagtaattcacgcagagccggctgtgtgggagactggagttttattattacttaaatccttgagccttcgtggatcagagtttttaaagataatttggcaggtaggggcttgggaagtggggagtgctgattgctcaggttggagatggaatcatagagggtcgaagttagattttcttaatgtcttctgttcctgggtgagatggcagaactggttgggccagatgactggtctgtgtggtgtcagctgatcccatggagtgcagggcctgcaaaataactcaattactgatcttaggttttacagcagtgatgttatccccaggagcaatttggggaggttcagactcttggagccagaggctgcatgacctctaaactgtaatttctttttttttttttttgagacagagtctggctctaccgcccaggctgragtgcaatggcgcgatctcggctcactgcaagctccgcctcccgggttcacgccattctcctgcctcagcctcccgagtagctgggactacaggcgcccgccaccacgcccggctaattttttgtatttttagtagagacggggtttcaccgtgtcagccaggatggtctcgatctcctgacctcgtgatccgcccgccttggcctcccaaagtgctgggattacaggcgcgagccactgcacccggcctctaaactgtaatttctaatcttgtagctaatctgttagtcctacaaaggcagactggaccccgggcaagaagggggtctttttgggaaagggctgttatcaattttgtttcagagtcaaaccatgaactgaattccttcccaaagttacttcggcctatgcccaggaataaacaaggacagcttaagggttagaagcaagatagagtcggttaggtctgacttcttgcactgtcataatttcctgttacaattttgcaaaggcagtttcagtctgtataaaacatttctttaaaattagctgagtgtggtggtgcacgcctgtagtcccagctactctggaggctgagatggtaggatttgcttgagcccaggggttcaaggctgcaatgagccatgatagcaccactgcactccagcctgggcaacagtgagaacttgtctcataaaataaaataataaaatagattagccaggatgctctctgggaccaatgatcatcctatatcaaaccagcctaaacaaaaaagtgtttttggtaactggaatggatccaacaggaagaatgagcttatggaaccagagcaccttgaaaaacttgacagcccaggagtggagacgtggtgcagccagggccgactcctcccagtccttctctcttgtgtacttgtctctgattggttcattttctcctactgcacacaagcttttcttcaagtcgtagggaggacggcagctgggagccctcaagccatattcgttcagctccacgaccccaactgacaaaatttttcacctatgttatagaaattcccgaagaaggactgtgttcctccctctctcgctggctcacctctgaatcagtcactgtagtcaggagggtatgataggcagggcctgggtcattctcccacctaaaggccagggtgatggggtactgtgattggccacccctttagaaccacagggagttggggaggggaaattgttcaaagaaatcactacagtaggaaaagtgttggtgtaaagagctgcaaacataaaacattaagtctattgcaatgccccataaagagttcggttgaataaactgtcatgttaatataaagcaatactctgctgccattaaaaataatgttttcatgataaggggaattatttgcaatgctaattgaaaggggttggggctggtgcagcggctcacacctgtaatcccagcactttgggaggccgatccgtaggagctcgagaccagcctagtcaacatggcgaaaccctgtctctaccaaaaatacaaaaattagccaggcatggtggtgggcgcctataatctcagctactcgggaggctgaggcaggaaaatcacttgaactggggaggtggaggctgcagtgagctgagagcataacattgcactccagcctgggcaacaagagcgaaattccgtctcaaaaaaaaaaaaaaaaaagaaaagaaaggggttggggaaagtgatacaaaacgacatgtggcaagttccactttaacttggaatttgaaaggctagaaagagtgtggcttggtggctcgagcctgtgatctcaacactttgggaaggcaaggtgggagggttgtttgaggccaggagttcgagatcaacctgggcagtatagtaagaccccatctctaccaaaaaaaaaaattaaaagttagctaggtgtggtgtcacatgcccagctacttgggaggctgaggcaggaagatcactagagcccaggacttcaagtctgcagtgagccatgattgtgccactgcactccagcctgggcaacagagcaagaccctgtctctaagaataaaaaataaaaataagctggaaagtgcattgccccctctctgacaatatgaaaaagccagacaaactgcaaaatcacttttcttaaaccaaaagttgaacctaaatgctgagctgggccgggggcggtggctcacgtctgtaatcccagcactttgggaggctgaggcaagcagatcacaaggtcaggagttcgagacccgcctggccaatatggtgaaaccctgtctttactaaaaatacaaaaaaattagccaggcatggtggtgcatgcctgtaatcccagctactcgggaggctgaggcaggagaattgcttgaacccaggaggtggaggttgcagtgagctgagatcacgccattgcactccagcctgagtgacagagcaagactccatcacaaaacaaaacaaaagaaaacaaaacagctgagctgaggttgcaggtaagctaagtagcctgaaattcaaggacatgcaatcctcatgagcagagaccagatgggtggagtgtctcatcagtgccagagtatgggaggtatttgggccatcatacaagcatgcaagaagaaagcagctacatttttcataaattgctagaggcctagtgcagactagagtgactataaggagcctctgggtgtcacagaagcaaggagggctttacttacccacaggctcctttccatgacctctaccaggtgttcacaggaaatactgggggccaagtgggagactacaaagagccccctcagtactatgggcatcaaggaccgtatttgctatcattgcagaaaaggccccagctgcccatgctcctctctcgaaagccttaagaccctggggaggactggcaaatactgttgctcccagggcacaggtgttaccaagggaagagcagggaggaccctagtccgagggagggacaaggagcaattgtgagcccagagttctaagctaatacttttagaggtctcctgaaactgaaggaggagcacaaaaaaatctttcccacccaagaccagccacaaattcaaagcagggtttggcagcctggcataaggagtggggcagaaatactcatcccccagggcccaggcatataaacctacctaagatagaagatgaagagggcaacagagaagcaccctgtcccctcaccattacccgagcaagagcaccaagtaactaagcagtccgccactggcagagggcatgaacgtgcagagagacgacctctgtggggtctgctgtgtggtgtacagaggagaacgagagctgagggtggggcacaaacactgagaaatagccagcactccagatgccaccctaagcataaggcatcacaaaaggaatttgaagcctatgatgtaccgaaagtaaacttggcaattacaaaacctgcacagttcaccttttaactagattaactcaatccaccaagctaactgcctgagaagaggtgtgtccatttctagtcacaaatactatttatttaaatctctcctgttctacacaagatgtttggcaatcaatgaaaaattacaagttgtatcaaaagaagaagaagatgacaacaacatcctgtgaagatacaaagtaatcaatggaaccaggctcagagctgccctccatgttataataaaagagagagactttaaaatgcccaggagtcatatgtcaaaggagctcatgaaaaaaaaaaaaaaggacaacagacatgaggagatggtgtcaggggtggatttcaaaagaaaggtggaagtgatcgacttcctgaaatactaaacatgacagactttatagaagtttcaaaaataagatatgcaatatcaggccaggaacagtagctgaagcctattaatcccagcactttgggaggccaaggcaaaaagatcacttgagcccaggagtgtgagaccagcctaggtaacatagtgaggagactttgtgtctatgtaagataaagacattagctaggtgtggtgacttatatctgtagtcccagctacttgggaggctgaggtgggagaattacttgagcccaggaggccaaggtcgcaagcaagctgagatcgcaccactacactccagcctgggcaacagaacaaaatcctgtctcaaaaaaaaaaaaaaaaaaaaaaagaaaatgctgtatcagagatgagcagctccttcttcaggctcattaataaccttgacaatacgaatatagctgaggaaataatcgattgccttgaagttaggtcaatagaaattacccaaacaaacacaacaagaaaaaagagtgaaaatcatttgaattcttttcaaataatttgaatttttatagcacttgaattatcttcaagtgctataaaacaatatcaaatggcttagcatacatattgtcagaatcttagaaggagaaacgagaaagaacaagcagaagacatgtttgaagagacaagaaatgagaattttccaaaaataatgaaacacatcaaagaatagattcaagaattataaacaatttctccatgtttcccctaattcacacacactaggcacatacatacatgcacgcaccgtctcttggttaggttgtaaaattgtgatggtctctggaggctctgtttgatttggacacagggaaaaccagtatattcaattgagttttgggtcactctaccactctacataaactccataaactttttttttttgagacaggatctcgctctgtcacccaccctggagtacggtggcgtgatctcagctcactgcaacttccacctcccaggttcaagagattctcctgcctcagcctcctgagtagcagggattacaggtgcgcgccaccatgctggggtaatttttgtatttttagtagagacagggtttcaccatggcctcccaaagtgttgggatgaccggcatgagccactgcggtcttgttttccttggttcccatcactcttcctgctaagagcaatcgcccaggtctgtgaacacccactcctccgtagatggtgagtgcccctccagctagagctgctgactccctttaccacttccatcagtcaaatcggcccaccagtgatttttatctcttctgatccattttaaaatctatttaaatgcagctatcagtctgataacctgtctggaatttggtgggaggaaatgtccagggtttaataatctcccaaagttaggctgcataaaaccctactgttgacatctcatgtggtgcatatgggcgaaacggagccgtgtggaaggctattctgtaaaggggttagcgtgcttggatttgctctgggtatcagaatcctgacttgagacttttagcttagatagacaccataatatgttacttcgaaggcttcttacacttggacctttattgtaaataatagaagtatttctggagtaagaattacatcaattatatattatcatgttatgctacatattaggcataacatatatatatatatatatatatatatatatatatatatagtttttgtttgtttgttttttgagacagagtttcactcttgttgctcaggctggagttcaatggcacgatctcagctcacgacaacctccgcctcctgggttcaagtgattatcctgcctcagcctcccaagtagctgggattacaggcgcccccccaccacccccggctaattttttttgtatttttagtagagacagggtttcaccatgttggtcaggctggtctcgaattcctgacatcaggtaatcatccacctcggcctcccaaagtgctgggattacaggtgtgagacaccacgcccggcctataatatatattttttaattattatccaagggtgctgacataaatttccaatttattcatgccaaaaaattagtgatgataactgccaatcagtacagctaaagaaaatgttttcattctggtgtatttggaagtcttctgtctttatattatcccagccttcctcactcatttctgtgtattttatactttgtttcacaccattctgctcaagggtattattttcgcatttccatattatttctatttttcacaggtagtctttggtcttacatctgtgaacatcttctttgactattttgcttttccacgaagggctttccaaaaactattagcccactttacttggtaacctcccaggagacagcttagtcctgtctgctaagggatgctattctcagcaagtcagttttctgctctcctcactgcaagggaggccagaggagaagagcctgtttctgttccacccaggactgttgatttgaggttctacctccagagagcatggggctaatcaaaccaagacacaacactaaggaaaagaaaagaaagaacaagcagaagctggggccactccttgcttgccactgtctcctccctccttcttactaattataggcttcactctgttcctttttcaaatgtattcaagtgaatatgcaatgtaccaaagtttgcatatgaatgcatcagggaaaataagggtgctacccaaccccacccatgcttagacagcacataaaccaacatttggcttcctaaagtcagaaatgacagaaaactgaaagttcaaagagggaaaaaagaaacatggagatcacatgctcagattatacctagggggaaaaaccttttttttccaacaaatatttattgaacactgctatgggataaattgtatccccctcaaaatttatatgttgaagtcctaactcctaggatctccaagtgtgacttaatttggaaatagggtccagcctgccctggagatattggacttgccagcctccacaatcatgtgagccaatt

SEQ ID NO: 7003 - DNA, 12683 bp, Homo sapiens
taaaattttaggctaaagttcctaatgtatgggtacattaagaatgagtaaacatattccactgaagtgcagaattttgctctggtaaaatgagaatctaacttcccactgactttcattgtaaaatatcaatgtgtctgtaaggtgggactgacccccatacaataaaaatcatacaccagaaaaccagaaatatttgatattagtatgtagaaaaatgatttttaaatgggaactaacatttttgaaatgtttaggctttgctagatgctgagctaagctttatatccttggctctcacagcaaacttgggtaagtgctaattataattcaggaaactaaagtctagaggggttaaaaaactacacaaggtcatgcaggtggtgaataaaaaagaatcaaatggaaattttagaactgaaaaataaatttaaaactcactagatggctcaatagcagcaagaatatggtagagcaaggaatcaataaatttgaaaatagaataatagaaattacccaatctgaatgagagagaaaatagactaaaaagaaatgaacagattatcagggacctgtgagacaataacaaaagagataacattggtatcactgttattttagaagagaaaataaagtaaggctgagaaagtacttgaaaaaaataatggctgaaaattgcccaaatttggtgaaagccacaaacttccagattcaagaagcagagcaaactttaaacatgataaacccaaagaaacacacagcaagacacatcgtaatcaaacttcgttaaatcaatcatgatgaaaaaatcttgaaagcagctagagagaaacaaaacataatctatagcgaatgaatgatttgagtaacaatggatatgccactagaaattacaggggccagaaggagttggcacacatttttcagggagaagaactctcaacccaaaattttatatcagtgaaaatatatcattcaagaacaaaggggaaggaaggactcctccctaactcattctatgaggccagcatcattctgatgccaaaacctggcagagacacaacaaaaaaagaaaacgtcaggccaacatccttgaagaacatcaatgcaaaaatcctcaacaaaataggctttatctctgggatgcaagtttggttggtccaacatatgcaaatcaataaatgtaattcatcacatcaacagaactaaagacaaaaaccacatgatcatctatagtatatgcagaaaaggcttttgataaaatgcaacatcccttcatgttaaaaattctcaataacctaggtatggaaggaacatacctcaaaataataagagccacctatgacaagcccacagcctgaatggggaaaagctggaagcagcattccccttgaaaactggcacaagacaaggatgccccctctcaccactcctattcaacataatattgaaagtcctggccagagcaatcagacaagagaaagaaataaaaggcatccaaataggaagagaggaagtcaaagtctccctgtttgctgatgataagaacctatatctagaaaaccccatagtctcagcctaaaagctccttaagctgataaacaacttcagcaaagtctcaggatacaaaatcaatatgcaaaaatcgctaacattcctttacaccaacaacagtcaagctgagggccaaatcaggaatgcagtcccattcacaattgccaaaaaataaaataaaatacctaggaatacagctaaccagggaggtgaaagatctttctctacaagaagagctataaaacactgttcaaagaaatcagagatgacacaaacaaatggaaaaatattccatgctcatgaataggaaaactcaatatcattaaaatggccatattgcccaaagcaatttacagattcaatgctattcctattaaactaccattgacattcttcacagaactagaaaaaactattttaaaattcatatagaaccaaaaaagagcctgaagagccaaggcaatcctaagcaaaaagaacaaagctggaggcatcatgctacctaacttcaaactatattacagggctacagtaaccaaaacagcacggtactggtacaaaaacagagagaccaatagaacagaatagagaagccagaaataaggccacccacctacaactatccaatcttcaacaaacctgatgaaaacaagcaatgaggaaaggattctctattcaataaatagtgctgggataactggctagccatatgcagaagattgaatctgaaactcttccttacacaatatacaaaaattaactcaagatggattaaagacttaaatgtaaaacccgaagctataataaccctggaagacaacctaggcaataccattctggacatagaaatgagcaaagatttcatgataaagacaccaaaagcaattgcagaaaaagcaaaaattgacaaatggcatctaattaaactaaagagcttctgtacagcaaaggaaactatcaatagagtgaacagacagcctatagaatgggaaaaaatttttgcaaactatgcacctgacaaaggtctaatacccagcatctatcaggaacttaaacaaatttacaagagaaaaacaaacaacccattaaaaagtgggcaaacagatggggcacagtggctcacgtctttaatcccagcgctttgggaggctgaggcagacggatcacttgaggtaaggagttcaagactaacctggccatccctcctaaaaatacaaaaattagccaggcatggtggcatgcacctgtaatcccagctactcaggaggctgaggcaggagaatcacttgaacctgggaagcagaggttgcagtgagccaagctaatgccactgcactgccagggcaatagagcgaggctctgtctcaaaaaaaagaaaaagaaaaagtggacaatggacatgaacagacacttttcaaaagaagacatacatggggccaacaatcacactttttaaaaactcaacatcactgatcattagagaaatgcaaatcaaaaccacaatgagataccatctcatgccaatcagaatggctatcactaaaaagtcaaagcgtaacagatgctagtgaaggtgtagatagaaaaaaggaatgcttttactctgttgttgggagtgtaaattatttcaaacattgtggaagacaatatggtgattcctcaaagacctataaacggaaataccatttgacccagcaattaaattactaggtatacatccaaaggaatataagtcattccattataaagacacatgcacacatgtgttcactgcagcactactcacaatagtaaagacatagactcaacctaaatgttcatcagtgatagactggataaagaaaatgtggtacatatacaccatggaatactatgcagccataaaaaagaatgagatcacatcctttgcaggaacatggatggagctggagaccattatccttagcaaactaatgcaggaacagaaaaccaaatgctgcatgttctcacttataagtgggagctaaatgatgagaacacatggacacatagaggagaacaacacacattggggcctattggaggttgggagcagggagaggatcaggaaaaactgctaatgggtactaggcttaatacttgagtgatgaaataatctgtacaacaaatccccatcacactagtttaccttcataacaaaccggcacatgtacccggaacttaaaagttaatttttttaagtatgaaaaggaacatgaaggggaaatcaatcatttctttcagatgaaagaaaaccaacagaatttgtcaacagcagaccatccctaaattaatggctaaaaaagttcttcgagcagaaaaaatgataaaacaaggaaacttgaagcatgagaaaataagaaataaaaacagaaagaggccaggtccggtggctcatgcctgtaatcccaccactttgggaggccgagctgggtggatcacctgaggtcaggagttcgagaccagcctggcaaaaatggtgaaaccccgtctctactaaaaatacaaaaattagccaggtgtggtggtgtgtgcctgtaatcccagctactcgggaggctgagataggagaatcgcttgaacccaggaggcagaggctacagtgagctgagatcacgccactgcactccagcctgggcaacagagcaagactctatctcaaaaaaaaattagcctggcatggtggcagacgcctgtaatcccagctactcgggaggctgaggcaggagaatcacttgaacttggaaggcaaaggttgcagtgagccaagatcgcaccactgtactccagcctgggcaacagagtgagattgtctcaaaaaacaaaacaaacaaacaaaaaacagaaagagtagaaatatgggtagatataatagattatccttctcttaagttttctaagctatgttaggcttctgaagcaataactataacactgatgtggttctcaatgtgtgcagaggaaacattcagagcaatttcactataaaaagagtgaggaagggagcttggaggtacacatatggtttatttccttaacaggatcaaaccacacataatgatctacatcaggcgggtctagtcttttggcttccctgggccacattggaagaagaattgtcttgagccacacataaaatacgctaacattaacaatagctaaagagctttaaaaaaaatcgccaaaaaaaatctcataatgttttaagaaagtttacgaatttgtgttgggccgcattcaaagctatctgggccgtatgcggccatgggccatgggttggacaagcttgatctacacatttactttttcccctgaaaatattctgattttctacattacttcatctagatctgcctggattgttaattgacaattatgagctgtatgtcaggaaatgaggacaaagattaaatatatatatttcacaatatcacaggttatatttcatttacaagtttctctgttgatttattagcttagaagtgtttactatcacaaacgatgccgcagggaacatctttatgcatatcttttcatgtaactgtgaacagttaaacataaaatacattcgtagaagtagaattgctagattaagttatatatactttaatggttgttgttgttgttgttttgagacagggtctcactctgtcgcccaggctggagtgtagtgatatgatcacagctcactgcagcctcaacctcccaggctcaagcgatcctctcacctcagccttccaactacctgggaccccaggcatgcaccaccacacccagctatttttctattttttgtagagacagggtctccctatgttgcccaagctggtctcgaactcctggacttaagccatcctcccacctcggcctcccaaagtgctgggattgcaggtgtgtgccaccgtgcctggccctttaattgtttcatattaaaattttttttatttaaaaaattatttccagagctccttaggtttgaacgtgtggattaaacattaacagactttttttaaacaaactatccaacctcataatcaaattttcccaggaaataaaaggtggtgacaagtaaactccagaagagaaccactggatctcctctgccacagggtggaaattttagcttaaaccagccagggagcactgttcctgagagttcttaggggttagggtcacagatagaaacagagaattcagaaagggagggaaataaacacaaggtgggacaaaattcagaagcagcggctgcgactgttcagcactgtgaatatgacttccatcaaccccaaagaggctctgagaccaaacacaaactgggccggcgcttttgctaaagtccataaacatcaacacgcaatttactccactgttccgtagtttacatgtgttgtgttatatatgtttgtgtatacaaaatattaaatatattattaaatataatgtttaaaaggtgaactgttaaaagcaaggattacatagtgtttatcttctggaggggtgctcataattttcttttttttacaatccagaggtcttctattttattttttttaacaccrattatgccatgaatcaatccatagggaagaggttccagcagctcaagctccttcccatttgttctcacacagtgcgcttctctgggcagagcagactggcacttctgctgaatccaggtacctttctctttggcttccttctttttctgatcattttccttcacaagtttcaggaagctagctcagctctcagagcgcttaaagtgctcaatacccacatgaattctcttggcaagaacttgcccttaacttgtgtgtttacaacaatgccgacggcctgctgsgtaacactgtagactcttccagttctgccatgataacacttgtggggcattccttcttgaacagtgcccactcctttaatgtctacaatatcatctttcttatagattcacatatacgtgaccaaagggaacaactccatgcttcctaaaaggcctagaagacatctaccaggagcctctcctctttccctttgtgtttgtcattttgtcgaattactggaagacggtggttctggccaaaagggccataataaacttttattttcttgtttctgtgtttttctataataaacatacattatttttataaccaaaaatgaccaacaacatacattaattttctctttaataaactttatctgattttcccattaaagctaaacatgctccttaccacttccaaagaaaaagttatacttaaaaaagccaataatctccctactccaaaatcccaagtgttacatcattccaaataacatcactccaaagttacacacacacacacacacacacacacacacaccacagtatactggtcgtgtgtatttctatatactatttgatatatatacttacacaaaccatggaatttgaacatattttcttatttcattctttttaaacaaaaaaggaccactctatacacatcgtttggaagtttagtttttcttttttcattaataaacgtatctatctttacattctagtaacatattactgcaaacttagcaggttgaaaaacacaaatacattatctcacaattttgcgtggttctgaagttaaggaggggccaagctgggaactctgctcagggtctcaccagcctgaaatcaggttgccagccaagccgtgtccatctggtcttaactagagaagatccctccttagcccattcagatggtggcacaatgcatttcccgatggctgtagtactaagggtcccagcttcttactattagctgaagtttgccctgaggtcctgcaggccacttaaacttctctgccaccacatggcagtttgcctcttcaagtccaacagaagagaatttatcttccaagtctgctaagagtctgcttatcttccaagtctgctgagagtctccagagtcttatataacataaccaccataggagtggcatcccatcacctctgccatattctatcagaggcaagtctctggttattcccacaaagggagaggttacacaagggcgtgacccattgaaggtaactttagtgtgttacttttctaaggattctataataaagtacaacaaaccaggtggcttaaataacagaaatttattatctggcagttctggaggctagaagtccaaaatcgaggccgtgctccctctgaaactgtagcgagagcccctccttgcctgtccctagctctggtggtttgctgtcaacccttggcgctcttggcttgcagctgcaggacttcactttccgcctgtgccatcacatggccttctcccatgtgtctgtgtctctacatttctccacctcttatatggacaccagtcacattggattaaaggcccaccctatgccactatgatgtcatcctaactaattacatctgcaaagatcctatttccaagcaggacatggtctgaggtactggcagttaggacttcaacatatctttttggaggacagaattgaacccataacacttggggtgtatcctccacggtatcaaaaacattcttctgcagaaatacatataaatccaacctagtggttcctgaggacatcagcatcacctgggaacttataggaaatgcaaatcctcagggcctatcccagacctactgaccccgaaactgcggagattgcggaaaagggagggagagacagcacactgtgttttaacaagcctacagcccattcttcttaccagctgcacagtttgactctcaaccctaccagactctctaggcagacccaaaactcccttcagggcaataaaagagcaggaagaaaattccaagcagcaggtggcctggattaccctactccttacacagggggttgagacagtgcatgtctgtcctccttttccacgccaagttcctcattgctagggcttccattcaagaatcaatgccacagaaaactagaaaagtcaacaaggatgaataaatacatgatttcttacctaattttgatgtcaagtcacaggaaggagtacagacaagtcaaccatgccaaaaaggccccacacatgcaaactcaaaggaacatcttcatcttcccttttatcatgggcacaggtctctcccaaagtcccttccacaccatccaccaagtccagttcaccagatcacctgtagccctgccctgattttgtttactttacttgcatttggggtcattatgatgtcgttgccatagggtcagggacttagtgacaacagaatgtacaatccagccatgaccaagacttgtgtttctgcagtgctgaatctcaccttactcttagagagcctcattcctttgattaaagaatgcaaatcactctacaattctgcttgttttctaatttctatctcttcccagtaattctggccagcctgcctagtttttcttgattttactgattatactccttttatgttttcaggccactaacctccctagctttgccatagtccgagatggcgactgtaatcaatacatctcattcaacacaagctacagatgtgatggaaaaacttgttttactattaccgtaacctttcaggaagtttcttggggttttgcctatacaaacatctcatataatcctgactatagcctgttgtgaccctgtctctgcttgcttcaaggcaatactctctccctccctcttaactccaacgttgagtctcttgccttaaagccattgtacacattattcctctttgcagcaatcatctatcacctgggtcaccccttgaagattttagttcctgtatcattatcactcactccagctctactgtcatcacacttggagtgcttataaatgactcatcacttttcctccttacttccaatgaacttcctctccagaagaccagagccactcacctccatccatgatcatatttgtaacttctgcattattaatccaacaatggtctcaattttaatcatctcattttctgattatcaactcctgtctttgcatctcacttcctctagtgaactaaagccaataaattgtcagctgcatcaataattcatggatcctgctactctcccactactcttcaaccttccttaccagcttacattatatggtccctctttgaatcaatcacctgcttgcaaacaccctcaactcccatatcttgctattatttttaaaaacagttttatcaaggcataattcacatacaataacactcacttattttaggtgtacaattcaattatttttagaaaatgtgcaaagctgaacaactaacattgcaatctatcattagaacatttgcactacaccattaacaaacttcatttccatttgcaatcatccctcattgctaccctctgctccacgggaccataaatctaatatctgtttctatagacttgccttttctggacatttcatataaaaggaattatacaatatatggcttatttcatttagtataatgtttttgaggtccatccatatagtaacatgtatcagtactttattccttttattgttgagtaatatttcattgtgtgaatatagcagatattgtttatccaatcataagttgatggacattttggttgtttccagtttttggctattttgaaaaatgacggctggatgcggtgggtcacgcctgtaatcctagcactttgggaggccgaggcaggtcgatcacctgaggtcaggagttcaagaccagtctggccaaaatgatgaaactctgtctcaaataaaaatacaaaaattagccaggcatgatagtgtatgtttgtaatcccagctactccagaggctgaggcaggagaatcgcttgaacctgggggcagaggttacagtgagccgagatcgcgccactgcactccagcctgagtgacacagcaagactccatctcaaaaaaaaaagaaagaaagaaagaaaaatgatgctatgaatatttacatataagtttttatgtggacatatattttaattttcttgggtatacctcagagtagaatcactgggtcatatggtaaaactgtatttagcattttaagaaactggaaaactgttgtcaaaatggcattttacatttccaccaacaatgtatgaaggctccagtttcttcacattctcccctgtatttgtccatcctgtgttgctataaagcaagcttgtccaacctgcagcccaacacaaatgcataaactttcttaaaacattataagaattttgcaatttttttttagctcatcagctatcattagcgttagtgtattttatgtggggcccaagacaattcttccaatgtggcccagggaagccaaatgattggacacccctgctaaaaagtaatacacaagtctgggtaatctgtaaagaaaggaggtttatttggctcacaattccgcaggctgtacaagcatggtaccagcatctgctcagcttctggtgaggccttaagaagcttacaatcatggcagaaggtgagggggagccagcacatcacatggtgagaaagagagtggggtggcagtgggggaggtcccaggctcttttaaacaattagatctcaaggtaactcattaccacagggagtgcaccaagccattcatgagggatccactcctatgacccaaatacctcccaccaggccccacctccaacactggagaccacatttcaacatgataattggaaggaacaaatatccaaattataccatccctcaacacttgttagtggatttttattacagacaacactccctggggcataaagcatcagtggcatctcattgtgttttaatttacatttctctaatatctaacgatgttttcatgtgcttattgaactttcttttttttttttttttttttttgagacagagtctcgctctgtcaccaggctggagtgctatggtgcgatctcagctcactgcaacctccacctcctgggttcaagtgattctcctgcctcagcctcccgagtagctgggactaccacacccagctaatttttgtatttttagtagagatggggtttcaccatgttggccaggctggtctcgaactcctgacctcgtgatctgcctgccccagcctcccaaagtgctgggattacaggcatgagccaccacgcccggcctctttttatttatttatttatttatttatttattttagatggaatcttgctctgttgcccaggctggagtacaatggcgccatctcggctcactgcaacctccacctcccaggttcaagcaattctcctgcctcagcctcccaaggaactggaattacaggcgcatgcctatttcaagtaaaactatgatcaaataaatgtgcatgccttttctattaatctgccttttgtcagtgattttcagcaaactttcagagggcaatggggaagttttcccttcgcttttacatcccaaaccaaatttatagttatacctcttatatttaggtcaattatctttcttgatttttatgtatgatgtaaaatgactaaacgtatatttttttacatgaggatatccaattattccagcaccatttgttgaaaaacctatcctttctccacattgaattgccttggcacatctgtcaaaaatccattggtaatgggctcaggtgatcctcccgtctcagcctcccaagtagctgggactacagagatcacttgagcccattaaaaaaaaaatccaatgatggtgggcccggtggctcacacctgtaatcccagcactttgagaggttgacgcaagaggattgcttgagcccaggagttcaagactagcctgatcaacatagggagaccccatttctataaaaatattttaaaattagccagtgttgtgttgcacatctgtagtcccacctactcaggaggctgaggtgggaggatcgtttgagcctgggaggtcgaggctgcagtgagccatgatcttaccactgcattccagcctgggcaatagagtgagagaccctgtctgaaaaaaaaaaatccactgaccaaaaacataagggtttatttctagaatctctattctgtttgatgggtctatatgtctac

SEQ ID NO: 7004 - DNA, 14416 bp, Homo sapiens
tgtttcctttttggaggatcaggctgaagtaccaaagaaaagtgctcccaaaacccgtcattttgaaaccatcatctaaagtgtcatggtactcgctcttctttgagctattatatataaattgaaagattttaattagaggtcaacattaatttacatctgaaactagcaaagtagttcatgactctttttcacatcacacatacccatactacttctcagagtcaactggtctctcatctcttcattatatactaaataagcaaggtatgtctccaccttgaaggtatagcacctccttataagaagtaagacaggtttctctagaaatgtccacctaaccaccaccattggaatagaggacagagtctgagggcagtggctcaggcctgtaatcccagcactttggaaggctgaggctggtggatcacctaaggttaagagttcgagaccagcctggccaacatggtgaaatcctgtctctactaaaaatataaaattagccagctgtggtggcatacgcctgtaatcccagctactggggaggctgaggcacaagaatcccctgaacccaggaggcagaggttacaatgagctgaaatcgcaccactgcacgccagccagcctgggcaacagagtgagactctgtctcaaaaaaaaaaaaaaaaaaaaaaaagagaaaataaacctaaattgtacagttacttataagattgtcataagaaatcactaatataaataattcagtcttgctgcagacccatgcttttcaactcagtcttaacaaggaaataaattcctttcagaattgagcattttgggaaatatgtttaagggctaatgtaccttacgtaactctttaaaccagctgactcacctgaaggataaggcccattaaagagattgtaacaataaagtttgggagtatttaggataccctaaaagtctgttttattctgctacatacactggtaactcattctgccaaagtaggcagggataggtatgcatgaatatggacctaggcacacagttaatagtggttacaatttaatcttgtcctaaaaattttgaagaatttgttgggactagaaatgcagaagccttgcaggcattggagaacctgatgtaaatgctccccctcaaaattcttctctcagaatcaacagtgaaacttcctctgttttcctctagatgatcgtggttcttcggaataatcctgcccaaaaagtgtccaaacctaaagacatgaagtcaataacctggcaccatcagatgctcgaaaaggattggtttgaaagagggtaattaaagggcaattcatcaggacaattactgatccattttgcctggtcagttatgaggcacatttgagaaacagccaccaggtttttgctacatgtatggaattggaagacaccaagcccaatgcctcaccgtacacataaatgtattcctgaaaatgccagactatagttaaccagaatctatccaaatatcgcctgtaatagggagattagacaatgcgttttattagataactcttcctaatattgaactccttataaactacttcctgtaatactgcatagggtaatggaaatgctccatgtctgtggagcactttaagtgttctctgcattacaaacactaaggaggagatgttgaaaaaaataacattggaaatagtcataaaagaaggcgacctcacattctcagaggccaattctgccactctgatgatttggcaggtacaacttagggtgtcaaaaagagactgtctatttttctgtctgtacatattaaaaacttgggaatgggaaacaattcagtaaagtccaagtccactttttgtttcttttctccgaatttccccctcattgaggaaggctctggaaatatctgcttcagcaccacacaggccaagtttgtccttcctagagaaagataccatcaatgttctctaatcttatgcaaatccaacatcccacctccaccttccactgtaatatgtccttgcccttggtttgggcaaaccattaataaattattcattcattaaattattgaataaacccttgtggaatgaacatattaaatatcttttatgtttgtttgtttccataactactactttattggaggaaactgttcttgtaacataatctttatcatcatgggcagagagcaaggcttcatttgatttgcaaggggctggccctccatcatgttttctgattgactgattggctctggctttgtacatcccaagcaattttccaagaatctcttcctttctcctacggaaaccacagtttctccttatattgtagtaactaacattgaggggtttggggttggaggtgcaaatctggtcatagcatttaaaaagaattatagtagtactgaagaattctactgttaaataaaatttatgggaagccatgcttttagactgagctcctgcactaggccccaacagaacagaccaaaccaaaatggagtcactctgatgatagtttcttttgctgtgaagaagctctttagtttaattatatcccatttgtcaatttttgcttttgtttcaattgcttttggcgtcttcaccatgaaatctttgcccatgcctgtggctgcatagtattccatagtgggtatgtgccacattttctttatccagtctactgttgatgggcatttaggttccattccatatctttgctattatgaaatgtgctgagatgaacacacacgtgcatgtgtcttttatagtagaatgatttatattcctttaggtatatacccaataatgggattgttgggtcaaatggtaattctgttttaagttttttcagaaattgccgaactgctttcaacaatggctgaactaatttacaagcagtgtataagcattccctttcctccacaacctcatcagcatctgttatttttcaaaaactgacttttttccatttccaacaaagcacttctatttttagattaagatgctgcctagttcatgaatcactaataaaaggccattatattgttaacctaaatatgttgaaattttggtttttgacagtactcaaataaatgaactggaaattaaacgaagaagctgagctctttgaaaccagtcctgactcagtgcttgttttctgggtctttgtcatttctctaatgcaaaatgaatcccaaaccacgtagtgcagcacaacaaagatattcaaatggaattaaggttcttattagatctgaagggcctggtgtggctgtggttcctccagaggagacttgtttgtttgctggtctttttacagagtttatggaacagaattttatttttagcaagaactttttttcctcttggaaatgaattaatgatggtgttgccagagagtgtttatgaatacaatgttaaaaagtggaccaaacaaaacacaccttatttccactcactaagaatgcattgcctttcctaacaggagcaggctggcataaatattattttattataataaatacttttgttattatgttaaatatctaccactacagaagataccaaagaattgcaggatctctgtcctcaaattgcttagagtcaagttagattaagaaaaataaaccaataatgaatagtataagacactgtgttatacagtaggagcatttttggtcccaattaggttctgaaggaattcagaacaggatctttgtggaatctagagtggctgggcaggaattcctataaggatgaaatctggtctggcccttgacaaatgggatgtttagatagaaacaaaactaagattacatgaataaagatagtccacagccacctgtatgctgagagtggggcaggcagatggcaaataaagaagaagccacaaccagattcaccaccaaaatgtagagataagtgaaacaggaggtttcagataaaagaaatcccttagggataagaggggacatttagtatatgttatatcttctagtttcagaagatctctatccaataaattcaaaagcatgagttccagcataaataattatatcattgtctctgccattaataatagaggacataataataaagtttgaggtacataaaataatagtaaagagagtgctagacatttgagaagaggatgccagcctgcttttaccactatagatcccccatgtcaagatgctcagagctgctatgacattatgggctggcaaagctaggatttggagaaacaaatttggaaaaacattaaaactctggacaaatcagcaaatctgaataaacaaatcctttaagttatttctactcccaaaagaatggatgactcaattcattgtgcttgatccaacatctgccttgacaaactttagggagaaattgccccaaatatcttagacacctaaagtgtttggcagaatctttgaagctttcctaggccatggtgggttgatttttgctattgaagtgagctactctgcacaaaggggtgggagtctgagagcctgaagcccatcagctggtctcatccttaactgctgctcaccccatcccctctctggtcactcagcagagctgctaagatacagtgacaaaatattcgtacctcttgaaatgcagtttgaaaaccactgttctttcacaaccctctcactttaaaaatgtggaacaatgaaggccccaagactagaaaagcccggggtcaccgggttggttaatggacaggcaggggttagaatccaggtcatctgatttccagcccaatgtgctttctccactccgcacagccctttaatgcatcggtgacaaactgcccattttaaaatatggtaaagtagggcatctaatgaagaatctccagcgggaagatcttcattgtctttttcaccttccatactgtgtcaaatattgatatttataaaataatggaagaactggcatcagaaaatgtatgctacagcgactctttgaatgagggccagaaagagaataaaaagcccagagtgacctgctgtacacccacactgcttccccaattaactccaaacagactttgtctgggatgaaatgatttagcctcaacgcaaggtcagtcccacatatccagaataaagattgccgaatatgcttatttgagctgaattacatttggtagtttaataatatgaatttactgccttttcaagagggactctagcactggggagaactttaaaatgcatcacacttaaaacataaaattaaattcaattaacttttattgggaggctaatacactagtactctagagggagaaacgaagctctcagctttcccaggattttcaaaccaggtctctagaatccaggccaaagatactggcctgtctccatccctcataaagagcttcattggcaactttaacatctgtactcagtggagtggactatgcctataagtctccagctaaaagaccctcaggggcataaaacctggaataatacataggtagaaaacactccctacctacctatcacataaaagacaaaaagccaatgcgggcatgaaaacatgtgagggtctcagagacaatatgctttttattaaaccctcctaccttcctgctatcaggataaagggttacatctatttttttttttaatatttagcacaattagccactcacattgacttattagagattcttcagccagcctcggctttcctaaggccttactgccccctccctccactgagatatccaagtttgcagacaactgtaagtagagtgcctgactactccctttgtgacttcataaagagcaagctatgacatttgctggttgagttgtggaaaaaactgaattccagacagattggccaactatatcctggaaataggatgaagtaatctccttgactcatttaacaaatatttaatgagtgcctactgcataccatataccatactaggcatcagagattcatgagtgaatgaaacagacatgatcacttcccttatggctacaaaagaggggagaatggggaaacatggaaatcaaaaagcatccctgtattatctattctcatactgctaacaaagacatacttgagactgggtaatttataaagaaaaagaggtttgatggactcacatttccacatggatggggaggcctcacaatcatggtggaaggtgaaggaggagcaaaggcatgtcttacatggtggcaggcaagaaagcatgtgcaggggaactgccctttataaaaccagcagatctcatgagagttattcactatcatgagaacaatatgggaaaaatccaccctcaagattcaattacctcccgctgggtccctaccacaacacctggggattatgggagccacaattcaagatgagatttkggtgggacacagtcaaaccatatcagtccctatcttaaacaartaatacaaaaaaaacccaagatttcaaaatcagggttaaactctctgtcaagctggttggaatttgcaagacagaatcagtttcccagtgctgctgtaacaagttcacatgaacttagcagcttcaaacaacacaagttcattgtcttagagttctggaggtcagatgtctgaaaaaggccctatagaggcaaaattgaggtgaggggagaacacgtttccttgcctttcccagctcctagtggctgcctgtgttccctgtcttgcacccctggctccattttcaaaagcacattgctccaatctctgcttgcttcatcacatctccttctcccctgactctgacttccctgagtcctcttcggaaccgttgtgcttacctcaggcccacctggataatgcagaataacctccacaatttatgattttttaatcacacctgcaaagtcccttttgccatataaggtaatcccagtttctaagaattaggacatggacatattcggatgattgttattcagcctatcacaaagaccaaaaataacatcccaaactttaggtactttcgtggaaaaagaaatgacctgagctcttgaagatgtgaccaggatgcagaacagtggaattgcctccctaattacattcatattctctgtctaacagcagtaaaacaagaaaggtgtggtggtggtgcatgcctgtagtcccaactgtttgggaggctgaggctggcagatcacttgaaccaaggagttcaagatcagcctgggcaatagagtgagacctcctctccatttaaaaagaaaaagaaaagcagtgaaacacagtggcaaagaacacaggctgtggggtgaaatacaccagggtattggttgaaccagctcaaccaaacacctggatgaacatgatcaaattacttaacctctctgaacctcaatttcctgttccccaaatggagatcacaataatactccctttctggggttgttatgaggattaatgagataatacctatatagcactctttgttgtatatagtaagcattcaatcgatgttattattatgttattattataattattcaatcactggccacccagcctggacttgaactcacacctgagtattttagaggcctccttcagtacagatcactgaaatttccagaacttcctcttccccttacttgaaatccgatctgtccctcaagcacttgtctcattcatgctccttcatgcttycccagtgggaagaactctatctccctttccttctgacctccaacaacaggtgcaccactcgtgtaaggctatcactgatcttgctgcttccaatcttatttttatgttttagcaccatatgtagattacaaactgcctgagggcaaatactgctgtactagtactcagtgaagacatgtggccacagtagataatcaataaactggttaaataaactcattgcagagtttattcctcccagatctgtggggaaacacaatttcacatttcccattaaaggggagctaactgtacaccctaagatatgctgcaaccttgaagttgaggttctaaagtgaatttagtcctcatctcccttttccattatgtgctccacagttccctatatcccaggatgatgaagacccctctttctccctctgtataccaagaagtttaagtatcagcaacacaccaagggaaaatagcaaacagacttctgtttggacatgaaattgaacaaagagctcacaccagtcagagccagtttgaaccagtctgcacggctctgaaatctgccggacctccctctgaagctggcacaaagacacgaagaacatcattgacttcaatctttggccttctaaccaggaaaggacttgtgaaggtgaatggtttgcagacgaaggggatataaaagagacaaaaccaggataaaaattaaataaaaagtagctgtcttaaactgtaattgcagtcctctgctgagcacgcttgcagatatataaatgtgatttaccatcagcttgcaactacaaatcaggtcttgagaaacacttgtgctatgaaattgtttaatctcatcaagctctgctttcacagcaagccataaatcacaaagtctttgttatcatagacctccaccagcgcctctctggcaggctatggatcgtgggtatatataatcttgactgcacaaacactggggtcgacgcaggctgaaatactttcataatagccactgtgcagctggtggaacacaagcctatgatggatatctcatttcctacagtcggcatctatttcgagcaaattattaccacataaatttcttgtcaacagaaacggccaattaattaagttaaaaatttacttgtgatcacatctacaaaccaaatagaactgcaaggcaattttccagttactgaatatactgcaggtcagtttaatgaataatttttaactttgtcataaactcaaagacaggctaatatctccagaaacctgaatggagaccagctgccgacagatttacacaaaatatatttatgtggaatttgattgctgacatctggggacagaaataaactttctataattacagaggcatctttgccatatatatgcatttctttcaccaaaaaatgcaaatctgtccccagaaagggtgtatttacattttcaggcagggctacaatggggctggatggttcttggaaaaatcattgcattaaattcctgtgctagtgatgggttcattatcatgcaggaagacaataacaggccaagacctgtttatcactgccccccaccttcctacacacaaaaaatcaggatgctttctctctttgaggttgcaagccacttggcacatgtccaatagtggaggcagcattgggaggatttaggggtctgtcaggtaaggcagattgacacagcttccccttagggttattatgcatataaaatagatctacatggaaataaggccggcagagggcccttttcataattcctgctttaaccatgtctctttgaactgaagaaaattcatggatgatgggggggttgggggaatggtagttgtccaggtgagtataaaggatgtggatttggggaacacatcagatctgactgctaacagtgatttactcaatgagccacctattggatatagaattagggttttcaatagggccgttatgtaccccagaagtagagggcactcaaggtcctccaaattatagtcccagtctatctttaacaatttcactgttccctattctcaacctgtcactgccaaatgaccaagctagactacttaatgttcctaccacgtgccttggcttttgtacttctgtaactttgctccaacaaaggacctttgaggtctgttcccatatacttccactttccagatttttatctccaagatgacctccttggcttttcctcagcctagaaaagacctttgctcttcagcaagacacttccttctacacaaaaattgagagcctgtcattctaccacgagcagaatgagcagtttgagttcacagccactgaagtgttcaagaagatgccagacaaccatttggtgggctgttgtaacggggactcaatgtgtgtggagagttggactaaataactgctaaagcttttcatccctgggattataattttttaatccttagcctgtatatcaataaggccacaagcaattctacaatggttgcttgtgcccttgttggtaaacttcctgaaggcagggatcattttactcatatttacagttttctcagcacacagtccagtacctttttttttaaggcacattccctagaaaagttattgagggctgattttacggaggttttctcatatttgcagcactcaacttcaggtggcatttgatacactactgtaccatgataatcaatatgaacagtgctgatgtgtgcttatgatgtttagggcaccttgctagaattctgagaattccaggaggcaaatacattctctcccagactaattttaattaaggaaaaaagtcacacagtgagctcaaagcataccccaaacaaacaggggctgaataaatgaatgatcaatgtgcaaaatacaaaataagatagaatataaatgttaaatcaagggtatcaataattttcagtatcagggtagacaatgcaaaaacttttgtgttttagaatctgaagggtgcaaaaaagtgattccatataattcttcactctgctactgtggatacaaaatcccctaccccaagctgaaccagcttgctcaaggtcactaaaatggaagatggcaaaaagagaatcatacctagctgtgctcaatacctgcccttcattctttccatcacatccaccaaacccaacaaggttactcctataaagtctaaggattaaattgcttttcagtttttcctggttaatttcatgttccttgaatcaaagtataaatacctcttctctggctcaggccttggctctacgtgtccctggattatttctgatgacaaaatacatttcaaaattttctccttgacaatgatcttaaatgtgaagacattgcctaaacatctaatttcaccagtcatctactctggatcctttctgccacacacactcactcacaaataggcattaaatgcagaggttgattggattcaaatcttagctcaaccctttatgagttatgggaatttaggctggttacttcacttctcagtgcctcagtctccttgtctataaaatgggactacctcatagtgtcatgagtattacattagacaacacatgtaacattttaaaacaatgcctataagaagcatttattctgagatcaggagttcaagaccagactggccaacatggtgaaaccctgtctctactaaaaatacaaaaaattagctgggtatggtggtgggcacctgtaatcccagctactcaggaggctgaggcaggagaatcgcttgaacccgggaggcagcggttgcagtgagccaagatcgtgccattgcactccagcctgggcaacaagagcgaaactccatctcaaaaaaaaaaaaaaaaaaaaaaagaagcatttgttattagtttttaatccttagcccgtctataccacttttggcatagtaaatctcatattcttatcccatgctgtgtaaactttatttcttttcatttgtcctgtacttgccttgtgaagcttcaaggaagaattcataaaagaataatgatgatgatgatgataacagataacatttttgcctgtattatgttccaggcactgctataaacactttacattcgttatcaacagccttaggaggcaaatattcttattatctccaaatcacagatgtgacctagaaaggttaagtaacttgtccaaggtcatacagctataattggtcaaactctaagttcatgctcttaatcactgcaatttagtgttactgtatttggtcagcaattccttatcattttatttctctcatttataatattataggtattgctcatgtcctccatcatactccatttttccagaacagtctgagtcagtcattattcctatccccaaggaccttgcagttcagacaaggaaacaaaataaatgtggatatgaaaagcatatccacataagaaaaacaaacttgttctaacccatccaactccatcatgcttgtttatttcattcttccttgaagcttctctctacccagcaacaatagtttttgagagtgtatctaatcatagcaccaaatcactatttaaagatgttgggcaaagtaaaagaatctttcaataaagttcaattagcttgtgagttcaaatatgaaacacacactactgtatttcaggaggaagggagaggccagaggaggttccatagcagagcttttgtgaaattagagtcaggatttctataaaagaaaatgttttattacagagacaatgaacaagaaacatggggaattacctatatgctgtctgagtgctactaacaaaggcaggtaatagtgtgggtgagacaccgctgactgtcaggttatcttgttgagggtcactgctgccagagtgtcaaggtcgggataagacagtataacaaagcagaagcgaggaacgcctgcctccctggctgatccactgacgattagcagcataggggacatgagtgatgataatatcacagttttacatgcgttgagcactttatagtttataaagcactttcacagtcattatctcattatatttttaaagaatttcttacggaagattcagtaatgaccaaacctgccgaggaacacttcacttttcagggatacattttcctgatttgagaaaagctatctactttgagttgggtaaacacatgagcacagatttagaaactggaattcaatgaaggagccagaagactctagggttaactggaggtatagtacagctcatcccagacagtgccagaaattatacagggaatctgcaaaatccgaaaaattctcattaatgcatccaaatctagaaagaagcaaactttatctaggcattcttctcttctccttcttctgactgagtaatggattaagtaaccactgggaaaagcaaatgaaacacagaaaactaacaactgggtacaccctctaatgggcatgaaaattccatgatgacccagtgaattagagaaatcatccaaagcccaaaagtaaaccctaatgaaggtttaacagaatgtcagatgagagaattaagtctggctattccaataaagatcacatcccttctcagttgaactattctcctccctaccccattttctgaagctacagaacatggacaaaacatgaaatacttacttctcaaactgcaactttgagggtaaaagaagctcatattatgagaggtgggaagataattaagaagccattcacactgtatatttcagagttactcaaacatgatcagagagaaaacaaacagcacagcaaaaaattcagactaacaacaaaaccaggaaaaggaggacagaagcacatcatgcaaaagacacaaaaaggacccaacaactaaaggaacagcagaaaaaaaaatccaaatagctttatgctataaaacaacttagtaagaacaagactttaataaaagaggggctcagctgaatgcagtttaattgaatgtgagcctgcctcttgcatgagagggtaagcccactacctcctatctcttccactgattacaactaaacactgcacaaaatacaaggatactgaggatggggaaaagtaaaacaaaagccagtggcttatggagaagctacccaccaagaggtgaatttctgggtttattgttcttttttaatgtggcttttccccaaatgcaggccccaatcacagagtcgtctgatacagcagtaccatggaaatctcaaactccactttctatttctatttcaaatttctgggctgaagagctgtgaaaaacagcccttaaggactggaaggtgtggagggaatcccagagtgagagagctggagaaggggatactctaattctgtatatgaaactacacaagttcccagctcatctctgagctgtgcatttggatgtgcgggacatatccaaagcagattagcaagggctctgagaacggaatgaggatcgtaaaccaccatccaggtttcatactaactcttgagtgtacaggcacagacagatcaagaggaggatgtcaaaggctttgaaaactggaccaagattggaacccacgaaaggcaagacagaacccatagtctgaaagaaatgaggctaattcttcataaaacaaaaaagtaaatattaatattcttcacagagttgtaatatatccaatattgaagcaacataatgttcaaaatgcccaggatacaagccaaaaattactaaatatacaaataagtatta

SEQ ID NO: 7005 - DNA, 16063 bp, Homo sapiens
ctggttatatttttggtcaaagcataaccagttcatgccagccccatagcctttatatttagtgagtggtaaataaaaattcgtgtttaaaatgttgatctggaaatgtttcaggatcctgaatcatccaagttttatatacatatatatttttctgataaaagggaaagtgctgcaatgttatgatgtttctatcagattaaaatatatttttaaaaaactcaatttaagcattaaatcatattcaatgagattttagattattttagattctgccttaccctgaattcaattttttaaaggcagccaaatcctcctgagatgaaatgcccagtttaacctgaattctgtggggaacctaaaccctcaccaatagggagaattcctaattcaatttggttagactgggttactcacagtttagagacttcctatataatttctgaagaagatcataaaatattgctatgatattgcttatctgtaatcataactacaccttcccccattaggtacacctttggccaacctgtgcaaggggaaacccaaatccgggtgtgcagagagtatttttcttcaagcaattgtgagaaaaatgacaatgaaatatgtgagcaatttattgcacaggtacagaccatgatctttactccaaaaaaagttctcactcatttttcattcttattctttctttgatttcatttataaggggaacttaacaatactattttcattttattgataatggagtttgcagctaaataaagtgaagaaagagaagaaaatacagtgcttaaagcagttttttattccatagaccatgtaaattgttctccacctatagattcatgggatttttagaatatgaaaggtatcgtgggctttgttgttttgtatatcgcctaggtggccttcctgatttttctttggagaatcgttaatcatcctttaaatgagtctgtgatattactctccatgccacctggatttttttttagtggaaacagcttacttgcaatcaactgcaattcagagtacccccactatattactttagacttgcagttcatatgtgaagtcatcatttgctctatctgcagcatcctaaccttaagtgaacaactcttcctatctctttgaaattgtcttttgactccccaaagtgaagcttgtgtacgccacatagttcatattttaagtccaattgtcctaaagttactcatcaaatttagtgaacatcctctaggtaaatatcaataattgacaaagacaagcagaatcctacctttacataggaaatgcaggcaaagaaaactagggtggaatttctccatgtcagcagtacattctgatagagttcagtcaactgttttacacaatgatgggtgttccctcagcaaatggtttatttttttcccccatgtgaaaaaaatacccataaacaatctggtagaggctaggagcagtggctcacacctctaatctgagcatgttggaaggccgaggcgggaggatcatttgactccaggagatcgaaaccagcctgggcaacatagtgagccccttctctacaaaaattagccaggcacagtggtgcacatctgtggttccagctacagggaggctgaggcaagagaatcactggagcccaggaggtcaaggctgcagtgaattgtgttcgcaccactgtactcaaggctgggcaacagagcaagacctgcctcagaaaaagaaaaaaaaaaaaaatctgtccggtggaactatctttatatatgagaggctttatttacttgaaataaatttcttagagtgagtttcctgagtcaaaggaaatatagataatgttcatagacagataattttaattttaataaatattagcatattgctctcctaaaagtttttaggcattcaaattcctgtcagaagtacatgagaatactatattttccaaattactttcagcaatatatttagaagttttaaaagtttttgtcattttgatagacacaaatttagcttgttttaacttgtgctatctaatttctatttagtttgagcaacttttcatatttttgttatcaatttggatttgagaactcttaattacccatgtttttctgttcatgtgaaatggaaactttcagtgtaagtactgccttccatcctacaagcattttttttcaagcctgttatttaaataggcaactcatttactttgtcatatttttgacatacccaccttccttatgttcctgggtttccagccttagaaaaaaaatctcactggcccctgtgttgtacatgtggctatctaagtatgctcttaagattgtttacaattttctaatagacataaagttcacttccaatgatgttctaaaatgggaatttttcttccagatgtgggctgtgttgtgttagcacctatctcacaattttgttctctctcactctttgtcctaaatcatgcccacgaaagtttcgtctattttattggttcttatttttactattttctttcttttattattttgtgttcctaaataatttattttctctttcatcttattaattcttttttctaatatttgtagttgattttgttggggtttaaaaaatatattagctgtttcttttagtaataagcacattcactgttttacatttcttctgaactgcagctgaataccattgactttgatgcgaagtattttttcattactctaatatctggattcttattggtttactttatgtattctctttgtttcaaggattcctgaaaaaaggcttttctcttattttcgaaataattaaggttcttctgatcactttctatgatttcattttaatttgactatattatcattagacaaaataaaattgcttttgttgttgatgtaatggctgttaatttaagatagagaagcacatactctggagccagagcagctcctcagcaccaccgtctcttagctgtgagatcttggacaggttacatgatggacctagtttagtttcttcatctatatagtaagataataacagtacctagctcatgtaatagttttgagtatcaaataaactaatatatccttataacattttaaatctggaataaacactgtgttataaaatataactaaatttatatttctctaattattattactgatgatagattaactatagattttttgttattttaaataagcaatataccttaaaaagtgtttgttttgttgttacacatgtgctgagcgcttctgttccatctgttttagtgcctttctagatgattagaatttcttcctcttaaaacactgtgaaccaaaagtatctgagacagatgtcaatcaatttgcaaagcttatgttgccaaggtgaaggatgtacctatgacagcctccagaggtcctaccaacatgtgcccaaggtggttgggctacagcttgcttttatacatttcagggagatgtgagacatcaacaaatatgtgtaagatgtacattggttcggtccagaaaggcaggacaatccaaactaagggggtttccaggtcataggtagataagagacaaacagttgcataaagaagaagtctttgaggccaggtgcagtgattcacagctgtaatcccagcactttgggaggccgaggcgggcagatcacgtgaggtcaggagatcgagaccagcctgaccaacgtggagaaaccccatctctactaaaaatacaaaaattagccaggcgtggtggcaggtgtctgtaatcccagctacttgagagactgatgcaggagaatcgcttgaacctgggaggcggaggttgcagtgagtcaagattgggctatttcaccccagcccgagtgacagagcaaggctctatctaaaaaaaaaaaaaaaaaaaaaaaagaataagtctttgtctttgatcagcctttcactgaatacacaaattacatgtgagaggaggatagaggaatagtcactcctgccttagtgtggctcagtaaatctgcatttttacataaactattaggcagaggaagcaatcagataaatcagatatgtatttgtctcaggtaagcagagggatgactgagtctgtcttttgtcccacgcctgtaaagataagctatgaatttatattgccagggtgaatttccaaagaactgttttaaggaaaagttcttgaggcccacaaagaatttccttgtgggcaaattgtgagggaggtatgtagtttttatctttgtagctaccttatttgggaataaaatgggagacagatttgcccagctgttcccagcttgccctttccctttagcttagggatgttgggctcctgagatttactttcctttcacaataccattcagcttcatttccatcctttaatcttttctcatctacaatgtttccaggagaatttccttgaaatctgtaaaatacagattacctccttcccttatttaaaatgctgatgtaaatattcgcctcctcctactcctcctttaattctttggccatttcaacaagtttatgaggtagagccgtggcacggggtggggatgttaatatatttgtgcaaaaaccatattttaaaagacacttaaaaaaacctcttggatctctaacattttaattataccttctctttatttttcagttggaaaatggttgtgtttctcaaattgtaaatacaaaagtcttccaactctaccgttcgggattgttcatgacatttcatgtcgctgtaattgttacagaatctgggacaggtaattactgtattttttggacgacctggggatatatgtatggcaacttactgggagaagcttgttgagttagcactaagtacaaaattcagattatttctaatttaatacaactgggaatagttgcaagtgcaaaaattattactgaaaaatttacaagattgcacaaagtgagtgttcaataagtatttgttaaaagaatgaaagaagaggccgggcacggtggctcacgcctgtaatcccagcactttgggaggccaaggcaggtggatcacctgaggtcaggagttcaaaatcagcctggccagcatggtgaaaccctgtctctacaaaaatacaaaaaattagccgggcatgatggtgaatgcctgtaatcccagctactcgggaggctgaggcaggagaatcgcttgaacccaggaggcggaggttgcagtgagctgagatcgcactattgcactccagcctccagcctgggtgacacaccaagactcagtctcaaaaaaaaaaaaaaaaaaaaaaaccagaaagaagggagaaagagattaattatttaatttggagtgggaaaatcagatttaactactaattatttcttgttatttaaaaaggagtttgtgattatgccattgtaaagtgctctatataagcatacttgatcaatatcatgatgctattcacactgggcaagctggtcacatttatattgctgtggatggtaacttagatattttcactctgctgtgttcatcattccttacaggtatgcagatcagtgagaagacctcagtttttatcactcaattgcttggaactgtaaactttgagaacatggatactttctacagaagagggatttcttattttggaactgtaggtttgactaaagaatacatgcttccatttcattttcttggatcatagattgccctttgaaaatttctggtcacttttttcctacttttgtaatacattttaagcactactatgtctgaggtgctagaaagtgtcctagattgaaagaagcaatagataacagtatcattttttccatactttatattatatatctatgtatttaatagagcatctttctgtctgttggaatttaggaaaatgactagggatcacatttatgagtagaaaactatttctctgtaaaaatgtaaacattttgtgttttaagtcatgttaattattcttttctcgtacagcttaaattttcggatcccaataatgtacctatggtgaacaagttgttgcaactggagctcaatgatgaatttataggaaattacactacggatgagaatggcgaagctcaattttccattgacacttcagacatatttgatccagagttcaacctaaaagtaagacatcaaagaacagaagaagaccattagacatcccacagaggatttggatatcagaaatgttaaacattaggaatatctcaaaagatagcttgtatacagaatmtattttaaagaaaatttaaaatgtaacttattttataaatttgcttgttcactaaataatacatgagaatacttgttcaagaggatgggaagctaaaagtctatcacgattgttataaatttgctaacaactaatattttcctytaggaaacaagaagtagctcatgaggatgatttgactttcttcctcagatcatttcatgcatagataggggagatcctatactttctgtttattttcygctgcttaaacagaattttgcagttaaataatttgtcagtgttcacatgtagctgaaagaaacagaactgaaacccaattctgtggcttcaattaaagtgtaaaaaacataacaattcaccatcagtctaatgaaatatttacacartctttcatggtcacgttttgtatacaaagagcaggtgctattattattttgattccaataacttaacattaaaacgtcagccacaagctgagattcctccctactctggagagttgagaagcctccattctcagtaacaactgtcttcggatgtcatgatactaagacccttcactttcttttgtcatctcaggccacatatgttcgacctragagctgctatcttcccagctggttgacgcctcagtacttggatgctcacttcttagtctcacgcttttactcccgaacsaacagcttcctgaagattgttccagaaccaaagcagcttgaatgtaatcaccagaaggttgttactgtgcattactccctaaacagtgaagcatatgaggatgattccaatgtaaagttmttctatttggtaagtctcagtcagtgggttcctggaatcctgttcaattgcacgtctgcttagcccagcacagcttagaaakcatgcatcagtcatgccacggtgaccagagtaagggcagccttctcactttgctggtgaatactgttcgatccattaacaacaaacaaacacatagaacgatctaaggcaattaaagtttccctaaggttgaagaacttgctgttcagagtccacttgtttaagcattcaaatgtaactcatatcaagtatttatgacactttgtaatagtaaaatattgggcagatgccagaaagtaaggtggaaagcttatkttgataagcagtaaaaggactttattctcttggttctgtccattttgtctttctaaggaggagcccccaacctttgtggcaccagggactkgcttcatggaagacaatttttccacagatggggtggggatggtgggatggcttcaggatgattcaagcatattacatttattgttcactttatttctattattattacatactcaccataatgtggaatcagtaagaaccctgtgcttgttttcctgcagctagatggtcctatctgttggtgatgggagacagtgacagatttttaggcattagattctcataaggagcgcacaacctagatccctcacatgtgcagttcacaccagggcttgtgctcctatgagaatctaataccactgctgatctgacaggagctcaggtggtaatgcttgctcaccgcactgctcacctcctgctgtgtggcctagtacctgacaggccatggataggtacctgccggtacacagcctggggactggggccttctgctctaagggctattgaagagtgataagacacagacctggaaattaagacattaacttgaatcccccaccctctcctagttagcatgcaagttagtgcatcttggacggattgtttgaactctttaacccttggcttcctcaggtgtacagtgtaattggagattataagacttacctcttagggtaagtgttctgtgtcaggcactgttataaagattgtatatgtgttaactcatttaattagccttatagatatctccattttacagataatggaacagaggcaaacaggtaaaacatcatgttttaagtcacaaagttaatgagcaggtgaaggcgtatttgaaaccggacagccttgacaatttcagagctttatgtgccactttgcacagtgcattgcacatagttcacaaagtttccagtacatgatagaatctcaatcagttttagtcactttctctgctcttttccaacttacgcaaagtctatttttaatatttgcttgtggaagctaccctatcttatggaacagaattaccattaagtaatgaattacctaatctcaatatgagaatatgatgacatcagataatatattgcatgttatgttttctttgttccacacagatgatggtaaaaggagctatcttactcagtggacaaaaggaaatcagaaacaaaggtatacataatgtattcattttaaaatatgtgctctaacttcattttttcttgttaaggatatatagacattatatatatgggaattatatatattaagaaaatatatttagtcaaacatatatgtgtgtgtatatatatgtgtgtatatatgtatgtgtatatattatatagtgaaaagaagttagaacgagcacttatttcaatttgtggatgaaggtaatagttagcacagcctgagggaagctactaaatgtcttgacgaaggagagttctacctgtttcttttattgtcagatcattgagtacattagaaaagaggtgtacaaccgcatattctcactcataggtgggaattgaatggtgagaacacatggacacaggaaggggaacatcacactctggggactgttgtggggtggggggatgggggagggatagcattgggagatatacctaatgctcgatgatgagttagtgggtgcagcgtaccagcatggcacatgtatacatatgtaactaacctgcacattgtgcacatgtaccctaaaacttaaagaataataataataataaataaaaaataaaaaaagaaaagtggtgtacaaaatcccagtattgttattatctaaattatgcagtcttctttatttgtgtatgtacttcctattatttgatttatttgtcttgaaaacagggcccaatttactctttctgtccatgagctattctcttttatctaagtgtaccagtgattcaggaaactttcagcatcgtatctcttcgtctcctatttacacagcctggaatggaaacttctcgttcccactcagcatcagtgctgatctggctcctgcagccgtcctgtttgtctacacccttcaccccagtggggaaattgtggctgacagtgtcagattccaggttgacaagtgctttaaacacaaggtgatgtttctcctatttctggcctgagaagtgggaacagtttgctccctgctgtcttctcgcctgactgctatcaccttcacgtgggaaacttacactcagtgctggcataattgaattattaggggatgtgagaatcaccaaacacaatgcatgatccttggcagcagtgccaatcctgagacggcagcacgtggtgaagggggtctcctgcaaagaaagctgagggtgagagtgggcaaaggaaatacmgtatagaaatctataaggatttattcaggagagattaaatgtattcagatcatctttacataaaatggtctctactctcatctcttttttttctctactttaggttaacataaagttctctaacgagcagggcttacctggttccaatgctagtctctatcttcaagcggcgcctgtcttattctgtgccctcggggctgtggatgggaacgtccttctactgaaatctgaacaacagctgtcagctgaaagtgtaagctctctgacttcctcgtttttcatgtttctctggactaccagaagtcttatccttcagatgatgtcttgaacatgttgaaaatattgaatgttttcttcctttgttccttcgtggattatatacgtatttttcttggctatcctaagagcatgcttataacaatacagaatttgatagataattataacagtttaggaattttacaactgtgatttttaaaaatcataggtgtaatcacagaagtggaaacttggaataaaatgaaatctctatgttcaaggatatgcttggattcagtgtaaagttattatctataaatggatattgtattttcttaaacatttccagacctggaattccagaagttcacatccaatttatttcgcttaacaattgttggatattttccgtttatttctaacacaattacatataaataactattgaaatttatgatcatatttaaatctaatttaaattgtgtactttgtgcaaagtatacaaagacataaagaaggaaatctttaaaatcatttatagtcctaacacttaggcatctttatagttttgctgtaatttttcaagtctcttttctgaaggcatatatattttacaaacttgagatctcaccaaaaaatagttttgtattttgctttcaacattctgtagtaagtccagttttaagtataaaattatagaattcagtaataatattgaataactatagatcattatataaaacatttttctcaatgcaaaacataaatacatttaagttttctattacagggagcaaaaatacttttagttagaagctttcagaatctgaggggacatcaacaaataaaggataaatttatctataaatatggaatatggccatgtgctgtgctcacgcctgtaatcccagcactttgggaggccaaggcgggcagatcgtttgtgctcacgaggtcgagaccagcctgcacaacatgatgagactctgtctcccccgaaaatataaaaaatgagcagggcacagtggtgtgcacctgtgatctcagaaacttgggagattgacatgggaggatcacttgagccctggcgggggcagaggttgcagtgaaccaagatcgtgccactacactccatcctgggtgacagagcgagaccctgtctcaaagaaaaaaaaggaatatgtatatatatatgtgtgtgtgtgtgtgtgtgtgtacatatatatgtttatatatgtacacacacacacactccttttttttcccttgagagtttcatggattcagagtaaatagcttctgctcattctttctacagttggaggtggcaatatcttaggaaaactgcctcaagaaaagaccatcaagggacctcaaaaagaaaattctagaggcattattcaggggtctcagaatatatcagagccaaaagaggttgcccttgtttattattgatagctatattaatagtataaatcaagtgaagttctataaatgagtgaattccaatttatattctataagtttatgttattttttgtattatctatgtaagcttagtttttagttttaaataatttttaaaagtgcaagaattacacagagaactcccgtagacccttggcctgattcaccagtttgtgaacatttcaccgtacttgttttctctttctcactctctccacccctacacacacacacatacatacacacacacacacacacacacacacagagtttatgccatttcagttttttctgaatcatttgagactaggttacatacatcagtctattgtgaaagaaaaatacaaacaactccggaccccaattcacgatgctaaaaggacaaaaaatgaggctgaaaactgagtcatggaagaagttgtttttcttttgttcctaagcagatagctactttttcttccttgttagattagttggtggtttacctattttgccgagttttccaaaaacatataattttaatttattaatgtgatgtaatatgatgtgaggttttttgctactccatcacattaatttctatttttatctttattatttccttactggtgctgtattttgttgttatttttagctttttcacttagaaatttacttcattttcattaatttattttattgggctaggtgtttttaagcctataagtttttccatgatttctacttttgaagtatctcatagatcctgatacatagcaattgcaccatttttatttttcagaaattccgtaatttctgtttgtattaaccctttcactgaaaatttacttactggagtactttataattttcatataaaaaggaatttattttagagttttcttttaaatttcaagttctatatcttcatggccagcaatatttccaccagtatatttttgtgcccaaatatataatgagtttttgcgaatatatctcatgtgttgagaagatatagtctctattatcagtttgttttctatccacgaggttggattattttgatcctttgtattcttacttattttgtaaaatttatttaaccttcttctgctgagtgatgtgttaaaataccctacaaatagtgctctgtttcttcttgcatcttctgtagtttctgcatagataatcataactgttgtgcctttattatgaattgcagcttttagcagtaagtattcttctctatcttgtttgatgtcttttggccttacttctacgatttccgataacaggaggattgcagcctttgcattcttattattttcctttacttttcctttggatttcaccttttgaagtatgcacttcacttgttttttgtatgaagtacagcattatgttttgttttaaatatgcatatctttgtcttctaaaggagaataaagtctattcactctattgatatgatgtatgtgttaggcctcagctctatcatactatttttcttatgattctgtattgtatttaaagctactttatttctttagcttttatgtttgtttgttgttatcttgcttaaagcttctttgagtattcaggctagcttgaatttttattttagtggttatttttatatttacatattttataatatcctaatatcctaatctcattttttcttgcttaaccttaatatctagtcagttatggccgggcgcggtggctcacgcctgtaatcccaggactttgggaggccaaggcgggtggatcatgaggtcaggagatcgagaccatcctcgctaacacggtgaaaccgcgtctctactaaaaatattaaaaaattagctgggcgtggtggcgggtgcctgtagtcccagctactcaggagactgaggcaggagaatggcatgaacctgggaggcagagcttgcagtgagccgagatcgcgccactgcactccagcctgggcgacagagcgagactccatttaaaaaaaaaaaatctagtcagttatttttaatctttgagtcttaactgctacctacacaacagtcagtaatctctagtttccacttttctctccctcttctctcattttattgttgcatctttccttttttgtcagaatatataatgtttacattctgtattgtttctcctattcatcaagtcttactaatttcctgagtcatcttttggttacataaagctcattctccaggaggctgggacgggaagattgcttgagcctgggagatcgaggctgctgtgagccattatcataccactgagcttcagcctgggcaagagaatgagaacctgtctcaggaataaataaataaaaatttttaaaaagtgcattctctgctagagtcctcaggatatcacataagtatagaattctctgacattttcatattcagaattattttttctaaagccttaataaatgaaagacaggtatttgtatattaaatctttggtttatacattttaaaattttttgaaatgctaccttactattgacttgctttgaatatgccttttaatagtgctgacattagtttaattcattttccattatgggctactttatctctatgtctgaaggccttgaatgttttttcccctttatacttagtttcagtaagaatgtgttattctgtagaagttttgccaggtacacagtggagtcatgcaatatgtaaactcaaatcttcttttattttcagatagttcccctgaattataattgtaaatattggtctttccattttttttgttctaaaaaaatctctgtacatttgttggatcttccttgcctgctttccaattcaatcactttgtgacctgttttaattcattctttttcagttttgttctgttgtttttcctctgtgctgcttttaaagttttctctgaacaattttctcttgatgtccttgtactttagagtttatttatgatataattttgtctagttttcctgagttcaataaagcctcattttatttcttcttgggttttgtccatttctgtattttcttaattgaatttctgactcatggtgccttttaaatacctcaaatacatgcttgagaatatttcactcatgttaaattattttggcatggcttttctttgtttacttatttatttacttagtgactttagtggagaagtttcattagctgaagtgttttggtttgcatttcctattttctcttacagaagctttgtatggagttgattttttctagttcttgatattttgtgcagggtgttcataggtgaagagcgccctttctatttttttttttttagtaaaatgcattatttttaaaatgttggtgatggaaatgagggtggagggagttattttatcctatgacatcctttccttttttaaattccctgtctccaaggatctgcatacctcttcttgtgatctgattatttccccttagccatgttttttggaagcttccacttccaggcccattcagtccaagccctttccctgtgtgctgtactgggaactgttgagtccgaaaactatgatttgtatttttaacaatgctagactttctcttacctggagttgacttggtgtgtgtttcttctcatttctccatgccattctgctctctttttctctgcagtctcttaagccttccctctgcaatagcagtagaagctctcttggcatttggtgtttgtttctctactaagaaataatttgaagatcatggtattctctgtattgtagtaatgttaaagatattagtcatgagtatccttacttgttctctttgttgattttatgttttcttcagaagattatgtaagaagatttaaaatcaggcagctaagattattctccagacttagaaattctagcattataattgactgtgtgtacaatgggccttggattaatcaatagtcaggcattgctttcttacattctctcttaaatcctgcgcccaagctgagaaattctgtgaacatgacatcagttgcctaaaacaaaactggtttgctcttttgaaaggaagagcttatgtgaaaatactggattaaatatgatggccgtgctcttaaagaaaagaacaagaataaatggtacagtagacaatttgccaattttgtaattttaaaagaagtgcttaaaattattgggaaatgttttttctcataggtgtataacatggttccaagtatagagccgtatggttatttctaccatggcctcaatcttgatgatggcaaggaagacccttgcattcctcagagggatatgttctacaatggtttatattacacacctgtaagcaactatggggatggagatatctataatattgtcagggtaagatcactaaggattttggaaaatatttcatcacaatttttagtattcataatgcatattaatgttttcttaattatgtagttttcttcctatactttgagattcgtgtctgtaatctgccaatagagtacatagaaattgtcttataaaaaggagatattaattttgttga

SEQ ID NO: 7006 - DNA, 12893 bp, Homo sapiens
cttagcgacctacaaagagacttagactcctacacaataatagtgggagactttaacaccccactgtcaatattagacagatcaagacagaaaattaacaaggatattcaggacttgaactcagctctggaccaagcagacctaatagacatctacagaactctctaccccaaatcaacagaatatacattcttctcagcaccacatctcacttattctaaaattgaccacatatttggaaataaaatactcctcagcaaatgcaaaagaatggaaatcataacaaatagtctttcagactacagcgcaatcaaattagaactcaggattaagaaactcactcaaaactgcacaactacatggaaaccgaacaacctactcctgaatgactactgggtaaataacgaaattaaggcagaaataaataagttctttgaaacccatgagaacaaagaaacaacgtaccagaatctctgcgatgcagctaaagcagtgtttagagggaaattcatagcattaaatgcctacaggagaaagtgggaaagatctaaaatcgacaccctaaaatcacaattaaaagaactagagaagcaagagcaaataaattcaaaagctagcagaagacaagaaataactaagatcagagcagaactgaaggagacagagaaacaaaaaaccatgaaaaaaaaaatcaataaatccaggagctggttttttttaaaagattaacaaaatagaccactagccagactaagaaagaagaaaagaaagaagaatcagatagacagaataaaaaatgataaaggggatatcaccactgatcccacagaaatacaaactaccatcagagaatactataaacacctctatgcaaataaactataaaatctagaagaaattgataaattcctggacacatacaccctcccaagactacaccaggaataagtcgaattcctgaatagaccaataataagttctgaaattgaggcagtaattaatagactaccaaccaaaaaaagcccaggaccagacagagtcacagctgaactctaccagaggtacaaagaggagctggtaccattccttccgaaactattccaaacaacagaaaaagagggaatcccccctaactcattttatgaggccagcatcatcctgacaccaaaacctggcagagacacaacaaaaaaagaaaatttcaggccaatatccctgatgaacatcgatgcgaaaatcctcaataaaatactagtaaaccgaatccagcagcacatcaaaaagcttatccactacaatcaaatcggcttcatccctgggatgcaagcctggttcaacatacttaaatcaataaacgtaatccatcacataaacagaaccaacgacaaaaaccacatgattatctcaatatatgcagaaaaggccttcgataaaattcaacacccctttatgctaaaaactctcaataaactaggtattgatggaatgtgtctcaaaataataagagctgtttatgacaaatccacaactaatattatactgaatgggcaaaagctggaagcattccctttgaaaactggcacaacacaaggatgccctctcttaccactcctattcaacatagtattggaagttctggccagggcaatcaggcaagagaaggaaataaagggtattcaaataggaagagaggaagtcaaattgtctctgtttgcacatgacatgattgtatatttagaaaacccagcatctcagctccaaatctccttaagctgataagcaacttcagcagagtctcaggatacaaaatcaatgtgcaaaaatcacaagcattcctatacaccaataacagagagccaaatcatgagtgaattcccattcacaactgctaaagagaataaaatacctaggaatacatcttacaagaaatgtgaagttctccccttcaaggagaactacaaaccactgctcaaggaaataagagaggacacaaacaaatggaaaaacattccattctcatggataggaagaatcactatcgtgaaaatggccatactgcccgaagtaatttacacattcaatgctatccccatcaaactaccactgactttcttcacagaattagaaaaaactactttaaatttcatatggaaccaaaaaagaactcatatagccaagacaatcctaagcaaaagaacaaagctggaggcatcgtgctacctgacttcaaactgtactgcaaggctacagtaaccaaaacagcatggtactggtactgaaacagatatatagactaatagaacagaacagagacctcagaaataacgccacacacctacaaccatctgatctttgataaacctgacaaaaacaagcaatggggaaaggattccctatttaataaatgggtgttgggaaaactggctagccatatgcagaaaactgaaactggactgcttccttacaccttatacaaaaaatgactcaagatggattaaaaacttaaatgtaagacctaaaaccttaaaagccctagaagaaaacctaagcaataccattcaggacataggcatgggcaaagactttatgactaaaataccaaaagcaatggcaacaaaagccaaaattgacaaataagatctaattaaactaaagagcttctgcacagcaaaagaaactatcatcagagtgaacaggcaacctacagaatgggagaaaatttctgcaatctctccatctgacacagggctaatatccagaatctacaaagaacttaaacaaatttacaagaaaaaaacaaacaaccccatcaaaaagtgggcaaaggatatgaacagacacttctctaaagaagacatttatgcaggcaacaaacatatgaaaaaaagctcatcatcactggtcattagagaaatggaaatcaaaaccacagtgagataccatctcacaccagttagaatagcattcattaaaaagtcaggaaacaacagatgctggagaggatgtggagaaataggaatgcttttacactgttggtgggagtgtaaattagttcaaccattgtggaagacagtatggctatttctcaaaaatctaggaccagaaatactgtttgacccagcaatcccattatcgggcatatacccaaaggattataaatcattccactataaagacacatgcacacatatgttgactgcagcactattcacaatagcaaagacttggaaccaacccaaatgtccatcaatgatagactggataaagaaaatgtgacacatatacaccatggaatactatgcagccataaaaaaagaatgagttcatgtcctttgcagggacatggatgaagctagaaacaatcgtcttcagcaaactaacacaggaacggaaaaccaaacaccgcatgttctcactcatatatgggagttgtacaatgagaacacatggacacagggaggggaacatcacacaccggggcctgttagggggttgggggctaggggagggatagcattagaagaaatacctaatgtagatgacgggttgatggatgcagcaaaccaccatggcacgtgtatacctatggaacaaacctgcatgttctgcacatgtatcccagaacttaaagtataacaaaaaataaataaataaatagcaggaaattctgtcatttgcaacagcatggatgaacctagagaacattatgttaagtcaaatgagctaggcacagaaagacaaatacagtatgatctcagcttatgtgtggaatttagaaaagtcaaattcatggaagtagagaatagaatggtagaagtagggaaaaggtggacaaaaagaaaaagaaaaaaaaaaaaacactcccaccagtgccatgacagtaaatttacagatgctggcaactcctggaaattactctatattgtctaaaaatgggaagaactcttggttccaggaactaccagcttctttcctggaaaactcatgaataatgcatcccttgcttagcatgtgatcaaagataaccataaaaatagtcaaccagcagcccatggggctgctctgcctatggagtagccagccttttatttattccttcactttctttctttttttttttttttttttgagatgaagtctcactctgttgcccaggctggaatgcagtggcgtgatctcggctcactgcaagcttcgcctcccgggttcaagcaattctcctgcctcggcctcccaagtagctgggattacaggcgcctgccaccacgcccggctaattttttgtattttttaatagagatggggtttaaccatgttggccaggatggtctcgatctcctcacctagtgatctgcccgcctcggcctcccaaagtgctgggattacaggtgtgagtcaccgtgctggcctattccttaactttcttaataaacatgatttcactttactgtcagcttgttcttgaattctttcctggaggaagccgagaacccatgtggcctctctggccgaatcccaattttggggttcacccagtaataaaccaaagagttgttttgttttttagactttagacaaactggataaagaatatcaggaggaaatgatttttccattgctaaagataaacaatatcctcaagttcagtgatattaaaaaaagggcaataagaaatttacatcagacagaaaagtacagagattaagagcaggggtttaaatcgtcactcccccacctactagccatgtgaacttggagaaagtatttaaactttatgggcttctgcttcctcttctgtacgatgagggtaatagttcccactcgtgatgactaagcaagtttatacatgtggagcacttagaacagcatctaaaatgtaagtactcagtaaataatagctgactcaagtttataattaagaaggctaaggaagtagcaagatatatgaaaatgatattcatatatactatgtttttaatttagaaaagggggaggggaatttgttagtgtattttctcagttatatagtctgggagagtatttaataaactattatctagaggcagtaaatactgtgcaactacattttaaaatttaggccaatctacatttcaatgtcacataatttttaaaatactgccaatttaagaagctcccaatttgggaggctgaggcgggtggatcacaacgtcaggagatcgagaccatcctggctaacatggtgaaaccccatctctactaaaaatacaaaaaattagccaggcatggtggcgggcgcctgtagtcccagctacttgggaggctgaggcaggagaatggcgtgaactcgggaagcggagcttgtagtgaaccgagatcccaccactgcactccagcctgggtgacaaagcgagactctgtctcaaaaaaaaaaaaaaaaaaaaaagcagctcccaatttcagagatgcttcaatgtgaaaaaaaaatgcacattttagattgaatgaaatagattaagagatggaaaacagtaacagcaatattccaagcatcagatgttttatagtctcatctttttctttttttttttttgagacagagtctcattctgtcgcccacactggagtgtagtggcatgatttcggctcactgcaagctcagcctcccgggttcacgccattctcctgcctcagcctcccgagtagctgggactacaggtgcccgccaccacgcccggctaatattttgtatttttttttagtagagacagggtttcaccgcgttggccaggatggtctcgatctcctgacctcatgatccgcctgcctcagcctcccaaagtgctgggattatagacgtgagccactgcgcccggcctatagtctcatctttttctatacaagctgtgaactaaaatccagtttctaaacatgcatagctgcttttgttttgcttttgttgttgttggttttttgttttttgcttttaaagcaaagcccactagagacagcaccacatatgtgactggtaaggcaacagcagaagaaaggagtccttttatyaggagtcttgacctaaaaagccaagtcctaataatgaaaaaacaatgagcaaagaaagaggaagaaaatggctgtgaaagaagagaggacagtggaaatgggatatgatagagaaagctacaagataaaagaaatacagaaattcctgacaatgtaacaaagcattctgggggctttcagtggaggagcagccagatcctacagaccagcatgctcttgaaataaggccctacgacaacatcagaaaggatgccaagaaaattggaactgttaaactaaaagggacataaagaaagtccagtccatgaatactcaaagagaacaaaaagtatactattctctaatacaccccagcacaaaattgctacacattgctgatgcgagtatatgratggtgtagacacacaaggaaagctgagtaccactgatgttatttagtttgcaagctgggattacaggtcagaaagagttacatctggcattccatctcctctatagcaaagccactaagtcatctagcctctccttgaatatccctcattattaagaaactcatgatcactgcagaaccctaattccactttctgacagtgttggtagaaaattcttatgtttggttgggcatggtggctaatgctggtaaatcccagtactttgagaggccaaggcagaaggatcacttgagcccaggagttcgaggttgcagtgagctatgatcatgccaccatactccagtccaggtgaaagagtggagaccctgtctctttaaaaaaataaaaagtaaaaaataattattacattgaaccaaaatgtaccaactagtttggggttcttctgtttattcaatatctattgagcccctgaatggactttgagaggcccttgaggagcaatggatgactacagaattaggggctatagggcagacacagagcaaaaacaagaagtttggtgaagaaattgaggtgactgacaacagtgaaagcaggaggaattttttctagtcagggaaagctagaagagggctgacctcaggtcccaaccaggagatatgtgggtcataaaagatgaacaaccgtcacttgagtgtcaccagggaatcagtaatgtgggagaaagccaggcttcatgcagaaaactgtgtgggtctgtgttgaaattcaggttttagggaattttctaaacataaaactggggttgctcaagacagcacagaaggaaagactgaggaaagtggtcagcaataaaaggcagttttggaaggggctagggaggcaagggctaagccagagggattgaaagggaacggaaagacatgcccggaagagcttgcacctagggcagtaacttgtagtaggtgctagatccttgtaaacaaacatgatccaatgagacaagcattagattagagatacacaaaagctgccacaaggaactgttagggcatgaaaacaataccccaaaatacggcactttggcatgctgaactaaggcagcagccacaggggcagagcaagatgatggaatagaagaagcctacactgtttgtcacccccctcacccccaggaggaacatcaaattttaacaactaactacatacaaaaggcagccatctcaaataaccaaaaatcaggtgagcattcacagtagctggttttaatttcatatcactgaaagagacattgaagagaataggaaagacagtcttgaagtgccaatgccagccctcccccttctcccagcagtggccacacgtgcagattttgtgcttttgggagatggacagcacagcagttgggaggctttgctttgaactcagtgctgccctgtcagtgataagcagaaccaggctgcactcagatgacatctaaccacggaaggagcatttggactggccttagccagagggaaatcacccaccatagcagtcagagcttgagttcccacaagcctcacaaccacaggccagagtgctctggggccctaagtggtcttgaggggcaggttaggccacaaggactgcaattcctaggcaagccctagtgctaagctgggcccagagccagtggactagagtaggaggcacacagcctactaagacaccagccagggtgactaagggagtgcttctgccatgcctcccccacccccagcagtggctgcgtggtggggagaaatctgtgcatttagtagagggagaatgcagtgactggggcactttaacttaactcagtgctgccctgtcacagaggaaacctggcaggatttaccccctgctgactaaagagcgccaaggccctgaattatcaacagcactatccaggtagtataccataggcactgggctctgagacatgctggcttcaggtgtgacccagcacattcccagctgtgagggctacagtgaaagactcctgtttgagaaaagcagggggaaaataaaggagactctctgtcttgcacctcaggtattagctcagctacagagggtagagcaacaagcagacttctgaggtcactgagtccaggcctaggctcttggtcagcatttctggacctgccctgagccaaaaggtgagtcccagagctggcagcattggtcacaagctgacggaagagcccttaggctttaagtatcagtgatggcctggcagaacccccccataagccagtggtgatggcagccacagggagaggatcttctgcccgtggaaaggggagggaagagtgggaagcaacttgtcttgtgggtcacgtgccaccttaaccacagtagaacaaaacaccaggtaaatatctaaggttttgacttcaatccctggtgttctcagacagcatctatgaaccaatctggggcctaggggaactcaccaccctggagggaagggcacaaacctggctggctttgccacctgctgactgcagagtcctagggcctggagtaaacttaggtggtagccaggtagtggttacaccgggccttgggcaagatcgagtgctatcctggcttcaggtctgaaccggtacagtcccagttgtggtggccacggtgtgctggtgacaccccaccccccaaggtccaggtggtttagcacagagagagactccatttgtttgggagaaaataaaggaagagaacaagagtctctgcttggtaatccagagaattcttccagatcttatctaagatcatcaaggtggtacctctataagtcggcaagaaccacagagttattcagtttgggcccacatcccctcaaatacctgaaaagcctttccaagaaggatgggcacaaacccagacagtgaagactacaataaatacctaactcttcaatgcccagacatagacaaatatctacaaggatgaagaccatccaggaaaacatgacctcgcccaaagaactaaggcaccagggccaggcgcggtggctcacgcctgtaatcccagcactttgggaggcagaggcgggcggatcacgaggtcaggagatcaagaccatcctggctaacacagcgaaaccccgtctctactaaaaatacaaaaaattagctgggcgtggtggcgggcgcctgtagtcccagctactcgggaggctgaggcaggagaatggcgtgaacccaggaggtggagcttgcaatgagccgagattgtgccactgcactccagcctgggcgacagagtgagactctgtctcaaaaaaaaaaaaaaaaaagaactaagacaccagggaccattcctggaaaaaacagagatatgtgacctttcagacaaagaattcaaaagagctgtggtaaggaaactcaaagaaattgaagataacacagagaaggaattgataattctatcagataaatgtaacaaagagactgaaataactaaaaagaattatgcagaaactaaaaatggaattggcatactgaagaatgcatcagagtctcttattagcagaacagatcaagcagaagaaagaattggtaagcctggcgttggagaccagcctggtcaacatgaggaaatcctatctctactaaaaatacaaaaattagccagacatggtgacatgtacctgtaatcccagatactcaggaggctgaggcatgagaatcactttaacctgggaggcagaggttgcagtgagccaagatcgcaccattgtactccagcctgggtgacagagtgagactctgtctcagaaaataaataaataaataacatataatggagctccaatacatctagcacttttcagtggaaaccttacaggccaggagaccttacaggcatgacatatttaaaatgcggaagaaaaaaaaaatttaccctagaatagtgtatccagcaaaaatatcctttaagcttgaaggagaaataaagactttcccagacaaacaaaagctgagagattttgtcaacaccagacctgtcctacaaaaaatgctaaatggtacttcaatcagaaagaaaaggacgttaggccaggcgcggtggctcatgcccgtaattccaacactttgggaggacgaggtgggtggatcacgaggtcaggcgtttgagaccagcctgaccaacatgatgaaacctcatctctactaaaaatacaaaaattagcagacgtggtggcatgcgcctgtagtcccagctactcaggaggctgacgcaggagaattgcttgaacccaggaggcggaggttgcagtgagccgagattgtgccattgcactccaacctgggtgacagagcaagactccatctcaaaaaaaaaaaaagaaaaagaaaaagaaaaggacgttaatgagcaataagaaatcatctgaaggtacaaaactcactggtaatggcacacagaaaaacaggaatataacatggcaatttttggtgtgtgaaatactcttaagtagaaagactaaaccatgaacccatcagaaataataactacaacttttcaagatatagacagtgcaataagacataaaaagaaacaaaagttaaaaggggaggagaaagttaaagtatatagttttattcattttcttttttgcttgtttatttctgcaatcagtgttgtcatccatttaaaataatgggttacgagatagtatttgcaaaccgaatactaattgttgtgttttatgtgtgtccattgtgtgcatgtccaacgtacaatggacacccaaaaaataaaaagaaattaaagcgtaacattggagaaaatcatcttcactaaaaggaagacaggaaagaaggaaagaaagaagagaagaccaaaaaacaaccagaagacaaataaaatggtaggagtagtgcttacctaccaataataacactgattgtaaatcaactaaactctctaatcaaaagacatacagttggccaggtacagtcgctcacacctgtaatcccagcactttgggaagccaaggtgagcagattgcttgagcacgggagttcaagaccagcctgggcaacacagggaaaccctgtctttacaaaaaatacaaaaattagctgggcatggtggcatacacctgtagtcccagctactttacttggaaggctgaagaaaaggatcacttgagcccaggaggcagaagttgcagtgagctgagattgaaccactgcacttcggcctgggtgacacacaacacaaagacatggagaggctgaatggataaaaatgcaaggcccaatgagctgttgcctaaaagaaacacacttcatttataaagatacaaatagactgaaaataaatgaatggaaaaagatatttcatgccaatgaaaacaaaaaaagagcaggagtagctatacttatatcagatgaaataggtttcaagagaaaaactgtaagaaaacacatataacgtcactatataatgataaaggggtccattcagcaagaggatgtaacacccagatataaaggaaatattattaagagctaaagaaagaggctgggcgcggtggctcacgcctggtggctccgcatttgggaggccaatgcgggcagatcacgaggtcaggagatcaagacaatcctggctaatacggtgaaacccgtctctactaaaaatacaataaattagccaggcgtggtggcaggtgcctgtagtcccagctactcaggaggctgaggcaggagaatggcgtgaacccaggagacggagcttgcagtgagccgagactgtgccacagcactccagcctgggtgacacagggagactctgtctcaaaaaaaaaaaaaaaaaaaaaaagagagacagatcccaatacagtaatagctggagacatctaaatcctactttcagcattggacagatcttctagacagaaaataaacaaggaaatatcagacttaatctgcagaatagaacaaatgaacctaataagtatttatgaaacatttcatccaatggctacagaacatcctcctgagcatatggatcatcctcaaggacagatgacatgttaggtcacaaaacaagtcttaaaacattcaaaaaaaactgaaataatagcaagcatcttctctgaccacaatgaaataaagctacaaataaataacaagaggaattttggaacatatacaaacgcatggaagttaaataatatgctcctgaatgaacagtgggtcaatgaaaacattatgaaggaaattgaaaaatttattgaaacaataataatggaaacacaactaccaaaatctatgagatacagtgaaagcagtactaagaaggaaatttacacctatgagggcctacatcaaaaagaagaaaaacttcaaataaataacctaacattcatcttaaagaactagaagagcaagagcaaaccgaacccaaaattagaac

SEQ ID NO: 7007 - DNA, 12732 bp, Homo sapiens
gagattaaaaagggaaagatgtcaataaaggatatagtatgaggtgggttactgctaagggcagctgggtttaaccccgtaaggtcagggatcagcaaactttttatgtaaatagccagatagtaaatatattaggatttgtgggtcatatgatctctgttaagactcagctccatgtagaagcagtcatagacaatatgtaaatgaataggcataacaatgttaccatatatatataattatatatatatataattatatatatatatatataattatatatatatatatatactttttttttttaaacagaaacagcagaccatattgggctgaccagcagttgaccaccaacttcttctctagaatggtatgggatgtaatgtggatcacttctcagtgacatctcagttagggacaagggagctgggatattaaccaacctcctgccatcagtcattggttgagggctgagaaggttcaagcagccagagaatagagttgcaggtgtctgtagttggaagccatcaggttggcaatgcacaagaatggtgattgccaagggaatatgggcagagcaccaatggggtctgctaacagcccttgccccagcctaatccattctgaaaggaaagaaaatagggtggtgacagagagaaacacagaggccttctaagatgggtggtgtggcttgtcaactccactcttcctcggccttcccccccacctccctctgtccctgccctactggacttgtaaggaactgtcatggtgatgaacccagtaagtggagctttctattaacacattttacctgttgccccaggtatgcccaaccacagctcaaccaaccaaaggccctcactttctttgtatacccacagacccttttatccttaaagagcgctcttctgtgtgtgggttggtggttgttgttttaatttgaaattaaaatgtcattttgctgattagggaaatcaaacaagggattgtgcagctaccaagtctaccatcagaagccccaccccatcctcactgaaggggagaaaaatgacccttcctcttttctacatccagttaaagtcaaagcaaaaaaaaaaaaaaattaaatcatcttattatgtaattgggactaggcctggggctgcagcagtaaagaagggattaaggacagcgccacctgggcagccattctcctgggtcccattaccacccccctcactcctttttatagccaacagattaaaatgcgagcctagcaatctttgatctttcacttgctgacacaaatcctttaagcttccaacattttctgctgaggtaattagtactaattaaaaggtttccaacagtctttgctccctttttttcctatgtgtctcccccttctccccctcccgcaaagaaatcgcttttacaaatacattccatctctgaagcacaggcatccctcactttctcctttatctgacttggccagatcaagtagattagtgactccattattccaaatacaaagccagacaacaggtttttactatcgctcctgacctgttgagactgcatgggcttatatcccgaaagaagcgcctcagcttgtatgaaaagacagtccaattatgcaggaaaagacactgtgtagtgtcttctggtgcccaaggaaggacaccacttaatgatgaggagtttaactcagtgtctgtcacacgcacatacatgcatatgtgtgcatgcacgcactgcctcgttgtgaactgaccagttgcacaacttacatcccagcccgctttgttcctatgctttataattgtttggaggggttacaggggtcgggggaagagccaaaaggactatgtatttaaaggataatgccaaaaattaaagaaccatcttattaaagtttaaaaaagactcggaggaaagcaccccccaacccccgatacacacacacagccatggattcaaattcacaatgaaatgaacaagtgcactagggtcccattggctcttcaccataggagtgggacatgaaagctctcatgctgtatctgggctgtgagctctgtcctggaacaaaagtatagccctgacatgggcttctgagatgcaccgtggcctgcagctatgtctgatgacaaagtgcagtggctgaaaactctggttggaagacagtggtccatcgaggagaggaacccagtgcagaccaagggcttgaacaaccggtaaacagaagcccaatgttgacagcaggactttacttaactgcgctccaggaaccagctttgggcaaggctgctgctcctctccaagccattctgacaacctggcaaccctgaactgcactcagaccctgcccctaaccctagagtgtgacagtcttctcacataggccctggagttctacggccagcctcactccctcctcctcctcctatcctggactttgggaagggagcaaagggaaggacactatccagcatggcttgccctcacctctggtctcctccttccatcccatgcaatctggagacatgggaagtcagggatgtgcctatgcatctcccctcagagtaaagaacttggccccatgttttgccccacctgcccaaagccaatccctggaggatagagctggaacaaaatattcactctttaagatgccaccactccacaggggaagggcacatggtgttaaaatctcaatcacacagaatccctttcctaaacaatgaagactgaggctcggaggcgttaatcttaaggaaatggtgatggctactttcatgagcacttaagacttgcacacgatcctcacatgcagccctcgtctgcctcgcccactcaccctgagaggcaggtgagatctgctccactagtcacatggaggaactgaggatggagggggtggcccactcgctcatggtcacacactggctcacagcaatggctccatggccccgtagagcatccagaggtacgggagacgagatggccacattcccacacccctcatcctggcattcagtatttttaggggattggaagtggcccctctcctcattcttctgggtggactacaccagtggctatagccagcagacccctttcctgactggctgttggggtcttttgtgataaatggatgaaaatcctccttcagaacccctgggcttagaaattagtcacttcacacccaaaatgagctttgatgacgctcccacaattagtgtgggatgccactaaaaaatatatccactctctaccccatcctcctaaaaaaaagttaacactgaaaagtaatggatttaatgatctagaaaatctagatgctggaaactccaagggagatcatattaagttagaccagtacaaacaagccaaactcgatttatcctcttgtggttacagattttatctactaaaccaggttttcagggctagtctgttttcaatgaatagaatttttgaatgtcaagtctcaggattcctagtggaagataatttaccctcaggatctccgttcagccagggctggccatgcttgcatctctgcagagggcctgagacaggccagtcctcctcccgttcctgtggccaggccacctgttgagggccagccacaggcaggattcagaggtggcagaggtcaggattcagggagaaagaggaattctttccttggctccttcctgagagagtaaggaggcatgagagggggagtgggagggtaaagaaactgcagagaatgtcctggaatggatgttgcctactcttaaaaatatggatatagcctgggcacagtggctcacgcctgtaatcccagcactttgggaggccaaggtgggcagatcacgaggtcaggagatcgagaccatcctggttaacacagtgaaaccccatctctactaaaaatacaaaaaattagccaggcatggtagtgagcgcctgtagtcccagctactcaggaggctgaggcaggagaattgcttgaactcgggaggcggaggttgcagtgagttgagattgaaccattgcactccagcctgggcgacagagtgagacactgtctcaaaaaaaaaaaaaaaaggatataaattagattaagagtaccctaaacaccatcatggacctggcacttagggaaatacctcagggtacagtggactctctagaccaaaagtgacacaaagccattttaagtcttccttcatcccgggacagtaaggccaccagcttgcctctcaatgcaatggtgaggaagcctttggctccctagccttgctctccaaggccttttcccaggactgttgtgcgagaaaaggcggccaccttcagggggagggaacttggctgctatgctgatttggggagctgctaagacataattataacagagagaaggcgggtgggggagagggaaggaaattacctttgaaaattatgaaaaataccttgacggcatctctttgaggctcacatttagctctcggaaaagatttctgccagagggtgagttctgacagggggaagatgaaatgaggggctgggggaggaggcagtgaggggggttgctcggcaaagaggcagccgtctgtcaggactgatgactcggcagctgaagtcagactgggatatttacccacccatttcagggagcggctgcggaggagaagaaaaacctggataacaaccagtctggccgagatgaccacaaagagacacacataaaagctggtcaggccctcagaccactgggaggttccccctaggctctgatgatacatgggagagaattaggtttggaaggtaacgcagagagtccctggctctgtcgaatctacctagagcaaggttgcgagctcctggcccgcaatccacactcacatgtcagagggatgcaggcaaggagagagccaacaaatcccaacacttcttttttaggggccccctagcttcgaattttaagacatcacacttttctgcaccattcctggctaatgtgagctcatcaaaaggctattttccttacttaattccaaaagaagcagggaacttctaacataaggttgtttttttgtttggttgctatttgatgagggatgcatcttagtgtagtgagaaaaacacagaactgggagtcagaagcagtgggggtcccaaagaggtggggagggggctagtgggagcacctaccttggcagaaaggggtgtttttagctctgacattgttgagaatcagctcatggtggtcattaaaagcagagtgaggggctttgttattgtttgtaaattccctgcagacagtgcagtcccttattacctgcacctgagcaacctgctgccatccctaccccaggtactccactgctcaggagacctgggttcaggatcacttctgctccctgcagtatgtgtgattttggacaaggaacttgatatatctatgccataggctcttcatctgcaaaaaaataaggggactggctaaatcattactaaatctcttccacttaaaagtttctaagaactcatattttctccctaaatatttcaacttaaaaagtcagcagtggaaaggatctcccatgactatgtttaaggaaaacacaggctcacatgggcagtgcttaaagatgggccctttctcagagagctctccaacacccatcaaacattgcttccatcttcagaggcagggaagaaattctctgatccgaaacactgccagccagtttgtccagcatggcagaggactgcagtgtggacagccatgggagtgtgtacccggtgggaggcaggttggcactggccacgccagtcccctgtgccctgcacagtgatgctggatgatgccacctatttatataacacctcaagagagaagccagcctcggaattgaaggcaaacagtgtttgttttttgtttttccaaagatgagttaatgtgtttcaaagtcaactggagaaagggtgcagcaggcaaaaaaggcaaaaaaaaaagtgtttaaactgctgcggctttaaaagcttaaccagtaaagcccctccagccttcagtcaatgggaatcaaaacaatgatttcaagctattttattcagtctacaggcaggatcactccatggaggcctgctcctttccttccttttcccccatttctaaactgtgatccatgccccactctgaaasaaccattttgacagtctattgtgtagccttcttaggacattagccaccccaacgcaaacaccccggcaatgggagttttccagaggcttctccccggcccccgccctccctgcttcttcaaatcctagaggcaatgctgcagaaacctataagcagagaggatttctaatgcctgccacttgcttaaaattgattttcagatgagagctcgagagagccaagtatccccacagttcggaacactcatcatctctgacgatgaagtcatttgctgccataagcagaacaagggttaatgacccaaaatcgaataaattactggattcagatccatcatgaccattggttttaaaaataatctgaagcgagtgagtgcagcctccaagccatcacaaagacggcctcrgctccccttcccctcctctgattctgacgataaatcctttggaagagcatctcaggctcacacaccaattarcatttctcataccggtgcacaagggccgtgmaaagtgattccatagtaaattagtctggaaattgcctgaattgtgatgccgggagatgtcctctaggtttgggatggcggggagaagggagaactttcttccctaagtgccactctatcgtctcaccctggaagaggtggtggggacaccagggcaggtggctttcagcaccacagtaaatcttccaacaatttatccaaacaaaggccagcatggggagagggcaatacgcaggaagcagatgaataagcaagatcaattatggttggggggtgaccctgtagccctgctccatgccacagatctcaaagcaaattgtgccagagtgaagttgacatgcctggactgaaaacagcggtctcctaaaggatgtctgcttccctcccattcgtcagagggggagcaagaggagagaatggggaaggaggggagggtgggcagagaggggccaagggaagggtgacaaggaggcgggtgaatgaaaaaccacgcataatggcctgaggtttattttacagagaacaaaatggctcaatttgagcactttagactgtcgaaattggctagcatgagatacaagaggttcatccaggaggattgttacatcggctacagaagactgcaggcccagggggcagagagacggaaaataaatatataaacacacacgcgcacacacacacacacacacacacacacacacacacacacacacacacacgccttctccatcctgcaaactttagcaggaccagggagcattgcagaagtgctttgccgaggaactgcttagccaggcatctgaatgcccttaacgcttgcttttcaaattgcatctctaaaatgtggggctcatcttactttcccctcttgcttgaagcctagaaagccacgtctttttaaaaagaagcctagtttattatttagtaggatcagcaggttttttctttttttaagggctgctaataatttcgattcccctttcaaaaacaatccagccctcactaagaaaaagtcagagcgactgactaatgggagtaattcaaagtacctcaattaaaattcaggttttggcctttcgagcagtctatttaaagatttttttcccctagattggttgtagacagatgattattaaatatttatgtgtctgtgaaaggggctcttggagcttcgctctgcagagggctgaggtttttgtggctgctgtttctcctcttggagaaacaacagaatagttagtttacttggtttcttacccacctggtttccaagagccccctacactagccagccggtcttcacatggccggacagaggcaaaacggttctctccaggtaagcggcagagtcacccagagcctttgctcagcggagctcaggctgactctccttctgaactcagttcaaaccctcactcctctgaacaccctcagccgccgcacagggagctccagggctcttgggtctttcacagtcctcaccataacctgccctatattagtgggtggacactccaggaagataaagaaagtcttagctccttaaatgttcacagactctgaagacagggtctggaccttgcctgaggcctctgccccatcaacttttctcattggcggatctgttctctttccctttgtgaaacagcgactccatttcaagcctgcctgaacccctgcattagaggggttctcaccacagcctagaaccttcctaagaagaactaagtctcagctggttcatttatttatttatttatttatttatttatttaagatggagtctcgcactgcacccaggctggagtgcagtggcaccatctcggctcactgcaagctccgcctcccgggttcacgccattctcctgcctcagtctcccaagtagctgggactacaggcgcccgccaccaagctcggctaattttttgtatttttagtagagactgggtttcactgtgttagccaagttgatctcgatctcctgacctcgtaatctgcctgccttggcctcccaaagtgctgggatttcaggtgtgagccaccgcgcctggcccatttatttattttttttaggtatttacttatttatttttagagataggactctgttacccaggctggagtgcagtggcacaatcatagctcactgcagcctcaaactcctgggctcaagtgctcctcccgtctcagcctcacaagtagctggaactacatgtgccaaggaaactggcttgattttaaccccaaacttcctatgggaaactgacgtggggtggatggtacaagatagctatgttctcttcatttattcagtcagcaaaggtttatcaacatttttctatgagggaagcacttgagtaaatcaatgaatttcaacaagttgaaaggatggatcacttccacattctggaatatcatgtagctttaatatgtattgaaagacatgcataatgtatcagaattgtaaagagaaagcacatagtacagtaatacatacagagaagtcctatgtttagggagaagataaacaaaataagaaaaagagagacagagaaagaaagaagactgaaatgctaccttgttggagggggataaatctgtctcatttggcttcctgcaattaggatttacacttatccatttattgatagacactaataaagtaaaaattttaaggccaggcatggtggctcacacctgtaatcccagcactttgggaggccgaggtgggtggatcacaaggtcaggagatcgagaccatcctggctaacaaggtgaaaccctgcctctactaaaaatacaaaaaattaaccaggtgtggtggcaggcgcctgtagtcccagctactcgggaggctgaagcaggagaatggcatgaacctgggaggcggagcttgcagtgagccaagatcacgccactgcactctagcctgggccacagagtgagactccgtctcaaaaaaaaaaaaaaaaaaattaaaagaaaaggacatacctcctgctctcaaagttggctttggtgcagtggttccttaatcccctacactatcgacaacaaaatcacctgagaaacaattttaaactgcagacattggagaccatacctgaaacttctgataaagtagacctgggggtggccagtctgtggcctgcctgacactgtctgccgctctttctgtaagtttccccaggtctttctgaaaatatgcaaagtttagtaaccagcagaccagcagtttactctgcgtcaatctctatgtcatgtctcaagactaagagcagcaattatccataagcaagaaactgtgattcacaagcttatcaagcagtctgctctcactctacataggaggcaaagtcatctgctggttcagaaaatatggtctactttgattacagctataagtgaaaatctaagttcggactataccataatacctaaacatatttaaaattggataatttttcactacatttgaaaatttactcaatggtgtaaatgcctatatattttaaatatagcaaagcaccttaaaaattactactgaagctaaatgtgcaactagtaacttatggtgtgaacttgtaaattatctattcttaatacagataagaattttaatcagtctttattcattcattgttcattcatttgctcattgatgaatttattcactcagtttttcatttaaccactcatgtcattcatccaacaaacgttttgagccattagaaacccaaaaaccccacctgggctagagaactctggctttatacccaggtcccaatctccatctgataccaagcactgcctagcggtaccatgagccacataagattaaggactggcaggcacaggtattcttcatctccctaagccacattgctcagatttgttaggaagaaatgatattccaggcattccaatgttgactggcttcttcctccccctatcagacactatgagctcagagacagttcattttataatctttttgtccttcaacaccctcaactgacttacctgccatttactcatctcaccttcctaatgctgcctctcctgaccaccctgttcaatactgcaacctgtcctgccacttccacccgggactactaattttattacctgctctctttttcttttttccatagcattttttgccctccaacgtgtaacgtctttatgagacatatttattgtttaatgtctattataaatttttccattttgcccatggatttaatgcaagcacctaggatagtgcctgatacacactgagcactcacttgagtggcagaaggaagggagagaggatggtagagagagagggtgggccaggggacgttccttccactgtggtctaggcttgccttgagtcggtcaggaaggttaattggctgcaggctgactcaagtggaaggatttgggagactactcatggcctctgattttccacccaccaatcccgtctaatggtggagtactcaggaaagagggttgccatatcactgcccaccaattctcgcagccaggggtggcgctccctgttctgatggctttctaaatgctgggcatttgttccttccccagatactggtaatctgcagaatctagggctatttgcacataaataccaacgccccacctccatcccaggcacaaaactcctatatttataaaactcatcatttccgtttgtgttttccattctggaaatggcaaaaataaataaataaataaactgcagattgttttctggtgaaaaaccctcaagctgagtcttcccaacttggggatctttcattcctgaatcatccccaggcccagaaggctgggcctctcagcccactctttgcagtctggcacaacctgaggagttccctgaaagcctgagacttcccagaaatgtaggaaaaaaactttttttgtaggagcccctccttgcctcaatgccaaggaccttacctgttttcttgcctccagacatgctcctggcctgtctccctgctctgtgtgtgtgtctctttgttgtaactccacacataacagctgctgtttcatttcattaaagatgccctcacatgactgggtaaattacaatgagaagaggtacctactgggtgctggaccctttataaacattacttctaatgcaaatagcaaccctacagattgattaccatccccattttacagatgtaggaactgaagttcggaggctaaccactgctaaaagtggtgggcctgggatgtgaaacccacagccacagactctgaggcctgggtgtttccaccacactgtatgttagggagtgaaggtttgtgccccaccccgcaacctcctcaaattcatatattgaatccctagccctcaatgtgacagtagtttgaagtggaacctttgtataagtagtatttgaagttgcagtatttggagagaattggggttagatgaggtcacatgggtgagaccctcatcatgggactggtgccctcagaagaagagtgaacagggtgtgctgtctctaccatgtgagggtgtgaggacccagcaaaaaagcagccatctgcaagctgggaaaagtcttcaccagaaacagagctggctcttgatcttggacttccagactccagaactgtgagaaacaaatgtctgtgtttaagccacctggtctgcagtatttttttatggcagcccaagctgagtaagacaccatggcaagtagaaacggcagttcttcttgagccctcagggtcacttccatgacactcaggccagtcccagggattttagaagaggttttccaacaagcccatttggggttctccaagggcagcaaatgttgcagtatacaatttggttttgggtgggtagctgcaaagaggtctgttttcagggcctttcatccatgaggagctacaagcatagcgtcaagggctctcctctaaactcattaaaggccaatgaaatgtttgatatctgaaaataaatggctctaaaatgtgaaataaaaattgcaaaactaagat

SEQ ID NO: 7008 - DNA, 18567 bp, Homo sapiens
  misc_feature (1)...(18567): n = A,T,C or G, or insertion/deletion polymorphism (see Tables 1-2)
aattttatttttggtttacactacaacaaaagtataactttcttgtgccaaggtgttgcatttaccacaggcctttcccaacagagtgcattcggtcctaaccacactctgcctgagagactacctctgcttccactagtaagaagctctggaaatgtttataacttgttgtaacggctttaatgccaaataaaacaagtttacacaccctgattatgttcagtagtggtaactcagaggagagcactgtgagcctgccctcatgacacagccccaccacagatacttatgcttgtgggtcttcacacaaagagaggccttaagggagagaacagatgagcattgcttaccattggttggtatgaaccagctgcctactgaggctctggacaaagggcttctcaagaacaggttttgcagagggaatgacgggttcccatttgtcccatgactcatggtaagttcctggcaaatttccctaaacccttcatcaattggctacgaagaaacactgcatgctttgcaaagtgatcacagccaaaagttgcaaaatgatttgaattatttccagaagctttgtattttcttaatatcaaaaatgatcaatactacctaaagattcatactttaaagaaagtgaagcaagaaaggtggtgaaaacacaggagagaagttatattctgaaaatgactttggaagagtgaatagatcttcactaagcttggaagcataatttattctttttcttatttttctttttacttttcatgagtatatattaatttttattttttaatagtatatattacctataaacttcagttactttgcattgtagggaaaggcatcttgaatataaaatgttttcttatattaaatatatgaatattcactgccataaaagcagacaatgtttattaataacattattccaaagtattcacaatatactcagacttggacttatgtcttacttgtgttttattttgacaattactgaactcatttttttaatttcataaaataaattgctgctgttaaaaaattataataaaaggcatcccagatgcatttttttaaaacattagagcaatgatcttaaagttagaagcattgatttagattttgtttagaatccttttttgtagtaatggtaaggaggctttagcccagcattgcacttttatagttgtaatgaaacacatctctgctttacaggatgaggaagtgaacattggaatgtatgtgaataaagagggatttttttcatatgctggaaacggcattcccagtttgcctaacagacaacccacaccatcatttttcccactctctccacacccttaactttatgaatgagatccttcttgtctagtaaatgatgaaatcttttcccacagtagaaggggatttcccatgcgtagactgagaattagaaacaactgctctgtatcctgtatgcaaataacattgttattgtactgtaaaaaacttacgtatgtctgtgttcatgtgtatatgtgttctgttattcttactgtttcccatttaaacagttagaagacttttaccaaatttagaaggtgtattagggaggtctatatttatatctatctctcaatttggataatgtttatgtacaaagttcacttttgagatctgggggaaaatctaaaaaaatgaacaatcataccttaagtcagatgtaacttagagagttggaggcaagtataaataatattaatagaattactccatatgtattataattccatggaataagaaaataaatcataattctaaacatgagtcccagatagaaggttagggcatttactccaaattttaggtgctaactggcaatctagaaaattctcatatgtgcaagtcagtgtagtatgctcatatatttatttatcagaggggtattattcaaatatttaatagttatgatttcttcaatcaaatcagatagatgagattgtatgtgtgtttataaagatgaatttaattctccttataaaagataagtgcactgcaagatccaccttctactcaacaaattcaaacatttgtactaatttgtcttttggaaatttcttatattaactttcctgttatcgatgttagatttggatttctaaattgtaatgggttaataaagtctgagaaagcatttgatctccagatgtgccctactattggtatgatttatattttgcattttaattagtaaagatgctctatatgtaagtacatgcctgactgtgttcctcaaatagtaagtgatcattttagattcacactttggaatgagtgttgtagcaaggggtaacgaaaccccaaggaatcagtaacaggcaaacataaagagaggtaggtttgggtgttgcttttcacaaagaacaacacaagtagtcactaatctgagactgttagccaactgggatataaagaggaaggagtagattgaaagcataaagtccattgtcttagtcaaatgattaagggcaattgtctttagatttggccaaaatttcataggtaaagaagtgcatgataacaggctttttagaaagggttatgtgaaaatagagtaacaataaaataaaagctaatgtctcattaagttgaccataccctaaatacagatactggctttaatcttttctagttctctgtaatatatagcagtgggaaaccagcagaagacattattagtcagaaagatgcgtctgcttctcactgcattacaaaacctgtgtaaaacctctggatagaaagctagcaccccaataatgggtttgctttaaaagtctgggagtcaagagtgcttacttcaaatgcagcataggatgggttgaatggaaagaagtgaatggaaagaagctctcctcctgggagggttaatattctcctattttgctccccaagaatatggttagttgtacacagacacaagattctatggaaaacctgagactgactaaaagtcatgattgactcaagaagtgcttgcattcatataccacccattggaaattcaacaatgaataaaacatgcaggctgtatctctgagattcccacagccaagtggcatgtattacataaaaactaaatatttgtagtgtgacatgacatcctgtaatagagatgagtacctgtgttatgggagctaaaagcagcaacaactaacttcagcttgggaattatgaaagtttgaaccgaatcacaaaagaacaaggaggatatatgtacctggtagacaggaagtcatataaagagaggttctagacagaagactgagcccacaaatacacatgtagagatgaaagggtgtggcacattgctggtgttttcagggaagaaagcagaacgtctgtgggcaagcagtgggggctataggtagataagagccttaagaaacttttttttctaaagagtttggaatttatcttgtaggtaatagtggaccattaaggatttttaaagaggatatgatataattaacttgaattttaggaaaaaacagttggtaaatagatttcctgctgttttcagtaaaagggcaatgtcagaggctgagcccaatgaaaccactttgtgatacttgataaagtcacagcaatcgtgcgattgtcttctaagagcatcttatttagtcaaaactctaaagacaaagaaacacaaaatacctggcaataattttggtaaaggaaaagaagaaaatgaaatgcaaaaaaagaaaaagtaatgcttcaataaactttcctaccaggatacttttatataaaaatatgtcgtatggaaaatacaacatcaacaattagtaataaaaaagacatggtaatatttaattttttttcaattagagcttccttaagcctttgttatttttacattgcttccattgtaataactatacagagcattgccaaccagaaattggtactgagttctcaaaatagatttagctctcaaccaagaaataatagtgagatacaaattaatttacaatgattgaatttactgaaatgggatttaatttgttcttgaaattttcactcataggcattgtaaattatgtctaggaaatgctgatgcaagactgttttgtaaattagataacacacctaatgacatgtaacacactgggagatggctaaaatttaaacatgacttaaactttaagaatgactcaggaaatactggcaaaatctcctgcatggatatatagtcccatactcggcttccctgactagtgagaacgtctgggctcctagaacactgacctgtatgtggatctagcagacacggcatattgactttttcttcatctcattggatcatgatgtggaagataatacatctgggtgtttttctctttcatctgtctctttctcagtctccaaacttgtcagtgattacacagtttattatttcacatggaaggcaaatagagcttggtattaaaaattcaggctgggcacagtggcttacgcctgcaatcccagcactttgggaggctgagatgggcggatcacctgaggtcaggagttcaagaccagcctggccaacatagtgaaatgaaaccccatctttactaaaaatacaaaaattagccgggtgtggtagcatgagcctgtaatcccagctactctggagtctgagactggagaatcgcttaaacctgggaggcggaggttgcagtgaggcaagatcgtgccactgggcactccagcctgggcgacagagggagactctgtctagaaaaaaaaaaataaataataataataataataattaaacattacatttttattgcagtgatttgattttaaataattttatcattttacaatataacccaaaatatgctcatgggactagtaaatttcaaatttggttggcatcatcatctctgcctcgtagatatccagaatgctgagtaagagctgtaacagtgctatatttatgttgaggaagaggtgtctgacagctgctggggaaggaactggacaaacagtaggcaaatataaaacagaatgtgctgtgtcagtttgggggcaaaagcattgtacaagaacactgatgatgttaacctttatagaactaatgacaaattacctgctgatttttaattgggatttcctttttgacttttaaaaatttaattcatatgccaacatctttctgtttcatacagatttagccatttgatgtatttctaacatttaaaaataacatacttctcttaaactcaaaaattcttcaattaacacaataattgctaagtaactaatcacacattcaattgtaatggtcttgcttgaattttgtaggcagtatgttctgctgattccttctgttctacaagaaggctctttggataaagcttgtgcccagctttttaatctcactgaatctgttgttttgacggtctccctcaactatggtgaggtccagaccaaaatatttgaagaaaatgttactggagaaaatttcttcaaatgcatcagctttgaggtaaatacttctttctgcttaatatagaaaagaatattacaggtgcatgaacaccacccacataactgattttttagggacagagatcaggctatttgactgtatgtgtaaagttattttaatttttaaaagaataatatagtcctcagtatgagatgatgttaagtacagtcataaatggtaacaagggcaagagccaaaacatttgattttatgatagaaaattgttgaagggaataagacatatagaaagaatgactcttgtgcagaaaagggaagttttaagaaaggcaaaagaatccatttaaatggtgagataaggaagtgacaaagcaagagaaataaacaaggttggttattgaagaaatagatatgacaaattatgaattaaaacttttagtgataccaacacacagtgatagagatttcttaacaaaaaatcagtttcatggagtatttatttgttccctaggttcctcaggccagatctgacccactggcatttattacattttctgctaaaggagccactctcaacctggaagagaggagatctgtggcaatcagatccagagagartgtggtctttgtacagactgataaacccacctacaagcctggacagaaaggtgagtgtacctaaatcaggttaccctcaactaatgtcacttatatgatatttgaattgatggtacacaatacaagctcagaaattttattgtattaaagtttattagagaacctgcttaaaaatacaaaataaaaatatagattacatagcctaaatgttagagatttcatttccatgagtctggggkggggagcctcagaaagtgyatttttaaagagcaccttattctattctaataatatccatattattctaataatattctaataatatccgtattattctaataacattctaatcacatatttggggattttgaatttaatttacacaaacttacaagcttatggttgaaatagaaacaaaagagcaacaaagtatgtcatgaacatgtaatgagatacccctagtgactagagaattgcccaagtaatagaatgatcagcatgatgttgaattaagctgaaaagcctcctctctcctcctgggtacagaaggagttgatgaatacagattacagcagtcagaagatagacatttctgatgagatgaatggtacataaaaaagcactgaggtagaattaatttaaaaaccatgccgtaaaatgagaagtagatagacttatttggagtaaagaaacccaaatgtccatcaatgatagattgaatgaagaaaatgtggcacatatacaccatggaatactatgcagccataaaaaaggatgaattcatgtcctttgcagggacatggatgaagctggaaaccgtcattctgagaaaactattgcaaggacagaaaaccaaacaccacatgttctcacttataggtgggaattgaacaatgagaacacttggacacagggtggggaacatcacacaacaaggcctgtcgtgcagtggggagagggggagggatagcactaggagaaatacctaatgtaaatgacgagttaatgggtgcagcacagmaacatggcacatgtatacatatgtaacaaacctgcacgttgtgcacaagtaccctagaacttaaagtataataattaaaaataaaataaaatgtgatataataaaagaaaaaaaaaggaaggaaaagaagctgcagtgaatagaagagttaaaggaaatccctgaatatagaactaaagaggcattttcatgtagttaagtaacacccatgaggagtcactacagatgtggggatcatggcttgaggaggcagtcgtggatgaactgggaatcacagtaatcagagcctgcttaggcaccaacacactgtgatcccagaacaacacaagcagagggaggtgagggatatgtgctggagatggaggaatgcactgcatgcattgtgctatccccagccttccactcctcttcccctgaccctttgcctccctccctcacttcacaaaagagggcattcaggtcagtatttaggcaccagagaaagaaggactagacaagaaagacagggcatggctgtacagtttgggctggcaccaacaacggtggaacaaacattacgagagcatgcatgctggcgtgggaggtgcttatgagggggaagagtatatgtgcttgacacaagaggatgtccaaggaaggcttctaggattcttgctaaggagagctatagaaggcagaggtggggaaggtggctgctacttcaaagagcacagaaacattaaaccttaatttaaaattgcttttttaaaatttcttatccatccacagtctagtaaagagtctaatgcacagaggaaaggttataacatagcaaagaaattgagccaggagtcttacacaattgagagatattcagttttcaaaaaattgatcattacaatctgagattataatgctacaaatattcataatctacycagcatcatgcttctttttgaataaaaatatggtgtgatattaactatgattgctaaaacctcattgcacagtttattgttgcttcatatttataatgcartatattaactactatatagtggcatgaacaaaatatgaaaaagcatagtaaacagataaaatagaaagtgagaccagactaayatggtgatggtagtctaagacagtatttcagcagaagactacaatctagctagcgacaatctgagaaccaaggcgatcaacagtgaaaactgtcaaaagacaacgaatyatgacctggacttcagtctttacaacaggatacctgacaaatttcatttcatgtagtttagaaacctgttagaactaagcattcttttgtggtctctcagatcaatctatcaactgagcgcagttacgaagaagcttctgaagcttacagaagctgtgcagatggtttctctgttagtgccttttcctccctccaaattgtacttcatccttaagacatcgtcacttttaatccacctcctttccccatcttctatagttatgctacattcactagactgttgcttaattttaatttccagagcaggaatctaatttttagtgctccaaagaccttgtagtaatctaaatccgaaatcacttcngtaagatagcatgtggttcctgttctccttggttcatggttgaagcttctatttctaagaatgcaactcctctatttaaccaangcagtgagaatttctactgcaatcctttgacaatcatccttgattggaagcaccatggggaagtaaaggncttcttgaaaatcaaagcagctgcagcattatcataactcccttattagttctcaccccccgaatgttgacttattattgtcaattaggccaaatatgattanccaactccctgctttagtaataactacatttgcataagaacaggattaatggactgttccctcaaatatgggtcatagataagaagatcrtttgtaccaaatgtttatggcaaggagtttccatggcacaacaaactgcatgtgcttatgtatagagatggaaattgatgtagcatttccaaaaatgatggcagctaagagattatgtggttttatctttgcaagccagtgtttctaattgctggacattatctggttcagtattccatttagataaatagattcaatgcatggctggcctatgagatttgggyattcataataaatttgactacataataaaaatatagtaatgatgcaactgggctcattatcaaatgagccaagatatrgagcatatacctagtttcttctgcccaaatcytacatcggtcttttctttcattttctgcaatttcattgctgatggtgcctttcttttcctttaagtcagtgttttgtagartattcaaacatactttttccagaaagtttcatttgcatcaagaagtttcagatctttctttaaacttatcttaagacctggaactactagtcctctaaaaagaggccctgtgtatggacagggagagatagtatgaaccagaaggggacatgaaggagttgttgtattggttcttggctggtttatacaagatttagtgcagacagtcattagtgactasagcagaatcagcctcattttaataattgtttttagagaaaaatcaagcagcttagaacaatgaaaatgtgattttactaggttcttgttcactagttttttgaaatagaccaagctgagtttaaaaaaaaatctaaaaaaaaargacaaattaagtaataaaaactaaatttgttgaacacagttgaagccatctgcattggaagtattacaaatagcaaacaaaaagggatagtactctaggttcatttctcattattagaatctcatccaaatggttaacgtcttcccatggcacctttgggtaatatawtcattttcttcctatgaggaaatctcatgagaagctctacctctcttaatgcttgagttaatgttgcagcagtagctttcttcaataccatctcaatatttcatcaagattcaattccatgaatttagaataacaagtaggcccttaattcaactgttatatttctcagttccaagaattctggacaaggtttatgaatcctgttcytatctccagacacattacgttttattagtgaatgaatgctgcaattagtgggaaggagcacttagcaacttggggagtgggcaaaggaccctatgtactcatttttaaaattctcatcagcctattcacatgagggcttctggcctaggagtctttaatttcaacttgttagttttaaggtcctgagagaaaacactaagagatgaaagtcaaactgttgactataggtttagagggggcaagagtggtaaacatggagagaactgagaggagatacagagaggtggaaggagaaggaagaaggagaggaaactctgcaagggaaacttgggcaaatgtctacrtttatttacttgtctgataaggaaatggtggagtataggaatggccaataatctaagacaaaaamaattagtgctagatacagaaatcaaaattgaagcatttcaaaaagaggcaaccagcagtgtaaaacattgcaactgtcagagtgaagactgaccacgaatttgttgataaggaagttatkattcatctaagagggcatttttattatgttggagagacccaagggcaggrttgcttactgagactgcagggtgtatgttgtgaaagagagagaagtaaatgaaaattcttgaaaactaggcagatgagtttcaatataatcaatagatattcaaactttcagtcagaaatcagtatttgtttgggttgtcctaaatgtgtttatgtttctttgcttmataatagatttataattaacctcttcactcatctagaaaaaaaaccttgagttcatatattaacattatttttatttttatttcagtatccagtgatcacccttcaggtaagataactaatagttgaagaattgttttctcattttttgaacatctctcyaaacctcaaaatcaaaaggcagctcacagggaagattgtctatttaaattgtygcagaattattaatttcatgyagacagccycaagaggacagaaataggtttccacccccaccaccatgtgattcatattagcatgcacccattaatacagacaataataatatagacaacgggcaagtatgattgtatttaatttaatgtttagttgttgaatgtatataaatgtacacttaatgttttatgcactggggataaaatatggctcgcctttaagaaatcagagattgacacagaaaataaatgtaaaaaaatcacagctagctctaaaatatactaagtrctgtaatatgcatctatgtgacctcagataggagagtaaccaattctccttgggtgatgtgaggacgcactcatgttttgaatcctaagtaagttggaaacctaagtaggaaacaccttgctgaaactttataatgaataaaaacatccagcatgcaaaaatacgctttcttattctcaggatccagaaggcartcgaatacaacagtgggtgaatgaggagtctgtgggagggattctacaactctccttccagttaatctcagagcccatcctcggatggtatgaaatcaccrtggagatgctcaatgagaagaaaacatatcactccttctctgtggaagaatatggtaaataatagcaatgaaaatattacctatyaataaaaaaattataaaatmtttccaattttgcaagggcargattattaaataatgaattttcaagtgagtatctcttcctttcctctttccttgtcctctgttactattttagggttctccatctactgtgatttttatctcctagttcagcccataatcttcctgcaattctctgttaacctaggctatctatcttccttttgtagtatctggattctattttatatgatagtttctgggatgtaaagcacttcttatgagaagaatggaattaacattagtcatatgttagccattagtcccttcatattttctcctaaaatcttcataaaatttctattgtagtatctttattactattttaaagatgaagatattgagaaacactttcccaagttcaacacctgaraagtgatgaatttggaattcaaaatatgcatttttctatccaattccaaaatccagtcttaggcacttcarcgtcctcctcacactgtttattaatggcaaacataagcaaaggttgatggtttgtaaaggagaaacaattgttttgtatgaatgtatttatgttaatatgtatttatgttaataatatataatatacacattataatataatatatattttttttttactggcagtgttacccaaatttcaaatgactgtggatgcaccagaaaatatcttagttgtggactctgaattcaaagtgaatgtctgtgccttgtaagttgaaattgtacacaatagaataatgtattcatagaaagatattagaatgggatagatggctaaaaagaagtaaaatataaatgtgtagaaggtaagggaaaaagaaggtgttaaattattttgctgattttatgaattcttccatgcatctataattcttttaatgcatgttatgacacgtggttttatgtaacagtttaagacaactgactactgtctttcttacatcataagataacatattgttttgcaccagccaatacagtagccgtgaccacatgtggttatttaagttttaattaaaactaaatattcagttgcgttagccacatttcaagctgtcacatgtgactagtggccactgaattggagagcatagacataaaacatagaacattccatctcccagaaatttccattggacaatatcttctgtttatgatgatttctcaattcaatctttatgtattacatgattataaaagaaagctgaagctcaagatgtatcacagagaaaactgctgtaagagttacaagtggctctagggtaatggcggggcacagtgtggaggatactaagggcagacagggacttaggggcaaatagtgaggattaacgtgtggcaggagtagcagtgaagcaggtcaggttgttttcccctcttgtcactaagttaagcaacattcacagagtttatataaccagcaaagagagccagggtgcaaacattaaaactttgtctcctcagacctgatgtgtactacttttccctgactcatgtgtactacttttccttttaattttgcataattaaaaataaaaaagtgacctggaaatttctagttattaggagagcttcactacagtaatctaaaattccatgccaaactttaaggtgaaagctttgcctgtcctccttcctgtgtctactttaggctggaagtctttaagagtcaagaagaagcatggctaactttttgatgtcactaccttgtgcttcacctccagagttggaagaatacagaaaaggcagagactgaaaagtctcattgtagttgggtcataaaggcagggaattgccagcattgctggaaaatcccctgagtaacagaaatccccaaagcccaaatgtctaggtacttccctatcacagtggctgtgtgttggctcctgtgtcatttttactggagaagtattgcataagcaaaataaagcactctaggacaagccagctgggaatcccaaaacataagcatgaatcactaaatggttgaagattctaatgacttgaaatcaaggtattatataaacaaaaaaaagagcaatatatacctgagaaaactgttgaacatcaatcagaaaaaaatttagaaataagtaaaatgtgtatactcagatatgagtcaatagtgtaactttaaaaataattaaagaccttggaagtaggcatattattaatttaaaaatatatgtgtagaaaggctgactagaaggatcgatgatgcttaagagagaattagtaatttggaagatgaaattgagaaattgtcataaaacgtagcccagaggaatctactgttattccttacaagcaattttgttctttgctctttctacctatttaaaattttttaaattatactttaagttctagggtacatgtgcacaacatgcaggtttgttacaaatgtatacatgtgccacgttgctgtgctgcacccattaacttgtcatttacattaggtatatctcctaatgctatccctccccactgcccccaccccacgacaggccccagtgtgggatgttccccacccggtgtccaagtgttctcattgttcagttcccacctatgagtgagaacatgcggtgttcggttttctgtccttgcgatagtttgctcagaatgttggtatccagcttcatccatgtccctacaaaggacatgaactcatccattttcatggctgcatagtattccatggtgtatatgtccatctatcattgatggacatttgggttggttccaagtctttgctattgtgaatagtgccgcaataaacataagtgtgcatgtgtctttatagcagcatgatttataatcctttgggtatatacccagtaatgagatagctgggtcaaatggtatttctagttctagatccttgaggagtcaccacactgtcttccacaatggttgaactaatttacagtcccaccaacagtgtaaaaatgttcctatttctccacatcctctccagcacctgttgtttcctgactttttaatgattgccattctaactggtgtgagatggtatctcactgtggttttgattttcatttctctaatggccagtgatgatgagcattgtttcatgtgtctgttggctgcttaaatgttttcttttgagaagtgtctgttcatatccttcgcccactttctgatggggttgtttgattttttcttgtaaatttgtttaagttctttgtagattctggatattagccctttgtcagatgggtagattgtaaacattttctcccattctgtcagttgcctgttcactctgatggtagtttcttttgctgtgcagaagctctttagtttaattagatcccatttgtcaattttggcttgtgttgccattgcttttggtgttttagacatgaagtccttgcctatgcctatgtcctgaatggtattgcctaggttttcttctagggtttttatggctttaggtctaacatttaagtctttaataatctgtcttgaattaatttttgtataaggtgtaaggaagggatccagtttcagctttctacatatggctagccagttttcccagcaccatttattaaatagggaatcctttccgcatttcttgtttttgtcaggtttgtcaaaggtcagatggttgtagatgtgtggtattatttctgagggctctgttctgttccattggtctatatctctgttttggtaccagtaccatgctgttttggttactgtagccttgtagtatagtttgaatcaggtagagtgatgcctccagctttgttcttttggcttaggattgtcttggcaatgcgggcttttttttggttccatatgaactttaaagtagctttttccaattctgtgaagaaagtcaatgttagtttgatgggaatagcattgtatctataagttactttgggcagcatggccactttcacgatgttgattcttcctatccatgagcatggattgtctttccatttgtttgtgtcctctcttatttccttgagcagtggtttgtagttctccttgaagaggtccttcacatcccttggaagttggattcctgacttcaaactataccacaaggctatggtaaccaaaacagcatggtactggtacaaaaacagatatatagaccaatggaacagagcagtggcctcagaaatagcaccacacatctacaaccatttgacctatgacaaacctgatgaaaacaagcaatggggaaaggattccctatttaataaacggtgttgggaaaactggctagccatatgcagaaaactgaaactggaccccttccttacaccttatacaaaaattaactcaagatggattaaagatttaaatgttagacctaaaaccataaaaaccctggaacaaaacctaggcaataccatttaggacataggcatgggcaaatactttatgactaaaacgccaaaagcaattgcaccaaaagccaatattgacaaatgggatctaattaaactaaagagcttctgcatagcaaaagaaactataatcagagtgaacaggcaacatacagaatgggagaaaaattttgcaatctatccatctgagaaagggctaatatccagaatctataaggaacttaaataaatttacaagaaaaagcaaacaaccccatcaaaaagtgggtgaaggatatgaacagacactgcttaaaagaagacatttatgcagccaacaaacatatgaaaaaaagctcatcatcactggtcattagagaaatccaaatcaaaaccacagtgagataccatctcatgccagttaaaatggcgatcattaaaaagtcagtaaacaacaggtgctggagaggatgtggagaaataggaacgcttttacactgttgttgggagtgtaaattagttcaaccactgtggaagacacagtggccattcctcaaagatctagaaccagaaataccatttgaccagcaattgcattagtgggtatatacccaaaggattataaatcattctactataaagacacctgcacacgtacgtttattgcagcactattcacaataacaaagacttggaaccaatccaaatgcccatcaatgttagactgggtaaagaaaatggggcacatacacaccatggaatactatgcagccataaaaaagaatgagttcatgtcctttgcagggacatggatgaaactggaaaccatcattatctgcaaactatcacaggaacagaaaaccaaacaccacatgttctcactcagaagtaggagttgaacaatgagaacatatgggcacagggaggggaacatcacacaccggggcctgtcgggggttgggggcaaggggagggatagcattaagagaaatacttaatgtagatgatgggttgatgggtgcagcaaaccaccataacacatgtatacctatgtaacaaacctgcaccttctgcacatatatcccagaacttaaaatataataataaaaaataatgaacagttttacttctttccaaaacaaacaaaaagaaattaccccaaaatctgatgacttaaaatgacatttataaaaaataaataaataaatataatttacattttaaaagtaaaaaccataaaatatgctcataatagcagtttaaaaacaaaaaaactaaaagaagcaaaatgttattttatttcattttttgtttttcaatactccattgctatcagtatgcaaaaaatattatttttaatgaaataatgactgatgtatttttttgtttttttgtttacattgtattttagtgacttagatatataacgtctacatgcctatttcaacctttttaattaaaatatatttttgcctaaagcattcaactcaattttagtccataccattgttttagatttcctccagaaaataaaatttatggtaactagctatttaaatgttgttacagtgctggtttcagctactaaataaaggtttcaaaaccctatacagattaaaaacgaccttgacctctgtaattgtgttattgttatattcttctattagatatacctatggtgaacctgtggacgggaaggtccaacttagtgtgtgcagagaatctacggcttatcattcatgtgctcatcttatcagttcactctgtaaaaattttaccattcaggtaagaggtatatcagcaaaattataaataggtttgcgttaactttttatcctcaccttccatttaccttcctttcttcttgttttcctctttacagttaaaatatatacttttattctatatttctattcctatttgtaaattttatattcctcttttgtcatgctaagtttcattttctattgactgacaaaaagcaaattatagtatcagaaactgagtagtaaatttcgattcttaattaaaaatacatttggtttcatatcaaaatctacaccctatcaatttactgggaacatatgtcctgttctttattttatactttgtgaatttagtcagggagatgtgatgtttctgcatattcaagagtattagatgtataattattttcctctcaacctattctcactggaaataagtgtatataggagctccagatgggaaccctatcagtcaggttcttaaccactaaagagaagaatcaacttttccaaactgacaaaggaggaatttcctaaaagatctacttggaaggtttgagaaccaacattcagaaaac

SEQ ID NO: 7009 - DNA, 42385 bp, Homo sapiens
  misc_feature (1)...(42385): n = A,T,C or G, or insertion/deletion polymorphism (see Tables 1-2)
cccaccttactaccttgtatataataaaccctaaattgctgcatgaatgaatgaatataagacagaaaagcaattttaaggggcaccactgtatttcaagatgattcagattttcatatcagatgataaggaataaaagtaatttgaatcagttagctcttatttaccacacttgatactgaaaaacactttccacctggttttcagactgtattgaggctccattaaaaaaaaaaaagtgaggcacttccatttcaagataaatgaacattgcctctccaagagtggttacatttattttagccatatttgtggaaatatttctaaagtatacaatagaatttttaagctagcttagctaacgatggctttacattttaaagataaaaccttttcttaacaacctggagaattataaacatcttgtcaaaacaggccatggaaggcatgctagcagagattcccttgctgtggggacatctctaagggattagccgaggctgcctggcaaaggtgggcttggttccagaagtgaacaatatccagagtgagctattccagtagctgggacatggccgtgggaggggtagcagctaccatttgctgaatactaagtatgtgccagactaaaccacatgctaagtatgtgttagatgccatatgcgtcatctaagggcacaacaacaggatattattatccctattttgtgggtgagaaatttgaggcttagagagttaaatatttgctgagagtgaatatgaactaggaaatggtggagaccagattcaaacctcaggctgtcaggcccaaaccatcctaaagaaggaaagctctgggtccaaggcaggcagttttgtaatttctcttgaaggagaacccaaactacaggtagaaattaattgtcttctttcctctccaggaagggtatggcaagataagtggagaagaacgttaaggcaccaggtaaacaggtgggaatccaaccagagccccagttcaggaggatggtcaacatgatgactctggcttggggacacaaacacccagtaatgacggacacaccaaataccgggtctctggcagccaaacaattccagaatcgcacctgctggcgaactgattcactctgcacatttctcgccagaacgttcctttgggaccaagtggttggtgctgtattaatagacaaaggatagtagtggctgaagctgaacaggactgagaggacacagttcttacaccatgctattatagtgatgcctgaaaggggtcctgggatgtgcagtgtgttattgtgtcttccttaaatagccccagacaactatgctttttatagtatttctctcttccatccctcatggcctactagtagtcactttttgctgtcagcatgcctgaagagcagattctgtgtcccctactctctccacatggcttctcaaaaaaatacacatcttcgcagctagtttatatgctaggaaaccgataaatcaaacgtttgatgagccaggtgcggtggctcacgcctgtaaatcagcactttgggaggccaaggtgggtggatcacatgaggtcagaagttcgagaccagcctagccaacgtgatgaaaccccgtctctattaaaaatacaaaaattagctgggcatggtggtgcgcgactgtaattccagctactcgggaggctgaggcaagagtattgcctgaacccgggaagcggaggttgcagtgcgctgagattgtgccactgcattccagcctgggcgacagagcgagactccatctcaaaaaaaaaagtttgatggcgtacaaataaccatacaagttattggcccccctttcacgcactcactcaacaagcatttcttaagcatgcttaatcaagagtggcaagtgctgtgcaaggccctaggaaaacaaaaccaaagaacacaatttttgcctttgaagggctcacaaaccaatggagatggagaggtgggaatgtaaatttcacactgcaggatgcagcagaggttctaacaaagctctgcataagtgtgaaagccacatgagaaggaagcaaagccattcatgagaatcacagatgactgtccacaaataaagtacatgggcttctctccacacaggaagagggagcaagtctgccaccttcagagttccaagaaaaagaatagctaatatttgttgagtgtttcctatataccagaggtattctttccacatattaactcacttaatttttttttattttaaatttttaaatttttcttttttatacaggcagggtctcaccgtgtcgcccaggctgatctcaattcctgggcttgggccaggcacggtggctcacgcctgtaatcccagcactttgggaggccaaggtgggcagatcactggaggtcagaagttcaagaccagcctggccaacatggcaaaaccctgtctctacttaaaaagtacaaaaatcagccgggcatgggggtgggcgcctgtaatcccagctactcaggaggctgaggcaggagaatcgcttgaacccgggaggcggaggttgcagcgagctgagattgcaccactgcactccagcctgggcaacaagagtgaaactccatctcaaaaaaaaaaaaaaaagaaaaaaaaaacccctaggctcaaattatcgtcctgtgtaagcctcccaaagtgctgggattacaggtgtgagccactgagcccagcctcatttaattcttaagaaaacttaaaggtgttgcttttttaaaaatttcattttacatctggaacctgagccacagaaaagttaagtaatttgcccagggtctcacagctaatagtggggagccaggacctaaacaggcagtcaaattccaaagaccacaccttaaccaagaaactgtattaccacctccaaccatcagcacactgcagtgaatacgtggaaacatttaaaatatgggaataggttaaaagtaaaatctctaaggtaaaattcactaagctttggccaaagacagaaaaaagggggaagaagaggaaaagtaggaaaccagctgtcatgctgagaggatgaagggaatggtggcaaggaaatttggggttaggtggcccctgcaaccacccaacaggtatccttgggcacccaggaatcttggtagcttccagaagaagcagaaagggtggagagcacccttgattgatcacttttagtatttacacatagagtatgtggacctctgtttgcctgcttgctccagccccccagaatctttaggaatgtgtctgaaaatttgttaatacaaagtatccaaaagtaatcataataatacacctgcatttgctctaccaacatttcatcccttcaatagagggtaaactccttggcatttgtacaaatgggactggattcttcattaacgtctgcatctataataaagggtagtattaaaagacatgcattaaaaaattaaattcaaattgacacacaaaagtagggatcaagtacttatctctgaaaataagactctggacttaattataatagacaagagtaatttctagacagtttcatctcctgaatcaatatcaaatattttcaaaacttgtaccattaacatccaattttattattttttaagcctatgaaaaccagacctttgatttagaaaaataataacgagcacatgtaattatgccagtaattatatcccaggcaacagttcaaagtgttgtatatttactaactcatttagtatatgcttatatgtgtatgtatgtgttataaaatgtatgtgtgttatacatatatatatgaaaaacaattttacagaattttcctgtttggagaggagaattcaaacagttggaatgtttcttgaccactagtaattttcaaataatatatgaagaacataaaatgcagctttgcctgcttctaggattgttccaagcagttctcttggctgatctaaacatgagtgttctgcaatacacacatctcctccgtggggtaaataataccaagcatagggatgccatcatggcactatttcaaaatgtaaacttgacagccagttaacagctcttcaggaaagagtaataagtacctggagcccagaagaccaaaaagcaaatgtcagaattttaggggaaatgatctaggttgctcccaaaatgctgttcacggtgatctcccagagagtgcctcattctgagtcaatataaccctaatgtgctttccttcaattactgtaagcatatcctgagatttcagtaatgtgacagctggtaacctgagccccaactaagactgccctcggctatatctctttattaattcatcccgggagctggaattgagctatgctgaggagcagagaaagtggcattgtgtcctccctgacaaagcagggcaagtgcaggcacctcacacacagaggtatgtttgtcccaccattcaaacagagctgcttgcctgctgcctgaactgtagcgtgccttgacactgcatatgaaacgctggaggagcaataatatctatgtgtgcaattttattgcaaaaaggcctgattctgctgttgtctctttacaaatgtctgataatccactcctgtcacagactgacaagagctgctacttcatttccagctgttggggaatacctcaggagaatacttatctctcaatgggcagcaacagcagggctatttcaagacctcactccattgtaaaggtgttatgtgtccacacagatctataaatcaccatgcaacatctttccagaagtatgtgctggtctgcagaattgctagatatgtccaggtgggctgggatcactggaaaggcctggtacatcttgcctgacagctaatttaaatggctcttttagggttacgtgtcataagaaagggggagataactttaaaagattataaatcacttttataaaaccacttaatgtaaatgactatatcttaatatcttaacaaatgttgctcccaattttttttatgttttaatgcaactgaaatctgaaagcattttcttattttccctttttttctttcaggcaatttgaggcacaaacaagtgtaaaaaccaaggaaaggtgcagctgctttgctattatatagcaacaaaagcgatctctttgtattttacaagaactttcctttctctgtagcattttgttttacaataaacaagtatttttgactttgagatgttcttacttcaaggaagacggctgtactttaatctgtgagaaacctaaaagatgagtgcctgaactagatatcatgattttaaaaatttagctgaaatcctcagcctattaaaggttgaatttgaatctccatagctggacagctgaaattctcctttttgcatatcaattagatttagtctctctaccttatggcattaccattcacagatggttactccagggatggatgcatttcagtaacagtttgaaatgcccctgggtaataacaagtgtaaatgattgcttgtgccgttgaaataatgcaataagactgtcagtggccgatggagtacagctgtggacgaagtctacacttgcttctagggccttatctacactgtggatttaaaaacttaaaatacatttattaactgcaaaaataataaatgtcattcaaataactggatttttttaaaaccacaacttactgaaaaaaaaagcagcacttcagagtaaaaaaagcaaaaaggttgacttcacagatgcttatttttctgtctaattgcagaaacaatgtggggtaaaatgtttgaatcagaggaaaaactgacgagggatcattttaattggatacaggataaagcaggaggtttatcgacaacccatcaataaagataccatttagtgtatgattaaggtgactttgagtaccaggctatgctagattttgtacaggataccaaagacattcctcctcctaagaaaatgaacatctactttgatagaaaagacttcatttatacaagacaatatatagtcaagtattgggttataagcagtagagataagagaacaggaatttggaaggaaagaacaccacgagctacattcattgggaatgcttggtggaaaaggtrgttctcaaggcaagttaaggaagaattttcagcaagacctgcaaagtcataaaaatgagtacgaatgtgacagataaggagacactggctgctcagaattcaggactcacaccaagtaatggtgagtgctacatgccagactaaggagcttgactgtcaagaggaggttgctgacaaaagtgggagttkaagtggtgtttaaagaactgatctaacagtggtgggtaagaggcactgggaagaaaaccagagcagtgattcttaaccaagagcacgtatcagaatcatccacgaacagctctccaatagacctcgccttttatttttcaagattttcttgtcactccagagagtctacggagcccagaacatatacataaagtaataaaaaaagggttagacccaaaatattgagaactggaaaaatcataatattaactttatcataatgaacttagagaagtccatcaaaaaaatcttagagttgggtgagtcttttgtctgttttttgcctgcacagcaataacttgttaggcaactgggtgacatgcttaattctctccaaagtgagagtccctttcccgtctgcaactttataaaagctcatccctgggactctcccaggagtatacgacaataaacaatgttcacatggctaccgcaagcattcagtgatggtgaccagaccagagttggttagccttgattccaacccctgatttcaagcattggagggctaataaacatcatatatacatgatgtttattacatatatattatatatattagrtatgtaatatatatgtattacatatatacacacacacacayayatatatatatatgtacacacacatatatatacaaagtctggctctatcacccaggctggagtgcagaggcacaatcttggctcactgcaacctctgcctcccagacccaagccagcctcccacctcagcctcctgagtagctgtgactacaggtgcacgccatcatgcctggctagttttgtattttttgtagagatgaactttcgccatgttgcccaagctggtcttgaattcgtgagctccagtgatccacccgccttggcctccatcttaactgatttaatgttcttgggtttcctcttctgccaggtgggccttgttgactcacttaacaagaatagtttcaggtatatatccgtaagaaaacaaaccactctattaataccaaaaagacaagggcactcacatgtttatcgcagcactattcacaatagcaaagacacagaatcaatttaggttcccatcaacagtggcttggataaagaaaatgtggtatataaacaccatggaattctatgcagccataaaaaatcaaaatcatgtcctttgcagcaacatagatgcagctggaggccattattctaagcaaagaaatgcaggaaaagaawracaaataccgtatgttctcacttacaaatgagagctacacatcaggtacttatggacataaagatggcaatactaggcactagggatgcctagaggtgagagggagagaggagagcaagggttgaaaaactactgtatactatgctcagtgtctgggtgatgggaccattcatacccaaaacctcagcatgacacgatatacctcagtaaaaaacctgcacatgtaccctctgaatataaagtaaaagttgggggaaaaaagagcagttttgctactgaagcttctggaatgtaactgaacaaccttttctcagatccagstattggataagaaatcaaatccagccatacgtggctgtgtacttctttgactatattattatcatattaagtagacttgatttcttaaaaagaaaataaaaggttatgacatatgcctatagaaataattccataaataaaagaatttattctaatgttgctcaaatctctatgttttgagggttgggcctcagcagccaagtttatatatataaatgtctccctggttatagaagaatggaccagaagcaaacacctggtccctggtgggccaatcaatttctctctccctgacagctagaattgaaatttgaaaataccagyctcagccaggtgcattggctcacgcctgtaatcccaacactttgggaagctgaggcaggaggatcacttgaggccaggagttcaagactrgcctcagcatcatggcaagaaaattagctgagcatggtggcatgcacctgtagccctaggtacttgggaggctaagacgggaggatcacttgagcccaggagttcaaggttaaagtgagctatgatcatgccatggcacaccagcctatgtgacagagcaagactgttaaaaaaaaaaaaaaagttaaaaaaaactagtctctgcctgtaatcccagcactttgggaggccaaggcaggtggatcacctgaggtcaggagttcaagaccagcctgggcaacatggcgaaaccccatctctactaaaaatacaaaaattggccaggcatggtagcgtgtgcctgtagtcccagctactcaggagtctgaggcaggagaatcacgtgaacccgggaggcagaggttgcagtgagctgagaacgcgccactacactccagcctgggagacacagcgagactctgtctcaaaaaacaaaaacaaaaaacamcaacaacaaaaaaacaagtctctgctgactgcttgaactgaagacatctagtctcaggaactgtgaagcctccatcttccactatggccacagggaaggagaaaaagggaaactgggggtagggaagaaagaagcagatgtgcaggcagaggtagggatgccctgcaaccacagattccactcaggtattgctcatatgcctcagtgtactctgactcagtggctttcagtccctgctcctcttccttctgctgtccctrttatcaccactggcatttctgttcctttccttctatgtctctccaactcccagagggaggatttgaccaactgtgtttggtcatcacccaatatcaaatcaacataatgtacacttataagctagggatgcctgagaacataaccttcgatgtatctatttagtgcttgcaataaacagtgtgccatttatygtacttgggttggcacgtgcatgtctccaaattaataagaatgaaaaatgtaagtgatttagccaaagctgtaccataatccartgatcatattgcatgcaagtaattaacaagttgcacctggtgagtaggaaggcaggcagccagaggctccagagccatcagaagggctgtcagggcacaagactgccaagaaagaaggaaagtgactgtctactggaagaatctgtgcaggctccatcacaggcagctgcagctctgtatgagggcctctgggggagctgggaacctgtgcttctatrtgggaacatgctccactgtttccagctttgtatagaaatttctaatcatataaatctcagtattcttggacatcaaggaagtcttayatttttaagcaacyctgtctgctaccatcttcccaacaaccccaccaccatstgttttgatgcctacacagaagatataagccagtggatcctacatttttttcaagtatttgctgaaatacaaagatttatcaaaattgctaagaagcagggtaccattgatgttaagattacaaggaagggctataatgaaaatgacaagaaaatgctcggacagaagagtcaatgaatttgccatgagtctcacgtgccttctttacctgtggaaggggttcttgtctctgcaatatctttgaacaagagcctacagattcttatgttatttttttttaagatatcagagtatcatacactcaccgacatggactgacccaaggcccctgtgtcaggttgtgcaggtctgcactgcataactttaagggtaccatttccatccctactccccaaacttgtgccacacarcagccctggaagttacccgtctatagcatggaaaagcragtacatgaattcatagatgttaacaagcagtgcatttgtaaagctaaaaagaaacattttacctggtgtcctttcagatcatcagtctytctgctcagtcaagcacaattcttttaatccctatyttcatccacttgtctctmtmaaattgattgggcttctcctaggatcttcatgtttgtacaaagaaagcccaagctaaattttcaaggtcaaggaaaaaacatacgcttttccctgcctagataaaaccttcagacagaccaraataatggactagcattgctactgtccagatgttcatgtccycccaaaatttgtatgttggaacctaaaatccaatgtgatagtattaagaggtatgatagttgatacagtttggctgtgtccccacccaaatctcatcttgaattgtagctcccataattcccatgtgttgtaggagggacccrgtgraaggtaattgaatcatggggacaggtctttcccatgccattctcatgatagtgagtaagtctcatgagatctgatggttttataaaggggagttctcctgcacacaccctcttgcctgctgccatgtaagaygtrcctttggtcttccttcaccttctgccatgactgtgaggcctccgcagccacctggaactgcaagtccattaaataaattacccagtcgtgggtatgtctttattagcagcatgagaacgaacgaatacgatagtattacaagtaggtgctctgccttcatgaatgggattagtgcccttacaaaaaaggcttgagggagsctgtttgttccctttcaccatgtgaggatgccataagaaggcaccatctgtgaagcagacagcaagctcccaccagacactgaatctgctgatgccttgatttggacttcccagtctccagaactgtcagttactctctcttcttaagatcacatgaccagaattctcctaagtcagatagggtcaatgttttgccttaattcctgacttgcatctttttaactctgacactaatttttctcttggttcacctaagacatctataatgtaactttattgtkctacatttcagatcattttctggcaatgcttctttgacawakcatacamattttgcaacatgaagcaatatacatttcttgacttcaaaaaaatatggtttccccataatgtrtatgaaaacatatcaaaggtgggttacattattaaattctgtaacttgtatattaataacttatgaagtctatgaattattatgtaccaatgatgcaagaacatacagcaaaattaatgctatcattcatagtggaccccctctatcatcacagagaaaatcattgatgaccagcactgactccaatattacccargatctatatttagtatgtctttakgagcatcatggttccttattcagaggatgagattgtatggaaatggcctatcccatgcagttcagcacaaggagayccagtgcagtacasgaacamtgtatgaaatgcttaaaaatgactattcattgcacattagagaatgcctatgtcacatttttacaattacagaactcttttttttttttttggagacagagcctcacttcgtcacccagggtggagtacagtgacgtgatctcggctcactgtaacctctacctcccgggttcaagtgattctcgtgccttatcctcctgaggagctgggaatacaggtgtgcaccaccatgtccagctaatttttgtatttttagtagagacagggtttcaccatgttgcctaggctggtctgaaactcctgacctcaagtgtttctcccacctcagcctcctaaactgctgggatwacaggcatgagccactgtscccggcaacattacagtctatcatttttataaaaatagcagcaacctgtaaaagytcccagtggaaagctgcatggtcatacagggagggttcaccaggaaagttcctacctgcctgtctgccaagtgaccttaaaagggagcataacttggtgaatttgacatgattcaggtcatgattcatgggctgggaaactgtattccattccaggctcattcaggctcgaggacgctcttgcatgtgaattaaacccacaggagactgatgcacaaaaccagaatagagctttattttacaataagaattgtataactgccgagaggtcagagaaggacagtgggaaaatcacattctctgctcaaaggcagactctccagaaagccagtttaccgggtgcctgttgcggggaacatggaatcagaatcagtatgagatttgcctaattcgaatgtaactgcatcagactctgaaaacctagtgtgtctgtctccacaacacaggcctgtcagaaatgaccactacagagccaggcagggtgcccacccctgcttagcacctcagtgaatatggccagtatctgcttctcagattcttttttttttttttttttttttttggagacggagtctcgctctgtcacccaggctagagtgtgatggtgtcatcacggctcactgtagcctcaacctcccagactcaagtgatcctcccacctcagcctcccaagcagctgggaccacaggtgtgcaccaccacatttgactaatttttcttattttttgtagagatggggggtctccctatattgctagggctggcctcaaacacctaggctcaagcagtcctcccacttcagcctcccaaagtgctacaattttaggcrtgtgccacagcacttggcctactgcagtagagatatagatacgaatacttttcttaagggtactgtacagttagsctgccctggaaccattmtgtctctttgagtttccttctctactctgaactttaagtgtctattttcttattttctagttcatagaagacatttcactatcacaactgtgtatttactgcccacattaactaaattattgtgtacttattcatgtttctagaaaacttgaaaaagattttttaaaattatcaacataaaaactctgaaggagccttgaagatgtttttaaaaaattaagtgagcagttgaggtaaataatgaatgattttacaatcacagatcatttaactttaaaatagcataaaaattcttcttagtaaatcgtaactaacaagaagaaggaaatataatggtcgataattaatcaaatatccaaaatgacrgctaagggaaaaaaatccaccaccgccacctgaacgacctttcagtgaaatgagcgttgtggattttagaattcagaattctctgttcttgttcctgtgagtctctcaatctagctgctttccagtcctaatattacttggcctgtctggcaacattggtctctcttgttcttgaaagcttcccacagccgggcacagtggctcatatatgtaatcccagcactttgggaagctgaggcaggaggatcacttgagttcaagattagcctgggcaacatagggaggtcccatgtctacaaaaattaaaacattagctgggcatggtggctcacacctatggtcttagctcctcgggaggctaaggtgagaggatcacctaagcctggggaggtcgaggctrcagtgagctatgatcataccactacattccagcctgggtgacagagcaagactgtctcaaaaaagaaaaaggaagaagaaggaggaggaaggaggaagaaggaagaagaagagaaagaagaagaagaggaggaggaggaagaagaagaggaaggagaaggaggaggagaaggaaggaaggaagggagggagggagggagggagggaggaaaggaggaagggagaaagagaagcagaaggagaagaagaaataagaaagcttccacgctggtttccatgagccactckgtaatcctcctcatcactgctctctggccacacttcgtgggctctgtcactgcgtgcccttcctctgtctgctctgaggcctggcactccctaggtctccatctgtacctcttttccttcttcctctacttaatctcattcactcctgtgactttaagaactacttaaatacaatgatttgaaaccagacaaaatgcataagcacagcataacacacattaatagtcccttgttgttcattttcttgcttttcattagtcatcctgagattcagaagtatatttccacctgcctaccagcacctccacttgaccatagttccctttaactctttaacttcatctgctcaaaacacttttttaaaacatctcaaatctcttctcccatgatctctatctgagctcatgatatcrccatccacctgcttccccaagcccaagctttggaagccacagtgaatgtgaggcactattggctaacatgtaacagtgaccatgygacagtaattgttaacagtgtgcaagagaaaactgtaaggctggctgctaaatatgcctgataaataactgtcaacttaacgctggtagtatgattaggaagaagagtgaaagggaagaataattgggttctgagagagcctttgttcatatgtatatgtcatttctaattataaatatggaaatttgattaattctgtttttcccactcaactctaagttctataagagctggacccatccctgttttgctcatcactgcatgcccagcacctaatatagtgcctcacatatagtagatgctcagtaaacacttggttccaattccctatgaccaaagctgacaattcagactgataaagacaaacattatatgaattatttatgtacaagaattagtgtatctataaatgtattgtcatgatgtacaaatatacagaaaatagaaatctgctgtcttctggcattttgtccttttccttaaaatcctgcatttacaaaaataatattcactccagccttaaaataaactgaaagacttcctctccctaacccctcatctgatcatcaaattctatcaacttggtcctctaaaattcagctcaaaaactgctatctctgtgtaaagttattggctatgttccaaatgcattctgcatattgtcatgtataatagtaacatattgtaattattttagtgtctcctccttccttccctcttccaagtccaggagctacttaaagattttcaggatctcttgtgcaataactgggctgaacatagtacctgataactaattgacagtcaatacatcacaagtcaaaagaaaaaagaaataggatttgggaacacaaacataggattttgacagccacaatgaattctttcattcttcctactctgcacctgtctgtggccttttcctctaccatgttctgtcacatccacatmattatctygtgtcacagagccttccctgtgacttctgtgatgtatggctatgggcatggaatggatgtacttaacattatggcttttttattctttcttcctatttattctgtcccttatcagaagcaaagaccacaacatgtagaagtctaatacaaagtgctgaaatatgcaaagataatatatgcacaggggtgctgattaaaacattgacaaaaatgaaagaatgttgctttcaagacactcaggtctctttctatacctaagtatattattcaaccatcagaaaagaaccaactccttcctagataagagacaacagcacttgcccctacccatactaatgccacggctatttgtccatcaaagkaaatgaatggctttgtatttgaatagaaaagaggggcactctgagctctgaggtgacagataatgcactgatcagtcactctccagtgggggtatcagaaaagtgaggaagagaaagtgattctgagtagtttggattaatatttgaatctcaatctttatgaaagaaataggagcttaacttgctatataaaaggtttcagtagataatagattttttgacattgttatgcaagtagatagaatattaacctgcctggattaatgaaagcaattactaagtgctgttactataagtggaatagtttcactgtatcacaygtcctggtgattcttcatttagcccagatgatgccaggggctatttgacaaaatgtttcgtatatctaagaagacatattttgctggtttaaaccataatctttgacatttgtacccactgtggatttatgcctcttgtacactcattacaatttaagcagaaacatttttcatgagcagaaaaggaaaaatcttagatttcattagcgaaaaagccactgtccctactgtcctattgtgatatgctaatattcaccctggaaagaataatttaagaactcaagcctctatatatgcaattcaactactgtagattcaaagatggtcacaataatttatatactcaaagttatgaagggttaaagaactaattatgaaagacaatttttgtccttcttccctacatagggaaaaatttcttaaagacacaaaaatacataacaaagagaaaaattaataaattcaattacattcaccaaattgagaattttatcaaaggacaccacaaaaagagtaaactgcagagatgaagatatttgcaacacatacaaagaataaaggactaggggccagaatatatattatacaaagaactcctatagatcattttgaaaagacaggtaacatttgaaatggctgaagacttaaacaggcatttcataaattaggaaatcgaaataaaaatatgaaaaattgctcaagcttattagtaactagggataatgcaaattataagtaccataggataccattatacacccatcagttgagccaaatgttaaaatctgacaatatccaatgatggtgagaatasagaattctcatamactgctggaaggtaaataaattggtatgatcgctttggaaaatacaggcaggttgaagattggcaattctacaccacygtgatcacgctcatagaaattcgcaaacatgttcaccaggctatatgtacaacaggtrcagagcagcactattcataatagcccaaacaatgaaagcaagtcaaaacccatcaactaaaaaatggataaactgtggtacaatcatacaatgggatactataccataacaaaatgaaataactagcactgtgtacaacaacctggagaatctcacacacacacamamaaaaatgttaaatgaaagaaaaagcattaaataatatatgcaatattattccattcatgtaaagttcaaaaagcagacaaaaactaaattatgtgtgataaaactataaaagaaaattaagtaaattattacaacaagttgtggacaatggttgtctgggacagagaaagctacgatggagaagggcacaaatggagattstgcggtgcttatgatattctatttccttcatctgggtggtggctacatgaatarcaggtttatattatttgttaaactgtatattcatgtttgtgcactttttctgtatatatggtatatttcccacaggatgtttttcagaaaggttatatagacatatragactagatggtctggtaaaagaatgacaggtgatagacaaaaggcaaacaaaaaatataatcagraggtaataagtgctatgaagaaaagaaaagcaggataggggaataggttgrgaagagagaactatttaacggcttgtagcaccaggatctccatagttaagcctcatggagtgccactgtgaacacagcaaaggcaatgcaaattgaatgcacaatgaagtttcaaattgtgctgcatgcaagrtttcataaagtccacaagagatggctccaacaacatcaaaagtccctgacarataaagatctggcagcattagactgtcaacaattgaagaaaagaaaataagaaaagctgtctatattttgggtgcttcatgagagaataatcttaatgatgaaatwtttttaaggcttagaaaactaatgaagccctcaaatatggtgtgagatctctttataagaatgctgcaagagtcakatgtgaagcgaaggctgttgtaatatgccttttttatagaaaaacaatcatgctataaataacaataaagcatttttaatttgaaaaattagttgactgctatttttatctagatagatagaccaatagatagatagatagatagatagatagatagataggatagataggatagataggggtggttttgttktttttttttttttttttttttttttagacagagtctcactcttttgcccaggctggaagtgtggtgacacgatctcagctcactgcaacctctgcctcccaggttcaagcgattctcctgtctcagcctccccagtagctcagagtacaggcgcctgccaccacaccyggctaatttttgtatttttaatagagacggggtttcaccatgttggccaggctggtctcgaactcctgacctctagtgacccgcccaccttggcctcctaaagtgctgggattacaggcctgagccatcacgccaggctgtcaataaacttttatgttgacatacttcaatagagtttcagwcaatccctcttttccctccctaatttttcctatttgaaaagaatccgctctctcctgttttgttcagcaaaatgtaaaacattgataagatttatacctttttgaaaaaaatagactatggttgagcccatacattcgatgaacatttgttcgtcacctactatgtgctaggctctggggagaaacaaaaacaaatgaaacaagaatcaccaagactcaagaagcttacaacgaacggcgaataaaaaggctagaaaaccactggcttcgggaatctgtggtaagtgctattcaaaatgggtgtccaggccaggcgcggtggctcacgcctgtaatcccagcactttgggaggctgaggcggatggatcatttraggttaggggtttgagaccagcctggccaacatggtgaaaccccacctctactaaaaatagaaaaattagctgggcgtagtggcgggcgcctgtactccgagctactcgggaggctgaggcaggagaatcgcttgaacccaggaggtggagggtgcagtgagccgagattgcaccactgcactccagcctgggcgacagagcaagactccgctcaaaaacaaaacaaaacaaaaagtgtgtccaaaggaagggcctctaaatcagatttctcatggggcattagaaatatagaattttgtttttgccatatttttcatacaatcttagcttaataacaaaaacacaaattagtcacaggcagtcatcaggacaaaaaaaaatcagaaatataaattctgaataagctataaactagataacaaggccttgaataattccattttcttaactttaagttgatatctaataagacaggagtgcaacatcgaaacgctgtcttgtttgaattataaatcttcactttaaagcggcagatggagcgccttatgttcacagaaagcaagccaagggctcagaaaaggtaaccactccgccaaagggaaagacacaaaacagaaaacatggctctgaacttatatgccctcgaagggttaacagatgcctgaatttgtgagaattttacagaattagaatggaactagtacaaagtcctccaatgtgttttcctttctgggtcatgcaaacacgtacgttctacggaagatttcaagtacaacaaaaaaatccgggtttcccatcacagaacctaagtcgccgcatttcctctggtgtataacatgttgttgatgcagttattgtcctttgttttttttttagctctgtttccttaaatgccaaaactacacacacgaagtatgtaatacgaacactgtgacaatgaggagatgcaagtaacattttattcacctgaagaaactaaamcccaacattttgctttttgtctacagacacagttcctgtaaacacagaatcaaatacggtgcgcgtagaaaataaaaagatcctcccacactatggcacttccttcaatggaggctactcgggaggctgaggcagcgaattgcttgaacccgggaggcggggttgcattgagctgagattgcgccactgcactccagcctgggcgacagagcgagactccgtatcaaaaaacaaacaaaacaacaacaacaacaacaaacaagatgttgtattcttgacatttaggcawtttctaaaatattacattttttataaaatttctctgccatggaaaaaaaatccacctttgccagagcaaaggaagccagtgaaagaagtaattcattgggagtataattataagcatttagcattgttttgaacatgasaaaaaggcaagctttcatctaacagattttcataatctcaagaaataattcatctgccatttattttcagggaaatgtggtgcttcttggaagaagcccagaggatcctgctgttaaaccaagacccatgcaggaaaaaaaaattatccactccacaataacatggcaggtaacacaaaggcagtggtacttctccagccgggagaggccccctcaaaacaggaactcctgccggctgacttaattacagcacagcaagggaatccactacaaaggcaggagccactgaacagagagctgytgagatccgtcctcggtacacggacagatggttctgctgcttctcggctggtataagaccttatagaagactctgaaaactgaaacacgccaacaagttttctgttaccagtattttttttttaactctgtgcccaggccaggmgcggtggctcacgcckgtaatctcakcgctttgggaggccgaggcgggcggatcgcgaggtcaggggtttgagcatcctggccaacatggtgaaaccccgtytttactaaaaatacaaaaatcagctgggcgtggtggcgcttgtctgtagtcccagctacttgggaggctaaggcacgaggaatcgctcgaacccaggaagaggaggttgcagtgagccgagattgcaccactgcgctccagcctggcracagagcgagactccgtctcaaacamacaaataaacaaaaaaaccctttgtgcccaccgtatgctakcgtaaaagtaatctgaatttgaaagtcaatcagcaagtatttactgagcgacgtgtaagggataaggaaaaggtctaaagcagcttatctagtttagggacatggattaaactctgatttaattttagggcttttgactttttcatcatcacacacagacacacacaaacacacacacacaaaattagaggagaggccatgaaagcactgccttgaaaattctcagacaaatttacagaaacagagtgagtccatgtaagaaacctgaccttatacacagggacgatgcactgaaacctgtttcacagcaaagggaactgaaagtttytaaagcagtcaccacagcagccacgtggcttagaacacaaaacagacagccccctaaattatgaagtcatacacacagctgctaaataacagcactgagtaaactctatcttgtaaaaaatgtttaaacaaaatgaaaatttaactacaaacattatttatggaattaatatacatgcaaattttctgcatgcaaactctaccttcctggtcactttgaaggatataaattaatcaaaatcacaaaattcttcaatcttatrtaagaatgtacaataatgccactgaagcaatttagaacttacaatgcccatagcatagaatctattatatatagatatctaattatatctatctaaacacayacatatacagatgctcctcaactgatgatgagattatgtcctagtaaacccatcatagtttgaaaaatatcataagtcaaaaatacatttaatacgcctaacctatcaaatacagcttacttagcctcacctaccttaaacatgctcaaaacacttacattagcctatatttgggcaaaaatcacctaacacaaagcctatttaaagtaaagtgttgaatagctcatgtaatttgttgactggtgtactgaaagtgaaaaacagaatagacgtgtgggcacccaaaatatggtttatataaagtcaaaaaattataaagtcaaaaaataattataaagtcaaaaaatcattaagatgaaccatcgttaagtcagggaccatctgcatacatatataaatacatacacatacatattcctatttaatactgatatcaactctataaactaaaaatgcacagcttggtgagtctgaatgagttaatatatttaaagcacttggagaacttctatcaatacaagctttgaagtcacactgcctgactgagattttggttccatcgctagacaaattaatttatctgtgctgcaattttctcatctatgtaagtggaaataataataaaagcctctacttcataggctaatgaggcatatgctatctggcatattaaatatctagcacaatacccagtatgtggtaggcaatgaacacaagcgagctatttttaaactttatatatttggccaggcacggtggctcacgcctgtaatctcagcactttgggaggccaaggcaggcggattgcctaagctcaggagtccgagaccagcttggccaacatagcaaaaccctgtccctactaaaaacaccaaaaattaaccaggcatggtgatgcgtgcctgtaatcccagctacttgggagactgaggcaggagaatcgcttgaacctgggaggcggaggttgcagtgaactgagatcgcgccactgcactccagcctaggagacagaaggagactctgtctcaaaaaaaaaaaagtttttatatttggcctccagtaatggaggcctttttacaaagggaatccgaattaaaacttgggtctcctgataaatttgagaatactttctacagccatgctgctgggaaccatacaaaggaggcatttaatcaaactgatacgactaagtattattatgatacagtagcaaaaagtaacaatggttgcacatgatgacactaaatgccaaaatctttacatgatgtcagaagataaggtcaagtgctccttcagaacatatgccctacaacacgttaccttgttcttttctgctatgattctctttgtaaaaagttatatatctgagtaataaattgctacactaagtatctgagagtactgctttgggtcacaaaagcaaaataatttgcttataaaaacaattaaccttaggccaggtgcggtggctcatgcctgtaatcccagcactttgaaaggccgaggcaggctgatcacttgaggccaggagttcaagaccagcctggcaaacacggcaaaaccctgtctctactaaaaatacaaaaatcaaccaggtgtggtggcgcatgcctgtaatcccagctactcaggtggctggggcacaagaatttcttgaacccaggcagtgtaggctgcagtgagccgaaatcacaccactgcaatccagtctgggcaacagagcgagacactgtctcaaacaaaacaaaaacaaaaacaacaacaacaaaaaaacytaacttaaaaatactaaatattcagtgaaaactagagtcatgctaaaccaaaacagtgttttagctccaggtattaatggccacttctggagccataagcaaagctgataatatagctcctaaataaagaactggaatatggytggcaaagaatcaccttcttaatttcttaagaatgttcaactctggcacaaagtggacaaggtgagtatgggtgaatatccttctagagagatragactagaagactgaggatctacagaaggggatgcccagttattctctctccccctactctcgaaactcactcattaattcatgtatttatcaaaatggcatgtcaataccctgagcagccactcaggacaggactcctgcattgctacaataccgatcccccagcctctcctctgcccctcaacctgccttagctgctgtcattttatctacactggacaggacctgtccatttcctgtcttccttccaattatgtttgtccatgtctggacctggctggttgttccctgcagccccttgctggttaccttactctgacagtgatgcagccagaggcactaaagggttagcccaagggccccagccctgcatttggcccatgaaggggcttacgatcctcnttttctgggtttgggtgatgttagaggaaagtgccccagcccagcaccattcctttttgcttctggtttggagctctagaccasagccttagttctggtcagttgttaagtaattatttaacagtgtgacgttcagacctgcatgacatctatacagtgtccagtaaagaaagagaaagccatggtccctaccttcaaaaaagaaaaaatgccacgtaggtgcttggtgatacaaagttgagtaagacacacataatctggtggaggaaacagacctgaaaatcaataatcacagaacagtggaacattatagttgcctcagtctttacaggggaacacagaggagcaccagctaaagaatgtgtactttggacaaagttatatgccaggtactcctatatatatgatctaatacaaaaataaacatcagtcctatactgttagatgaagaaataggttccaagatttaagaggcagaactgagaatgcaagtcctgcrctatcatcctccacacgcctctcctttgtccctctccaccttccttccccctttattttcctttcctagaagggaaggagggtgtcagcatctcaatcaaragtcaaaactcacatgtcaacaggtaagtgacagatgatgtaaatgagggaagmacagagatagtgagataactcagatgagatggaatggtggggactctggtgaattagagattcacgctctttctaaaagaaaggtgaaggttcatgcctgtaattccagcmctttgggatgtaaaggcagaagatcgcttgaggcaaggaatttgagaccasgccagccaatatagtgaagtgttgtctctacaataaatttaaaaattagccaggtgtggtgatgcmcacctgtagtcccaggtactcasgaggctgagatgtaaggatcmcttaaacccascaggtctaggctgcagtgagctgtgttygtctcactgcactccagcctaggtgacagcgcaagagaccctgtctcaaaaaaaaaaaaaaaaaaaaaaaaaaaaaagccacgcatggtggctcatgcctgtaatcccggcactttgggaggccgaggcaggcggatcacctgaggtcacaagttcaagaccagcctggccaacatggtgaaagcccatctctactaaaaatataaaattagccaggcatggtggcatgcacctgtaatcccagctactcaggaggctgaggcaggagaatggcttraacctgggagatggaggttgcaatgaactgagaccacaccactgcactccagcctgggtgacacagtgagactccgtctcataaaaaaaaaaaataaaggaggggagmggggaaggggaggggaggggaatggaggggaggagggggagaggagaggagaggaggactcattcacctctagccctctgatgccacacagaaatgtggrcccaaggctctgtgaaatcttccagttttttgagactggcctgaaatcctgtttatgtgattctgtttcttgaaaaaagcagctccctaaatcaaaatgtttatcaatcaccaagcctgactgtggccacgggataycagcttgcaatatctgctgtagaccaaaggtggccaggcttgtcggcattgctcccgacactatggtgtttcacttagaaagtttaacaaccacacagtcatcgcaaaacaaaccacaggactggtgccactactgttatcaagactttattctaattctgaggtattaaggagagaggcacacaatgacagagtcgcggtgctgaaaacacctgactcacttccttgacatccctaccaagtagctttttggctctgcttaagcatcatgatgagccaacagggaagtctctctctcctcagatggcctgctcactttcactctgctcttagacattagagaaggtctttttttatattaagttgacctctgtatccctgtatctgccacccattggtctctggaccactttacctagaacacaatatcccaggagcaagaaaccaacgttatcatcacattacaaacagtgtttctgttcatacaaagatcatatcagctttttacttggactarcacacttgcctccctggccctcggggaccatagcatgatctagcagtgccagtgagttaacaaaggcttaccaagttccatggtagggcacagggagagctgttatttccatcagtcacatgttttactttaattctagctcaagaatatatttatgccccagtctccatgttcctaatctacagtgcacaactgcttcctataaataattattttaactttggtttaaaaagtactggcatccagccaggcacagtggctcaggcctgtaatcccagcactttgggaggccgaggtgggtggatcaccaggtcaggagatcaagaccatcctggccaacacagtgaaaccccgtctctactaaaaatacaaaaaattagccaggcgtggtggcaggcgcctgtagtcccagctactcaagaggctgaggcagaagaatggcgtgaacccgggaggcggaggttgcagtgatcagagatcgtaccactgcactccagcctgggggacagagcaagactccatctcaaaaaaaaaaaaaaagaactggcatccatttcagaaactggataaagttggtttcacagaatgttaaaaagtatccatggctagtttgtttgactttataggaataaaaatgacttaacagtttagctttataacagaaactaagaaatatggctccacacttaatatgcatcatgaaaggtagccaacttaggtccagtaaattacatcatagagcattataactatagaatgctgcttgtttttctggcaaagtcatgaatcccttccaaatgagaaacattttggcagactcatcttttttttttttcccagatggagtcttgttctgtcgcccaggctggcttgcagtggcacgatcttggctcactgcaacctctacctcccaggttcaagtgattcttgtgcctcaacctcccgagtagctaggattacaggtgtgcaccaccatacccgkctaatttttgcatttttagtagagatggggtttcaccatgttggtcaggctggtctcaaactcctgacctcaggtgatccacctgactcagcctcccaaagtgctgggattacaggcatgagccaccccgcctggccaggagactcatcttaaaattatttttcagacaaagtatcaatattggtatccacaagaattttcaaattcaaataagcaaatatttcgtctcctaaatttaagtgtgaaatattattttattcctttttatatctccttatcatatgatttctttacattcttcctagctccttataagaaacctaggagccatcctgatttctccaccttcttttgcctcccatatttaattaattagcaaatctttcaacatataccctgaatcagatcacttcttaccctcaagtagattctctctcagtctaagccaccatcatctcttacctgaactactgcaatagcctcctaacttggctcactcttycactgtstgcaaggartaaccasagtgatcttttaaaaacatgtrtgaaatcacatcactcaggcggcttaaaataaaatccagacttctcaccagggctcagagaacctgcttgctgactccctctccactgcccctctcacattccccctccccaacaactgccacactggagtcttttggggtcctggttgaaggcagtactgcccccttggcgttggggcgggcagtgggtgtctagaatgtgtgactgtttttgtaatgacagtgactagggatgctaaccgtcccgcattgagccacacagtcccacagtgcacagcacagttccgagccgcaaaggcttgcagtacccaaaatgccatttgccattttcacaaaaacccagttcattctcatytcaagatctttttttttttttttttgagacagagtctcgctctgtcgcctaggctgcagtgcagtggcacratctcggttcactgcaacctccgcctcccgggttcaagcaattctcctgcctcagcctcctgagtagctgggattacaagcgcctgccaccacacccagctaatttttgtatttttagtagagacaggttttcaccatattggtcaagctggtctcgaactcctgacctcatgatctgcccaccttggcctcccaaacagctgggattacaggtgtgagccacagtgcccagcccccatctcaagatctttacacttactgttacttttgacccaggaactgaaatattttcccatcttgctcaaatattttcccaccttgctccttctgaccacttgggattcagctccaacatcatctcctctgaaaggccatgcctggccctcatttctcaaatagccaccccagccagcacccccgccagtcttgttattcctccaccttgctttatttastttttagcacatatcaccctgtaaaattatgcatttacttgcttaagcttttgttgcctttctcccccacaagtgtgtcaacccgctgagggcaggaactttgtaccctggcacctaacaatggctggggtataccaagcgtttagtcatcagatatgcagtggataaatgtctccataatttttcttatttacgatcaggaatttttttaaatcttcaatttgggagtgcagtgtctcgtagttatcatttctagttattttttcctacaccaagttcccctttttgtgcaacagagttgttttacattccacaatttttatttttgcagaggacagagaggtgatggtaaacttaaaatatcccaaatcaccatgcaactgtttcacaaaatgtgaaggagggctttttatgaacacagtatttttgtaagcctcagagtaaatgtgtaaattctggctaactgaccagtaaagctatggtaggaccacttctgggggcaataatcatccgatgagagagcagctccctttactggagccaccgaaatagaaaatgagcaccaccttttgtcaaaaaggctcacaaatcttttcaagaccgagaagagctgaaatatacggcaacagaaaaataatttttttaaaaaaatcacactttgaaagcactaaatccaaagttcaaaccaggtctagaagtgaattagagataagtgataagggggatgtataggcttacaactggactttaaaatatgattttatttaaatgtcacggagcagcctggcgtggtgactcacacctgtaatcccagcactttgggaggcygaggcgggcagatcacctgaggtcaggagttcgagaccagcctggccaacatgacgaaaccccgtctctactaaaaatacaaaaattagccgggaatggtggtgcatgcctatagtcccagcttgagaggctaaggcaggagaattgcttgaacccgaaaggcagaggttgcagtgagctgagatcacaccactgaactccaacctgggcgacagaaatagactccatctaaataaataaatacataaatgtcaaggagcattatttatttaactatatagaagcctggaaagatatgttaaaaaaagaatgagcatacttcgattacttttatgttccacacacatatgatctatgctcaaacagggtctaaatgagatactagatgttaaacagtgcttctctctaacgagtggtatttgggaactgacatacaatcacctatggcttctgtgagactgctgggcccaagcactgtatgcattttagatcttaatacagactgccaatccacgttctcaaagttcacagcaattcacacttctacctctacacactttccgacactgtatattatcattatttaaaaattttggggccgggcgtggtggctcacgcctgtaatcccagcactttgggaggctgaggcaggcagatcacgaggtcaggagatcgagaccacggtgaaaccccgtctctactaaaaacacaaaaagttagccgagcgcggtggcaggcgcctgtagtcccagctacttgggaggctgaggcaggagaagggcatgaacccgagaggcggagcttgcagtgagccgagattgcccagtgcactccagcctgggcgacagagcgagactccatctcaaaaaaaaaaaaaaattttgtcactgtatattatcatatttaaaatttttgtaaattaatgggaaaaaaagtaaacttccttaatttacattcactgactactcagattgaacatctcttcccatttactgatttacttgcaaatcctctctgactagttgstctttgtccttttttcctattgcattatgttgttttcaataaactcatygtacctatattttaggaataataattgtttgtaagtcatccacatcgcactatttcttccaaactgttctttttcatttctaaaaccaaataagtcagtcctcccttttgattctaagttttgtatcttgcttagggaaatttcctcccagtgacatttaataaatattctcaggaattttctactgagtagaattcatttttttaacaaaccattaagtccttggtattgcaatgtaaagttaatgaagggaggggataaaagaagatgagaaagaaaagggtacagggttaagaaagagactggaaaagtcttatttcttaatgttgaagaaagagttttaggccaggtgcggtggctcatgtctataatcccaggactgtgggaggctgaggtgggaagatcggttgagcccagagtttgagaccagcctgggaaacatagtgacaccttgtgtttacagaatttttttttttttttttttttttgagatggartctcgctctgtcgcccaggctggagtatagttgcgccatctcagctcactgcaacctccacctcctgggttcaagcaattgtcctgccacagcctccacaagtagctgggactataggcatgtgccaccatacctggctaattttttttatttttagtagagacaggatttcactatgttggccaggctggtctccaactcctgacctcaggtgatccgtctgcctggactccacaaagtgctgggattacaggcataagccaccatgcccggcctacaaaaaatttttaaaaaattagttggcctctaacccccagcactttggggagctgagtgatgactactcgannnnnnnnnnnnnnnnnnnnttcaagaccgagaagagctgaaatatacggcaacagaaaaataatttttttaaaaaaatcacactttgaaagcactaaatccaaagttcaaaccaggtctagaagtgaattagagataagtgataagggggatgtataggcttacaactggactttaaaatatgattttatttaaatgtcacggagcagcctggcgtggtgactcacacctgtaatcccagcactttgggaggccgaggcgggcagatcacctgaggtcaggagttcgagaccagcctggacaacatggtgaaaccccatctctataaaaatacaaaaattagccaggcacaatggtgcataatcccagctactcgggaggctgaggcaggagaatctcttgaatctgggaggcagaggttgcagtgagccaagatcgtgccactgcactccagcctgggcaacagagcgagattctgtctcaaaaaaaaagaaaaaaaaaattagttggacatggtggtgcatgcctgtagtcccggctacttgtatggctgatgtgggagggttgcttgaacctgggaggctgaggctacagtaagccaagatcgtgcccttgcattctagcctgcgcaacaaaacaataccctatcttaaaaaacaaaaaaaggaataaaaagaagttttaaaagattctaaagtaacaatacatttctcatattgatatattatgacaggaaaaaaactcaagtattttggcttgaaaatataaactataaacatataggaaaaattttggtttaaaactaagcacaaattacrctggttttttttaagaaaaggaacaattatatttttcataatactaaaaatgaaataatgtaaagtgataaaaagcaattaattcctacttaggtaatatttcatctcagccttttccattaaaactttaacttttatgtgattatgaggttatttatacctaaagagaccatttatgtatatagagaattagtacaggcatttattyytccagggactgagataagaggaaaataaccaagggaagaatttgttcagcactakaggcaatatttcagatgcttaagtggaaatacgcatatgcttcctcaaaaatcacaaatagaactgttagattagaacttgtacctttytgaatactttatgaaaagcccttaaataatatttttttccaaagtgacttcttaagaattagctcaggccgggtgcggtggctcacgcctgtgatcccaacactttgggaggcggaggcgggcagatcacctgaggtcaggagtttgagaccagcctggccaacacggtgaaacccygtctctactaaaaatacaaaaattagccgggtgtggtggcatgcacctgtaatccccgctacctaggaggctgaggcaggagaatcactggagcctcggaggcaraggctgcagtgaactgagatcgcgccactgcactgcagcctggatgacasagcaagagtctgtctcaaaaaaaaaaaaaagaattagatcacagccccaataagatttctrgtaacatctaattagacaattgagttcccttgctggagcttgtctgctttgcttataaaaacatgtgcaaagtctaagacaaccacaactagaccctcaatatcctcctccttaatgcttattggggaaacggaaataaacagtgtgatctgccttcgttcacacttgtcacttccttgtaaatgttgagagctttccaaagcaaagagcctatgacagcaaggaaggtgtccaaagccagtgactcctggggaagaacaaaataagaagaattattccatcagctaccaagaacttatattaaaatggtaagagtaagacagtgtggcatttgcacaagaatagaccaacaaaccaatgtaacagaatagtccaaaaatagacccatgcatatataaaaacttgatttatcacaaaacasacattggaaattagtgcaggaaagatcaactgttcagtaacctgtggtaytgagatcactggctaattttattggggggtggggtggaatcatgggaaaaaatttaaattagatttctacctcacaccaaacacaaaamtcaattccagggagaattaaagatttaaatataaaagtcaaaccakaagatattcagaagacaatataggtgcatgtttttatgacttcatggaaaggatttcttaagaatagaaaaatacaacctagaaacacaaaasagtgataaatcaactaaattaaaattataaacttctcttcttcaaaggataccacagaaagagtaaaaagacaacccatggactaggaaaagatatttccaacatatctaaataactaaaaaggcttagtatacagaatatgagtataggtgtatactcttacaaatcaggaagaaaaatgtaaacaatccaatggtaaatgagcaaagacatgaaatgcatttcagtgcaggatagtcataaatgcctgtaaatactgaagaggcacgacctcataagcagccacaaaaatgcaaactagagccacaaggtatgaagtgatgacraggatgtggagccaaaggtgcctggtgcctgttccttgtatatttatatttttacaattttaatttctgcagggtctttttctttttttttaaacagagtctcactctgtcgcccaggctrgagtgcagtggcgtgatctgatctcggctcactgcaaccttcacctcccgggttcaagcaattctcctgcctcagcctcccaagtagctgggattacaggcttgcatcaccatgccaaactaatttttgtatttttagtagaaacaaggtttcactatgttggccaggctgatctcgaactcctggtatcaagtgatccacccrcctcggcctcccaaaatgctaagattacaggtgtgagccaccatacccggccagcaacttttttttttttaagaatactatctatggtgactatttctagcccrccatgatagcgagtgtcttcaaagagagctgcaggcatgaccaacctgcgttcactctcattctaatcttaagatttcatcctttctacacamactcggtgtgaacagtctgcaaaccgtggtgasagcccattggtggggtatgaagtctgagaagaggtatacaatttttcccaccacatccagttccccccacaatagttgtagggtcctctggagcccaaatctggggagattctaggctttatctcctatttcctctactctaagtggccggaaaactaatgctcagtattgaaccaatactgattcagcaaatgcattcaaggcaaaagtcagatttgatgcactgcttattttttttttttttttttgagatggagtcttgctctgttgcccaggctggagtgcagtgacacaatctcagctaactgcaaactccacctcctgggctcaagcgattctcccacctcaggctcccgagcagctgggactacaagtgtgtgccaccatgtctgcctaattttggcattttttttttttttagagacggggtcttgccatgttgccccggcaggtctcaaactcctgagctcaagtgatccacctgccttggcttcccaaagtgttgggattacaggctgagccactgcgcctagccaacacactgcttacttytaagagttcctgctttgattcagttttagcctctgagcatccttaccaagtagtcractcattcattccatttaagggctagttttttattgcactcagcatttttaattgttgctakcaggaaggttagtcagatgtcttagaccacaggaccactgtattgccagaatctaaagtcaaaaakccgctttaaaacataaagctaattatgtcactctcctgctttgaaactttcaatgcttttctcatgatatacagtgtaaatctgagctcctaagtgctcttgaccctgttcaagaggcataagggaaacttcccagaggagaaagaaaatggaggttaaacttgaaccagcaggaacagagagaaaagaggagagcasagaaacagccaatgaatcctaattaacaaatcaaatgggcaggagaatattcaagtctagtatggaaagagctcaacattcaagggtctgatcaaccattagaagctcagtcaagactgcagggcatcaggggctctcaaagccaagagtgaagaatcagaggggtctgtaagagatcagggacattgggagcagcatctatccaaccacgcagaaggacagtgggtgcccaaaccaaagggccaattaggcaacctggtcacartaggagttagactgaggagctgccwctccctaattcacaggagcccagaaggctcaaacagatttaaaayayacaaaggagggcatgggagcagcagatcctcccagaccccttgttagtcacaggtactcctggtctggctctcaaaagcaaggccttcccaactttgttacagtcagctatgctgaagccttggctggcagaaactgacaagccccrtaacacagctttccccatctggccccaaaccatctctccaggctcacctcccctctcaccccattccatctacctccctactgcaacaacacagacactgacaagcagcactctctccagccttccctcytctacaggctgtttcatcytcctgaatgactttgcccctcttctctccccggaaaatccctacttattcttcaaagccccctcaaatgttgcctgatcaggagattactctgattcaagctgagtttgctaccctccactcctatcgagcacagccaacacattattattttattattattactattattgtcaccatcacatccatcatttatcaagtgcttgtcatgtgtcaggtactgtattaaatccttcacatgcatttttccttaccacttatagttattatcattctccattttactgaggaggaaaccaacgttcacatcatttcaaatattggcctaaggtcacatagctgctaaagggatttcaaacacagtctgttcttaactcaaaaactcatattgtttccagtaaaatatcacaattcatttatctctgttgcctccaacaacaaataagtaacttaaaaataaagatcacgtcttcctaatttttgtatagcctgcataatacctggcatatagatgatgctctctaaagatttaataaataaatgaataacagacattcattccattttctcaggaacttgaatgacaactgtagcacagaaccagtaatacaatgttgagactgtctttatgtcccctttggctagggtctactggatagctcgcattatggagaataaaggacagagagcacaagacacttaggtaaagattcaggtacaaggaaccaggcaagtcagcgcagtgtcttttgagtaaatgggtttaacctaggcaaacaagtggttatttttaaaacaagtggtctactccaacctcttttcaaataactggctgtcttttttttttttcttttcagacggagtcttgctctgtcgcccaggatggagtgcagtggcgcaatctcggctcactgcaacctccatctcccaggttcaagcgattctcctggctcagcccccgggtagctgggattacaggcacctgccaccacgcctggcttattttttgtatttttaatagagatggggtttcaccatgttggccaggctggtcttgaactcctgacctcaggtgatccgcccgcctcagcctcccaaactgctgggattaccggcgtgcgccactgtgcccgaccacaactggctgtcttaataacttcatctttatttttttcccagcctaaatcagtgcaataccataaccatctattaaacacctgctatggtgggaaggaagagaatgccatatacctcatgggatactgagttaatgaaaacttcttttccctgaagggggtcttagtcgtgcttgaatgtatgcagaggttatctcaatgaaggaaaaagtgcagaacattgtgacttttctgctcaaagctctctgaaagtttcccatctcactcagagcaaaagccaaagtcctgataatctagaagctgctacatcatgtggccccctctggtctcacctactattcaccccctaactcagtcccctccagccacatggcctccttagcgtgtcttctcaatgaggctttctctgatcactctattgaaaatcataaccttcttccacttcacatgccatctccctattcccagggttttttccccccatagcattttggatgatctaacgtgctatctacttaactcattcattttgtttatcatctctcttcccccacaaaatgtaggctccgcaaatatggaccttctgttgtgtttgttctctgctgtattttcaacacccaaatctgacactgaatcattattgtaggaatgaatgaatgaaccattagttatgtttatacaatgacctatctgctcacagcattactttgaaatccatttttcaaatttctgaatcacactggcatcacaaatttaaatacatcttaagattttttcgcttggcattgattaatgatgactaaaatctcattggtctagagctttcttcgttgcttttttctgaaaagacttactgtgaccattatctaaaaatgtaattgttgttttgagaccctggtctaaattttagcaaataattgcttgtattgtctcaagcacttcaacatgatttacaaaaatatattacttattatgccacaatgaaaaatagcacctgattataaaacatgactggaaataactacagtaattaagatagaagacctgagaatgctcttaagaaagggttctacttctttttttgttatttgtttttttttttttgaaacggagtcttgctctgtcgcccaggctggactgcagtggcgcgatctcagctcactgcaagctccgcctcccaggttcacaccattctcctgcctcagcctcctgagtagctgggactacaggcgcccaccaccaagcccggctaattttttgtatttttcatagagacgggggtttcaccatgttagtcaggatggtctcgatctgtgttaggatggtctcgatctgtgttaggatggtctcgatctcctgacctcgtgatccacccacctcggcctcccaaagtgctgggattacaggtgtgagccagcgcgcccagccttaagaaagggttctacttctaaattattgtaaaatattaacaaactgaggctgggtacagtggtacacacctgtaatcccagcacctttggaggctgaggcaggtagatgtcttgagtccaacagtttgagacgagcctgcacaacattgtgaaaccccgtctctactaaagatacaaaaacttagccaggcatggtggcacacgcctgtaatcccagctactcgggaggctgaggcaggagaatcacttgaacccaggaggcggtggctgcagtgagctgagatcacgccactgcactccagcctgggcaatagggcgagactccgtctcaaaaaaaaaaaaaaaaaattctatggagccaacaattcaaaagctatttataatcagtttggagcacattatattttttccttttttttttctctctctctctctctctctaatggttgattttccttcctatattttcttgagatttggagcttaaagaatctaagcacaccaaccttagcagaaagaaagccagtttgtgatttaaaagacaaaaaaaaatggtcatgcgtgccaaagagataatctgcaagacaatagtatctccagctcaacaaaagaagtcatgtacaagattaaactcatgctgtttccatccagtaacctcacacaaggtcaacttcaagatatctcctaaaaccatctagcaagtagcaatcagtgaggcttatcaacagggcccatccttcttacaatataaacctctttcagtttcaaaaattgatgactaagagctcttcaatagtggtatttgattccacattactctgcagtatgcaagagaaaaacaaagacccatcattctgaaccttctatcacagacccacgccaaactgcaacagaacattcttaaggaaattgctactgttattgtacacatattgctattgctcccataaatataaacaggttctcattttcaattctatatttaaagatagaaacacagcagttaaatattacatttgagagtagtgctttttctccttaaaatgttggaaaacagtaaagatgtacaaccaaaagaacaactataagtcaccaagaagttagagatcaatccctcaaaaaaaattctttttaaatattctatttacaaatgtgtaaagttggcataaaaactgcaaacagaataaaataaatagacacaataagagagaacttttaaaagacactttaaacagtactcaagaatacaaaattaaatgcactcaaagttaacatatatctctgtctaatgcagttaagtttttgatattttctgttttcaggaaggatttaatattttcattttcagaaagtagaaacaacaaattttaaaagactgtgcaatgaaggtttatgtattagctcataacttcccagttttttgttttgttttgttttgttttgagacagagtcttgttctgtcgcccaagctggagtgaagtgtcacgatctcagctcactgcaacctccacctcctgggttcaagcaattctcatgcctcagtctcccgaatagctgggactacaggcgcatgccagcatgcccagctaattctgtatttttaatagagatggggtttcgccacgttggtcaggctggtctcaaactcctggcctcatatgatccatctgccttggtctccctaagtgctggcattacaggcatgagccactgcacccggaactagattttcttactaaacacttctacgcccatggggtcatttagtcctcaagttggaaatatagaagaggggttctttaccctggctgcatctctaagggaagtgggattcacatgctgaagccaggctccacttccaatgagtgatttaactctcccggagtggggtccaggcagcagtagttttataaatcacccaggtgattctaacatacagtctgtattgaaagtcactagttcctacccacctcttctcagagaagacctcagggagatatccaaggtctgctcaaacatttccaatgttgagacccaatacctcattagaaaaatccagtaggcaatacactgtgttacagaatggtcatatttcaaatatgaatggtcatttttacagagcatggtaacccatcccttcccctaacaactacaacagagttcgcagatcttggcacttgtcctcttcttaaaaatcacattccccagtctccacatgactggctccttgtcatcattcaggtctgggctcaagtctcacctcctggggaagactgcctgatcacgctttccccagccagtctgtctcttccctcatggcacctctcacaactgaaatatgtgtggatgttcgttgactctcttcccagtctgaaacataagctccacccaggcagccccattgggtctgtcttgttcaacgctgtatctccagcaagtggcaccatgcccgacacagtagccactcaatacaaatttttgaatgaataaatgaaacagatgaagaggtaatgggcaatctaaagcaaaaagaaaacatcagagtggtagataacgtaaatacagtcatccctcagtctgggtgagggtgtgggggttccaggaccccctgcagataccaaaatccacagatgctcaagtctctgagataaaatagtgtagtatttgcatgtaacctacacacatcctccagtatacattaaatcatctctagattacttataatacctaatacgatgtaaatgctatgtaaatagctgttatgctgaattattcagggaacaatgaccaaaaaaagcctgtatacgtttagtaccgatgcaattttttttccaaatattttcaatccaaggatgcagaatccaaggatgctgaacccacagattctggggcctgactagttgacaatgcagattataaaatattggactaggccaggctcggtggctcacacctgtaatcccagcactttgggaggccgaggcgggcggatcacaaggtcaagagatcgagaccatcctggctaacacggtgaaaccccatctgtactaaaaatacaaaaattggccaggcgtagtggcgggcacctgtagtcccagctacttgggaggctgagacaggagaatggcatgaacccagggaagcggagcttgcagtgagccgagttcgcgccactgcactccagcctgggcgacagagtgagactccatctcaaaaaaaataaataaaataaaataaaataaaataaaatattggactaagcgggccggtgcgatggctcacgcctgtaatcccagcactttgggaggccgaggcgagcagatcacctgaggtcaggagttcgcgaccagcctgaccaacatggagaaaccctgtctctactaaaaatacaaaattagctgggcatggtggtgcatgcctgtaatcccagctactcgggagcctgaggcaggagaattgcttgaaactgggaggtggaggttgcggtgagctgagatcatgccattgcactc

SEQ ID NO: 7010 - DNA, 14646 bp, Homo sapiens
ccccacctccaacactggggattgtaattcaacatgagatttggatggggacaaatatccaaactatatcaagggcccatagtgctttgtcttcgacactgagtgaaccatggaatgcgtcagcgttcttgagaattcatatctcttgtactttgctttagttgttcatgtttatttatctggactagttctgaaattgtcaatgattctgggtaaggagagatattcctctgtaactgtgaaggacctttgaacattctgataggattaatgattttcttccagtgtgtctgtaataatcactaaacatgtctctgtgaagactccttagtacattaaagtattgttaatgcaacagtaccaccagaagactctgggtgattgatcgggataaagttgatcatctgtctgttaaagttcttttttttttttttccattcttgacaagtggttcaacttagaaatcccgagtaccccttacaaattgcaggctacctcaatcacctgtgattacagaacatggttggtttgctgtgtgctaggacccccatgtcttaaccacagttgatttattttaaacactggaaattgcaaaaaaaaaaaaacaaaaaccacacacaaaaaaacctaccttgggagttctttgaccccacagttcttcctattctatgtcttaggctcttaaagtgcttctcctttctgcatctgtctttccccaattcagaaggtacttcccgctggcagaggcatcactcagtaaatttcagggtagcataagaattgctctggttacgttgatatataatttaattttccccagactgcctctggcctctgcctgtttaagctctggaatccctgtggggggtgagtgtgcagaatatgttctcacctctcaattcattgtgactttagctggaggtcggtcctgttgctgttgttgctctgcatcccagcaagtagaagcagcatgtgagatggagtgagcagtaggcatatggccagggtttgtgtgtacagagggatgcagcacagggagggaaagcagcattttccctatgggactgtcaagagaagtcgagcccttccatggagcacagaggcacagagaatcagacagggcatgggcctgggcagcctgaggcctgcctggtgagcgatggggcaggatggctcacatcgcctagccgttggcaaagggtctaaaattcagtgcttcccccaagcagcctagctccttcaaatggcaaattattatttttctgttcttttctgtcttcgggattgtatttgcatctcaaatgtgtgtaaagggaattttgcacattcgacaaacttttactttaaaggcagcaggttggagaaaggagctccatcacattaaatgctggctattgtgcttttcattcagcttgacgaacagtggccgaaaatggcaggggattaaactgatgtaatgacaagaattcatataagaggctgtgggaatggggcagaagaatgctgaggctttgcagtattatggtgttctttgatctgccgtagatggaaaacataatgtacctgtatttatgttgattctaaatagggagtgtgtaaacagaggcatgtcattttccctgcagccttcaagttgaaattacacagctaccatttctgagcaatggacatatttctgagtaatgagttaaatgcagtttttgaatatttggatcttattgtacatcacaataagagcatttttgttgctcaactgggttcctgttacagaggcacacagtatgtgggcatttgtggattattcatttgctaaagggcattcttcttatttttaggaaaattcacctttgtcttggggaatttaagcaaaaacaactgcaatcccgaatagaatgaacacctccttttttcagcctcattctttagtgtgggagagccgcagatgagatgtccctgccttctggagaaatacatatgtgtctttcatctgggaaatgtctttctgggacagcaccagctggaagatgtcacctgggatgaccaaagacttgatcaattgacaaggggagcatcaaaagtggctgagaaccatttatgtttactgtgtttgaaagcactttggagggcagggcgtgcgtctcgtgcatctgtataatatgaaagcatgttttgtgaggcacatcttaacatatggttccagaaaaaggaaggtggtgccctgcactcaaactttttcttttctatacatagctagaaagtcatctttctataatcatttgaataatgatgttcacactttttttgttgttgttgagatggagtctcactccgttgccaggctggagtgcagtggcgtgatctcagttcactgtaacttccgactccttggttcaagtaattctcctccctcagcctcctgagtagctgggattataggcatgcaccaccatgcgcagctaatttttatatttttggtagagacagggtttcaccatgttggccaggatggtcttgatctcctgacctcatgatccgcccacctcggcctcccaaagtgctgggattacaggcatgagccactatgcctggcctgatggtcatactttttaaaggcttcatgaggaatttccctaatttcttagaatactgctttggtcatctccacaattatggtaggaaaatgtggactcaaggccatccacagttttgactgactctgctctgcacagaagcccctgggccagaatgtctcacctgccattagttcccatcccagcctcacatttgtgcctctatggaggctgtgccttctactagaggggcccacccttgctggcttctgcccactagctgctgcccatcctctgggggtcagcttgttccagctcccccaccaccttccctgcaggcttcatagccacctccccagagctgagtgtgtcctgtcagtagcactcggggaggatcagccaccttgctgccaggtggcctctgcatctcacctgttgcactcttagcgtcagtgatggagggtaataacactaatgataatggtaataataaaatcatttattcagcctgcttttactgattgcctgttgtttgctacgggtgaggatggagtggtcatcaaaaagcagacatgggccaggtgcagtggctcatgcctgtaatcccagcactttgtgaggctgaggcaggcagatcacctgaggtcaggagttcgagaccagctgatcaacatagtgaaaccctgtctctactaaaagtacaaaaattagccaggcgtggtggtgtgcacctgtaatcccagctactcgggaggctgaggcaggagaatcgccttgaacccaggaggtggaggttgcagtgagcctaggttgtgccactgcactccagcctgggtgacagaatgagactctgtttcaaaaacaaaaacaaaaaaagacagacatggaccctggattcatggcacttcatgttccagtgggaaggatagaccaaccagtagtcactcacgtcagtggaaggatgttgactgacaggtggtgcgtgacactgtgagggcttgcaaaggggcatgtgaaccattcaggaggtcagcgaaggctttcctgaggacagaaccagctacataattttcagagtccaatgctaaatgaaaatgcagaggtccttgtttaaaagttattgagaattttatggtgagtggtggcagcagggtattaaatcaactgtggggtccttctgtgcagggggccttgtgtggctatgctggttgcattctcatgaagcgggccctgcctgaggagtgacatttgagctgagatgtgaggggagaagagggtaggaagatggctccaggtggacgaaacagcatgagcagagtctctggcaggaaggaggttggcacattcagaaatgatgaaggggccagcgtagctggagttcagagagcaggtggggcatgacgaggccagggcagtagagttggtgatagggaaggcaaagcagaaccctacacagctacttaagtgtcctgagcagggagctaaagacactgggtttggattttgcagtcacaccggctgcagtgtgcagggcagactgggtaggtagcaggagcgaaagcagggctgttcggaggatgtcagagctgtccagttgagggagggcaggggctagtccagagtggtgccagtggagggagaaggtgtgcaggaatattgaggacacccaatattgggcatagtggagctgaaggaacaaaagacgccaaagatgacatctagattctggctttgaacccctgagttgaacctcatgaaatcaccaacattctgccacttttgatctgcagaaataccaatttcacacaacttgttctgatagatgggtggttggtgggacatccctttacacgggaatgcttagaggatcagaggggtttgctttgtttttgctttggtggtggcagctatgagagacaattacaaactgggttctagacacagtgagcttgaggtgcctttgcaacctctaagtgagggtaaggaaagaggtggactatatgcatctggagcttagaggaggtgcctgagcaggagatacagttgttggagcagatgctgtatagacaccttatcagggttaccctgtttaaaacttgcaaacatcctgtaaagaatgtactattgtattcagtttccagatgagaataatatggctaagagaggttaattaacttgcccaaggtcacacagccaccaagtggaggagctgggtccagggcccaagctcctaattactgtgcctactgccttctcagtggtttcctcacatcaggatgcacagctctttgtactgagtagatccttaggaattccttattggataaatacatttaaaatatttggtggaaataatgatatcttcccttcttaataggagattcttgaaagaggtcccaaggccccaaagtgtcagcaaccatagatggaatttacatggttgcctgtctggttattctcatcacactttcctctccttcatgggcaagctccacccccaccccttgctgaggtctgaactttgtagagagcctcagttgtggtcatagcaacatcttgcagatgaatccattaatgataagttaggctcctcctctagtattcttggggtgaattttataggattttgacattttagggctaacagctgcctcaggtgctgctgcgctccctcgggaacccctagggcacattactaaatcttgctgggcctaggcacggactcaggatccttctcaacatggtactcatctcattttaggactgagggcactgagatccagagagatgttacttcaacaatcagttaatgctagaataaatctgtttgcttattaaatcaaataaagtagattctagttcagtccttttacaggtaaggatgctgagggcccgagaggcagtgacttgctcatttctggtggagatggagctcatgctcccattcctacctcccatctagtcagtggtccctccttgggcctggaacacacggcaaatccacttgctgtgttggctcattcagcaaaacggagcacatcttgttgtggacatgcatttttcatcagctgttcctctggaacttccctcatcatgcttgtgtacagtgaattgaatgatgtgaattatactttattaggattgccttttgatacaagtatttcttttaggctgctttgtgcccgctgtgatgcccaccctggattttcttccctttgcccttgacgttgaagtgaaacatattgtttccctttagaatgccattaaaagtcgatgatgacctttacagtgactaatagtttctaaggggctttaattgtgattttttttttttttttttttttttttagcagagcggcattagtttgcttcatatgtcttttgtatcagggaatcaataaaaactcctgccttttgttgatgctataggatattttatgccgatgacaagggatttgatttaatattctctttaaataagatcaacactgctgcagttataaactcttcgaaaaactgtcaagcccgtcaatgtagcatgaaacaaaaagttagcagcctggtataaattagcacgtacaatgtgtctttgggaagggtggtacatatttacgattgtgtgttaaaatatrtatatttagagatttctttctgctctttcgaccataagtgggaaatgcagagaggaacatttcattaccaccaccttccaaaccgcaaactttctttgccagttaatgattttctggggcaattctgaacgtggtgacatgatataaacaggtatttatgatctgtgatacaattcttcgtgagtatggatttatagttaaatggtgcagtgggaatccagccagagattattgacagagcttctagaatccatattttgtctgtttccattattcacatacattttcttttgagttctgattatctgtgtagtctgtgtttcctggtttacttgagaggtgagcataagactttgaaattcaagggcatgtgttctatatgcttgggggccatatgttctgtacatcttgaccctgcacctcttccccaatatcttgccattttcattcaacagcgattaggttatgtgattagatcattccatctctctttggctttgtcccagatgaaccaaagtaggagcagagctgatggacaagaaatgtttggggtgagcacatgggtacagtcgtggcagtgtcagagacctgggagagtccagagcttcctagatgagagttacrcggctcctgggacaaagtgaggctttttcagaacagcagcagacaagtgagggatcactcacgggcaatgtggatcatgttagcaggataggaatggataggcaagagtctgaggggcggcaaatctgagatcaggtgatccagagagaaggtctgccttgcacactgggaagattgcagtggagctgctggtggcatcaggagagccctgggaggtcactgcttccatgactggaggaggtccactcagagttgcttccagtgccgacccacggggagaaactaccagaccagagtttcttgaagtatcttccctggagggtctacatcttaatcacttgggatttccatcagaatctgttgtgaggaagctgagaatctgtattttataaagctccccagctgatttccatgcaaaccaataaagctttgaaccatcgcttcacacttaaggagtctttccaagttagaacaaacttaggtctcctttcattttttccgaaagagtttgggtttatatctggagagagagtgatgctctttggacgacgtgggacagatacgcgttactccacaggtccatttgagaaagtgatatttgccagaaaatatacaatatatgttttgtttaggttatatttgttgtattatagatacaactttacatgcagtttcagatatccaaattccctgatcgtgaactccctgttgaaagctcttggttggaagacagggttatattaattcttgctacctttcactgattaccctatgcttgctctaaccatttgtgttgaagacaggatcaagatatgacctctagttactgtcctagaaaaatctctgctgggtcaaaatgctgaatcttcattatgctaataaacaccttgatgaaaatcgaagcatgtggtccccattccagccaataaatccatttgtcactattggaaagcattgtaattcttgaattcccatttctgctttcatttgaatgtttgccattcttccttttgccttagtcctacatatgtgaaccatttaggaatatgatttatgcaggaggaagagtgaagaggttccttctggacactgggcccttgaacttgaagatcctgcttttctgtctggaagacatggccctaatatgcagtggctcaccaaagcaggtattgatcttgttttcttgagaattcttcataggcatgagtcactagccagaccacacatcagctgtcatctgcccaacatttttgtcattttggaggagatgagtgcaaactgagaaagtctctctgcttgtttccctgggtggtacttatgctgtctgaatgttcctttctggratttattagttagtgattttcttttcaataaacacttgtagcatacatactagtgtgctctcctaaagggggaaataatttggcagccttatcagcatgttattggactttcgttttgtttgtaatcttaagacacctttttcccactcagccattcagcaacattttcccttycccagccttggccccgccacctgaaacattcatgttcttcctctaagacagaataccaaccaagtgcaggcagccggttgacacaaccagatcaaaaggctttgaattctgaaaatgattcccctcttggtatcaagcccagtgataaaarcaaagcagttgtcatcttgaaaacagagctgtatacacagcagagcctttccaattagcacacttaagatgcgtgttagaaatgatgggaagtgggatgttacagagtgaaatgcaggtaatagggctttaaattttcatgtttcagttgatttttttctattgcagttttaagaaaatcgttgcacattattgaaactcctaagtgcatcttaccattgctcttctgtttacaataatatcttccaaaacaacagaaatgttggtcacaaaaaagcttgtacccattggttttccaagtagaggaagaataatctattattcaaaatttccctaccatggatgaacaaatcagtttaggtggcttttctgcctgctaccagccaactacttcaatggaatccctgaactgaacaacctggcatttttcatgttcactagactcaggcttagaaatggagcctcctcacaggatccacacaggcatatggagaaattaaagccaaatgtccagcaaaaaccaatgggtgtgttacataaagataccagagttatttaaatatgtaacttactcaccagtatgtaggctgctagaagtcaggggaaacctattaattttgaatctctggtgtctagcatggggcagcatagagtaataattacagttgtggtggatgtgattagtactcaccaatatttccagttcccctctccttttgtgtacatgggagaattatgctttcctttcctcttgaagtgagatgtgccttgctttggtcaaatcagtgggagcagaagtgatttgtgtcacttctaggtataagcatttaagacctagtaaatggcccttctgttatggtaaaccctaaagccttttattgagaaaggagcattataaaatgttggagactctgttagtttaggtcagtgaataactacagtcaccagagcccctttctaccagccaacccacactggacatgtagaatgagagagaattaaccttttgttagtttaagccactgagatttgggacttgttattgcagccaaaataatctaacatattttggctgatatactaatgaacatttattcagtgctgtgtgcttcaagtatttttatgtattaattcacttaatcatctctataatcctgtgaaaaagatactgctgttatcaccattttgcaggagaagtcacatgggtgatgagatgtttagtcacttgcccaagattgtatctctagtaaggagcagaactgaaatttgaacctaggcagtctggtaaataataaatggtgaatgagaaagtcaagatcagagagtgctttgtgatttgctgcagctatgatctttcatgtgacatcattggaggaggtaccggtcagtgtcatctatcccagatctctctgctacctgtcatttttccattatggtttcttacttttaggtcttgaaagttttcggctttctatctgcctatataattcacatagtgctatggtggacaacactctgtaatggtttttggaaagctaggtactccacaagagtgcatgaagcgtcagagaggaggtctagaactctgggagagctaaggagcaatcaaggactagagctgccctttggctgagggttccttcattaagactagtgactgccatgttgtgctgtgagcccagagaagacgagcatcctgtgggagttcccacctgtggagttcatccagcctttccaagcagtagtgggagataggatgactgtgggtatgctcaactgtttgttgcttccaaaagaagatgagggccaatttcccaaaagggtaaaaggaaagaagttgtggcatagtctgagaggctcaagaggtttgattttgctcctttgttctaatatggtttggtcaaggtggtttggtgaagctttagggaacttcttattgtaagtaacagaagcccattcaatgttgtttaagcaaaaagcaggatttgttaaaacaatgtaaaatatagggtcctcttatggatccccaatcctggatgtatagcgagtcctcatggaggactggaacaagaaattgggaagctctctggaggcacagctccctcttcaacttttggaggttatgcaaaacttctctcaattttctcagtacatttcagctcttctacctggttagtattctctgctgtcataggttcaagggcaaacatggccatgatatagtacctgagcttatggatcttcagttcaaataaccatgaaaaagtgattagaaactttaacttccaattcaacaaactgggaacagaaaatttgatccacgttgcatggtctactcctggcctcatcatcggtagtggtgggatcatatctgacatttgttcagcagcatatgttgattgcctaggatgtgacaatcactgggttatgtgctgaggatgtggaatatgaataaggcagtgcctctgtcttttagattctcctgctgcggaggggcatgtgaggccagaactcaacccaagggatccaattggacccatgcctaacagttataaggagccacattttgttttaatataaggaggttttaatagctactattgtgagatggtgaactcactgatgctgaaattatttcatctgagataggatgatcatctctgtaacaggatgttatctgaataattctctcctcttccagcagattagaccacatgacccttgttctttccaactctgtgattttaaaataaaccatgtgatacagtctgtagaaatgaagggggaaaatatgtgctagaagtggtcagaaaagtctctttagagtaatgaaaacttgaatttatccctgaagaaagagaaggcacatagacacaggagaaacaatatattcccagttggcatagtgaaatatgtaaagacacaaagacaatggatgtggtatgtataaaagagaagacacacatctactttgtgtctttaagaagctaaaggaaaataagcgtttgggagggtattggaatgatacaattaggaaagtggacctatagctatagtatcggagaaccagagggaacttgttttaggtagaatattatttgctgtaagagaacacccaagagaaagtgacttaagcagggaggatatttcattatctcacgtaagagtaagactgagttaaagaattaagggattgctccagcagatgacatcagggaccaagactctttccatcttttttctctgcccattttaccatcttggcttggtgcttacacttgtttcctcatagtcacagcctgagcatgatggttccatgaattgcaggtggacacaacaagatctggagaagtgagagggatgtgtctttctgtgcatccctttttatttgagatatcctttttcaaatgtcctccagaaaatgtctgtttgtgccccattggccatggttagtcacatacccacaccttagagttaggggagttagagaggaaggcaggctttgctagtaatgagggggtttgtggggtaagagttgtggggtcagccactagtggtattgctcccagccagctcttgcaggtcatcttgccccatcacttagtttcactgataaagataaatcataactgtcatatgtcaagtatctgttatacactgggaactctgcagtattttgtttttactcttggcagcaacttttccaggtagatcatgtcattctcacttactgatgaggagactgagtggtgtgtaggtgactcagatacttagtgcctagagagatgagatcttatttgaattttagaatcacagagtctcagttttgaaaaacgttttagcccagaactgccttcttctccagaggtgcccagccctaccttcaacatccctgcccagtggcaatggagccagcttttcaatatttgcagagacgaaagttttctgaccactggtccagtgttctttccaaaccggatcactggcagagcacagacctgtcatgggatagaggataactgctggttttcttctgtggttccacctccccacccctgggagggatcttttaagatactggctgctggcactagtgatgtcatggcaactgttattgcagggcacgttgaaatccattagcaggcattcaaggctcctcatgagtaaaataggggcaatgtaaaaaagttagtttggcttccccaacttccttaatcccaagaccccgtgccaggtacttgtattttctatttgctaaatgttagttgaaacaaagggctgttttgttgggtttgtgtttccctgtggaaaagattactctaggcaaattttagaaaatgcttttaaaaagaatcttgtgtaagttgaaaacagagggaaagaaagtaaatgtcttgatggctttttattacaataaaaattgtagtgagagctctttcaattccctccctcctcccatctactaaacaaacctttgtctgtgggaggaggattatgtttaaacaagagagcaaggtgggaaagtggcattatttgagaagtcctagtgctgataagtttgtgatcagtgacttcttgagtacttgtcaagattaaagaggtgctttaaaagtaagaatttgctattggtggttgtgggaagggattacctatagatccaataggaaaccattttgagtctgtaatgtgaaattttggggagtagaggagggtaaaggaaacaaaattcaagcaatgaaaatatttctttttggtaggggaaatgcttctagagttcaattgctctcctcagatacctttaaaattgccttacctttttttgactatgataaaaggacctcttaggcatatgtgccaattatcagagattttccctgataatatgataaattttcatactccagtgaaatttggtgattggcaggtcattgggttggcagttgtggttctggtgatgtcctagatatgttggaacttgggataggtctctggaggacatgatgcaggtagccttctggtagtcaggaggaccccagctgtttctccacatggctcctaaaacaggcaagaaaatggtgggtctagacctgtactgtcaaatatggtaactgctagtagccatatgtgactattgagcacttgaaaatatggcaaattgagatgtgccataagtgtaaaatacacaccaaagacgtagtagaaaaaaggatgtaaaatatctcatcagtaatcttttattttgacaagaggatgtaacaattctaaatatacatgcaccaaatactagagtgcccagaatcataaataatattagacctacaaaaagatgtagaaccaatacagtaataagggggacatcagtaatctactgacaacattagacagatcatcgaggcagaaaaacaacaaaccctggacttaaattggactttagaccaaatggacctaatggacatttacagacattctgccttacaaccacagaatctacattcttttcatctgctcatggtgcagtctcaaaaattgaccatatgctaggccacaaggcaagcctcaatacattttaaaaaattgaaataatgtcaagtaccgtctcagactagagtgaaatagaactagagatcaacaccaaaggaaccctcaaaactctacaaacatatggaaattaaataatctgatcatatgtgattgttgggtcaatgatgaaattaagtggaaaaaaacccaattttctgaaacacatgaaaatagagacataacataccaaaacctctgggatacagcaacggcagtgccaagaggcaagtttttaaaggattaaatgcctgcataaaaacatagaaagatctcaaattaacaacctaaccttatacctagaaaaacaagaacaaactagaaaaacaagaacaaaccacacccagagctagcagaagaaaagaaataacaaagatcagagcagaacaaaatgaaattaagaccaaaaaagccactcaaaggatcaatgtaatgaaaagttggttctttgaaaacataaataaaattaatagaccactaactaaattagcaaagaaaaaagaagagtcacataaacacaatcagaaaagttaaaggtgtcattacaaatggtataaccaaaatacaaaagatcac

SEQ ID NO: 7011 - DNA, 13197 bp, Homo sapiens
ttcccccatgtggagtacctttctggtgaccagagatcttagagacactctttgttgtttccacataattttgttgtgtttgagaaggagtctcgctctgtcacctaggctggaatgcagtggcatgatctcagctcactgcaacctgcaattctcgggcctcagcctcccaagtagctgagattacaatcgcacaccaccatgcctgtattttttttttttttttttttgtagagacagggtttcgtgatgttggccaggctggtctcacactcctgacctcaagcaatctgccacaagggaggtagagatggagtttcaccatgttggccaggctggtcttgaactcctgccctcaacagaaaccaggggatagtatgaagtctcattttatagataagtatcatccacttcctgatgaatctctgctacaggaactaatttcgaggcagtatctttatttttaaatgctgcagcgtggaagaacatgcttgggttgacacagggcccacagctcactatggaacaatcacagatggctatatgtgatccagacacaaaggtgatgattcagtcagaaatgaattgaactgttttatccaatccttgagggaccagccagtctcaaggactggataaaagctactcgaagtctgtttaccttgagaagggagactgcccaattccccctataaattccaagtggaacaccccagatgaagaagctgatatgctctgcacaaaagccacgcaggactggctttatgataatcgggatattcacccgctgaatacatccgttacccagggcaaatgctgcggttagggaggctccttttatgtgggcactccatgtaactttactgcttcaaaatctaacattacgagaagccttattgaatttgctatctcagcttactctcatcttacagatgctaataaaaacattaataatgagtcaaaggactcaacccagcagggtggaaatttttaagtgtctattaagaaatagggtgaataaaacagaccttgatgggactgaaacaaaagtcttttttgagatggagtcttgccctgtctcccaggctgcagtacagtggcacgacctcggctcattgcaacttccacctcttgggttcaagcgattctcctgcctcagcctcccaagtagctgggattacaggggcacaccaccatgcctgcctaatttttgtattttcagtagagacagggtttccctatgttggccaggctggtctcaaactcctgaactcaggtgatctgcccacctcggccttccaaagcattgggattacagacatgagccacggcacccagcctgaaatgaaagtcttaatatagcactaccaaaggttgcatggactataaggaccctcagatggtttcccaaaattaaagggctcaaacaaatctgctctatttgccccagcacagagaaatttaaaatgtaagaagggaaagattacaattagaaacatgatctggaattgcttggggatatatagtaaggtaaattaatcaaaataaagactcacaaaagggccaagataccttgctgaacacccaaaacctaatgcacaggagtgggtcaaataatcaagggatggagaagtttctgggactcatttgagagccttatatgctgttgcaccaaaatcttctagtgaagtctttttaaaaaaaaaaagatagggtctcactgtgtcacacaggctggagtgcagtggcacaatctcaggttactgcaacctccacctcccaggctcaagcgatctcccacctcagcccctgtagtagatgagactacaggtgcacactaccatgcctagctaatttttgtattttagtagagatggggttttgctatgttgcccaggctggtctcaaactcctgggctcaagtgatcctcctgcctcaacctcccaaagtgttgggattacaggcaggagccattgcctcaacacagtggcttacagccttaacgcaggctacaattagaatgataatatattaaagtgttaaggttgataggattaaggaggaagtttgaatgaaattggaatgtttaaacacactttatctaaatgttttatgggagtggatcttaggtttgactgtttcaccccatttctcctacctagtacagtaaaacagagggcacagtgtcaatctacccttcaagcattattaattggacatgctaaatgggaatgaattagattgcctgagctcacgcagtgtagaaccgagaagctggagcactggtacagacaaattctctgtatgtggagtgtgggctagggcttatgtcgaaagcctgcgagtgcctcccagtgacaactatcagggtgctggactacagactttccatttcagaggcaactactaagtttgctattggatattgatttaaagtgcccctatgactgaaggacataaaacaatgctgaaacttgaaatatccacggtatctaaggcgattttggaaaaacactctaatgggagaggacagtgcccaaaagagttccctattgaaaaagaaatggtttatactggatcttgttaccagaggaatgcaaggaagagattctcacatatagggagcctctttttcccttggactgactttggaactgtaggagaaccttctgcatttaattgtcacttggacaatgccctataaatacctctcagttgaccagcaaagtactgtttggtttatggatggcagttccaaggagaactatgatgtccacttgagcatgcctagcaatttgtgatgagaaagctcccaactttttcaagaaaactttaagtagcttccaccttctgacaaggttaattcacatacaactcaaagaggaatgaaacgaacagagggatggcagacaagcactgcaaaggcacacaggcatgcagtgtggtgtgggtagtggtttatttccactatgaagaaccaaaggaggtaagcaaggcccaaaaatgtttcttagacttcaattattggtatcaaaagttagacaatggtgtttaaattccccttttattcttccactagttctttgaaaaaagaatcatactctgattttcatactgtgctgctccaggtatttcccagttgcagaacaaagtgcccatttctgatctggggtcctagaaaagagccttcacatcctgggtacattttctctacttagaatttctagctagttaccactgcaaagtgacagtgatatatgcatttcctaaataacagattgaattggtttaaatgggctgtggatcagaatttcaaatcagtctagaaggacattttcatcactgaaatccacctactttgattcactttgggttttcatggtaactcttcagcacacgcaatgtttttaaatttatggcatagctttatcagtgagtaagaaatgaagtatcacatgttattaaaacccccttaacacagttaagaagagtaaaggagggcacccaagtacaaatcaacataaggacacctatttcattcatttaactgaaatatttttctctaatagaagagacattgtcaatattaaaatctagatttacacagcgctttcattttatactctacaattacttcgcatgacacctttacaatagacccacagaatgagttaatcatttaaaaataaatattgagacagataaggagaggttaagtgcagtgcccaatacagttaacacagtggttaagcatctgaaaaaagactgatgaaacccaattcttagtagtactacattacttactagctgtatcatcttgggcagattacttagtttccccaagcctcaatctcctcctcaacaaaaaatgcacaacagcactaactcactgctgttgagaggattaaatgtagggaaaagatccaaaatatacaatgcctttttgtagcacaattcctaacatagagtgattttagtgaatggttataaatttactgtatggcaattttttggggtatgtcactttaaattttttaaaaatctagctctataatctcaggattcactctgttgttctcggcatacagattacaaaaaaatagagtataaaaccatatccataaatgcttattcttcttcatttgaaactgaaataaattggtagatattaatgagctaaaactcctgaacagactccacaaaccaaacaggacaagctaagcagtggctcacacctgtaaaccctacactttgggaagctgaggcaggacgatcgcttgagcccaggagtttcaaaccagcctgggcagtgtagtgagacttcatctccactaaaaataaaaaacattagtcaggtatggtaatgcatgcctgtagtcccagctactcaggaggctgaggggtgaaggttgcttgagccctggagtttgaggttgcagtgagctacgatcatgtcactgcattccagcctgggcaccagagtgacaccctgtctcaaaacaaacaaacaaaaaaagagcagaaataggagagctcaggacagaccacaaacggtgagacataacctgctacttaaaagaggaggtgtgggccgggtgcggtggcttacacctgtaatcccagcactttgggaggccaaggcaggcagatcacctagggtcaggagttcgagaccagcctagccagcatggcaaaacctcatctctactaaaaatacaaagaaattagccaggcatggtggtgcgcgcctgtagtcccagggacttgggaggctgaggcacgagaatcgcttgaacccaggaggtggaggttgcaatatgctgagattgcgccactgcactccagcctgggtgacagagcaagactccgtctcaataaaaaaaaataaaaataaaaaataaaagaggaagtgtgataatggaagcttttggagtttttttttgccttctaaaaaaagcatggtatacaatataaaagaacatttattaggttctcaactctggaataaactcttgactgtatcatttaaaaaggttttatgttaaatgtagtaatatgttgaaccttcacaacttagagataagtgtaatttatagaagattatatgggactaataaaactagtaattattataatagcatcagctatcatttagtcagtgtcaattataccctaagtattttatacacgttttcttatttaattgtcataatagatcagtgagaaaggagaaaaaaaaaaaacccaaactattatccctatagagatgtggcaactgtcacacaggaggattacctaactcgcccatgggtatagttaataaatgacagagtagacatttgaacccaggattgttatgacttcaaaaaccaatactctaaaccaggcatggtggtatgtgcctgcagtctcaactactcgggacgctgagatgggaggatggtgtgagctgaggagtttgaggctgcagtgtgctaagactgtgcctgtgaatacactgtactccattctgggcaacacagtgagaccccatctctaaaaattaaaggcaaaacaaaagaacccacccacccccaatattctttctaacccaaattgcttctctaggcagaacataaataaattgaacttcaagattcaagaaaatggcctttaagatttcttctaagtctagaatacaaagttctttttttcggccaggcacagtggctcacgccggtaatcccagcactttgggaggctgaggcgagtggatcatgaggtcaggagttcaagaccagcctgaccaacatggtgaaaaccctgtctctactaaaaatacaaaaatcagctgggtgtggtggtgcgcacccatagtcccagctactcgggaggctgaggcaggagaattgtttgaacccgggaggcggtggttgcagtgagccaagatcatgccactgcactccagcctgggcaacagggcgagactctgtcttaaaaaaaaaaaaaagttatttttttctaatgggctaaaacaccataaggtattaagctccaagcctctgccccttctagccattctctaatccctactccattcagggaaataaaaggaagaaaggaagagagaattacttaaggtaaaatttttcagatacaaaaaggtgatctgtaagtaataatggaagcagtgagtcctcagcttctgctggtsggaaggttcatgctgaatatttagcaggcgctctctctaaagagaacagccaccacacttatggcagggactttgctgtcagtagctcaagaggcaaaatgaactacagactgggacaaaaggtgtgaagtctctcgtttacatagattggattcatcacaaatttaccaggtcaagaattccatataaagsgtttcagccttcacttgcagatcatgaaaaatatgacggagatccacagaatcctcagaaactgcatattgttaccagaataaaaaagtacaaaaaggtgtccatattgggaaaaagacataataaagatgctcagattagaaaacacacatatccatcaagttcacaagcatattgcttcagtgaatgcaaaactgaaagtggtttaacagtcagtaagaatcaagcccctgaagttgccacaaggatttccaactgaggaggacatgtctaagctctgcctcaagagcactggggaattagtgcagtggcatctgaaatctgtggagcagaaagcaattaactcctaatgcccaaggagcttcagattaaaaaatggattttttttttatctaaagatgatgagaaagtgtttcactaaaatatattttaaatatatacatataaaaagaaagtgggtgaaagaagaaaggaaagaatttagattggtcattagagaataacttcctgacaacaaaaattgagacatgaaacacattatcaaagaacattatgttggataaactgaagaaaatacaaccttgtgaacggctgtcaacacacaaatagtgtcaacatacacacaagatggggaagtacaaatatagtctacttggctcagccccacttataatttaaaatagaaaaataaaaaaaggaaagtggtaaaataagcttgacggcaccagtcgggattgcactacaattctgccagcttaaatacaagttagcaaaatgctaaccccagttgggtgcaatgcttcatgcctgtaattccagcactttgggaggccacggcaggaggatcatttgagcctaggattttgagagtccagggcaagacagtgacagtccgtctctacaaaaaataaaaaattagctgatgcggtggcacattcctatagtaccagctactcaggagggtgaggtgggaagacagcttgagcacgggatgtcaaggttgcagtgacccatgattgcactactgcactccagcctgggtgacggagtgagaacttgtctaaaaaaaaaagtgaatccaaatatttgtgtaaccttttttgaagaatctatcagtgtacaggtactattttataatttccttcaattcactatccattaagacatagcatctctattttctctacacattcatattcagatgacaactagtatcctagtctaggctcagcattagtcttcacaaatgtactggtaaaataaaatccatagtttgttattttcttaatatgtgttggaagaactttgaatgaaagataccacaaagataacttccttctgagattaaaaaacataaacaaaaaaccacacacacacacacacaactctggcagaactgttagacctgggaaagtcatctgtctcatgcctgctcaccttttctctcactcagatgaaatgctcccacaggcaaagatccaaagttgattgcctcaggaagctgcagagtcaacaatttcatttatcccttttcaatgttcgctgagttttgatgtgaacctttactaatccataaagaatgggaagtctacacgtttctggtagtaacagagttctctcactctcattatgatgaagaaaaaatgttttcttaatgacgattatatattatcaggaaaaaagggctatttccattaataaataaatatacccaaatcagccaagttaacacttgtgttccttcctatttctctctgcagtcactgactgccacctcaaagagaaacagcagtctcatctcagccgctggtcccaccatacctgctccctttacacaaaacagaaaagactgtgatcattattcggttctaataatataccccatggaaacacagtagttgggagcaaaagtacttgtttttggaaaatgtaaaatccaaggaaaacctaccttgtgagtagagaaggatttgcatctctaaaagaacacaggtaaacacctgcaccaggttctctaatcccaggagctcaaatgcctcccgaagggggtaatcagagagggggagttcactgggcccaggcctctggcagatgacaggttcataaacaccataaaatttcagtgacctccctggaggtggaaggggtacttcataaagaatattgtggatatagctttcaagtggcaagggtggtggctgctgtgaggtaacagccttgtaaagctggataaggaatttcttgcaggcctgcatgaatggtaacggtgtgatcaagcatatactttttgaaacatacagggtgtctctgctaatatcataggagttgtatcgctggagtttcaaaagggaagttgtatctccttcatcaagactacttgccaatgagtccatactgcaggaagatgaagcatacacactgctgtaatgctcagcgttgtgcatctggtaaagtgtctgcattgctgtgcagatttgcttacttgtaacttcttcataaaaagtgagaacaaaaccataggtgcgagaaccatcttccctggtaattataaatgagtgaaactgggggtctttattgtccgtttgtgtcctgaaagatagccctttaggcatgcacaactgtgaaagaaagaaaaaaaaaaatcagaatgcagtacacaaataacttcaagccagaaataaatgttgtttttttaacataacaggattcaaaaagacaggttttatccagatttaatattcgcaatagccttaaattagaaatatattataaattcctcatacacatgtatataaaattattcttaaaaggagtatatacaagggaaaaacttttactgtgtgatgttacatgcaaggggctttactaagaacaagagaatcactgatttagtcccagagtaaacctctaaccaagcttgtggcctttagcaagccatataacttctgtgagcctcagttcctttatctacaatagttgctgtatcaacgacttgaagacagagtaggcaaaagcatttcacaaatattaaaaagcacttcacaaaaatagtactcaagtatttaatacagggaaataggaaaaggctcatttaggaagtggaaaaaagttaaacaaagaataataaaaacaacagtgtcatctttgctattttgaatagtatggtattttatccaagaaaaagaaactttggaaattgaaagctttttgatctactaaagcagaagcacagaaacaaggcattttagattacttctagtagagattatgctctagttcttgggaactacccaggattgaggaaacttgagaacaaaattacccagaggagctaaagatgctatatttaagacacttaaaatgcacagaaaattagaattgattctttaaaacattttaaataaaagaagtgaaattacagaaaagttgaaatatactaaggaaaacagaacttgtaattcaaccatcctaatactcattattcatatttagatatttctatttttgtattgcaatatgctttttacatagaaataatttaaccatatattattactatttttctatatttaataactgatgtggtacaaaatttagactgtctcccacatccccacattaccaagaaaatacaattcctttatttcttcattcaaaccgtcaaaaaacatttattaagtgccttttatgagaggggccctatgatacaatggtgggaaggacagacatggcccatggtcctatggtatttccagtcgagtaaggttaacaggtaagttttaaaaatcataaactataaagtaagggaagtgctatgatagggtaaataagggttgctatgggaaaaacatataatagtaggaagacacacattagaaaagaaggagctaccaggaaaaaatgaagcccaactgaaacctcaggacgagtataggtcttagtggataaagaagattccaggcagagaggacatgtgcaaaagcccagaagagtttgaggaactgaacaggtcagtgtgggtggggcagagaatgcaaggtgggaggacgtgagagaaagcaagagaaataatcaggggctagcccatgaagggccttggtaggccatgttagaactgtggggaggacaatgggaaacctctgaagggtttttaggagagggacagaattagacgtgcctcttagcacatccatcttggaacactaaggggagtggttttcaaaggggttccaaagaggcagcaggaatgtctcagggccttggaagggagtgagaggctagaggaagaagttgagagggccagtgtcccttcttcccctatgcacattccactttcatttattctgtagagtggaattctttcagtgttaagatttctgggttcccactgcttaaaaacaaaatcttgatggtgggataggattaatgcaacacaattgtcattaagcatgaaggcgggtgggtgtccaaactgctcctcacagccatttcagattgtggtcctttcctttaccctaaaaactattggctttgaagctcatgtcatgattgtgccacattttgggtttcttttctatccaagttcatttccagagcaacttcttccatgattttaaatatactctttcaactcccaaatctacaatctcatgaacctgactcttaactgagtaactacttgacaatcccatcaagatgtctaataggcaactcaaacttaccatgtcccaaactgaagttctgatttcttcctccaaatcagtttcttcttatatcagtcttttctgtaattccatccatctaatttgcccaggacaaaaaccttggagtcatctttaacttcttcctctctttctcacttaccccattatccaatccatcagcaaatattatcaattctatcttcaaaaatacatgcagaaactaattgctgttgcttctttttttttttcttttttagaggtgaggtcttgctctatcactcaggatgaagtgcagtggtacaatcacagtttactgcagcctcaaactcctgggtaaaagcaatcctcccgcctcagcctcctgagtcagaaagtaattgttttgatctttacgcttaccactctaatctaagtcaccctcttttcttgtctggatgtaacagcctgtttctgcccttgtcccccataatctatttcccttataagagccaaagcaatccttaaaaaatatgttagatcttgtcactcttgccaaaattctccaatggactcttatctcactaaaagctgatgtccttataatggcctgcagggaagccctgcatgactcagcccccaacaacctctctgccctcatcttatactctctaactcacccactctgctccagcaacaatggcacgttactgttctatgaacacaccccgcgtgctcccatcaaaatctgctcttcccttttccagcagctttcttccccttggtatccacatgactcattccttgtggcagatatagctccaataatatttctactttcacacactcttccaaaccttgacacttccccattaagaagtggagctcactctccttgaacctgggtgggctgctgagagtgcctataccaggatctgggaaactttttctataaagagacagataagtattttaggctctggaggccattacagtctttgtcacaactgctccactccacattgtattaggtgagtgcaaaagtaactgtggtttttgcattgttggaatttgccatttgacattggaatacactttttaaataaatgtggttatagtatacatcttttttttttttttccaagacggagtcttgctctgtcacccaggctggagtgcagtggcgcgatctcggctccctgcaacctctgcctcgcaagttcaagcaattctcctgcctcagcctcccaagtagctgggattacaggcgtctgccactgcacctggctaatttctgtatttttagtagagatgggtttcactatgttggccaggctggtctcaaactcctgacctcatgatccgcctgcttcgtcctctcaaagtgctgggattacaggcttgagccactgagcctggaccatcattttaatgggcatttctcgctttatgtttttttgctaatgacttattacttgctgtttattttagattttagactgaaaatgttagacaaaaaagcaaattagagcagttttcttttcttttctttttttttttttttttgagatagagtctcactctgtcactcaggctggagtgcggtggcgcaatcttggctcactgcaacctccgcctcccaggttcaagcctcagcctcccgagtagctgggactacaggcctgcaccaccatgcccagctaattttgtgtttttagtagagacggggtttcaccatttttggccaggctggtctcaaactcctgacctcaagtgatctgcccgccttggcctcccaaagtgctgggattacaggtgtaagctacccgacccggcctcgagcaattttcttattcaagttcaaaatgggtcgtaaagcagtggagacaaccacaacatcgacaatgcatttggcccagggactgctaactaacgcacagtgcagtggtggttcaagaagttttgaaaaggagatggcagccttggagatgagaagcatagtggctggccatcagaagttgacaatgatcaattgagagtaatcactgaagctgaccctcttcagcaacatgaaaagttgctgaagaactcaacgtcgaccattctatggccgtttgacatgtgaagcaaat

SEQ ID NO: 7012 - DNA, 14021 bp, Homo sapiens
tctctatgtgtcaattcatcccacctgtgtgagtataagagttgactttttaatttttttatttatgttatgttatgttatgttatttttgagatggagtttcgctcttgttgcccaggctggagtgcaatggcacgatctcagctcactacaacctccacctcatgggttcaagcgattctcctgcctcagcctcctgagtagctgggattacaggcatgcaccaccacgcctgactgattttgtatttttagcagagatggagtttctccatgttggtcaggctggtcttgaactccctacctcaggtgatccgcccaccttggccaaagtgctgggattgcaggcgtgagccaccacgcccggtttttttttgagacagggtcttgctctgttgcccaggctggagtacagtggtgcagtcagctcactacagcctcaaaatgctgggctcaagtgattctcccacctctcagcctcccgagtagcagggactacagatgcgtgccaccatgcctggctaatttttgaatttatgtagagatagggtcatactatgttgcccaggctggtcacaaattcctgggcttaagtgaggctcttcctttggcctctcaaagtgctgagattataggtatgaactaccatgcctgctctgaaatacgttttactaccagtgaactggaattgggcatctccctccggacctgccgtgattttaatcttgccaaagccacaatcaatcccacagccagtgtccttcagtgcaagcaaccctcaggtgggacttgttgactggagcacctgcatgtggtgtctccagcatagaggcttccggatggttggacttcttgtactgtggctcagggctcctggacagtatcccaagagtcaggaagaagcagctgtcactctctcaagttttagacctggaagacagcacagctttattgtccctgtattctatttgccaaattagtcagtaagcctgcctaggttcagggcagggcatgcagactccacttgtcagtgtgaggagtgtccaaggccttgtggtcatctttattctgccatagatacgtgtgtatgtgcgcatatgcgtgtgtatcacatataacatcaaacatttttttttattgttatgtgtcatgtttcaaagtcatctttttcttgatctgggcaagggcaataaaatgtatgtcctgaacttttgaagctgacaaacttaagaagtagtttgtgttcatatttcatgagcccaaagatctaacaactttcccaggctatgtggtagaaagagataatgataataacatcttaggtttatgtggcatcttctaagaggttcaaagtggtggttccactcatttctttatgggaatatactgtgaagtccataagcagtagtacccccaagttcatacacagaggtgggaatgcagtaatttcatcattctactaatgaacagtgttcagaaggcagttcttgtagtgatctgtttactgatagaacttctgtgaatctgcctttcttagataagattttggaaaatgatagaaattaacttttgtgtgcctggtaatacataatatactatttatcaaagagatgtcatatttgaagaagagtcagttatttttctgaagtgaaattctttgggggagaagttttagaggtatggcattgcagggatgtctgtagtagattaaaaagtctacatcctcagcagaggcagaaaaatacagtggaaagggtataggtggttatgtggccatccctgtactgagtatatggccaggactgagggtgacactgcaagtggaaacccttgtccccttgtgatatctgttcatgagtccccccaacccccaccccccgctgactgtgggagtgtctctttgtacttacgggagattgaatggagttttcaagtataattcaaccatatgttgagtttgcttacctttgctgtttagagcttatcctttgagtaaggtgcaagtcgactgtaaatgtggtattacttaaatacattccatttttcttaaaatgagatactttacctctaattgaaggtatcaggggataaacagtttttcaggcaccatttgttatggattatctcctggttcatgaatattgcattcttatgtgaagtgatccacccttcatgtttccccagagtaaaattttttttttttttttgagatggagtttcactcttgttgcccaggcaatggcgcagtcttggctcactgcaacctccgcctcccaggttcaagcaattctcctgcctcagactcccaagtagcagggattataggcgtgtgccaccacgcccagctaattttgcatttttagtagagatggggtttctccatgttggtcaggctggtctcaaactcctgacctcaggtgatctggctgccttggcctcccaaagtgccgggattacaggtgtgaggcaccgtgcccagccttcccagagtaaactttctaaggatggcttttatatccctgactagtacagagaactccatgggttctgtgtggttttccaagtagaattcaaatttatcagcctgaaaactgaccccagcctgccctcttctctttaccgccacgaccccttccttccctctccctgatcatggcagaactgactctcactgctgccctggagtcctactgccctccagctcccttgtgttcgtgagttgtccctggcctgggatactctgcccctccttttccctctcctcttggctctcccattttttcatctgcactgctgccagagctgtgctttttgttcagaaagctctttgtggcctctgcgacggccccccggctccccaggtgggctcaaggctgactgcaccaccctgggcttctcagtgccacaccaagtgccactgctggagcccacacctgcagtccctgctgcagccccaggcattgtccagatggtgcctttgcggattctccacccacaacccagggagatgcaaaagtagattatgttgaattcaaggtatataaagaatcactgtacaaacatgtgctttttgaaaggaagttactccgataattttgaccgtgttattacatgttttattagttgtaaataattaaaagtggatgaacatttaagagcgagtgagctgataccatcaaggaggatttctgcagtctccttctttggcgagggtgttcacccagcagcctgtaggcatgagcagtgcctggagtcctctgctttctgctgccaaatttgctgctgcacaggtcactgtagacctcctgggtgcaggtgcagctccagcgggtggcgacttgttcctaggtagacagaacagggggacatgtatccttgtgggaaaacagtgtacttgagaactgcagggcagtcacgactaatgctgttattaagaaatactcctggctttgtgactctgggtgtttttaatcttttataattaaacataagtgaatattgaggtgtattttagcatttgctgtactctgctaagtagagtttgtgacgtgttgataatgggagaatgggtgctactatagtaaagaaaaacagagagctggtgctgggtgcggtacctgtgcctgaagtcccagtgctttgggaggctgaggcaggcgcgtcgcttgaggccaggagtgtgagacctgccggggcaacacagcgagaccttgtacttttcttcctacagggaagagcctgtagactctattctgtctccacaggtcttctcccacccagcgttgggtggagccagagagctccgcaaagagcacgtgggcgcacgtccggggagagctaggggtgcacaggtccggggcaagcacgtgggcgcgcatcctgaggcaggaacagggcgcatatctgagcaagcgagcacctgggcgcatgtcacgaggcgagcacgtgatgcatcctgggaggtggccgagggaggctcaggagagattggagtggagttgaaaaagcaggaagcagagagggaagtccgtgtgtaacaaaacattcagtttgtaggcccttgggtcagaggaggtgacagccataattttggctccctgggaagggtctcaggcagtgtcctgatttttttttttttttttaaacgaggcagggtctgactgtgtctccttagctagggtgcagtggtgcaatcacagctcactgtagcctcgacctcctgggctccagtggtcctcccacttctgccactcgaagtgctaggactacagtgactaatttaaacaatttttttttgtagagatggggttttgaatccctggcctcaggcgattgtcacagctgggcctcccaaggcactgggactctaggcgctcactaccacacctggctctgacgggttgaggctgtggggacctggctctttcactgtccttctttgccacatgtccccgcgtcttgtctcttctcgtgagggctgaagccatcctttggaggagctcaggagcttgtcctctttatccagggctcggtgttggcttcgagccggcttcctggggaggaggccccggcctggtcccgggcttggtgatgacgctgcccacagtgggatgctggggagctttggagccttggttttgcggctgccagcagtgtggtggagcatcgagagggacgcaggtgatgagactcaggccagtggcttctacctgggactgtcagggttgcctgcgttggctgttggctccctatgtagctgctgctcgttggtgacgggtacaagcgtcagtgcttctcactcagggcagtgtagaatgttacacagtgatagtttatgtctagccaggttttgaatgctcttactggaaacagtcatatttcctattatctaactgaatagagaagtaagcagttgagaatacagttgggctgcacttgtctttttttccaagtgagttattttgtattttttgatactctgaaatgatcagtaagtgtgtgtgtctgtgcgtgagcccatgtgcgtgccacgcatgcgcatccctgtgcatgcgtgtaggaggctgggatggaagggatggccataactgactgttggaatttccaggaaaggcttggaatttatttttgggtcacaggccatttttttggtttctttcaagcactaaatgatttttttatgtaacttcacagattaaagaaatgcagtcagtttttgtatgacttagtaaatcttaaggaaaaaaccctacttacattaggatacatttgctggaatatttacacaaatcttacaataaaacttttcatcttttaaaattttttatcaactcagccataacttatttattttttgcttcattttaaagagaatactcattctttttttcctctttcctggtacttcagcttctcatttgcttgcagcctctgcattgcatggatgctggtttttcagcagttctggccctaacagaagcatcctaaggataggaggatttcagtctgggcttgctagccttatcagggggagagcagagttgctaagtttccattctctgtcactttcagttactctgctgtggctgctcagtgctgttcccagtgaaataattttagcatattttttcctcttgtttctgcatcagcgtcattactgttcatgcctccctggggatcagactgattggtaaattagtgccagcagaggaagtagaagacaatgtgtgagcgtgttttatttaaacacatacactctacaatttgttttattggattttgtcctttgagaacaccacaagtaatcccattacagtctagaaactgcttgctcaccacgcctccaccttcgaaagcacataagtctttaataaatgaggcaatttccagattcatcaataattaacccagaacatgacaagttttatcacaactcaaagctttcccatgattcaaacggtctgctcctgccactgaattgtctgtatagtttctggttcagcttcccagagctcaggattctgccatggagacactggtttgagcaagcatactggatgttttcttgaaaaatgttaagctttaattgtttataataaaataaattcatacttattgtaggaaatgtggccagcacagatgattttaaagaagatagtaaacacycatattcttaccacccagaataatctacaaaagagcatttctttcatttctttgcattctttctgtttgtttgtgtatawataaatacaaatgcttatttttttgggggggcgggtggtaacaggatcttgctctgttgcccaggttagagtgcagtggtgctatcagagctcatggtggacttgacctcctgggctccagtgatcctcttgcctcagcctactgagtagctggaactacagacacatgtcatcatgcctggctaactttttgtatttttttttttgtagagacagggtctcagcatgctgcccaggctgatcttgaactcctggcctcagacgatcctcctgtcttggccagccaaagtgtttcgattacaggtgtgagtcatggcacctgaccaaatgcttttaaaaatattgataattgaaatcataatgcatacacagttgttcctacttactttacttaatttatcggtgtcttcccatgtctcgcaaaaattttggtaatttttttcctttttgagacaaagtctctgtcgcccaggctggagtgctgcggcacaattcttcatggctcactgcggcctcggcctcctgggctccagccattttcctgccttggcctccagtagtgctgggattatgggcgtgagccactgtgcccagcccataatactttttagaggtcgtatagcacttcattatgtggatatacaagtattaacctagttaactattgttgggaagttaattaattttctcatttttcatcatttaaaatattgtaataatcttagtgtatattattgacaagttttctgaagtataattattggataggaaattatgaacatttcaaggccctcagtttctgcacttggccagtttgctttccagatggggtgtgccagtgtatacctggcctgcatgggagagtgctctctgcctctgccaaggaggggacctcctgggtcagtaggtgatggtgctgccactgtttttgcagccgttgttgagtggctgggcccaggactgcagtctccagtctcattttgatcatatgttagtggagctgtaataccctcttctccttgaagattgtatgagagatacatatgtaaagaaccagacctacaagagatcgagaccgtcctggccaacatggtgaaaccttgtctctactgaaaatacaaaaattagctgggcatggtggtgcatgcctgtagtcccagctacttgggaggccaaggcaggagaatcacttgaacccaggaggcggagtttgcagtgagccgcgatcgtgccactgcactccagcttgggtgacagagcaagactgtgtctcagaaaaaaaaaaaaaaagaactggacctagagcttggcccaggtaggcagtggctgcgtggtagatgcggtggtggtggtggctgatcttatatcaggtgtttagagtcgtccatgttaatggagcagagtgctgagttgggagatgacatcaactggtcctgcgctttctgggtgacacacaaagtgcttctttgaactggggttctgtagaaaatagtttggaaagcaatgtgtaatattaatttttttctttcctgagaatgttacatggagtgaaattcaaaagtttcctgatgtctagataacttcctatctgtccacgtggtcttgtaagacccttgcatgagcctgtcccatttgtgctttataaatgcatgctggggctggggcaacgttacttatacctgtagtcccaacactttcggaggccaaagcaggaggattgcttgaagccaggaattcgctagccacctggatggcataacaagaccctgtctctacaaaaaaaaaaaaaaaattagctgggcatggtggttgtgttccttcagtcctagctactcaggaggctgagttgggagaattgcttgagcctaggagttcgaggctgcagagagctctggttgcgccactgtacaccagagcctgggcaacagagtgacaccctgtctcaaaagtaaaaaaaaaaaaaaaaggatgttggttgcccatttgctgtgtgccttgggtgtggacatttttcatatattttctcctagcctgactggattatgactatgacggttatcttttctccccttcaagacatacacatgtaatttgctttttcagtcttcagggattgcttccatctttaacgagatataaaaatgctgagtacctctctgcagcattgtttgtgctgctgctcaaatgctctgcagccttactgagaccagctgtaaagagcatctgcccttagcattttccttgacaagtcttgcttggctgctcaccttcttacggacgtgggtaacttcatctggttatctgattagtaccttgtctttccttaagactctgccattttggaattattattattgtttttgagatggagtctcactctgttgcccaggctggagtgcagtggcgcgatcttggctcactgcaaccttcgcctcctgggttcaagcaattctcctgcctcagcctcctgagtagctgggattacaggcgcccgccaccacacccagctaatttctgtattgttagtagagttggggtttttccacattggtcagctggtctccaactcctgacctcgtgatctgcctgcctcggcctcccaaagtgctgggattacaggcgtgagccactgtgcctggcctatctttatattcttggtgtatagtagattcatagggatttttgctaagtctctaaggattgataaaagatgtaaaagatctagcagttttctggttacttgacttttgagctggatgtggtgctaatttttagactagtcgttttagataacatgtgtttagagcattgcaactgtctatctaccagtttttttgtttgatctacctaaaataatgatctctttgaactctgcgtgccatttttggccttccaaaaaccaaatctatatatgtatattggaaaagaaatatatgtaggatcctaaaactcatttttcagtttttaaaaggcccctagtaagcagtaagtgtcaggagtggataaattttaagtggctttttacagagtacttaaatagaaacattaattggatcagtgtgtggatctcatggagatctgtccctgtcatacgctggcaggcacattccatttctttctaatccccagatgtaataagatgcctgggtctgtggttacttgcatttgccattcataaaattgctgatcagtcctcccaggtggcactgttgtttataaggctgttcaaaatgtcagtggacttctgccatccctaagagcctccttgttatttctcttatggggcctaactgctgtaaaatatgtattttaacatctagtgggatatatttctttgtttctttgggctattccttcatcatctgttgaccacttttagtcaatagttatgggtcaaagctttggccagaacacaaaatacttgataggaagagtcattgtgagaataaataacatgtagtggaaactctgacattgggatgggacattgagtgggctcatctgctgagaatatttgcaagatggagcttccacagagcctcatgggcaaagcctaaagagatgagttagctgggtgagagggaaaaagtaagttgtcagagttctgtatttcatatgtgatttcgtttgtatgtctgcctctgtctgttgacattacgtcactgattattggctttaccacacacatgagtgaagaagaggaagatgcgcagggtggggagaaatgcagggaagacactgttccttttttttgagacagggtcttactctgtcacccaggagatgacacgtaactacatcaactggtcctacattttcaggcgaacatacaaagtgcttctttgaactagggttctgtataaaatagtttgaagagcaatgtatagtattaatttttttttcttctctggaatgttacgtggagtgaaattcaaaagtttcctaatgtctagataaatttctctctgtccacacggtccgcccatgtcttataagaccttcacatgagcctgtcccatttgtgccttataaatgcacattagtgatgtgatctctgctcactgcagctttgaaatcctgggctcaggcaatcctcccacctcagcctctcgaatagctgggactacaggcatgcaccaccatgcctggctaatttttttgtagacatggtctcgccgtgttacccaggctggtctctaactcttgggctcaagcaatctgcctgcctcagcctcccaaagtgctgggattacagacgtgagccactgtgcctggactctttttctttctaaaaaaaaaaagtatgatgcaaaaaatgcttttacttcaagaagattattctgtacttcaagagtataagttgcaaaatgcaaaattaaggatataaaattgtggatttatatttctggggtttcaaaagcataaatgtgtgatacatgtgcaggtttttggatattgaggttttttgagatttgaaaaaccatttattttttaaaagataaagttatatctcatttgtgtgtttaaacaaaaagtataacatctcagatagctttgcatagacagaaagattaatgacattcctgcatgaggcattagcaattattttccctgtaatcgtccttagaactctttgtctagtagtccacatatagaatttttctgcagcacatatattaagtaatcagtttaatatttgttcctataaattaaataaattccagtatcctttttagccatttccagcagtctaaggcagggaggaaacttagtgatgagatttctggcactaacttttcaaagaggacattaagaggtgaaaatgggaatgaatgctagaaaaatgactgttgtacatcacagcagggaggttttgcgctgatgaacagtgatgtttccgcttgacagtgtgaggatatttaactttcccagccttccacaagatgagaagggatgaagagacggggaaaaaaggggaagaaaatccttaaaaaagtatattggggccgggcacggtggctcacgcctgcagtcccagcactttaggaggctgaggcgggcggatcgcttgaggtcaggagttcgagaccagcctggccaacatggcaaaaccctgtctctactaaaattacaagaattagcctggcatggtggcgtgtgcctgtaatcccaacttgggaggctgaggcaggagaatcgcttgaacctgggaggcagaggttgcagtgagccaagattacaccactgcactccagcctgggcgacagagtgagactccgtctccaaaaaaaaaaaaagtatgttggaaaataccaggagagtgtttatctccactttgccctactcttgttagtattcacatcttcattggggaatgtaaaagatcctaaaacatgtgggtctttttttctccttctgtctcacatggggctgcagttttctttctttactcttttatatattgctatttatattttatgacttggaatactattaactttttagaatactgatgtttttattttattttttgagacaagttctctccatcacccaggatggagtacagtggcgtggtcacagctcactgcagcctccaccaccccagctctagcaatcctcctgcctcagcctcccaagtagccgggactacaggcgtgtatcaccatgcctggctaatttttaagaagttttttgtagagacatggtctctttatgttgcccaggctcatctcaaactcttggactcaaatgattctcctgctcagcctgttaaagtactgggtctacagccgtgagccactgtacctggcctagaatactgattttaaatgacagaatgatagttataaaactgtgaaagtttgaaaaaccacttaatgagttgctgttacatatatagtctagttccaagtagttagaaaaaaaaatgcactaagtgatttggcaacgtactaagccaataatagtatttgctttggagtaatgggattatgggttgttctccctttttttctttctaaagtttttatgatgtggttgattatacttttgtgacaaaactgtataatcacttgtttttattataaatgtgcaagaggacttacattctttttttttttttttttttttttgaagacggagtctcgttctgtcgcccaggctggagcacagtggcgtgatctcaactcactgcaagctccgcctcccgggttcacgccattctcctgcctcagcctcctgagtagctgggattacaggcgcccgccaccacgcccagctaattttttgtatttttagtgaagacggggtttcaccatgttagccaggatggtctcgatctcctgaccttgtgatctgcccgcctcggcctccgaaagtgctgggattacaggcgtgagccactgtgcctggccgaggacttatatccttaaatgattaaaatatatcctgaggcaaaactattccaaataaaaatggaggccaatcagaaatatttaaaaattcagataaatgtattttagagagtgtatttagaaacccagtttctagatcagagtgccatcattcagtgtgttatactcccaaattaatgctttttacctattgtcccttggattaagtaaattcaacttgactcaactaaatcttaaggtttgacaccctgacaaacatgtcttaaaatgttttaaagtacataagatttaaaaccttggccaggcatggtggctcacgcctgtaatcctagcactttgagaggtcgaggtaggtggatcatctgaggtcaggagttcgagaccagcctggccaacatggtgaaacccgtttctactaaaaatacaaaaataactgggtgtagtggtgcatgcctgtaatcccagctacctgggaggctggggcaggagaattgctggaacccgggaggcagaggctgcagtgagccaagatcacgccactacactctagcctgggtgacagagcaagactcagtctcaaaaaaaaaagaaaaaaaaaaaactttcctaatgtttgtatattctcacgttaagtccttcttggaataaagttggtgtagagtggggatgggagaaaaattaatctccgtaagttgctggggtagaggtaacagtgttttatgtgtagaggaaataatgtctactgttaagtctttcgatcagccaaaagtggagtggatagtgcttaaaatgttttgatgtcgttgtgaggattaaagttatttaaaaagaatggatgtggagttgattttaacattttgggattaagaagggtggagagttctcactggaggttgtttgatgtgccctaaggctggttgagcacctctggctgcctctgagcatgttgcagtcccctgtcaagattccctgggtaacctttctaaaattttgctccagcgcccagtggaggaggctggattctgcctctgctgtcttagaacttcagtctttccttacaggtatagctctcttcatacacactgcttgactgcaatgtgttcaggttacatgctgtccttaaatcaggcctccataatttcttggcagctttccttttgcaatcaaattagcacttgggtctagaagccagttaggatgattggaagaaaaaaattacagatggttaaaattgggtcaaagtgcacttccttactctgttctctttacaagttaaaaatatctaaaaaatcattgcagctgtgtcagcatttctcagtaggtgccagatttaggtactacctttcagaatgtttatgtac

SEQ ID NO: 7013 - DNA, 12715 bp, Homo sapiens
tcaaatgatctaatacttttgacttaccagaggattagcacatgattaccctgagtaaaaggattattattactgctgctctaagatattaacactttctgtaacacactctaagggcactgtatagatcactgaaaaatgtgacaaaatgcatgggggaaaggggattttaaaaaagaaaggtggtaagtgttcttctcttttaagtttccttgcttaaaatacagtgggcctcccaacggtagaatcaacattttgcatgatgctttcagtggacatacaagtcacagaaaaataagtccagcattcaatgcactcaggaaattaagccacgtatggccttcttcccgtgaagatcaggctccaaacaaaaacccccactttgtaatagacaactaattctcatgtaatgaatgacagaacacagcattaatgtacttaacaagacagagctaaattcaatgaagcttgacgccattgatatgaaaaagggctacatttgtagacagagccaaagggagagaaaaaatcattctgaattccgagttaaatagtgctgcttctgctttggtttagccctctcactggaaataaagatcagagctaaaatatgacccttaaaactggcagcagcaaagaaagctaaataccactgtattaaactctcttactgactgacaaagaggcaacagctaacggactttgctcggagcttttactggcaaaagtgttatttcttcatggctaaattcctgatccattaaaaatgtgccccttcactaccagacttcatgatatgcaattctgccaccatctgatatcattataaaaatttcagacaacccaaatgatgacttagtagctactgaaacttctacatacagcatcaaaacaaaagatatggaagcaaaccatgtgacacaaaatgagtatgtagcaaagtttcttatgtagagccaccataagaaaagatttgtaaaagcctataaataccatagtgccaactcccttttttcagtgttaagtgcagaaaacagattttaaactacattttaaaattcagcatatgaacaatgctgatcattctgaaaacaatttataaactataagtagatgagtgaatatttaaactccttgagcaggattacagtaagaacactgatctaaatagcacactttatgcatctggtgatatgacttatttctgtaggatgttcttacacacacagaggtaacaccacctggaactgctataccttaaggcagggaaacctcgactttccacttctctcctctatccacaatgttatctggttccgctgttgtcacagagccagggaataaagctcttccagaaaactcacccaagatcaaattgagcctggtgacagcaatgtccaggccgtaagtaatgttcaaaggattcaacaacgcctgtgactgatcattctttttcccttgccatcacctgctgattttgtccaggtgttttatggctatcttgaggatctggagagcagacagagggaagactttgccaatttcttttgtctgggattgtgaattccttacacagatggtggacagcctcagtccagggcagcaccagggtatactgccttcaacctccaaaaggagaaacagagggaaactttttcttctcccacaacactgcctgtaatgtgtctgtggttagcaaaactgagacagtatggcttcacagggagtaaagtgacgaaggaaaaaagtctacaagtaacttgaaaatatttacttgaagtattactaagcatttgccaaggaatcaaaaatgttaatgagaaagatgattctagagcaatgtgcttctattataacgacttatataaggtttcagttactttttcacttgtatatcaaagacaccaggtctcctaaattaaccaaaataagactttgaaaatccaagtcaaccctttaaaagctactacactgctgtggtggaaagaaaattggactggtgtctagacctaagccatccaatatggtagccactagccacatgtgggtattgaccacgtgaaatgtggctagtccaagttgagatgtgctgaaagtgtaaaatacactgaattttgaaggctcagaatgaaaaaagaaaagaaaatgtctcgataaacactcatattgattatatattttttatatttattatacatggaaatcataatttttgatatactgggtcaaatgaaatacattattaaaatcaatttcacctgtttctttttacttttgtagtgtggctactagaaaattttaaattgcatatgtggcttgcagaattatttctattgcacagtactggtctggacactaggattcttgtccatttcaatctcttgttggttgtgatgaccgtggtcttcttaacctcctgagcttcatcatttccaaatgagagggatgaaaatcaaggaaatggattctaaattttatagctccccaaattataaaattttatctagttacttttcacactttcattcctaaactccatgattcattttcatctgcgcccactctaaaagaagcagtgaagaacacccaataggaaaataggttttattcattagtcaattaatttaagaacctatagctccctctgatgacttttagactaaaatttttcaggatttgtgtaatatttttaatgtagacaaacttactaatcatgatgaataaaccaagatgacgtatcaaataaagaatatctatgccttaagtggatgtggattaacaaagcaatgaatcgagttgcttgttttgtgaattcaagctcactatcacaggtacacttgattgcaatccatttggtcagaaggttaccaaagcctcagagaaggtttttccactaaatccaagaaagtgtatctgaaattacaagatataatgtagctgatccctcttggaggcacaatttttgacagaaatagctgcacagattgcatcagttatacctaactttctgataattcacaaaacacctcttcacatggttcttaggtgggtggccaggccaggaggagggtatttttagaagcctgttgctcccacaactggcgctaactggcagtgttaggtaattacaaagggctaagggaaacgcatgtaaagaacaacaatttcaggtgacaatttaagtgcttaattatatactaaaaaaaccttattatttttatttctctactgttaaaaaacgatgaacaactttattctctgggtaccctaatattaataaacctttggttttataggttatactgaagatttgaatcagtttgctgtctgaatcaaagaaagaaaacataaaacaggaggagaagattaaatgcaagtcagaaattcagtatctgtttaatacatgtatttttaccaaaatgatggtgaaactaagccacacatcctggctcactgaaagcctttgttggaatacgttgttggacatgtaagacacacatgtatccttgctttatggacgtattccagtaaacgagacacaaagtagtcaggttagccaccagagattgaaagtgcggcatacaagactcaggacttaaaaactaggagagagagggcatattgtaccagactgaattatttcctgtcatgacgtgtttaaaattctaatacaaaggtagcagaaaagagagatcaataaatgacgttatattctatgtatccaaaaggaagaactttctaaagaaacgaaaagaccaaagtaaaaggcactaacaagtagatgcaagtgaaggagtagaacagtattgtcaaagctaaggagcctgcagagaaaaccatcagaatggcttaaacaactacactttgtaaagcaattcagtcgactatttaaaaatttcaagttaatatgatgtgtagctgattttaaggatctaacttacatgcaagaaaaacattagtttaaattatttgctttttaaatattcctaatgcataacagataaacactgaagtgaggctggattaattcatagttgctctaataccagatgtatgtgggtcataaagtaaatggatctttccaaaagcctttgggaaaaccccgtgaggccagttttgagatctatcagtagcaggaaaggtaaaaaggattcagtaaaaagcaaagcagaaggtaggaaataatgttaccttagaaactgatgtattgtgtatttttgtctccttgtttaatgtttcttaaaacagagaacatgatttgcttaaatgtcaaacttggaaatcatattgatctcaaaagatcacttcgttcaatattaagttttagcctagtcaagaatttcttaagatataccaaatgtattttaaaatattttaaagtgctacttcaaaactctaaactacaatgttttttaaaagccttatttcttcacagcaaggagcttccagaaaccactaaaacattcttgccctttgaatgtctgggcatggtctcttcatgtgttattaataagctagacgaagtatttatattaatggccatacaatgaatattcaactgcatgtggactcataccacagggctatgaaaaccgaaaaccaccttcacgtggacttgccaaactacccgattataccaaacttttcatggcttaaacaaagttatataaatgttcactatggcaacaacaccagatgtatgcacaaggaaatatctgcaattttaaagggggaaacaagaaaaactgctcacacaacataaaagttaattttacattagtatcattaatattatactcacactgtaacagccaaataaaccttgtgctttaaaaacagatcaggtcacttgagtcgtctgctgcattccgctaagaaagcaaaacctaccatgcatggcaagtgttgacactcttcctcaatgacttttattgtctctggtcaacctgtagatcttctttttccaagcatggaatcagaatacctcacttgtagaaagttacatcagtggtattaaaagcatattgaaaactttaaaaagttgatccaaatggaagtcatgtttttaaaaaaaatcaaagttatttctctagtttatcggagcatttaaggtttttttaatccaacaagtatttatttaaagaatgatctttatgtggctgaaatgagaatgcacacatgatagtttttcaaggccagcaagcacttcctaaccaaatcccccacttcctttgctagctaaacataactacttcaactgtgtacatcctttaaaaagttagaagagagcacctcgcatgtaatagcaggcagctgggaagccaattggtgcagtcggagtgcacattttagaaagcagctttttaacattcaataactaagtggtaattggacacagaaacataaactgtcaaactgaatcaaaacccctttgcttttcagagaattatttgtaagattatactagaattaaatttgaacatgcatctaccctatgcattagtcaaattatgaaacaaaaaaaatgctgtgctttctttggataaaattaatgtcagctttgcgtccttaaaccagacccgatcgggaaatgaaatatgtttagtcctgaaatagttgtggtaattcaatccctgcactctccttattttcttgatgacaaagaaaaactcccaactggcagggccacctgcactgattactcctccatccacacccacagaatatgaaaatgagccaatgatcattaaccttaatttcttctaacataaacctcagctctttttcagtcttgctactcagggaactcccctgagataaaggaaaagagaacgggggaaataaggaaacagggagtgaatgctcagagcaaaaggcggggggcggtccaagtgaaaagcggaatccactggcgttttaaaaactgcacagccggcttattaaacttcatacagaaaagaggttacaaagataaagagattctgaggcatcactaactctctagatagtgggatactttcctttctgagcaaacartgagaaaggctgcttcctctccaccctccctatccccgacyctgggcatcgcactcctctacctagacatcactataaaaagacagccaacaataaagatgggtctggacagtaggaatgcatgtgtggcggtatgatctctagtatgaggaccaaaggacctctacaaccaaaagagatttccaaggtaagcacttgcaattacagtggagaatgtctagcaccttctggtcattcacattcaaatacagccaactggaatcatttttggtccaagctgtgtggagctagataccattagcattacatcatcttctaatggatgaggagctagttggggcccttaaaagaaacacaacttggaggggagcaggaaaccttcagaaatgccagtctctttagcacagacatgtgtactgaaaattgtcttgtaatgtttgcctacagaccttggtatatctaaagaggactcctcaaagataagaccacaaaagtgaggaacaattcaacaaggcaaccacacatgaccctstgtaaagcattcctgaagctgaagggaaaacaaacttcaaaaatcatgacattgctgaatgaaagcagaaagtctttaaaatgcgagtttttcattaaaaatattaaatgcaaaggcgataaatgcttaaagaatataataaaagtcgaagtgttttttcctgcaagtacatttgcaagatgcatggtgcccacccagtgcaggcagacagagcaaaactttcatctctcagttatcccctcattatttcaaccacaaatcaagtagcagtcatgaggagggtgagacagaaaggcagagaaaataaacaacaacaaaaacagagacctggttgcaatttagtattggattcagaagcccaatttaaactaaaacctggctctggggtgctggccctcatctccttcttgcctagcctacgaaacgtaaaaggcaaacacacacacacacacacacaccctgtattctcttttctttctcctttttttccttccgtaatcaggctctcaaatgtcaacggtcccctctggaaggaagcgagaacagggtattgaagtatgcagtgccatgagtcatcttactagatgctctagcaactgcctgtgacccagcagtgagccaagatagcagggcttttaataaagcagcacgtttgcacactcacagccctgttaatttaatacctgccgcttgtttaccaaacagcacgggcatgtctccgtgtcggtaacttcccagtgacagtgaggcgactgaatcagggcatggaacagatgcacctttttacgctctgttacactgtgtcacagactacagcccctgagcgcattcctttatttatcctgcagccagttgagctaattgtcagagacagacctggttctaattctgcagagtccagcaactgctggagtgtatgtagtgaggcatgaacggtgcagaactttagaaggcaacagttgaaaaacagagtctgagggtagaggcataatctgccaatattttacttagactttgaaaataccacctgtctcaatagcaggctatgggagtggggacaaaagtaaaacaactccagtgtcagaatgaagcagaagcaagcaaatgtcaaagcatattcctatgtaaggagaacacaacacagcagcaatggcattcattttccaaagaatatggttcggcctgtgcagttgtaaaatattcacaagctcaaaaacctggtgataacaggccaatattcaatgcggctcacaccagcagttctgcacaataccaggattgagcattacagagatactgtgatgcaagcccattaatgacaccaaaattacttaaaagactagtctctcaatcctccagccatacaatttgagtctgcttgatcatgtgtagacaaagaaactcccatttattgttctcctcacaccctgtggtattagaagtgtttcttatgagctgtaataccatactcatattttatcagtagcaagagttcactccagttaaagttcttcacccgtcatgggcatttttcagcaaattaatgtcttttacttgcatgacttcccttcatattataatttggggtttaaacggatcataatactttgcagaaagtaaaaagagaaaaagagctcagtgttgataatttttaccacttatgactgaatgacctcaactgaggaataaaaaattaagtcatttgtcttatgaggtacaaaggacattttacggtgtacaatttagctaataacgggttcaggccaatccttaagaagtcacatgtttccattgtcccttcaccccctgcttgtgtttttaccacatcctaacaaaaacatgaccagaactggtgaaaaacatacggttccaactaatgaatcacatactttcccgcaagtacagtaagtactaccagctgtgtgacagtcttgctttggcagtgggaccagcttagaacaagccggctcatctgaaagcagctgtactgaaaaaccacaagcaatataagtgtgtctgccttctcagggcggctttgtctctgttctatgtctctgctctgtccccataatgtgccagccatcttgtttagagaaagtttcagaaattacagtggtagggagaaaatccacacattcaaaaaccttaagttttcagaaaatgttgtcactttatcaagtggaacgccgtgagaggtcaattaaaggaaaacacctctctcccacatccagccttccacatgcatcttttggggtttgccttagatgtaaaagtgtgcgtatttatgtatctaaataagtgaggtgggaaacagggggaggaacggcacaggatccagctacttacagatgggctgaggcatgcatgcgaacacacacaaacacacacgcagagcaattcgcagattatcaactcatgccatgagctactgcaaaaaagttctatgattttaaacttgccatttatacaacaataagcttcatttgtaaccacaaagcattctgaaaaagattccctggcaagccccagatatttttacacaaatgcacttttcctttctgtgaaacaacattcaactggataatcattgctgttaaagggaaagaaagtccaacagcattggtctagaaatttaagtggaaatagtaggatttttaaacttctgtagtgtctgaaggcaataagtaattaaaatttttttaatgtcattaagtgatcagtagcttgtatgtaagcacctaagtaccatctcaggcttgttctgcaaaaaagaaatacctaccgttgtcattcttgacttttccaaagtctcaatcagaaaaataaatacagagtagtgaaattatttttggtttttgtcagtgtttcacatacagagaagtcaaatgtaaggactaatcgggaaggtttaccttttatgtttacttttattgcctaatttagccaaacacattactctaaactataatgttgtaaagatgcttgattcggcaataatctaatccaaaaattatattaacatcacatctttttatttataccatagttgtgtgaataattttcgttttgaatgagctatcaatgtaatactcaaaaaatggccagaagactcactacattcagaagattcactacattaattagagaagatcttggcctctgtggtttcttcctaaaattcactctttctaaatgaactttaatgtttgtgtgtttgggggagttcagtgctgggctgatcaagggcaagtacttagggtgaatctagaaatcacattgaggcttacaattggataaaggcagacagcagaactgggagcaccaacagtagtggggaaagagtaaaggatgagcatctgcaggcaaacatcggacgaactcaggttccactccaaaccaccacataaaccaagtcacatgatttttttttggtttcccagtgcatataaaatttgtttattcgatgctgtagtctattaagtgtgcaatagcattatgtctaaaaaaaacagcatacatacatctaaaatactttattgctaaaaaatgctaacaatcgtctgagccttcagtgaggtgtaatctttttgctggcagagggtcttgcctagatgttgatggctgctgattgatcagggtggtggttgatgaagacgggtggctgtggtgtctactcataaaacagacggtttgccgcatcaattgactcttccattcagaaaagatttctctgtagcattgatgctttggatagcatgttatccacactaggacttctttcaaaattggagtcaattctttcaaactctgccactgcttcaatttgtaaaagaaatgcagtatctgcagagtgcagtaaagccaagtgcaataaaaggaggtatgcctatgttcaagcctgaagaacagacttaactaatacatagacttgaaacagtacactgataaacagacatataattttaaaaaaatattgactcatttatagcacttagttcatgttaaatctaataaagaatactagtctaagtgggaaaagtccaaaactggattattaaattacacagtaaaatctatcaagaaagagctaatatggctgagccaaaattatgattaaattatgataaaagcattaaaactcagttattaataacatggaaagatagttacaaaatgttgataagcaaaaagcagcttacaaagcagtgtacgcaatatggtcctctatttttaaaatgaatacaaaagacaagtgaaaacaaaaaatgattaacacctgtgtggaaggaactattggcgatgcttttactcttcttaaattccattttctaaactttatttatttagcatgtataaactacacataggaaaaataagtgtacttcttttcctttttttaaacagtgtgagaaattttatttttaagaaatctagtaactagatttctggtcctcaccagtagttacactgcaaaacctgtgtattatttaaaaatgtggagcgtttcttttttttttttttttttttgaaacagagtttcactcttgttgcccaggctggagggcaacggtgcgatctcggctcactgcaacctccgcctcccgggttcaagcgattctcctgcctcagcctctcgagtagctgggattacaggcatgcgccaccacgcccagctaattttgtatttttagtagagacggggtttctccacgttggtcaggctggtctcgaactcctgatctcaggtgatcagcccacctaggcttcccaaggtggtgagattataggcatgagccaccatgtccggcctggagcttttcttaaaatcaaaaattgatttactttgaacaattctttaaaactacatttatggggtacgtgtgtgttctctataaaatctcaagacaaataaccaaacttacttatcctctccccgatacccagtttcccaagagtattctttcataatttgagccaaaaactagcctttgctaattcaacttttacataattaatgaaccacagatctaaatccttatctttctaacaaaaataatacctttaaatagcacttaattgccaaaacactcccataaaataagaacccatacccccaccgaatcaccattacttaatcccaaagtctagaggctgccctgtagcgcacagtccagggcactggagtagtatataacaccatcacaggatcaatgcaacagagcgaatctgttaaatacgcttatccacattgaaacatggcagaaataactaggttaataaccatactcctataacaagggacttagaatcacagccaatagtcaagaagatttattattaaagaagcattcaaagtttttcattctgcaactgagagggctggtatgaacaatcatttggcaaatacttattaactgatttccgtggcctaccatcgtgtccaatgtttgggtttgaacaaatataaggaaaagcatcttgacataaaaaccatctagtgaaggagaaaattcaaataatttatcacgttgtgcagaagagcagaaacacacagagatttccagagaaaaagaagaaggcaccaactcaggtagggctttagaacaacttcagaaaaaaagacagaacataatgaagcttaaatacaagtttagtagccaaccaggcaagataaggactagggagaacaacatgggagaatgttccacgataggaaatagcacaaaatcggcaaagaactaccagctgatctgtgttgctggggcaataaggctgaggcaagaaatgacaagaatggcagacagggtaaggggcaggtccaatcatgtagggtcttgtttgtcccttttaaggagattctaagtttcccttcacctaattcagcagtgagaatgctcagtctccttactccagaagagtcaggactacccatgtcatcttgcatatgatggtaggaactattccctccttttttttaatcgttatttttatttcaaacaagtatttactgaaccccttctatgttttaggcactgagatctcaggatcagacagtcttgctcctcctctgtccctccaggagttcactttccgtggatcccccacattcggtaataatttctttaaaagcacaaacaaaaaaactgg

SEQ ID NO: 7014 - DNA, 16487 bp, Homo sapiens
tcctccttcctctctccttgtaaggtgcacctgtgctgctgggagcctggagtactggctatacccattcccaggcctaagccagcctctccctcctgacagtgcccagactgccagcagcacccgtctgttacacatgtgaaaccaaagcctgctctctcccaaggctctcattcagcctatcttgcgaggcccgggcagctggaaagtcctcctccagctccacctccctccctccctccagatgcagaggctggggagtctctcaatgccaggttgtcacccacctgtctcatagtgtttataagtggcctgctgggagtgagtgctccctctgttccctccctggaatgtgtctattaaatgcatgtgtcacctgtttggtgtctggccctctgtttggaatggtgactgacccaaagcaattctcctcctctcccaggcctgctcccagcatggggatcacacaaccagtgctcagaggcatcacccttgccccttccctctgagctaagaaagctggctgggaggaagggagggcgggctgcagaggtgcagggagtgcagggctggccagacttccttttccctctccttggcatgccttgtttgggaagccggagctgttgggagaagcccagaccggcctccctgctctgttagtgccgtccccattccaaaccagtgttccagaatactgacgccgggtgggcggcccagcagaggggctgatttttccctgacagtttcaaacttgcagacccagcagagaaataacaggccacgaagaggagttaaaaggcagccctgggagcaacgctttcaccaaggagaggagccatttagcccataattgcaggcagcagtgagatatccagtaagctcccacattcctgagtttacagtctcctggacccctcccatcaggcctgagctggggcatagcccagtgggctcacccagagtggggcagtcgatgtgggcttggagggagtgagttcaatgctcaggaactgatgtgagctacttgggacagggttctaaaacacccttgtccagggtgaaggagcaggaagtgaagtcgggggagagggaggccgtgaatcaggagggaagatgagtgtaaaaccaggggctaaaatttggagtggacgggagagggaggacggcaggaaggagagaaatgacactgagaacaattgtgaaatccctggtgttggggtgagggcgagttcagaccaagagaggagagaagtggagggacaggaatttgcagtgacatcctcaggctttctccactggccaagctggctctcatctctgagcctgatcttcccaactgtgtggggtgcaatgattcagggcatgggaccaggagtccgggttctgacaatggccccagtgctcactagctatgtgacctcaacaaacgtgcctaactacactgtgtctcaatcggcctcctttgtcaaacaaggatcttaacggcaacccctgtagtgctatttcagattaaagaagatacatggaaaccagctacccatagtggctgctcaaaagatattcaaaattgtccttatttttatcatccaccctcacaaagttattatgagaattaaatgaaatcatgcttgcggctgacctgtcgtgtggtgtggcacagactgaatctccaataaatgaatttttagaaatcataagtgaacagaatgggaggagcataatttagtgactttgggttcagagcccaagacctgggaatagagaagggagttcagatgagaggctacaggagtgtccacaatgtgtggctgaaagcctgcgtgggtagggggcccggaaacccccaggcctgctccaagtctgctccagactccaatccccagatcttgtcctggggactttatttaaggggaaaaattgtgtgtatttcccaagtctgtcttccatgctgaggtgagataagggttattcaagaaacccaaactggctgcacaagaccacaaaggactcgagagagcagacagaggaaggggtgtgggggctggccctaggccacacagctcatgatggacctggctggggacatacctgcgtcctcacaatgcaactccagtgtgacccattgcagcattcccagagtatatggacaactgagtccagattctaggtctagagagatcatgtcagaaagaaaatggacatattaaactttctgccaaggacctcctgcccatttaatggaattcaaaacttcacccagtaatatgatggtggcgtgttcttttcttgaattatcacacatgcacctggttggtgccagcccctctgactcttcctgcttctcccctctccaaacaaaaccatctgtcccccaaccccattgcaccaacatctgcttggctctctatgttccaggttccttccaggctgaggaagaggaggaagagcctgccacctggactctgagatccaggttgtgcagagcctccctgcactgttagggatcccatatcccagagccctctgggaggctcctgcatggaagctctctcagtctcttacctctgactggggcaggtgtggtttctggaacaggagaacaaagtcctggagactaaatggagcttcctgcaaggccaaaaaaccaccagggccaattttgagcccatgtttgatgtccacatcgacaacatgaagcagcagctggactgcctgggtggagggtatgtgaagttggatgtggagttaaagaacatccaggacatggtaggggacttcaagaacaagtgagcagacgctcagccagtgcctgggccagggtcctgccctggggctccaggggaggtcagagggggcaggagaaacagcctctgctctccagaaatgtccagtctagtggggaaacggaacacacttagggcacagaggtggaatcagaagtaaacataaaagtgtcaagagaactgggacccaccctgtggtcaagaatgctgaggctttagtgaagggctgggattgtagatgatgatacctaacataggtacaaaaagcatgatacacacagcattcttcaaactctgcagataaggaaagtaaggctctgagatagcataccaaagatgacacaaagtggcaactcaggagttaagaatgaatcccatagaatctcactctcacatgaatgcaactaaatctcactgctaatttgcacagtgttcacatattcactctaatccaggcaaagaggctggagaacaaaaaagaaaggacacatttgctgccttctcccaggaccacacacacacacacacacacacacacacacacaccactaaacataatgagatgctcaaatgctcatgcctgtagatacaaatttcttgattttattgtttttacttatttttatttcttatttttctggttctaattatttttaattctcttggtctaaccaaaattagtaactggatcatgagttttggttaacactgtttgtatactctagcacaagttcaggttttagagttgtgctgtccaacatagtagccaggagccagtggccacagatgactatttaagtttaaattaattaaaattaaataaaatttaaaattcagttcctcagtcacacttgccacatttcaggtgttcaatggccacacatggctaatggatcctgtaatgaacacagatacagagcaattctgttatcgtggaaagttctcctggatagcactatagacttcagagtcagtggatttaggatcttggctcaaccacttaatggctgaatgaccttaagaaaactatttaatctctcaaagccccaggttctttatctgttaaaagagacatcaatagtgcccacctcacaagagcattgagattattaaatcaaaacttgcatgtaaggtgcttggtagggttcacagtgcctggcacatagtaagttgttaataagtgttagctatgtttattgtatttatgattaggtatgtgtagtgatacagacgcagacaagagaagcaagtgcagatgggtaatttataacatgtatgcaagcgtggactaacagtgtttcaatacaagaagacttcctggaggagaaggctaaagcttagcattgaaaaggaagaaggcacaggggagggatatggtagggcatctgttgaagagtgtgttcctagtcaatgaccaggcagtgttcctgtggcatcaaagtggcctgtgcagggccaggcgatgcttgcccttcagcagagggactgtgagctgggccacatggaagacgaggacagttgtatggagttaggtgaagaagagacattcagagttcattaaaaggcaactcaaagaaacgatgaggaaaaccaaattgctcttcccagagaacactgagagaaagcacaatactgaaatttcaatggcaagcaagagattttctcagatcctatagagcagcagaggaaatataaaagccaggaagatcctgcttcatgtaagtcatgtgtgatgggactctgtggttttaaaagaatgacaactttccattacatagtagagaaagatcctctgagaggtcatatggctgatgggcagagcagctgagatcaaaaccacagctgtctagcaccacgagggtggggtgtgctgatgcacccaagtaggttgggtggggaatgggtcacctggaacagaagcaaaacttccttcccagagatcagtgagcaggaggcacctccacatgcccctgggggacagacagggtggggttgctgcctacaggtaaattgaagaatgagaaacctttgggggagagggttcctatggtcctgaagtctctgctccttaggccacagttcagtgtgcctgaacagagtgagggaaatgcgagtgttgtacagtgaggggctgccggcctctgacctttctccctgttcctctcctccctgccctgggttggggcaagaccataaaaaaaaaaaaaaaaaaaaaaaggaaatgtatatgcccctttatgggacccaaatactccaaggagctgagctgtgagaaaagaaacctcaagtagactgagaggggatctgttttgttgttttgggtttgggttgtgtttggtggtttatttgatttgggatttggggccatgtgtgtcataggagagccaggctacagtggagcatttgctaaggctgctctgcagacccaccattgcctgtccacctccaccctactgctctgacctcactaccagcgcccaatccaaccccaaaccacttcttgatccttcccagaggtatgaagaagaactcaacaggtgcactgaggcagagaatgagtttgtggtgctcaagatgagtggacagagttcctcctgcccagctcccagtggcctcatacaaggccttatttaatttgcacagcaagcctagaagtaggtcttactttaacagtgggaaaactgcaattcagagaggtaaagacacttgcccagggctacctaggtaatcaggagtgagtcaggacccaggactccaaagtctgagctgcaaatcccaacaccagcccccgccgtgtggagtccagtgtggagacaggggaagcaaaacgggccttgtcctgggctgggtctctaggcacccagtcaggctcaggaggacagggcagcccagaagcagctccacggagtcctgggccttcctgcttggtggccagggccagaacagggttgtcctcacaatgtgaggtgatgcaggagacctttcaatgtggcaccagagctgatgagcaggtgggcacccctgaaggccctggtcttcacagagtttggaagttctactccctccctcctctccaagttctaagttctactccatggcctggagtagacagatgctctgtccttgggaactgaagctctcccacctaattcacagacagagggggctggttatccctggaagggtaaggcccagagtgatagcatgttctgtgggacatggatgctgtctacatgaacaaagtggggctggaggccaaagtggatgccctgatggaggagaccaacttcctgagcactttctataaggcggtgagagtgccyggtgccccctccaacaggggggctgggggctgggtcttagagcctcagctgggcacagagyctgtgggctccttccctggtcttctctctgctccttatcccacctgcgtattgcagggcagatgccacttcccctaccacaggagaaaatgaggttccatagagcggctggcaggtcaggagagatgaaaaattcagccttaaccatctggatcaagcatgttctgttgggcaggcagaaaaatggaccacctgtcattaaaatatggatttccatagaactttctgagcaacttggctcatcctgccctgccaaaatttacctgctgctcttcctagagcaactgcagggtgatgcaattacacaaatcaagtggcaattagtgagccctcaggtgcttctgggagcaaacagcacaattgcctggttctccgtttgtgtcctccacagagctgcaggcacagtgctgagcaaatacaacggggcctgtaagttcttgaagcttacagtatagtgcaggagaaaggcacaacagagataatcaaatcactgtactatttcaggccctacagaggcaatgaagagaaatgacagtagaaagcaatcataggcagtgggtgggtgacactggacaagaaacttgaaggaattgagcatgtcagccaggaaggcatggtgggtgggggcagtgctccagcaagaaggaatgggaagtataaatgcccccgggtgtgatccaggaatgccaggaggaggacagtatggctggggcagaggggagagtggtgaagatagggccagcagtgtcaaggtggggtgtagggtgagtggagtgcctccaggtaggcctggtaaggacaggtgatatgcccatagggtcacacacacgtgatgcccaacagaagctggtcacattgttccaggacctggggcttcagctctgattgtttgggtgggctccaattccaccttacaacccacagggggataaccagccccctctctacttgttctcttcaatgctgacaaccagggtgatattgcctccgaattctgaactagcccacagccagcaagcctgtgggacaagacctttgaactagatctgctgccaggaaaaactatttgggaaaaacaagccgcagcacaataagaaaataataatttgttgaaacgggaaatgtatgaatcagtcatcaataaagagagaaaaggaatatttttacttagacttctgctttggcctactgattctcaaattttaaagagcatcagaatcttctagaagtgttgctaaacaccaattctgatttagtaagtctgggctgggcccacagtgttgcatttcaatcaagtttccagtgatgctgatgctgatgctggtttgaggtcacattttgagaaccactgagttagatgatcctgaaaatggaccattaacaaattaattgtgggttcactgtttccagaccatcttatctggatgtcatttaatctccacaaattmatttgaggccagtattatgatcagccttgctgagatctgggatgctatttaaatgtgattggcagatacaagactcraatttgtcagttgggtgccctttctgctatttccagctgatttccatttcccatcctatccccraggagcagggaggagccaaattgggaaacgcaactggaaagtagccaagttttctggcttcttctgactyagttttctttcacaagatattttccttatttggtgtgaagggctgtattttctcagaacatgagacatctgtgatactgacaggtcacaacatggtgtgctcctgtgacaacagagtggcttctggagaatgctggctggagttacatgtgctgctgytccctccacgcagatgagctgatgacaaagaacagctataaactcaatgacctccctaatgttcttcccagccctttcagcctacacaggccactccatccctaccgtgcaagaccctcaatgccagggtctgttccagggggcagatcacagcctcccaaaacatgcccccmcacacacatgcatacacatgctcacacaygcacatgcatgcacacacatacatgcactcgcatgcacatacgaacgcacatgcacacttgcacacacacacacggacacacatgcacatgcacactctgcctcagctctctcatttggacccaaccacaaaagctggctcagcttcaggcccagatctctgaaacctccatggtccttctgttgatggaaaacaactgcaacctggacctggatagcatcatcattgaagtcaaggcccagcatgaagacatcgccaacaacagcagggctgaggctgagttctggtactaaaccaaagtgagacatcaaggtcaagttcattaaacaagcacaaaaaaccgagatttcaaaggcaaacaagataaragccatgtcctctcagatgtcccagtctgatagggtcaagggatctgagttcagcttggggctcaccctatgttacctgggggaagcatgtcaggacctggggaacagccagataaaggcaggaggtggtcagtccctctgccaagaggaagatggacacacctccaatgccctgtatcagagagaaaagggacagctggacagttccagccatcagtgccaacaggaggaacararagggagggtggggacaagaggaaagtttaaccccttgtggaggaggctggaggatccagagaagaaaggcggaactggctggggcccaggggctggagggyaaagtcttaatctaagtcacagactgggattttccagatgagagcaaacattctgccctgggagtcgttgggatgataatttgcaatgccgaggaaaacacgaacaaaggaaaagtgattggcacctacctgatgctgartttgggagggtgagatgcatggtgtcgagggaaagggaagaaagaccaggtataggaagaagggaaagagcacagccacagctgtccagctgtagggtgaagccagtgggcatagaaagtgagggacagagtcaagagaaaatgcagatgaatttgattgggccagaggcggcccagcagggaggctctcagacgcacatgaaagcctatggggctgtgggaagccacagccttctcttccctggcctggctgtccctgcccactgcacgcatcccccatccgaggtctgcttctcctccctcctagtacaaggagctacagcactctgctagcctgcacgggatgacctccacaccaccaagatggagatctctgagataaactggtaatgmagaggctgcactctgagattgataacttgtagaagcaggtagggctgagctcccaggtgtccttccatccatgctcctgcytccaggtggacttgtgcctgggcctcactcagcccctacagagagaagcctcccagatgagtggccttccaggaatataaatatgcattcacctagtgcaatggttaatattgtcaacttgattggattraagaatgcgagaaaggcactttcttctggaagagtaaatggcaaaactttggcttgctttacttactcgcaatccagaaaagttcagcattgaaaaggacctcagagggctgggtgtggtgactcacgcctgtaatcccagcactttgggaggctgaagagggcggatcacctgaggtcaggagttcgagaccagcctgacgaacayggtgaaatcccgtctcyactaaaaatacaaaaattagccaggcatggtggtgcrcgcctataatcccagctactcaggaggctgaggcaggrgaatcgcttgaacctgggagatggaggttgcagtgagcagaaatcgtgccagtgcactccaacctgggcgacagagtgaaactccatctcaaaaaaaaaaaaaaaagaaagaaagaaaaggacctcagaacatcattttctccattctggctaagtctcaaactacccaaggtggacagaaatcaatcttagttttaaagatgatgcagctccaacctcctttgcattaaatccacttcagggaattctttcatattttcaacttaaagttcatagaggatcttactgcatcctccatgaacaatgtcacacacattctcatcgccacctggcagtgtgccatgccccagrccaccatcgcctgctgatgccaagcagcatgggaagctggcactaagaacaagctggtggagctggagatagccctgcagaaggccaagcaggacatggcgcagcagctgtgcaggtaccaggagccaatgtatgtcaagctagccccggacattgagatcgccacctacaggaagctgctggagggcttgaagagcaggtgggccacccctcccctcccactaccacccaaacagatgcaccagaccacgacagcaatgccacagaggccccatgagcgccacagtgtcagccctccagatgaagctcccaggtcagaaacagggttaaaatgcaattgctcccttaaaggcgtcctgcagttgcagcccctcccacagctgttggacccagggcaggggtgagggtcaaaggggtcaaggaagggacgctaagcaagaccctttcttcccaagtcctgtgagaaatgcaatcatgcttgggacaaggctcaggggctctggaattgccctgcaagctgacggtctcgcactacctctctaccacagctgcctcttctcatttctctctgtatttgtgactcgttctctctcctggattttcctcacagatgcacttgagcttcccaaggctagcaagctgaggggagagcttgccaagcacggtgcctgatacatgtaagcactctgtgctcataactttaaatacaaagaacccagggccccttaacctctcagcaaacaaaatgactctttctctccctagcggtcacagactcactgaaggtgtcagagccgtcagtacctgtgagtcaatgtcttggaatggtagaaaagtggggggcacaatggaagctgggagcatcactcttgagggtctggtgggtcaaagatgagcaggcaggggcagggatgtcacaaagaccctcttggaggctctatggggactcttcttgtgcccttcttccccatgaggtcaagagaactcaaaaggggcacattccatgtcactaaggagctcaacaactttctcctcactctggcttaatctccacaaaaactgtggcgattaatctgcaggtgacccctcacccccagggctggtcccagaagatcccagtgacaggacaagactattcaaacaatcgtgggtccccagtctgaatgcctgatttctcagctagtgctgtcaggaactcaaactaacacaaataagaggctattaaacagattaaatgtaaaggcctatatttagaattgaagcatatgaattcaacaaatagaacagtgactgatctggcgtggcctcaactcacaggagggagagcagcagtgacctcacagagtgacccaccagggctctggggctgtgtgtaaaagctcagcatcataggcggcattaatgggagcattgagtcctggtcatgggagtagaatccccttgagacccatgtgggtcagatcacattagagaggctggcctgccaggattggggagagcctggaaccaacccatcagaggggcaggaatgcctcaccaggaaaaacggacgccaagaggggaaatcaatgagacgtttccaaatgtttacctggcttgcaaagatgcatccaagtagggagttcccgttgctgaaaatattgaagcagaagctgaacaattgtatcttggcaatgtcattgaggggttctggtactgggggaggctcgtccaggtggccttcaggcctctttcgaaaaggaagtctatggctcccttccagaatacaaggcctcctcttccatccaatgtgacagccgcctacaagacaggggaatgaacccagcacaggagctaaaagccttggcttctggtgggcgtggacttgggtatgccacttgatctctttgcacctcattttttcctctacaaaatgggggttattgtagtaatggtgtcctctcagccccattgagatccacatggtcacagctgtgaatgtgccttgagtatggcgatgccctgtgcagaggttcatgagaaggtagcgtgtgacggggtggtgagtccacgcccaccctctctcacactggctcaggcgttccccgaggctctcagggaagggagggttgcctggaacaaggcattgcgggaggggagcaggcatggggatcacacccaggaagggcgtcgtgggaaatgggaagaacctgccaacatatcctgagccctctctccacagctgaggtctcttcccctggggccacaggctccagtgggggcagcgtcctctgtgtgggtgggggtggccacagcagtggcctctgccacaacaacaggagcagtggcatcagctgtccagctgtgaccagcagtcacagcagctccaacatattcattgtctccaagagatggcccaccaaggagagtcacagcagccatgcacctgcctccactgccactcccctcaagccctcaagcttcccagctccaaggcttgatatttactgacgtcctacacacaaaatcaacagcaggaggtacaaggagcaggaagtggcttatgaggtcatcctgtccatccctctgcctccagaaggtccccacagaggtaccccacctgctcccgatctctgcagggtcctgcagggtccacaggcatccattccaaccaatgttgactcaactgctctgtgccaggacctgggctagcactttgcccttaagaagcttccagagtagggggtgcagtagggtctttcccctcctgtctaagtcagacccacagcaaccacaagacaaggcctcttatgcagtccttcccaggacctcagaactgaccacggtgccccaaagagactaagtgcagtgtgggcccaagtttccacacacctttctcattgcagatggaacagttttcccactcaggccaggacacatcttgcacaccctgccacacatgccacctcctcacctcctttcttccccctgcccaggccccagccaagtcccctgacaactcccaccagcaggatatttgagtgagaaatcaacacccttcaaaatatgatcaactcttgcttattcataatataatggaatgatgttatcaagaactcaaaagccctccatggcccagggctgcaatgaatgagagttcatggccaaatttctgtcaagtctgctttatttaagtcaatattagacctgctgttcctaaacagaaatgccctgatgacagaggagtgggagggaagcaggctcatgtgagggtgtgggaaggccacttggcccaaaatgtttgcaagaaatacaccaggaaaagcctattttaattctcctgcattaggaactgccctgtgagattcctgcaaaataatcctccaggctcagaactattcctcttctcttgtgccagacacatctctcttctggaaagttttccttcctttttttttttttttttttttctgttgactctttttttttttttttttattgatcattcttgggtgtttctcgcagagggggatttggcagggtcacaggacaatagtggagggaaggtcagcagataagtgaacaaaggtctctggttttcctaggcagaggaccctgcggccttccacagtgtttgtgtccctgggtacttgagattagggagtggtgatgactcttaacgagcatgctgccttcaagcatctgtttaacaaagcacatcttgcaccgcccttaatccattcaaccctgagtggacacagcacatgtttcagagagcacagggttgggggtaaggtcacagatcaacaggatcccaaggcagaagaatttttcttagtacagaacaaaatgaaaagtctcccatgtctacctctttctacacagacatggcaaccatccgatttctcaatcttttccccacctttcccccctttctattccacaaaaccgccattgtcatcatggaccgttctcaatgagctgttgagtacacctcccagacggggtggtggccgggcagaggggctcctcacttcccagtaggggcggccgggcagaggcgcccctcacctcccggatggggcagctggccgggcagaggggctcctctcttcccagtaggggcggccgggcagaggcgcccctcacctcccggatggggcggctggccgggcggggggctgaccccccccacctccctcccggatggggcggctggccgggcggggggctgacccccccacctccctcccggacggggcggctggccaggcagaggggctcctcacttcccagtaggggcagccgggcagaggcgcccctcacctcccagacggggtggctgccgggcggagacgctcctcacttcccagacggagtggctgccgggcagaggggctcctcacttctcagacggggcggttgccaggcagagggtctcctcacttctcagacggggcggccagacagagacgctcctcacatcccagacggggcggcagggcagaggcgctccccacatctcagacgatgggcggcctggcagagacgctcctcacttcctagatgggatgtcggccgggcagagacgctcctcactttccagactggacagccaggcagagaggctcctcacatcccagacgatgggcggccaggcagagacactcctcacttcccagacggggtggcggccgggcagaggctgcaatctcgacactttgggaggccaaggcaggcggctgggaggtggaggttgtagcgagccgagatcacgccactgcactccagcctgggcaccattgagcactgagtgaacgcgactctgcctgccatcccggcacctcgggaggccaaggctggtggatcactcgcggttaggagctggagaccagcccggccaacacagcgaaaccccgtctccaccaaaaaaatacgaaaaccagtcaggcgtggcggcgcgtgcctgcaatcgcaggcactcggcaggctgaggcaggagaatcaggcagggaggttgcagtgagccgagatggcagcagtacagtccagctttggctcggcatcagggggagaccgtggaaagagagggagagggagaccatgaggagagggagagggagagggagagggagagggagagggagagggagagggagagggagggagagggagagggagaggagggagagggagaggagggagcctccttccttttaaccttgcccttttcacctttcactctcacttctttttctacttacctttccccactgccaccccacgcacctcctctctctcaacccccctttctcctcctgtcctatatttttcacccttcttcctctcccactctttccatttgacaatctattaatattgcctgctctttctcttctgacctccctttttctatctccctccctcggaacgtctctgttccgtgtcttcagccatggctgacactgaagctccttaagccaggacaccacattctctaccccacagcagaggcccaggatagtgcactcagaggagaggtggctctttctttggtgtttttcctcgctctgaggggacacattgctgagccccagaaggacacaggaggaggctggcgtggaattgggagtgaggtaggcatgggattcttctttgaggccttcaaagggtggtttctgtatttaatttgaagagtcatcaacccccaagacacctgccaaaacgcattccaaaggcaggtagagattgtctactgcactgccaaagtgaagacggagttcactgctccagaagaaaatcacacccttctcaactgcctgctcccttatgccccctagttcctgaacccactttcataaaatgccgccaaactgtctaggtcttgactgagtcctgccctagctcacactcagagggcaaccctggactcggggggctcaggaaacaggtgcctccctcccacaatgaatccaaggaaccgccctgccctctgctcctgagctctggttctggactccaggagcccaacatgctcactgaggccctcctctggcctggacatggcggggagactctgctgtgtccactgctgcagtgacccctgccctccggtgcagctcactgtctccctcaccccctctagtgggaatctgctctctggtggggcctctgagtgtctccatcaacattcacaccatcctgggccccctctgtggac

SEQ ID NO: 7015 - DNA, 70872 bp, Homo sapiens
  misc_feature (1)...(70872): n = A,T,C or G, or insertion/deletion polymorphism (see Tables 1-2)
tgtccttctgaaacttgacacttgaatgtgcattaagcagagtttttcctcagagacacaagtttcaacaagtgcgtaatttgttcaatcaccagacaccatgtatatggttttctttagtaacaacaatctttagatgtaattcacataccatataattcacccatttcaagtatatgattcaatggctttagtatgttcacagagttgtacagccaccgctacagtcaattttagaacatcttcatcactttccagaaataaaacctatacccactggtggtcatttctcatttctttttctttttctttttctttttttttttttttttgagatgaagtcttgatttgtcacccagactggagtgcagtggcatgatctcggcttactgcaacctctgcctcccaggttcaagcgattctcccacctcagcctccccagtagctgggactacaggcatgcgctaccacgcctggctaattttttttttttttttttttgtatttttagtagagacggggtttcaccatgatggccaggctggtcttgaactcctgatctgcaagtgatcagcccaccttggcctcccaaagtgctgggattacaggcgtgagccaccgtgcctggccatttctcatttcttcataacgctaatctactttatctctctgttaattttcccattttcgacaattcatataaaaagaatcatagcatatgtggccttttgtgtctggcttgtttcatttaacataatactttcaaggttcatccatgttgtagcatgtatcagtactttagtccatttcatggctgaataatattatattatatggacatatcacaatttgtttacccattcataattgatggatttattggttgtttctactttttagctgttatgaataatgctgttatgaacatttgtgtacaggttactgtgtggacatatgtttccatttctcctgagtatatatctaggagtggacttgctgggacatgtggtaactataggtttaactttttgaggaagtgttttccaacgtgattgcattgttttgcatttctccagcagcttatgagagttctaattcctcctttccaaatcaaaccaaggttccactagttccttgccaaaccttgattatagccatcctggtgggtgtgaagtcgtacctcattgtggttttgacttggatctccccagtggctaatgaagttgaacatctttccatatgcttattggccatttgtacaccttctttggagaaatgtctattcaagtcctttgcccctattttgaactgagttgtctttttattgttgaattgtaatagctctttctacgttttgacttctagacccttgtcagatatagaatttgcaaatattttttcctattttggcagttgtctttcttttcactttcttgagggtgcccttgaagtataaaaatattttacttttggccaggcatggtggctcacatctgtaatgccagcactttgggaggccaaggtaggaggatcgcttaagtccaggaattcaagaccaacctaggcaatgtggcaaaaccctgtctgtacaaaaaatacaaaaattagccaggcatggtgatgtgtgcctgctttttgggatagttccaaatagttccagctatttgggaggctgaggtgcgaggattgcttgagcccaggagttcgagaccagcctgggcaacatggcaagaccctgtctctggaaaaaaaaaaaaaaattagctgagagtggtggcacacacacacccctgtagtccaagctactcagaaggcttaggtgggaggatttcttgagcctgaggggtcgaggctgcaatgagccaagatcgcaccgctttactctggcctgggtgacagatcgagacactgtctcaaaaaaaaaaaaagattttacaggccgggaggggtggctcatgcctgtaatcccagcgctttgggaggccgaggcaggcggatcacgaagtcaggagatcgagaccatcctggctaacacagtgaaaccccgtctctactaaaaaaatacaaaaaattagccgggcgtggtggcgggcgcctgtagtcccagctactcaggaggctgaggcaggagaatggcatgaacccaggaggcggagcttacagtgagccgagatcatgccactgcactccagcctgggtgacagagcgagactctgtctcaaaaaaaaaaaaatttttttacttttgttgaagttcaatttacctatttttttcttttgttgcttatatttttaatgccatatctaagaaggttctgcctaatccaagatcatgaagatttattcctatgttttcttctaagagttttatagttttagctcttatatttaggtctattatccatttggagttaatttttgtgtatggaaaggggtccaacttcattcttttgcatgtggatatcgtatatggttttgatttttttaggttataaaatacctgctttagatagaacagtgccataaatcttgctatcttggaatgttcatgtccctccaagattcatgttgaaacttaatcctcaatgcaatagtattaaggagtggggcctttaggaggtaattaggtcatgagggttctgccttcatgaatgggattagtgcccttataaaagggcttgagggagtctgtttgtaccttcttgctcttctgcccttccaccatatgaggtcacagcaacaggcaccgtctgtggagcagagagcaaactttcaccagataccacgtctgctggtactttgatcttgaactttccagcctccataactgtgagaaatacatttctattatttataaattatccagtctaacatattttgctatggcagcaggagtagactaagcaagaaattgtgctgggagtggggtgctgctgtaacaaatacctaaaaatgtggaagcagctttgcagctgagtaatgggtagaggctggaagagtttgaggttcatgctgaaaaaaacttgtatttctgtgaacggactataaagggtttttctagtgagggttcagaagacgaggagaactgtagagagagcttcaatcattttagagattatttaagtggttgcaagtggaacattggtagaaatataaacggtaaaggctactttgatgaggtcttagatggaaataagaaacatcttcttgttaagtggaagaaaggtgatccttgttataaagtggcaaagaatttggctgcattgtgtttgtgttctagtgttttgtggaaggcaaaacttatgagcaacgaaagagtatatttggtagaagaaatctctaagcaaagtgttgaggatgcagcatggcttttcttgattgcttacagtaaaatacaagatgagagaaatgaattaagggtgaaacatatagttaaaagggaagtagaacttaaaagagttggaaagttctcagcgtggccaggttgtaaagaatgagaaagtgtttgagagagaataccaatggtgtggccaagtgaatgtttgatagggagatttatatggctagaagaatgccaggtgatattcatcaagacgatgggaaaatggcccccaaggcattttggagatcctcaaggctgccactactattacaggcccagagtgccagggttttgtggtccgaatggtttcaagggagggacccaggatgcctttggggctttgtggtttgctgcccagggctgcatcaaatttctactccatgcattctggcacagagctcgttggtcacctcaagtgtggctagtgggcctaggtgcagtgtggtctacagtggttgtccctttggttgccccatggataccatgctccatggctggagcgccgtgcttcatgcccacaagtgtaaaattggatacattggagcatggtatccatgcagtgttaaactgcagtgggggcatggctatgaccacctggatttcaaaggatgtcctacagaggcttggggcccaggcagagaactatcatagatgtgagaccacttcagagagcccccactagggaaatgtctaatggacctgtggggttggggccacctcagaaatcccccactagggctcccagtggagccatgggggcagagtgaccctggagatgccagaccaggagagccaccagcatgcaactccaatctgggagattctcagggactggactccaatacatgagggccactgcgtgggtggtgccaagcgaagctgtggggacagtgctgcctggaagcatgacttccaccccagtgtgtgcagaaggtggggcacagagtcaaagattattttcaagtcttaagatttactgttgtttgctctgttgggttttggacttggtcaaggcctgtcacccctttcttctttcctattgctcccttttggaatgggaatgtctatctatgcccatcccaccattgtattttttttttatttttattttttgtgagacagagtttccctcttgtcacccgggctgaagtacaaaggcaccatcttggctcattgcaacttctacctcccaggttcaagcaattctcctgcctcagtctcccaagtagctggaattacaggcgcccgccacaatgcccagctaatttttttttgtatttttagtggagacagggtgtcgccatattggccaggctggtctcgaactcctgacctcaggtgacctgcccgccttggcctcccaaagtgctgggattacagatgtgagccactgtgcctggccccaccattgtattttggaagcacgtaactttttttatttcataggttgacagctggagagcagcttgcctcagggtaattttattttattttatttttttgagacagtctcactctgttgcccaggctggagtacagtggtgggaaccttggttcactgcaacctccgcctcccaggttcaagtaatcctcctgcctcagcctctcgagtagctgagactacaggtgcatgccaccacacccggctacttttttgtattttagtagagatggggtttcaacgtgttggccaggctgatctcgaactcctgacctcaagtgatccactcgtctcaggattacaggggtgagccaccgtgcccggcctgcctcaggttgaattataccttaagtctcatccatatgtgatttagatgatactcattttaaatttttcatttcgttttattttttttaagtgacagagtcccactgtcttgcctgggctggagtgtagtggtacagtctctgcagcctcgaactcctgggctcaagggatcatcccacctcagtctcttgagtagctgggactattcaagatgatattcagatgaaatgtagactggacttaaactttaaagttgatggtgaagtgagttaaaacttttgggggtattgagatggaatgaatgtatttcgtatgtcagaaggacatgaatttggggggcaccaggggtggaatgctatagttttcttttcttttcttttctttttttttgatatagagttttcctcttgttacccaggctgcagtgcaatggcgcgatctcggctcactgcaacctctgcctcctgggttcaagtgattctcctgcctcagcctcccaagtagttgcaattacaggtatgtgccaccacacccggctaattttgtaattttttttagtagagatggggtttcaccacgttggtcaggttggtcttgaactcctggcctcaggtgatccacccgcctcggcctcccagagtgttgggattacaggcatgagccactgcgcccggcctggaatgcgatatagtttgaatatttgtgtgtctccaaaatttctgatgacacccctcagtgcaatagtattaagaagtattaagagtattaagagagccccgccctcatgagtgggattagtgcccttataaaagggcttgagggagtctattagtcccttttgcctttctacccttctgctgtgtgtgtgaggacacaagatgttgtctatggagtagggaaagccttcaccagacactgagtctgctggcacctcgatcgtagacttcccagcctccagaattgtgagtaataaagttctattatttatamattacccatgctaaggccttttgatatagcagcaggaacaggcgaaggcagcactcgacataggatgcacgagggagatagagcgtgattgcgtctgctgaagtgcagtacctaccacataaatgacagctgtgacctgaaatcaaagaggtcctttaacaaaactagtgtttagatgctaattatcatgcatatattaaagagccaaaatgcagtcacatgtggtgttttcttcaccctgcgataattctttagtgccttttctttacaagtttgtgaaactttgaggttcttctcccacagccctcaacagtgttacccacagttcttgttttgccctttgtctcataaaatgagacaaaagaactgaagaaatctttcctctttttcctctctgcaaaaggcttcatagaagattggcactctgttggtgtaattgggtagattttattcaggtttattgggtagctttattcaggttttctgttttgtttgttttctggtatcagttktggcaagttacgtttttctaaatccttcacactgtctaaaatttcacacttgtgggcatgaagttgtttacaatgttctttctcttaaaaacaaaatmtttctgagttagtagtgatgccctattttgataaaagatttttttaaaaatggctttaggctgggcatggtggctcacgcctgtaatcccagcactttgggaggccgaggcaggtggatcacaaggtcaggagatcgagaccatcctggctaacacggtgaaaccctgtctctataaaaatacaaaaaactagccgggcgtggtggcaggcgcctgtggtcccagctactcaggaggctgaggcaggagaatggcgtgaacccaggaggcggagcttgcagtgagccaagatggcgccactgcactccagcctgggcgacagagcaagactctgtctcaaaaaaaaacacaaaaaaaggcttttttctttttcatggatcagtcttgataaagatttatacatatcacattaattttttcaaagaacctactcttggctttattgattttctctattgtatcattattttccattttgttaatttcattaaaaattttttttcggccgggcgcggtggctcacgcctgtaatcccagcactttgggaggccgaggcgggcggatcacgaggtcaggagatcgagaccatcccggctaaaacggtgaaaccccgtctgtactaaaaatacaaaaaattagccgggcgtagtggcgggcgcctgtagtcccagctacttgggaggctgaggcaggagaatggcgtgaacccgggaggcggagcttgcagtgagccgagatcccgccactgcactccagcctgggcgacaaagcgagactccatctcaaaaaaaaaaaaaaaaaaaaaaaatatttttttcacttccttttcccttttgtttgggcttcttctgttgttctttttctaacttcttgagttgaacccttagctcattaattttcagtctttctttttctttattttcagtaagcaaatgcttctttaagtaatcatttaagcctctacatttctaagaatctttttaactgtgtctctaaagttttgggatgtggtattttcataattgcctagttttaaaatattttcttataatttcttttttggcttgcaagttatttataaagtgtgctttccacgatttcagtcataggggttttaaatgctatctgttggttatgaatttctaacatagttgcattgtagtcagagcatgttgtctgtgtgacacccattcattaaggtttattgacattttttctatggtctaccgaatgtttagttttgtaaatgttcctgtgtacttgagaagaatatgtatttgctaatttttggatgcagcgttctatgttcaaatctgtggtcttttgaaacagtcattactgagagaatcatgttgaaatcttctacgatgaaggtagattgtttagcttctctctatacctttcgttctgtcagtttttgctttacatatttggaagctgctttattaaacaagtttagtatagtgttgtcttccaggattgaactctttattattatgtagtggctctttttatctcaaacaatgctttttgcctaaatgtctatttggtctggtattaatagagctattccaactttcctttttttactattatttttaattgtggtaaaatatatgtaacatggaatctaccaggttaataattttttttttttttttttttgagatggagtctcactctgttgtctggttggagtgcagtggcacgatcttggctcacggcaacctctgcctctcgagttcaagtgattctcctgcctcagcctcccgaatagctgggactacaggcacacgcaaccatgcccagctaatttttttgtatttttagtagagacagagttttaccatgttggccaggatggtctcgatctcttgacctcgtgatccgcctgtctgggtctcccaaagtgctgggattacaggcgtgagccaccgcgcctggcctattttaataatttttaagtgtaccagctttcttttgattcgttccaccatggatgtattctaccttacttccaaattccgtgtgctcttatattttagataggcctttgttaaacataattagttggagtttgttttgtcatccagcctgagggactgtttaactatgtgttaagtccatgtatatttgtgattactgttctaatagagtttgtttccaccatcatgttttatatttgtttattgtcttgcttttttctgtgtatccttcctccctcccttccttccttcttttgggttgactgaactttagaaaaattacattctttactctctactcgtttagttattgcaccctctatttctgattgtttggtggttacccataaaaaatgctaacatgcattctaaacagtctaaaattgtttactacttccctccttcccaaggatacaaagatcttagaatactgctaactaaaatcaccttttggctgggcgcagtggctcacacctgtaatcccagcactttgggaggccgaggcgggtggatcacctgagttcaggagtttgagtccagcctggccaacatggtgcaaccccgtctctactgaaaatacaaaaattagctgggtgtggtgatgtgcgtctgtagtcccagctgctcgggaggctaagcggggagaatcgcttgaacccaggaggcagaggttgcagtgagccacgattgcgccactgcactccagcctgggttatacagtgagactccatctcaaaaaaataataatgataataaaataaaaaaatcaccttttgtcattctgaaagttatttttgtccagtattttagttccatctcatttttcctctgttaaatcatttattagtactattgcttgatataatcaacatttgtctgtatttatgcatgtttaccagtgtctttgctcatttattctttgatctagctttctttggagataacttttcttttccttgaagcgcccattagaaaagtgctttcagtgagtctctctggtagcacatgctctcagtttctgtttgtctgagctgtctatttcatccctgttcttgaattatsatttgagctggttgaccctttgaagttattgcttgttgactcccctcggtgcttctaagttattatgtcacagtttctggcttccactgttgctactgtttaattgttattcttcatagagaatttgtcttttttgtgggggaggctgtttttaagatcttttcagttttggttttctgaaattttactatgaagtacatatctagagatgacttctttaaatgtattctgtttgggatttgtggtgcttcctgagtctgaggattcacatcctttaacattctggaaaaaatcttggctgttacagtgtcatatattccatctccctcatttgctctaccttttgcctttttttttttttttttctgagacaggatcttgctctgttgtccaggctggagtgcagtggcacaatcctggcttactgcaacctccatctcccaggctcaagctatcctcccacctcagcctcctgagtagctgggactacaggcacacgccactggacccagcctatttttgtgtttttggtagagaaagggtttcaccttgttggccaggctagtctcgaactcctgagctcaagtgatttgcctgcttcgacctctcaaagtgctgggattacaggcatgagccaccatgcccagtctactttttgcctttttgaatgccattggtgatataatagtccatttcactctctcttccatgtctgttacgctttttttcttatttcccactttctgtctttttgtactgagttgccattatttttctcctgttcttttcaattcatgaattgttgcttcagatgtgtctaatgtacgattacttcatactttgggttttaagattaggtaatacacgtaccaagatgcraaaatcaaagtgatggaaaatatatacagtgaataatccttctctggctctttccccatttgctccagtccaactgacctccataggtgcyactgttgttttttttttttcctaatttatttggtggcctctcagagttttatcatgcaaataaaagcaagtgcagacataaatagttttttattctcctcctttctcacacaaaagaaccctattatacatcttgctgtgtactttgtctttatttttactgaatacagtttggaaatcttaccttgtagcacataatttcctcaatctttcatttaaaaaaaatgttgcatagtattttgttatatggatgaaccgtaagttattgggccagccttttaatgatggccatttgggttatttatagtcttttgctctaatgaacaatgttgcagtaaataaccttgtacacgcctccttttggacatgtggaggatatctgtagaataaattcccaggaattgaattgctggaacagaaccttacacatttttaattttgtaataaatttgctataaatagcccccataaggacagcaccagttttcactcttaccagcaaagcataagtggcctcatttccctcagtcttacctatgacatttttttgtttagttaatttttgcttttaatgatttatgtgtaaactctgtttcattctttttcaaaatttcatgactatgtcttctagttattgaaacaaattttaaacatgtcaacgtattcattttgggttttatatctagttatgccaacacataaaayctttggtgcagctcattctttatcttgtyatacagctgaatcttcctggttggtggattgtttccttgagggttttgcttgcaatgttagattgtgagctcattcttggctgcccttcacctgtgggaatcctgcaaagtttaggattgagaacattcctccaaagtgggtttgcatgtgcttttatgagacacttcccgtttttaccgactcagacctatttatgcttattttttggcttggcatgttctgactcacgcaagtggcatatgggaaggtagacctgtggttctgatgtttaaggagagaccgtccttccactcagatttaagactgagaaaaatgagtttttttctggactccctatcccagtaaatagatccttttaacagcctatcctttgattgacattattagccctttgagtatttatttagttttttacgtggagtggtctcagcttcaattcccctactctgcaaccctgcccagccttatttcctgttgctcgtgtggtcaccgtagcctgaggttctggcttccctggccaggcctgtgtcctcagggtatccctggctgttggcctgctttaccctctagtttttgcttctttattatttttggctgcttagaatttcccttacttttttccaattttgtttatgctttttgatatatgtatttaattctgtctttctaggtaacagaagtgggttttctcatagaaagcttttaaggatagctactctgtaatatttgttctttattctttcagtcagtgaatatttattgattgcctactatgtgctagattattctgttctttctgttttactttaaaagactcaaaggactctggtaggtrtagcaaccactagttaattcagatgaaggagtttttttgtttgtttgttttgtttgcttgttttttcctgttttaacatagagatctttttcattgttgttgtagagagggagtctcattatatcacccaggctggtctcaaactcctgggctcaagggatcctcccatctcagtctcctgagtagctgggattataggcatgagccaccatgcccagctcctagcacagagatctaagcccatggtggtgagggctatgaacaagcctatggtggttacaaattcataccgacaacattttcatatgagattgacccaatttagggagcacaaagagagcatttctaacacctttgatttgaggtctaccccgccacatcaactctatcagctaaccaaacaagaacctagaatgcgaatgtgcatgttgtggaaatgagtagtagaagtagaatctcccgctgtaatgactgaatgtttatgtttctcccaaaattcatktgttcaaatcccaaccaccaatgtgatggtactaggaggtggagcctttgggaagtaataggctatgagggtggtaatcaggtcataatcccttatgaatggtgtcagtgcccttattagagagrctccagaggactggaatgaaatgaggagacagccgtctgcagctcagaggagggcccttgccagagcccagcaagctggcaccctaatctcagacttctggcctccagaactgggagacatcaatttctgttctttgaagtcacccagtctgtggtacttctgttatagcagactgaacagatgaagagacctgcatttgttttgttttaaatcaatggtaacactgaggattgctataaggattaccgtaggaatctccccaaatgaacctatacttagaggaactggaaagacatcagggtccccttctctcctgtcctttctgtatctcctgttcagattttgtaggcttttacctccctttctttctcttcttcattcttcccttttaccagattgacttcttgcccctcatttgcttcaggagacccatggtagctgtttagaaatggcagccccartcgtctcatttggctccatgacccccactcttgattttgtctgacacagactttacagtttacaaagaattttgtgtgtgttatttcatctgcacctaacaatgttgtgacatatgcaaaatattgttatccctattttttttttaattaaaaaaactgagacccagcaagaagtacttgcccaatgttatacaaccaacaagtggcagagcagggagcagacctaggttttctggcttgaggccagtgctctcgcaggagcgcagctcatacagctgtctagcaaatccacgttcaagtgaaattccaatgtctggaaaaactggatttctaactcatccctgagctcccagttttctgatatttctattaaagaacagtgggtctgttacttctctgtgagagcaatgcccttagattatacagtttaaaaatttggtgtgggttttgtgaatgttttgacagtctgcctaccatttsgtctggccagccagccatgctgagccatggctggggttttttgatggattgctagtggccaagggcttgtgaaaacataaatgtctcactgagcgcaaacctgaatggaaaaaaagaaaagaagttctgagtaagagtctgactaatgacttcttggaagaaactgaacagtgtctgagactttttcatctgcctttagctagcaaagtttcttccgaaagccccacagccccacgcatttgactagcactggtggatgtgtacattcatccaccatgccacgcattgatggagtctttaatgaacacatactatgcaccaggtgctagtaatcatagagagggctacaaagacacataaaatagagttccatccttaaaggagcctaccatccaaatatacattttggcatcataactgaacttatagttctgggagccagagtgcctggtcaaaattctggctctactgctttctactaacaacaattaaccttgtatccgagtatttatctctttaagctgcagtgtcttcatctgtaaaataagaccaacaaaggtacccatccatctatgcctctaactcagagcactgctttgaagatgaaatgaggtaataatgtgtttaaagagcttgacgcagagtaaaagatcaaaataaaactgaagtcattggcataaaaccttaaaggtggtttgagatgtgtggcttagcaatgaagagctaccgtggttcggaggggagcagtgggtttgggtctctatgttaccagaacaagatgcatgcgaaggactggcaggtagcaaagactgtgcagaggttttcagggaggagaacaacaggggcaaaagcatggagacaaaaaagagcgactcacatgaaggaaacagcatgtgtttctgggttggactaggatgtagggataaatgagtgggtattaatcattataactgtaagcatcccatgtttaacatgcactctctgccagacaccttgtgaatttataattatcatgtaaattaatcctcccaacaacccatgaaatcgcctcataaaatcttgaaacttgccagctaaatatccttctaggacaaagtctcacacagaggcaaaatggctgggactagactctaaactgagcaagacagggagccatgtacagataaggtccagacaaaactggaggaaggcgacagaggaagtcattcccagaatcttcaacccattttaaagacatttttcagtacaacagaagagggagccctagagtcacgaatctaggccaagaaatcttttcccattctccccattgaggactgcccgaaaaactatctcacttaaacatacgtaatgcaaaaggattgcagaggagaaatccagtcccattcagtttttkttttgktttgttttgttttgtttttaaagaaaaagaagttgattagcatagtaacagatcatcaggcaatgatctctggaaagacatgccctacaaaatacataaaatttttcatttgatatttttaaatgaagtagaagagtttttaaaatgacagaatttaggaaactaaagcataagtcaggattataaaaattaagagatgagataattggayacaaggaaaatttgaaaagagctcacacagaatttagttaggaaaaaaccatttttcttttctaaaaaaaacctctaaccattttagaaataaaaagaagctagaatgaataaataacataaataatgtcataagagaaatagaagatgaaacagaggaaattaaaaaaatcaaaagtggagactggtttaaaaaaagatataaaggtgatagatatggaagatagagaagatccaacccatgtataaaagagaccttaaagaagaaaactgaagtaatgaaacagaataaatacatactgtagtgaaatatgttaacatacctctctttttaactgataaaacaggtggacaataaaatcagtaaagatacaaaaaaattgaacaatgcaatgataagcttgacccaactgacatatataggacactgtacccatacaccaaagtgttgatgaaaaggctaaactttgtaaaatatttaaagaggcttattcagagccaatatgagtgaccatggcccaggatacgttctcaagaggtcctaagaaagtgtgcccaaggtggttgggctacagtttggttttatacattttagggaacaagagttgcaaggaaagacataagtcaatacatggaaggtgtacattggttcagcctaaagaggtgggatgtcttatggggaggggactgcttccaggtcatataggtagattcaaagattttctgattggcaattggttgaaagagttaagctttgtctaaaggcttaagaagtcagtagaaaggaatccttgagctaagacaagggggttgtggaagccaaggcccttgttacgtagatgaagtctcataggtggcagcccgcagacagcatgtgatgccataccagagttaggttggaattttgtgttttattactacaaagagtctgttttgtcggtcttatgatctctcttttaatattaatgctggccagttgtgcctaaactccaaaagggagggggcataatgaggcctctccaacttcccttcccatcatgatttggaattcattttttcaggttttccttggcccagagggagtccattcaatcagttgggtagcttaggattttgtttttggtttacaaaagaaatatgtctttttttcaagtgcgtactgaacatttacctaaattggcaatttactgggccataaaatatctcaaaacatttcaatggattaaaaatttacagagaatgttactcagtggattaagcaagaaatcaataacaagaacaaaaaaacaaacaaacaaaaaatcaaaatgtttgaaaatatacaagggttaaattacatttagcctaaagctgcctccttacatagttcaagtttggcctaaaggtttctcagtaagtaatgaactgtaacctaactggatgtgtaaacagactataacctactcttttattttattttatttttttgacasagagtctcactgtgtcacctaggctggagtgcaatggcacaatcttggctcactgcaacctccacctcccaggttcaagtgattcttgtgcctcggcctcgcaagtagctgggattaggtgcgcaccaccatgcccagctaatttttgtatttttagtagacatggggtttcaccatgttgtccaggctggtcttgaactcctgacctcaggtgatccacccgccttggcctcccaaagtgctaggattataggtgtgggcgaccatgccaggccttgtaacctactcttgtaacaagtaggtcttagccaatcacagcagtcatatttcaaccacttacaggcagccaatggttcaaaccatgctcagataaggcaaacgcttagttsccttttggattggctgccaagcaactaatctggctgttcctgcgtctcacttctgttttctgtatttcactttcccttttctgtccataaatcctttccaaccaccagagtcactttgaacctcttctggttctagggactgcccaatttgtgaaatgttctttgctcaattaaactctgttaaatttaatttgtctaaaacttttcttctaacaccaatatccttcaaaataagttccaaatcaaagaataagtcagaaaatacttttaactgaatgataaaaatatgatacactaaaatacatggratgcaactaatattatgtttagagggaagtttatggtcataaatgcacatttcagaaaaggagaaagatttaatattgtaaaaaaacaaaatatgttactctaaaatatggttttagcagatcagaatatgccactccaaaatatgcctctggcataagaatgattttgagctgattattattatttatttatttttgagacagagtctcactctgttgcccatgctggagtgcagtggtgcgatctcygctcactgcaagctcygcctcccaggttcacatcattctcctgcctcagcctcctgagtagctgggactacaggcacctgccaccatggctggctaattttttttttttttttgtatttttagtagagacggggtttcaccatattagccaggatggcctcgatctcctgacctcgtgatctgcttgtctcagcctcccaaagtgctgggattacaaatgtgaatcactacgcctggccgagctgagtatttttgatggcagtggctgctgccatcatgctggctgcagcagggaggcacggctttggctgcacactccataaagctggtgggagttgggaggagagctctctgggtgctgctgcaactgcccaaccagcagcttcagacccaggcctcctgctctacagagcacacaggagactcaccctcctgggtggggctacagccgtccaaattgcagctgtgctctttgaggaggtctgggagcaggcaggatctgccctcctgggtgtggctgtgaccgccctcccaggtgcaggagctggtgtctctrcagcctgcaccctcagtggccttaggaaggacactcctccatccctccaagctcagaggtgtcttttcccactgcctggcttctcttcactcatggtgcctcctctgatcttggagggggtgttggggccaagcccaggggccatgaatggcagtgggaggcaaattgatttttgggtggaaggaggcaggtccccagtaaggccacaccttcaggccagggaaggtctgaaggctrgggaccgggctgccagtcctgcagattggcagactggtggggggacttgtggtgcctcttctgggcctcccatggccacccagggaccaactggcatgtacttccttccctccaaggcccataaaagcccagggctcagccagagtggggcacaggacgaagagggcggagatgatgggaggaccacctgcaaagaggagtactttctctgctgatagctgcagagacctgcagaaatgtccaaatgacctgcctgcagagaggagttatcctctccagggcctcctttttgtggagagctgaacactggatgggatgacctgcctacagagaggagctacccattcctctaagctgttctaacactaaataaaactcttcttcacccttcacttgtctgcatacctcattcttttggatacaggacaagaacttgggcaatagtgctgtggccacagaggtttctggccagaaaagtcaacaccctagagatcccttaaaattttgagaaactgcagacataggagaagctctgaaaacacagtaaaaattacccttttataagggaaattaaaagccataaaggaaatctccatttgtaaagatgtttcctgctcagtaccagaaagagaagaatgatgttaaatcactggaaactcttatcagtggagaaggtatcaacttaaatctgcctaacaaaccttatcctattttcttttcttttctttttttttttttttttttgagatrgggtctcactttgtttacctaagctggagtgcagtggcatgatctaggctcactgcaacttccacccactgggttcaagcaagtctcctgcctcagctgggattacaggcatgtaccaccatgcccagctaatttttgtaattttagtagagatggggtttcaccatgttgcccaggctggtctcaaactcctggcctcaagtgatccgcctgccttggcctcccaaattgctgggattacaggcatgagccactgcacccggcttgagattttcttgggcatctccccacagctggccttcttcacacccttgtatttttgttttagctgaagattatatctaagcctgaactcagagccatctctttgagatttactcatttactctaggtatcttatgtatgtttgaccataaacaagtctgttgcagtatacatggtaagtcaatacatcaacactgagagttgcatcagagaaaaagttttaatcatagggctgcccagcaaggaggcaagaggaaacttcaaatctgcctcccagaggagttgggggttagagattttaaggagtttggagtggccaaggtgtggagattgttgattggtcaaagagtgcagcgtgaaatcctgggatggggagatgaagaaactgcattctcatgttgattcagctcctctgtgggagtcttcaagctgatgggcatcagctgttcagctggaattcaggatctgaaaacatcttaagtaattcttttttttttttttttttttttttgagacggagtctcactttgtcacccaggctggagcgcagtgatgtgatctcggctcactgcaagtccgcctcccgggttcacgccattctcctgcctcagcctcccgagtagctgggaactacaggtgcctgccaacacgcccggctaattttttgtatttttagtagagacggggtttcactgtgttcaccaggctggtctccatctcctgacctcgttttnnnnnnnnnnnnnnnnnnnnnnnnnnnnnnnnnnnnnnnnnnnnnnnnnnnnnnnnnnnnnnnnnnnnnnnnnnnnnnnnnnnnnnnnnnnnnnnnnnnnnnnnnnnnnnnnnnnnnnnnnnnnnnnnnnnnnnnnnnnnnnnnnnnnnnnnnnnnnnnnnnntgatactgtgactttaaattaaaagaagtgccgggctcagtggctcgtgtaatcccagcactttgggaggccgaggcgggcggatcacataaggtcgggagttcgagaccagcctgaccaacatggagaaaccccggctctactaaaaatacaaaattagctgggcgtggtggcacatgcctgtaatcccagctactggggaggctgaggcaggagaatcgcttgaacctgggaggcggaggttgcagtgagccgagatcgcgccattgcactccagcctgggcaacaggagtgaaactctgtctcaaaaaaaaaaaaaaaaatagataaaaataaaaaaaaagataaattacaaagaagtgggccaaagtgcagcctgcttagtgctcctaatgcttaataatgagtatatttctgcccagaacactgcatgtatttcttgttaaccctgaaaggatggttttatatgcataaagtatatgtgttattaaacttctgtttgttattctcttgtcactcttttgttccagggatctgtcctaactaagaactatgaaggtgtaaaccaaaataaaatcctaaaagctgggcatggtggcttatgcctgtaatcctagccttttggaaggccaagatgggtggatcacctgagctcaggagtttaagaccagcctgggcaacatgaaaccctgtctctaccaaaaacaaaaacaaaaacaaaaacaaaaaacaactgggcatgatggcatgtgtctgtagtcccagctacttgtggggctgaggtgggaggatcgcttgagcgcaggaggtggaggctgcagtaagccgagatcgcaccattacactccagcctgggtgacagagtgagactctgtctcaaagaaaaaaaatcctaagtcccccagtagactgaatgaacccttttggccaaggggatcctagggaaacctgaaaaactcaactctaggccatgacagtaagggaggtcagacacacctttttatacctcctcccttttagagtttaggaacaactgaccagcattaacataaaatagagatcataaagctgacaaaacagattatttgtagcaaattccagcctgactctgggataacatcacatgacagatagcagaccctgaaggaaataaaaatattttagtctaaaatataattatttgacatattttaaaagagtccttcaaagccatcttttcaggaagcctgctacctggaggcttcatctgcataacaagaaccttggcttccacaatcccccttaactcaagcatttctttctactgacttcagatttttagacaaagcttaagtctttcaactaattgctaatcagaaaatctttgaatccacctatacctgtaagtccctcctttaaaatgtcctgcctttctgggctgaaccaatgtacatcttctatgtattgatttatgtctttgcttgtaacttctgtcccccacaaaatgtataaaacaaaactgtcaggcctctgagcccaagcctgcacatatacatccagatggcctgaagcaagtgaagaatcacagaagaartgaaaatggccggttcctgccttaactgatgacactaccttgtgaaattccttttcctggctcagaagctcctccactgggcaccttatgtcccctgcccctgcccaccaaagaacaaccccctttgactgtaattttccactacctacccaaattctataaaacggccccacccgtatctcccttcactgactctctttttggactcagctcgtctacacccagatgattaaaaacctttattgctcacacaaagcctgtttggtgatctcttcacacggatgcgtgtgagaaaaactattacttgactactttgggcacaccttctcagaacctcttgagacttttccgggccatgttcactcataatgacttagaataaaccttttaaaatatttacagagtttggctttttttcctcaataaacaatagagagaaaattatttttcctcccttacaatatcaataatcaaagtatacatctaaagatgtttaaaagaggacaacagattaaatccaaacagtggaggaaggaaatactaaagagaagagcaaaagttaatgaaacaaccagctgtcatggctcacacctgtaatcccagcattttgggaggctgaggcgggtggatcacttgaggtcaggagttcaagaccagcctggtcaacatggtgaaaccttgtctctactaaaaatacaaaaattagccaggtgtggtggcacacacctgtagttccagctactcaggaatctgaggcagcagaatcacttgaacccgggaggcagaggttgcagtgagctgagatcatgtcactgcactccaggctgggagacagagcaagaatctgtcttgaaaaaaaaaaagagagagagagagaaggtacaaattagcaatatcagaaatgaaaaaggagacattactacagcacctrcaaacattaaaaaggtcataaggagatattatgaacaattttatgccaataaatttgacaatttagataaaacagtacatttccttaaaacaatagcttaccaaagctaacacagaaatacattaaaaatctgggtaacctatagccagaaaataaatgttttctttttaaaaaattgagacttgtgtaccataagacttacccttttaaggtgtaagattcagtagcattaagaacattcacaatgttatacaatcatcatcattatctagttccagaacatttttactatcccaaaaagaaacctactaattagtactctttccccatttactcttcccccatcctatccccatggcaactgttaatctactttctttctctatggatttgcctattcttgacacttcatgtaagtgggatcatacaagttgtagtttgtttgtttggcttcttttacttagcataatcctttcaaaattcatctacgttgcagaatttatcagtatttttcttgatatttctgaataatacttcaytgtatggttatacctcataagttgatgggttgtttctattttctgattattatgaacaatggggctatgaaccttcatatataagctttgtgtgaacatacactttcattgctcttgggtatgttactggaagtggaattgctggttcttatagtaattctaggtttgacatttggaggaattgccaaactgttttccaaagcagctgcaccacttcacattcccacgaaaaatgtatgagagttccagtttctccacaacctagccaattatcttagtcagtctgtttgagctgctataactaactaccttagactgggtaatttataaacaatagagatttattgctcatagttctggaggctgggaagtccaagatcaagacaccagcagatttggtgtctggtgagggctcactcactccttcatagatggcaccttcttgttgtgtccttacatgtgagaaggggcaaacaaactcccttggggcttcttttataagggcacccatcccattccttagggtagagctttcatgacytaattatctctaaatgccccatttcctaataycatattgggaattaggtttcaacatatagattcaggggctgggggacacaaacattcaagaccacagcattgtctttttggttgtagccatcttagtgggtgtgaagtgacatctcattttggttttgatttatgtttccctaaggactaatgttgaacacagttttatgtacttattggtaattttgtatctgttatttggagaaatgtttattcagatactttgcccatattttatttcggtatttgtctttttatttagttgtaattttttaatgtattctggatactagatccttgttagacatatgatttgcaaaaactttttcccactctaggttgtcttttcacttttttgataatgttctttgatgcacaaaagtttcaaattttgataaatttcaatttatttatttttttgcttatgcttttggtgtcatatctaagaaacagttgcctaatctgaagttgaaaagatttgggcctatgttttcttctaagagtcttataatacagttgacctttgaacaagacaggtttgaactgtgcaggtccacatatatgtggattttttccaataaatatattgggaatttttttggagatttacaacaatttgaaaaaactcacagatgaaccacatagcctagaaatattaaaaaaaaaacataagaaaaagttaggtatatcatgaacgcataaaatatatgtagacacagtttattttattatttacaaccataaaatgtacacaaatctattataaaaagttaaaacttatcaaaacttacaaatacaaacactgaccttataaggcaccattcagagttgagagaaacgtaaacaaatgtaaagatacagtattaaatcataattgcttcaaaacaactgtagtccatactgcactattgtgataactgcatagccacctcctgttgctattgcagtgagaccaagtgttgtgagtatctgcctaaaacaccatgtgatgctaatcactccatgtgggcagctcatctctccagtaaaattgcatatcacagtaaaaagtgatctcttggccaggtgtggtggctcatgcttgtaatcccagcattttgggaggctgaggaaggaggatcacttgagcccaggagtttgagaccagcctgagcaacataaggaaaccctgtttctacaaaaaataaaaacaattagccaggtgttggcaccgatctgtggtcccagctactagggaggctgaggtgggaggattgcttgagcccaggaggttgaggctgccactgccatgatcatgccactgcacttttttttgggggggggagggggaaaaggtctcactctgttgcccagactaagtgagaatctctatggttctcatgttttgttttktttttaattgcatttagtgcaataccataaatcttgaataacaccaggggacccatatgaagtgccactagagatgctggaggtgttaccaagtattagagaaaagtcattacattacaagaaaaagttgaattgcttgatatgtaccatagattgaggtctgctgctgcagttgtccatcatttcaagacaaatgaatccaggataagggctatcataaaaaaaaaagagaaggaaattagcaaaattgttgctgcagccacaacagcaggcataaaaactttgcacttgttttgaaatacccttgtatttaatatttaaaatgcagcttttatgtgggtgcaggattgctgtaataaagacatacctataaactctaatatgattcaagaaaaagcaaaggcattacatgacaactgaaagcaaaaagaaggtgaaggatcaaaagctggagaacttaatactagcaaaggatggtttgatcatttaagccaaagaggtttggcttaagaaatgtcaagatgggatgctgagccgaagctggactgtactgctgccatcttggctcactgcaacctccctgcctgattctcctgccgcagcctgccgagtgcctgccattgcaggcgcgtgccgccacgcctgactggttttcgtatttttttggtggagacggggtttcgctgtgttggccgggctggtctccagctcctagccgcaagtgatctgccagcctcggcctcccgaggtgccgggattgcagacagagtctcgttcactcagtgctcaatggtgcccaggctggagtgcagtggcgtgatctcggctcgctactacctccacctcccagccacctgccttggcctcccaaagtgcagagattgcaggctctgcccggccgccaccctgtctgggaagtgaggagcgtctctgcctggccgcccatcgtctgggatgtgaggagcccctctgcctggctgcccagtctggaaagtgaggagcgtctctgcccggcggccatcccatctaggaagtgaggagcacctcttcccggccgccatcccatctagggagtgaggagcatctctgcccggctgcccattgtctgagatgtggggagcgcctctgccccrctgccccatctgggatgtaaggagcgcctctgcccggccgtgaccccgtctgggaggtgaggagcgtctctgcccggcctccccgtctgagaagtgaggagaccctctgcctggcaaccgcccagtctgagaagtgaggagcccctccgcccggcagccgccccatctgagaagtgaggagcccctctgcccggcagccgcccagtctgagaagtgaggagcccctccgcccggcagccgccccatctgagaagtgaggagcccctctgcccggcagccgccccgtctgggagggaggtgggggggtcagccccccgcccggccagccgccccgtccgggaggtgaggggcgcctctgcccggccgcccctactgggaagtgaggcgcccctctgcccggccaccaccccgtctgggaggtgtacccaacagctcattgagaacgggccatgatgacaatggcggttttgtggaatagaaaggggggaaaggtggggaaaagattgagaaatcggatggttgccgtgtctgtgtagaaaggtagacatgggagacttttcattttgttctgtactaagaaaaattcttctgccttgggatcctgttgatctgtgaccttacccccaaccctgtgctctctgaaacgtgtgctgtgtccactcagggttaaatggattaagggcggtgcaagatgtgctttgttaaacagatgcttgaaggcagcatgctcgttaagagtcatcaccactccctaatctcaagtacccagggacacaaacactgcggaaggccgcagggtcctctgcctaggaaaaccagagacctttgttcacttatctgctgaccttccctccactactgtcctatgaccctgccaaatccccctctgcgagaaacacccaagaatgatcaattaaaaaaaaaaaaagaaatgagaaaaagaaaaaaaaaatgtcaagatgacaggaagaggagcttctgctgatcaaaaggcagcagacgagtttccagatgcctttaagaaaatcattgtggaggctgggcatggtggctcatacctgtaatctcagcactttgggagaccgaggaggaaggatggcttgagcttaggaatttgagaccagccatggcaacatagtragatctcatctccactaaaaataaaataacattacatatgttagtaaggagaaaagtcagcatcaggatttactccaggaagggataaattaactctactattttgtgcaaatgcagtcagacatatgatcaggactgcctttatctataaggctgctaacccctgtgccatgaagagaaaagataaacaccagctgccagtctttttgttgtacaacaagaaggcttggacaatgagaaccctttctggattggttccattaatgctttgtccctgaagttaggaaacatcttgccagtaaggactgtcttttaaagttcttttgatattggacaatattcctggccacccagaaccccatcggttcaacactgaaggtattgaagtagtgtacttgctcccaaatacgtctctaattcagcccctagatcaggtggccataagaacctttaaggctcattacacaccacactctatggaataaaggattgtcaatgtgatggaagaaaaccaagacagagagaatatcacgaatatctgggaggattacaccattaaagatgtcatcattgctacagaaaaagctgtgaaagccatcaagcctgaatcaataaattcctgctggagaaaactgtgtccagatrttgtgcatgacttcgtaggatttatgacagagccaatcaaagaactcaaaacagagattgtggttatggcaaaaaggtcgggggatggtggtgaagggtttcaagatatggatcttggagaaattcaagagctaatagacaccacatcagaggaattaatagaagatgacttgatggagatgaatgcttccaaacaactgcaagatgatgagaaagaagacacagaacaaatagcgccagaaacaaattgacattagacaatctggcagaagcgttccaattattcaagactactcttgacttttacaacagggacattctacaggcactgaaactaaagcaaatggtggaagaaggcgtgggaccacatagaaacatgtttagagaaataaaaaagcaaaaaagtcagatagaaagtaggatgtatttctgtaaagttacactgagcgagccttcctctcctgcctccccttccacctcctcyatctcttctgcctctgtcacccgagacagcaagatcaaccccctccctttcttcagcstactaaacgtgaacatcaagaggatgaagacatttatgatgatacacttctattaaatgaacagtaaatatatttgctttttcttgtgattatctttacatttcctttctctagcttcctttattgtaacaatatagtatatgatatacacaatatatgaaatatgttaatcacctgtgtatgttaatggtaaggcttctggtcaccacctaatcacctcttaaaagtgccacctggtcccacctctttttttgtttgtttgtttttttaaatttgagacagagtcttactcactgtaacctccgcctcctgggttcaagcaattgtcctgcctcagcctcctgagcagctgggactgcaggtgtgcaccaccacgcccagctaatttttgtatttttagtagagacagggtttaaccatgtaagccaggctggtctaaaactcctgacctcaagtgatccgcctgtctcagcctcccaaaatgttgggattacaggcgtgagccactgtgcccggcttggtcccacctcttatactgtcccaatgacaattaaattccgacatgagttttggaggtgacacgcaaaccatagcagtcctgaagacaagaggtgcagcacaccgtgcaggtccacatgggaaagatgccagggagggcaggaggcagaagagaggagcaagggacagactggggccagagcctttcctggggcttccttggagagggaaggcaaggcaggatgaacagtttaggattggctgtgttgaaccatttcagtgggctttgggctctaggggtgtacccagccgtctgccacctggccctaggatgagtaaggcagaaggatgagtaaggcagagggaggagtgaggcagagggaggagtgaggcagaggtgtggctctgcgttggctagtttgcatttgaaagacccactcccggcagggccctttgctgtctttcagaattggctaattagttggaggggaggtctgtccccagttagaaatgtttttttttctttgtttttattttaaatttgatttttaggatgtcaaactattataatattgttatatacaaagttttggtgccgcaaaaggaatagcacttgaatataaaattttctttttaattctcagcaaggcaagttacttctatatagaagggtgcacccttacagatggaacaatggtgagcgcacacttggacaagggaggcggaagggttcttatccctgatgcacgtggcccctgctgctgtatcgttcccctattggctagggttagaccacacaggctaaactaattccgattggctaatttaaagagaatggggtgagtgctttggcgggagtcagggtagagcaggtagcaggtaattggaatgagttagggtggagcaggtgattggaatgtagggtggagcaggtgatcagaatgagtcagggtggagtaggtaattggaatgagtcaaggtggagtaggtaattgaaaaaggttgctttaagaggaagttaagtttaaaagtaggaggcaaataattgaacatactgacatattaattatttgaaaagaaatttagaactcatatctaacaatatgcagaaaatttaaaacatttacaataaagtttatttctggattctcatttcattttttttttgtcactcaggctggggtgcagtgtcgtgatctcagctcacggtaacctctgcctcccaggttcaagtgattctcctgtctcagcctcccaagtagctaggattacaggagtgtgccaccacatccagctaatttttgtatttttagtagaaatgaggtttcaccatgttggccagtctggtcttgaactcctgacctcaagcgatctgcttgcctccgcctcccaaagtgctgggattacaggcgtgagccaccgtgcctggcctggattctcatttctatcccattgaccttttatgtttatcctttggcaataccacaaagtcttagttacgatagcagaaaatccatttatttatttatttatttttgaggtagagtcttgytatgtcgcccaggctggggtgcagtggtgccatcatagctcactgcatgttccatggcgtmcctcttcaaactcctcgcctcaaaggattctcctatctcgacttcccacagtgctgggattataggcctgacctactgtgcctggctagaaaatcaatttaatcttttaaaaaacaaataaacacacacacacacacacacamacacacacacacacacaaacacaaacacattcctacaaagataactctaggcctaaaccgtgggtttcatccaaatatttaggggcaatataacattaatcttacctaaaactttccagggaaaacagttccttcattttatgaggtcagaatcaccttgatcacagaacttcacaagaatattataaaacataaaaattacaggtaagtctctctcataatcatagatgtaaaaattccaaaaatgttttagcaaattgaatccggcagtatataaaaaagataatctgacatgacaaagctgggtttattccagctttggaaaggatgcaaggatggcttattatttgggaatcaatcaacataatttatcatataacagagtaaaaggataaaaaaatcatatgataatctcagtagatgtaggcaaagcatgcaataaaatttgatactctttcatgattaaaaaactcaacaatttaagaatgagaattacaggtagcatcatacttgaagttgaaatattaaataatttttcttggaaaatggaataagaccagggggcttgctttcaccagctgtattcaacaggcactgggttgcatccagtataagcaagaaaaggaaataaaggcctatgattggaaagaaataaaacaatcattttttgaagatgacatattgagtaaattgaaaatggaaagaatctaataaaaaatgattcaattaataagtaaattagtaatgccactggattcaaagtagacataccagcaacaatcataaaatgaaatacaaagaaggatttcatttatgggagcatcataatacaacaaattcctagggataagtttagtgaaggatgactgctatacaaaaatctccaaaacacgtaccgagggaaatcatgtaagggagagatatgtcaacattcatgaattagaaaattcaagattgtagacaagtcattactccctaatttgatcggcatttgtaatgcaatcccagtaaaaaccctaaggttctgttatggaaatgtacatgcaaattctaaaatttatagaaaatataaagagccaaggctagtcaagaatagatagaaaccaaagctggaatggagaacttgtaccaccaaatataaagacttgttataaacctacgataactaagtcagtgtggtattagcataaatatagaaaaataggccaatggggctgaataaggtccagaaacmaatacccacatatggtcaccagaatggtgacatgcaagtcactgaaatgcaatgaaagaatgttcttttcaataaatggtagatgaaatttggatacccagagaggaaaaagatgtatcttgaatctcactgtaccccatatgaaataaattccagctggatgtagaactaaatgtgaaaaacagcaaatccataagaaaaaggcaaaaagcggccgggcgtggcagctcacgcctgtaatcccagcattttgggaggcagaggcgggtggatcacttgagcccaggagctcaagaccagcctaggcaacatagggagtcctatctctacaaaaaacacaaaaattagccaggcgtggtggcgcatgcctgtagtcccagctannnnnnnnnnnnnnnnnnnnnnnnnnnnnnnnnnnnnnnnnnnnnnnnnnnnnnnnnnnnnnnnnnnnnnnnnnnnnnnnnnnnnnnnnnnnnnnnnnnnnnnnnnnnnnnnnnnnnnnnnnnnnnnnnnnnnnnnnnnnnnnnnnnnnnnnnnnnnnnnnnnnnnnnnnnnnnnnnnnnnnnnnnnnnnnnnnnnnnnnnnnnnnnnnnnnnnnnnnnnnnnnnnnnnnnnnnnnnnnnnnnnnnnnnnnnnnnnnnnnnnnnnnnnnnnnnnnnnnnnnnnnnnnnnnnnnnnnnnnnnnnnnnnnnnnnnnnnnnnnnnnnnnnnnnnnnnnnnnnnnnnnnnnnnnnnnnnnnnnnnnnnnnnnnnnnnnnnnnnnnnnnnnnnnnnnnnnnnnnnnnnnnnnnnnnnnnnnnnnnnnnnnnnnnnnnnnnnnnnnnnnnnnnnnnnnnnnnnnnnnnnnnnnnnnnnnnnnnnnnnnnnnnnnnnnnnnnnnnnnnnnnnnnnnnnnnnnnnnnnnnnnnnnnnnnnnnnnnnnnnnnnnnnnnnnnnnnnnnnnnnnnnnnnnnnnnnnnnnnnnnnnnnnnnnnnnnnnnnnnnnnnnnnnnnnnnnnnnnnnnnnnnnnnnnnnnnnnnnnnnnnnnnnnnnnnnnnnnnnnnnnnnnnnnnnnnnnnnnnnnnnnnnnnnnnnnnnnnnnnnnnnnnnnnnnnnnnnnnnnnnnnnnnnnnnnnnnnnnnnnnnnnnnnnnnnnnnnnnnnnnnnnnnnnnnnnnnnnnnnnnnnnnnnnnnnnnnnnnnnnnnnnnnnnnnnnnnnnnnnnnnnnnnnnnnnnnnnnnnnnnnnnnnnnnnnnnnnnnnnnnnnnnnnnnnnnnnnnnnnnnnnnnnnnnnnnnnnnnnnnnnnnnnnnnnnnnnnnnnnnnnnnnnnnnnnnnnnnnnnnnnnnnnnnnnnnnnnnnnnnnnnnnnnnnnnnnnnnnnnnnnnnnnnnnnnnnnnnnnnnnnnnnnnnnnnnnnnnnnnnnnnnnnnnnnnnnnnnnnnncctcccgagtagctgggattacaggaaagtaccaccatgcctagctaatttttgtattttcagtagagacagagtttcgccacgttggtcaggctggcctcgaacccctcaggtgatcctctgcctcagcctcccaaagtgctgggattacaggcgtgagccaccgctcctggcctattatcttgtttttcatgccacatatataaaggaaatttgtcagttgcatcattcttgccatgaactctcattatacctttacatttaaaagttatcaggcacaaattaaccacaacctttttttctgagatggagtttcgctcttgttgcccaggctggagtgcaatggcgcgatctcggctcacagcaacctccgcctcccgggttcaagctattctcctgcctcagcctcccgagtagctgggattacaggcatgcaccaccaccatgactaattttgtatttttagtagagatggggtttctccatgttggtcaggctggtcttgaactcccgacctcaggtgatctgcccgccttggcctcccaaagtgctgggattacaggcatgagctgccgnnnnnnnnnnnnnnnnnnnnnnnnnnnnnnnnnnnnnnnnnnnnnnnnnnnnnnnnnnnnnnnnnnnnnnnnnnnnnnnnnnnnnnnnnnnnnnnnnngcgtgctcctgtagtcccagctagtcaggaggctgaggtgggaggattgcctctacctgagaggtggagatcacaccactgcactccagcctgggcgacaaagaccctgtcttaaaaaaaaaaaaaagaaaaaaggaaaaagtgaaaataattgtcccattataaaataagtacccttgggaggtagtgagcttcccatcactggggagatgcagacagctgctggygcctgagcactgggtagaggagtcggcaggggcggagtatgtgcactgggggagaagtggggcagatcagaccagtgcatgctgagattctactttttggagactctgcttytcactataaagtggcgttctgatattttagaygcttttaagttttttttttaaattattatttcttttttattatactttaagttctagggtacatgtgcacaacgtgcagttttgttacataggtatacatgtgccacrttggtttgctgcacccatcaacttgtcatttacattaagtatttctcctaatgctatccctcccccagcccctcaccccctggcaggccccggtatgtgatgttcccgccctgtgtccatgtgttctcattgttcaactcccacctatgagtgagaacatgcagtgtttggttttctgtccttgtgatagtttgcttagaatgatggtttctagcttcatccatgtccctgcgaaggacatgaattcatccttttttatggttgcatagtattccatggtgtatatgtgccaccttctcttaatccagtctaycgttgatggacatttgggttggttccaagtctttgctattgtgaatagtgccacaataaacatacgtgtgtgtgtatcattattgtagaatgatttataatcctttgggtatatgcccagtaatgggattgctgggtcaaatggtatttctagttctagatccttgaggaatcaccacactgtcttccacaatggttgaactaatttacactcccaccaactgtgtaaaagcgttcctatttctccacatcctctccagcatctactatttcctgactttttaatgattgcctttctaactggcgtgagatggtatctcattgtggttttgatttgcatttttctgatgaccagtgatgatgagcatttttacatgtctgttggctgcataaatgtcttattttgagaagtgtctgttcatatccttttcccactttttgatgggttttttttttcttgtaaatttgtttaagttctttgtagattctgggtattagccctttgtcagatgggtagactgtaaaaattttctcccattctgtaggttgcctgttcactctaatgatagtttattttgctgtggagaagctctttagtgtaattagatcccatttgtctattttggcttttgttgccattgtttttggtgttttagtcatgaagtccttgcccatgcctatgtcctgaatggtattgcctaggttttcttctagggttttttatggtattagggcttacatttaagtctttaatcagtcttgagttaatttttgtatacagtgtaagaaagggatccagtttcagctttgtacatatggctagtcagttttcccagcaccatttattaaatagggaatcttttccccattgcttgtttttgtcaggtttgtcaaagatcagatggttgtagatgtgtggtgttatttctgaggcctctattctgctccattcatttatatatctgttttggtatcagtaccatgcttttttggttactgtagccttgtagtatagtttgaagtcaggtagcgtgatgcctccagctttgttctttttgcttaggattgacttggtgatgygggctcttttttggttccatatgaactttaaagtagtttttttccagttctgtgaagaaaggcaatggtagcttgacggggatagcattgaatctataaattactttgggcagtatggccattttcacgatattgatttttcctatccatgagcatggaatgttcttccatttgtttgtgtcctcttttatttcattgagcagtgatttatagttctccttgaagaggtccttcacatcccttgtaagttggattcctaggtattttattctctttgaagcaattgtgaatgggrgttcactcatgatttggctctctgtttgtctgttattggtgtataggaatgcttgtgatttttgcayattgattttgtatcctgagactttgcagaagttgcttatcagcttaaggagattttgggctgagacgatggggttttctaaatataaaatcatgtcatctgcaaacagggacaatttcacttcctcctttcctaattaaataccctttacttctttctcttgcctgatttccctggccagaacttccaacactatgttgaataggagtggtgagagagggcatccttgtcttgtgccggttttcaaagggaatgcttccagtttttgtccattcagtatgatattggctgtgggtttgtcataaatagctcttattattttgagatatgttccatcaatacatagtttattgagagtttttagcatgaagagctgttgaattttgtcgaaggccttttctgcatctaktgagataatcatgtggttttgtcgttggttctgtttatgtgatggattatgtttattgatttgcrtatgttgaaccagccttgcatcccagggatgaagccaacttgatcgtaatggataagctttttgatgtgctgctggattcggtttgccaggattttattgaggattttcgcatcgatgttcatcaaggatattggtctaaaattctcttttttgtgtgtctctgccagactttggtatcaggatgatgctgacctcataatatgagttacggaggattccctctttttctattgattggaatagtttcagaagaaatgataccagctcctctttgtacctctggtagtattcagctgtgaatccatctggtcctggactttttctggttggtaggttattaattattgcctcaatttcagaaactgttattggtctattcagagattcagcttcttcctggtttagtcttgggagggtgtatgtgtccaggaatttatatatttcttctagattttctagtttatttgcgtagaggtgtttatagttttctctgatggtagtttgtatttctgtgggattggtggtgatatcccctttatcattttttattgcatctatttgattcttctctcttttcttctttattagtcttgctagtggtctatctattttgttggtcttttaaaaaaaccacctcctrgattcattgmtttttttgaaggttttttttgtatgtctatctgcttcagttctgctctgatcttagttatttcttgccttccactagcatttgaatgtgtttgctcttgtttctctagttcttttaattgtgatgtcagggtgtcgattttagaccttttctgctttctcttgtgggcatttagtgctataaatttccstctacacactgctttaaatgtgtcccagagattctggyacattgtgtctttgttctcattggtttcaaagaacwtctttatttctgccttcatttcsttatttatgcagtagtcattcaggagcaggttgttcagtttccatgtagttgtgcggttttgagtgagtttcttaattctgagttctaatttgattgcactgtggtctgagagacaatttgttatgattttgttcttttcatttgctgaggagtgctttacttccaatcatgtggtcaatttgagaataagtgagatgtggtgctgagaagaatgtatattctgttgatttggggtggagagttctgtagatgtctattaggtctgcttggtgcagagctgagttcaagtcctggatatccttgttaaccttctgtctcgttgatctgtctaatattgacaatggggtgttaaagtctcccattattattgtgtgggagtctaagtctctttgtaggtctctaaggacttgctttatgaatctgggtgctcctgtattgggtgcatatatatttagaatagttagctcttcttgttgaattkatctgtttaccattgtgtagtggccttctttgtctcttttgatctttgttggtttaaagtctgttttatcagagactrggattgcaacccctgcttttttttgctttcyatttgcttggtagatcttcctccatccctttattttgagcctatatgcgtctttgcacatgagatgggtctcctgaatacagcaccgatgggtcttgactctttatccaatttgccagtctgtgtcttttaattggggcatttagtccatttacatttaaggttaatattgttatgtttgaatttgatcctgtcattatgatgctagctggttattttgcccattaattgatgccgtttcttcatagcatcaatggtctttaccatttagcatgtttttgcagtggctggtactggttgttcctttccatgtttagtgcttccttcaggagctcttataaggcaggcctggtggtgacgaaatctctcagcatttgcttgtctgtaaagtattttatttctccttcacttatgaagcttagtttggctggatatgaggttttgggttgaaaattcttttctttaagaatattgaatattggcccccactgtcttctggcttgtagggtttctgccaagagatccgctgttagtctgatgggcttccctttgtgggtaacccgacctttctctctggctgcccttaacattttttccttcatttcaaccttggtgaatctgacaattatgtgtcttggggttgctcttctggaggagtacctttgtggtgttctctgtatttcctgaatttgaatattggcytgccttgctaggttagggaagttctcctagatcctaccctgaagagtgttttctaacttggttccattctccccatcactttccagtacaccaatcaaatatatatttggtcttttcacatagtctcatatttcttggaggctttgttcatttcttttcactctcttttctctaatcttgtcttctcgctttatttcattaatttgatcttccatcactgatatcctttcttccacttgattgaatcagctattgaagcttgtgcatgcatcacaaagttctcatgccatggttttcagctccatcaggtcatttaagctcctctctatgttgtttattctagytggccattcgtctaaccttttttcaaggtttttagcttccttgtgatgggttagaacatgctcttttagctctgagaagtttgttattaccaaccttctgaagcctacttctgtcaactcgtcaaacttattctccatccagctttgttcccttgctggcgaggagctccaatcctttggaggagaagaggtgctctgtttttttggaattctcagcttttctattctggtttctccccatctttgcggttttatctatgtttggtctttgatgttggtgacctatagatggggttttggtgtggatgtcctttytgttgatgttgatgctattcctttctgtttgttagttttccttctaacgtcagacccctcagttgcaggtctgttggagtttgctggaggtccactccagatcctgtttgcctggatatcaccagcggaggctgcagagcagcaaagattgctgcctgatccttcctctagaagcttcatcccagaggggcacctgcctgtttgaggtgtctgtcagcccctactgggaggtgtttcccagtcaggctacacaggggtcagggacctgcttgaggaggcagtctgtctgttcttggagctcaaacgccrtgctgagagaaccactgctctcttcagagctgtcagacagggacgtttaagtctgcagaagctgtctgctgccttttgttctactatgccctgcccccagaggtggaatccatagagacagtaggccttgctgagctgtggtgggctccatccagttcgtgctctttgtttacactgtgagctactcaagcctcagcaatggcagatgcccctcccttcatccagctgcagcatcgcaggtcgatctcagactgctgtgctagcagtgagcaaggctccgtgggygtgggacccaccaagccagkcatgggagggtgtctcctggtgtgccagttgctaggactgtgtatagctcagtatttggtcagaagtgcaccatttctccaggtacagtctgtcacggcttcccttggctaggaaagggaaatcccctgaccccttgtgcttccccgggtgaggcaacgcctcgccctgcttcagcccaccctccatgagctgcacccactgtccaacgagtgctagtgagatgaaccaggtacctcagttgcaaatgcagaaatcacctgtcttctgtgttgatcttgctggaagctgcagactggaggtcttcctattcggccatcttcgaagtgacctccracccttttatgtttgaatgctttctgtcaataaatgagggaaatgccattttaaatttatgagcagctttttcttttccttttggtttggggtagagttacaaggcaatttatctttggrgtaaatatagagcttttgttaaaaaacaaaaacattagcytttggagaygcaggrgtgcaggccagatctttgtgaccctgggctggagcctccgtttccacatctgaaaacaggggcattaatatccacctgcccagcaaatcagagggttactgtgaatgtgaaatgacctagtgggctgtaggcatcatggccatcttcaccttttgctcttaccctggtggtgagggctcagtctgtggtcacctggccctcaycctgctgtaactctgcttagggctctgctttcaggcctttgtgatgggagcgtgtttgtgcaccctatagtcatgaacagcatctcctctgtcacctgcatagctctgtacaattgtcagggggctttcatgctcatccatgatctcatttagaaaaaaaaaactgagcacagaatctaccaaagcccccagatctgggtgtcttattttgtaatttgctcatttaaagcaataatatcaaatgcagtcagattaacagccatttgttgaatccttacaatgtaccaggtgctctgytawacactttccatacatttcaccctaaccacagaccaagaaactaggtctatgatttccctattttccatatggagaaactgaggctcagagggtttaagaaacatcccttaagtcacagagctgttaagtggcagagccaggactcaaactgacctctgtctgaccctcatgagcatagcttacttgcctaaaacacttccagatcctatatgtatcaggggcagtgtgtggaatccccctgctgagggatctagtgcccaggtaggggtgcaaagctgctgaggttggagagaagatggaaaaaagaaagcggaatttgtcaacagggcacccctggctggagtgggtaccctggacaggacgttgggggacctggtttggaatatcagagcttacattctcccacagcatgaccttggcccattcaactccactttctgccttcagttttccctccagaaacactgttaggatcacagcggtcattatttgtggtgcagctgcttcatgattgcttagcacggcccatgaatcattggattcatctttagaaaatccctcatggaaggatgcaaaggcataagaatgataccatggactttggggacttgggggaaagggtgggagtgggtgagggataaaagactacacattgggtacagtgtacactgctcacgtgatgggtgcrcaaaatctcagacatcactactgaagaactcattcatgtaaccaaacaccacttgttccccaaaaacctatygaaataaacaaagatccctcataagtggatatcattattcttttaattttacagagaaggaaactgaggcacttaaaggtaaagtaacttggatcaactcacctggatggttagtgttggcaccagggcttgaacctgtgccacmtgatttcagagttttgtggaactgtggaattggtggagccctcaggttcccactgttatgggtcaaaggtatctgagtcacctggcagggaatccatacaggtctgtagcaacctcaattcttgcctcctccgaaagaaagaattcaactgacgggcataaggcagaaggagagaccaatgcamgtttcagagcaggagtggaagtttatttaaaagscttcagaaaaggaaagaaaggaaaacatgcttggaagaaacccaagcaggcatgtgaaggtcaagtgcagtgtttagccctgatcctaggactttctaggctggcccctttcccatgattcttcccttagggtgggctgcccacatgcacagtgyyctccttacacttggaggtgagcatgtacagtgtggttaggaagttgtatgcacacccatctgaagctttcttctstcttctggtggagtgccccctgaaggtaatactccaccattttgtctcttgatgcacatgcccaggctcattagtccaatacctgagattttgttggaagcccctttttgcttctccctggcacctgcattcaattaacactttaatgcaacaggtgtggaccataaggaaacggccactccctggtgctgactgccagtttatcacttttagagagacaatgtgacaacagccaaaccatcgctcaatgtagtaggtggaggagagctctctcttgccccatgcgtgtctgtctacctgtaacaccaccagctggagttccctggggccttttctcctgctaggatcagggaagtaatgagggaccctgggrcagaggaggaagccctaagggtaggagtctctgtggatggtcaccagggtaggggtcctctgtcaccaatggccaagagaaatggaggaggggttgtcagctaagtcagaggctgcccctcaatggcctctcccttattagtttgatatggtcctggaaacgcccacccctgccctggctgccttccttctccrcaacccaaggtacctggctcccctactaaccctcacccasatggtctcagatgctgcttctggatgctctggtcccatgcaaggcccagggaagaaaagcctgttgctcactgcttgcccttgtacttaaggagacrggaggcctcttccctctcagctcacaggctcacattagccccccacagtatctgttgggagacaattcccttggatcttttgtgtcgtgtcacagcttttgttccagactatcttttcaaggatttttgtacagcaaacagattggacatggccytggaagataaagatcttgtctccagggtagaggtcagatttgtttgctgtcccccagggtggggatggggcagtgtaggggaaatggctgcactttagtcaggagtaggctgyggtggccttccagtgcagcatgactcaatgggtttggagtgcaagcgcacaactccacacattatgtaaccatgctgcataaggtgcattaggtgaccactcatgtgagcttgtgcttggctcagagccactgttgtctataaaaggtatcattaccctgatgacgctgtatgtacagctcttgcccaggctcatgcccacagagagaataaagccatgtcaaaattgcctacaattccttaagtgtttttccagctacctgccacctgccctctgacttccctcggacccagtttggtctagaaactgacaattggcactgtaagcaggatcccaatgtaactgagccttctgtccccaccaattccaggttggccttgtggccacaacatagactgtggtactcggtggcagctgtgcttcttagatgggctctggtggaaacctgggtggcagtagatgggttcccctacaagcatggagaaggtgctgaagcagctggaagcacagagcatcaagaaggagcaaacctttgctggcagagttggatgggcatttttgactgtgcaatgggaagtacacaccctgtctctgagggatgtagtgcaggtaagggacctccaggctcaggtggggcacctggaggcccagctacagagctcagaaagagttagaggctgctgtgaatggggacctccaggtgcaggtggggtgcctggaggcccagctacactgatcagaaaaagaattagaggctgcaatgaatgcaggcctgggtccaccatttctgtctgaggcccccactcggtctgctattgaggaggaggaactcctgttgtgggcttacccaatggtctgtcagaagatagatcatgaacagccgatggggccccaagggcgggctcagggacccccccaccrtaatgcaacacacttcatatattccctgtaccccaactgagttgcagaaattaggcaagcagtgccaccagcatccaggggaactcctgactgcctggatgcttcgtttgtgggacaaggcagcagatagtatctcttgttctgtctctgagttggaagagctggcctccatcatgactcatccctccatcagtcagcagttgcaagtgagcaggwggtgagcaacagggcaaggtgaccacaccctgactgagtggctatgggcagccatatagactgtgtggaacaatgctggtgaaatacctaaaactgtgagcaaatggtagtcatgtgccaatttggtgcaagccatctttgagatgggtatgcggcaggctatgtttgacatgaatacttgggggccagatggtgaatgtttcacctcccacatgagggatctccttttgggttctgcatccccaagctgctgttctcaccccatacatagggcaccacatacatgaagtgatcactgctgtggyggcccrtggggaarcagaaggctgtcagcaagactgaggggtccatgctgtaaagaaggggaaggtgcctttcccataaagggctcacccatgggacaaaagggggcccaatgagtgacatgctcrtagatgtggatacatttgattttggccagggttgactgagagaaaattgataagcagctcaatgaagtacccttaactttgtggagacacttgtgtctacagcagcaattccagaaaatgctcgagggggagaaggacattactgcacgacccagtcccagctgggtgctccagatcaaagactacttgctgcagccaggtggaaatgtagagccttttctgtttgattagggaactggctgaggtgcccagcttggggggacatcggatgactggaggccacatgtaaaattggcaatccacyggtcccccaccaatgtacagtgggtaytggcactggtagatactggagcagacagtagccttgtttacgggaacctgggtaagtttctggacaaaactgcatacactgatgattatggaggctggtcagtgaaagtgaaactgatatctctacaccttggcatcggccgtttggctccccgtttatatactgtgtatgtctctcccatgctagaatacattctgggggtggacattttacatgacctggcattacaaaccayggctggggaattcagactctgagtgcatgtggtgaagccggtgccatgtggacatatgcatcaacagcctcaggtcctgccacaaccccgatgggttacttccacccattactactgtttgctgggtgggtagatggagataacagagacaattaaaaagctggagcaggtgcagataatgcatggcaaccaccagcccctacaattatctggtgtggccagttagaaagactgatggaacttgggagataacggtggactattgggaactgaataaagtaataccccctttgcatgcatctgtatcatcatgaatttgatggactgtttgatgatggaactgggacagtatcactatgtagtggacttggccttatgtacctgccactgttctctccacattgcccagatacccacataaccaggaggctctatgctctcgggttctgcaagtacagtgaaccccttggtggttctatcccctggcagtgactatccctcaagtgggtatcataactgtagaagcacaagttactgctcttgcagagcacactgctcaggctctgaattacatctgagtggccctcctcctgttaacggatgaagttgatcagatcagaaaggtatcgttgcaaaaccaaatggccttagacatagtaactgatgcccaatgagtcacctgtgctcttttaggaacacaatgttatacctttattccttacaacacttggcagagcaaaacagcaccctttaaggggtctcacaggagattaaggcagttgagagccttactgacaactcccagcagagatggtgggcatccttgggctctggcctatgctgggccctaatagtcataagtagcatagctgggatcctagtagtgagctgttgctctctgtattgttgttgtgggttgtggattcagaaatctgccctatggssatgtatccccacctggaagatgcccttggtctaggaggtggagtgtaagggaaatggctgtgctttagtcaggagtaggccgaggtggccttctggcacagcatgactcagtgggtttggagcgcaggcgcataactatacacattatgtaaccatgccatgtgaggcgcattaggggaccactcacctgagcttgtgcttggcttggagccactattgtctgtaaaaggtataattaccctgctgatgctgtacatatggctcacgcccagagagagaataaagccatgttgaaactgcctatgattccttgagtgttttcccagctacctgccacccagtcactgactcccctcagacctcagtttgggctagaacctaacaggcatgtttggccgcagcccccttttaagtttggaggtttcttctgctgtgtccctcagctgtgacacaaaactgtggtagcatccacatgggcctgcctccacattggccctgtgggaccgggagtgtgagggtaacatgaagatcttgctgcctgctgtcccctgagcaacagtgtccttagtctctgacccaggacttttgtgtcttcttccaggaaactggattagcttaaaagtagagcaacatctctcacacttcatagctctttacagttttgacaacaaggatgggtgctgatggagacatggctttctggaagaccccttggatctggtaacaaatgctctccccaagtggtgggtgagggttgtggagtaagggtcccccactgttcttattaatgaggctctcactttacctcaacaacacttttcttgttttttattattattattattattattattattattattattattatttttgcctcctgcaggtaggaggaggaagggccaaggagtccccaaagctgatagagagctccaggtgggtccaaactgagcctagctggccacagggctgctaaaacccaaagcatgggggcattgccctcccagcagatggactacctgaacttccactactgacatttcttcagactgataaacctaatctgtgtcttgtgtttggctttctggacattgacaatggtgcacctttcattacaaaagctactcaccgggattgaatttctgactctacctccctccccacccaccccatcttagtaagaatcttaggtcatggggtgtggcagcctccagagacagagatctcctcctctcagctgctctctaggcacgggggctggggtggtgtgtgcacctattttgaaaattcagtggtcagtcacttccgagtaggaggaagcttcgtcttggatggttggagaggactctgggaagcacatagctcaggggccctagtttcacatctcataacgtgcaatctagagtcctttttttagctcattccggatttaggcctgcacactgtactttacttctctgggtgctttgctgtctccatgaccttgtctttcaatggctctctgtagccctccacccaaggcctctgctctgctccactggcctgaggtagccatctgctgactgagtcaggggccctgggagaattcctgacctggttcccaccccacaagctcccagcttcccagtgctgacttggctaattgatctggagtccttgccaaaaatcatatcctgcaggcctgtggagccttaaacgtggagcggctgtacagccccgctgggctcagctgctcggagttataaaaagaacygcagtgcatgtggtgggccggtgactaacgtggccacttggggagtcgtcatcagctgttgggtgaggtgatgtgtatcaggccgcactcagttcccaaggttcaaccctggaggctgatctcctttctcacctccttagtccaggctgcaggagagatttctgccttgagygcagaacttaatcagtggctcactgtctatcctgagttatggctgtggtacagcccagctctaggcactgtggcaggccctgcactatgaggaactgtcatgaggtgaatgatttggcgagaaatgatatgctgagagtttgcagacactaaaggagtgtgaggaatggggagtggattttggagtctgaagagctacctccacatcccaactctgccacttactagctgtgtgtggctttgggctggttatttaacttctctggacctcagtttgccttgtctgtgaaatgaaaacaatacctaccccatgagggttacatgaaaaaaacacagtagaatccattttaatctgaccttgagtcctaagagaaggaaggaggaaaagttatccctggctgggtgacacttggcatatccagctgtcccgggtggagctcttagcagaagcccccgtttttttttttgagatggagtcttgccctatcacccaggctggagtgcagtggcatgatctcagctcactgcaactstcgccttttgggtccaagcgattcgcatgcctcagcctctcaagcaactgggattacaggcattcaccaccacacccagctaatttttgtatttctagtagagacggggttccgccatgttgtccaggctgctctcaaactcctgaccttaagtgatctgcccacctcggtctcccaaagtgctgggattataggtgtgagccaccatgcccggacaagcacagccttttaacagcagcctgcaagacccacactttactccacgaacatatcaatattactgttgttgtgttggtaggagatgttgtctccctgggaacctttttacttaagcctggaccataaaccatggtagtaatggttctcttgcttgtggtggcacatccatacaggtgtgcagcaacctcagttcttgcctcctcagaagaaagaatttgactgaggggcataagtcagaaggagagaccaaggcaagttttgaagcaggagtgaaagtttattaaaaagctttagaggctgggcgtggtggctcatgcctgtaatcccagcactttgggaggccgaggcaggcggatcacttgaggtcaggagttcgagaccagcctggccaacatggtgaaaccccatctctactaaaaatacaaaaattagctgggcgtggtggcgggcgcctgtaatcccagctactcaggaggctgaggcaggagaatcacttgaaactctgcagtggggtgagatcgtgcctctgcactccaacctgggcttcagagcgagactctttctaacaacaacagcaacaacaacaacaacaacaacaacaacacccccaaagctttagagcaggaatgaaagcaaggaaaatacacttcgaagaggcccaagcaggtaannnnnnnnnnnnnnnnnnnnaggagaactacaaactagtgttcaaggaaataagagatgacacaaacaaatggaaacacattccttgctcatggttaggaagaatcaatatcgtgaaaatggccatatggcccaaagtaatttatagattcaacgctatccccatcaagctaccattgactttcttcacataattagaaatacctactttaaatttcatgtggaaccaaaaaagagcccgtatagccaagacaatcttaagcaaaaagagcaaagctgtaggcatcacacttcctgacttcaagctatagtataaggccgcagtaaccaagacagcatggtactggtaccaaaactacagcctgggcttcagagcgagactctttctaacaacaacaacaacaacaacaacaacaacaacaacaacacccccaaagctttagagcaggaatgaaagcaaggaaaatacacttcgaagaggcccaagcaggtaacttgaagaacaagtgcaggacttgaccttttgacttggggttttatacgttggcatgcttctggggtcttgcgtcccttctcacttgattcttttttttttttttttttttagatagagttttgctcttgttgcccaggctggagtgcaatggtgcaatctcagctcaccacaacctccacctcccaggttcaagtgattctcctgcctcagcctcctgrgtagctgagattacaggcgtgctccatgcctggctaattttgtatttttagtagagatagagtttctccatgttggtcaggctggtcttgaactcccgacctcaggtgatttgcccacttcggcctcccaaagtactaggattacaggcatgagccaccatgcccggccttctcgcttgattcttcccttggggtgagctgcccgcgtgcacggtggcctgctagccctttggggggtagcatgtgcagtgtgtttactggagttgtacacatgctcacccgaggagttcttcccttttactggtggaatgctcctggaaggtcaactccgccatttcgtgtcttaatgcacgtgcttgagcccactcgcccagctcytgagatcttataggaaactgatgatcaccagttttaggtgttttctatctacaggcagaatgccttttcctggtgctggttgagacctattactattttagagaggcagtgtgacaactgcctaaccatcacctaatgatcgcctgattttcctggtggggtgtaggggccctcttctgccctgttcatgtctcactagctacccaccgtaacactcctgagcacactattggagctggtggggttttctttgcaaatgccaccatgtcacccatagcttggcctgcaggtccctgcactagtgccaatgtagatattttctttccaaatctaatccctaatttacacaccctttgtgatgatgagttcaaattcttagagaaattatttagccccctggagagactgctctcccagtgtggagggctggggctggggtcatatgtcaacattgttcaatgtgacacatatttactgagcacctactcagtgcctatccctggtgagacaaaagatgagtgaggaatggcacctgcccttgagaaacatataagaaatgcttcagcaagaagcgtgtgtctttctcttgaccataatggcaatctcctaacactggaatagggttaagaaatcataaagagttcatgcatgtgttcgttgattcatgaaggctttatagggcctctactttgtcccaggctctatgctagacagtaggtaaagctgaattgaaggttttattttgcagttattaagcctgtgaataatttcagcacaggaagcctactgtgcctttcagcacagttgacttatgtccaaggtacagatgtggaacagaagagagagtactgaatgatgttctggtgggagagcaggatggttctgtgtctgggagtgcttcacrgaggaagtggctactgaaaaaggattcaaaggaagactcagcttgccaggcggatgcatggggaaaaggcatcctaggctgaggaaacagcctgtgcaaaggcctgggggctgagtcatggaccagcagggctcagaggctttgcagaagtgatctcatccacccactcatagttcagatgaggctgggatgcagagagcggaaggcactgcctagagctactcagccagttaaccacagagttttgatgggaacctggcctcctacctcccagccacagctggtattttcttctgctggggaaatgctacacatcatacacaataccatctttaccacttgatggatcacaagcaggtatacatttaagtcatctgaatttagttcaaagtttgcaaatggagagcagaattagaggggctggctgtgctttccatgggtccagatatatagtgggtgctcagtaagggtctgtgccctcctccatggccagatgyggtcggggggtgggggcgggaagtaaaggcaactccctgttctaaaggaacacatggatgacaacttccaacttaggatgacttgaagctgggcttgtgaaggctctgagcagctgggcttggaaggcaataatttctcaggcagagcatgagtacctctgtgtctcccagtttgaaagggagcaagtcatcctgaaaataagcaaatgtcacttcacctccgacctggctgccctttcagtgggtgcagcgaataaggccttctcggtcattccgggctttcagtttatgggactaagaaaaaggcagaaatgccaatagtatacaatcatatctattttattatgctttgctttattatgcttggcagatactccatttttaaaaaacaaagtaaaggtttgtggcaatcctgctttgagcaagtctattggtgccatttttccaacagcatgtgctcacttcatgtctctgtgtcacattttggtaattctggcaatatttcagactttttcattattattatatctgttatggtaatctgtaattattgatctttgatgttactattgtaattattttggggtgccacaaaccgtgcccctaagacagcaaatttaatcaataaatgttgtgtgtgttctgactgctccaccaactggccattccttcatctctccctctcttttggcctccctattctccaagacacaacaatattggaattaggccaagtaataaccctacaatgctgccttaagcgttcaagtgaaaggaagggtggcatatcttgcttcaaataagaagctggacatgatgaagcttagtgaggaaggcatatggaaagcagaaaaaggctgaaaatgaggcctcttgtaccaaacagttacaaatgcaaaggaaaagttcttgaaggaaattaaaagtgctacttcagtgaacacaggaatgataagaaagtgaagcagctttattgctgatatggagaaagtttgagtagtctgaatagaagatcaaactaaccataacattcccttaaggcaaagcctaatccagagcatgaccctaactctctccagttctataaaggcagagagaggtgaggaagctacagaaaagaagttggggctgggtatggtggctcacacctgtaatcctagaactttgggaggccgaggcaggtggatcacttaagtccaggagttttgagatcagcctgggcaacatggagaaaacctgttgctacaaaaaaaaaaaaataaaaaaaaawtaactgggtgtggtggtgcatgcctgtggtctctgttacttgggaggctgaggtgggagaatctcttgagaccgggaggtggaggttgcagtgagccatgattacaccactccactccaacctgagtgacagagtgagaccctgacacacacacacacacacaagaaaaagaaaaagaaaaaaaagttggaagctagcagaggtcagtttctgaggtttaaggaaataagctatctctttgatgtaaaagtataagcagcaagtgctgatgtagaagctgcagcaagttatccagaagatctagctaagaccatcaatgaaggtggctacactgaacaacagattttcactggagacaaagcagccttatatgggaaaaagatgccatctaggacttccatagctagagaggagaagtcaatgcctggcctcaaagcttgaaaggacaggctggctctcttgttaggggctaatgtagctggtgactttaagtttaagccaatgctcaatggccattctgaaaatcctagggcccttaagaattatgataaatccactctgtctgtgctctagaagtggaacaacaaagcttggatgacagcatatctgtttagagcatagtttactgaatgttttaagcccactgttgagacctactgctgagaaaaaaagattcatttgaaaatactactgttcactaacaatgcacctggttaccaagagttgtgatggagatgtacaaggagatgaatgttgttttcatacctattaacacatcatctgttctgcacccacggatcaagtaattttgactttcaagtcttattacttaagaaatacatttcataaagtgatagctgccatagatagtgatccgtctgactgacctggacaaagtaagttgaaaaccttctgggaaggattcaccattagagatgycattaagaacattcatgactcatggaaggagataaaaatgtcaacattaacaggattttttttggctgcccagtgcatataaaagttatatttatgctattacatgtacaatagcattatgtctaaaaaacaatgtatggaccttaatttaaaaatactttactgctaaaaaatgctaatgatcatctgagccttcagcaagtcataatcttgctcaagtctggaagtctggagtttgtaagaagttgattgcaaccctcatgaatgactctgagggattcaacatttcagtggaggaagtaactgcagatgtggtagaaataagcaagagaactagaattggaagaagagcctgaagatgggaccgaattgctgccatctcatgatcaaacttgaatggttgaggggttgcttctttatggatgagcaaagaaagtggtttcttaagatgaaacctactcctggtgaagatgctgtgaatattgttgaaattacaacaaaggatttagaatattccataaacttagttgataaagcagtggcagggtttaagaggattgattccaatcctaaaataagttctactatgggtaaaatgctatcaaacagcattgtgtgctacagagatgtcttttgtgaaaggaagagttaatcgatatggccaatttcatggttgttttatttcaagaaattgccacagccaccccagccttcagcaaccaccaccctgatcagtcagcagccatcaacatggaggcaagaccctccacagcaaaaagattatgacttgctgaaggctcagatgattgttagcattttttagcaataaagtatttttaaattaaggcatgtacattgttttttagatataatgctattgtacacataatagcataaatataccttttatgtgcactgggcagccaaaaaaattgtgtgactcactttattgcaatatttgctttattgtggtggtccagaaccaaacccgcaacatccccaaggcatgcctgtatgccttcactgccctcggggttttttttttgtctttttttttttttttttttgagacagagtcttgctctatctcccaggctggggtgcagtggcatgatcttggctcactgcaacctacacctcccgggttcaagtgattctcctgcctcaacctccctagtagctgggagtatatgtgtgtgccaccatgccccactaattttttatatttttagtagagacggggtttcaccatgttggccaggctgatctcgaactcctgacctcatgatctgcccaccttggcctcccaaagtgctggggttacaggtgtgagccaccacgcccagccgccttttcaatcttaactaagcatttattatgtactgtggctgtcacttttgcagtttcaggtgtgacagcaaaactagcatgaacttctttttccttcttcacaatttcacagaagatcttcgtaatctcattgtacaatttttttttctttcctaattaagttgaaaactttcaccttttcagttaaaagaagcatgatacagcttctcttaggcacagctgcattgtcagtatcactactcttgcgtcttggggccactgctatgtaaagtaagagttacttgaacacaagcaagattgcctggctgatctgataactcagatggctactgactgactaatgggtgggtagtgaagacagcatgggcacgctggacaaagggatcattcatatcccaggcaggatggattaggacagtgcgagattttgtcacactacgctgaacagcatgcaactgaaaacatgaattgcttatttctgaaattttctatgtaatattattggactgtggttgaccatgggtaactgaaacctcagaaagcaaaaccatggataagttgggactgctgtatatagaatagtctatgatatgatatattaaatacaccataaataatacattgtataatataatgctttatagtataaactatataaattaaatattaaaatagaaattacatatttaaaatataaatataaaatataaagacatgcatttaatatatatgagaaatatttaaagaaggcagagcatagtatgataaacaccctcccactgcatcttaacagtttaccctgttgtctctaccccagtacacgactatggttgactgtaacacctcgatgtgagtgagaaatttgaatgcaggttttacatctgtagctttttaagtcccaaagctgctcctcctcatagaatcctccagtggctactgagagccctccggataggccagactcccgcacagggtctttggaggcttgtgagattggatccctgcccacatctccccaccagcccctcacgctctggctcctgttttgttccttccaccaggcaagtggctgtctcctcctgggacgttctgtcctcctcttccccttgccaactcctgattatccttcaggctttggctgaaatggcacttcctccaggaagcactttatgacagctccaacatggctgtggctaccgccctccagcaccgtgcctgccccgggcccagcatgtcagtcctccctcccccagggattgcctgacccctcctctgtgactttcactgtttagtgagctccggcacagggattggcctgctaggctcacctctgcaccccgtgtgtccatcatagagcttttaacaagttggtgggtacatcacctctacttgttacatgttaaacatgagctggaaggtggcacagggcgtatcctggaggatgaggggaccctgaatgggtaaagcctgctgaggaaggcttggccacccctagcattggctaagttggcccattttgaaagattggaaccatcctggtttcccaactagtaaccattcacttccttcccctctttctgatagaaacccgactttgcttatcttcgtatgagcagccatatgtttccaaagagggggctcagccctcatcaggaactggccaaggcatgggctggtggggggtctggacagtaacacttgagggtgactctgccgctggggggtccctgaagcctcaccttattcttcaaaagggacacaggaatgtgggraattctgtaggacaaatgtcttggttttcttgacttaaaaaaaaaaagatgttggggaggggaagagagggagagagagaaactgtttagatgaggggttagcagattttttctgccaaattccaagcagtaaatattttaggctttgtgggccgtactgtctcggcagtaactgctcaactccgcctctagcaggaatgaaccatggaacacataaacaagcagaggcggctgcgttcccatgaagctgatttacaaaaacacacggcgggctcactgggccccaggtgtagtttgcccacttatggtatagatgaaaggagacttctgaggtatactggccagatgagatgtatggactttgcttggatacccacttgaacaaatcaagtctttttttgagacagagtcttgctgtgtcatcgagactggactgcagtggcaggatctcctctcactgtaacctctgcttactgggttcaagtgattctcctgcctcagcctcctgagtagcttggattataggcacccaccagcacgcctggctaattttgtatttttagtagagacagggtttcaccatgttggccaggctggtcttgaactcctgatctcaagcaatccacccgcctcagcctcccaaagtattgggattacaggcatgagccaccgcatctggcccaaaccaagtcttaaaaaccaaacaagacaaaaatgtttgtgacagttggggaaatttgaacaatgatcagatgcaagatgattttaaggaattattgttaattttgctaggtgtgacaaagacatggttttcgttgttgttgatgttgttttgattttgtttttaaagaagagagagtttttatctactagctgctgatactaaatgggagataatgtagggggtttgctctaaaatgacctcgggtgtggagggaaggggtaaggatgacacggagctggccatatgggcataatgactgaagctgggtgatggaattgggggaaggggcctctatactcttttgtcttcctttgtttatgtttaaaaatctgtataataaagtcacagccagcctcrgtggcttactcctttaatcccagaactttgggaggccgaggtgggtggatcacctgaggtcaggagttcgagatcagcctggccaacatggtgaaaccccatctctgcaaaaaatacaaaacaactagctgggcatggtggtgagtgcctgtaatcccagctacttaggaggctgagggcaggagaatggcttgaacccaggaggtggaggttgcagcgagctgaaacaacactattgcactccagcctgggcaacagagcaagactctctcaaaaaaaaaaaaaaaaaaaaatgaaaaaaaagaaaagaaataaagaaaaagaaaaagaaaaagaaaatctgtataataaagtctttaaaaaggagagacaagaaagaactccccgccagttgtggtggctcacacctataatccyagcactttgggaggcgaagacaggcagatcacctgaggtcaggagttcaagaccagcctgaccgacatggtgaaaccccgtctctactaaaaaaaaaaaaaaaaaaaaaaaattagctgggcgtggtggtgcatgcctgtaatcccagctactcaggtggctgaggcaggagaatcacttgaacccgggaggtggaggttgctgtcagccaagattgcgccactgcactctcactgggtgacaaagggagactctgtttcaaaaaaaagaaagaactccctcttccactgcctctggtccccattgcatcaggtgaatatgtgatgcctgcagctaatgcagtcattttacagctaagagggaacaagcctgaggatgagactaatccccaagcatgacagagtggaagaggaagggactgagatgctggaagatcctgtgaggctgccaaattaaccaggtccagcactggcctgcttcaggattcctttttatatgagataataaattaagccatgtgtttggtgacatgtaagccaaagtccccttactgatctaaagaaaggaacagtatagaggtctggcccctctttgctgcagaatgtcacccatggtatctaagaggatgttaggattggaagaaaagctgctaagtggtatccaagaggatgttaggattggaagaaaagcyggtaagaagcgtgccctggacgaatctctctgagtccttccattataccataggggcacggggaaatgggggagatcactgcttcctgccttactctctggaaccccaggcagccaatgccaggggccgcactggacttcgcttaggaggatgctataggagacctgtggtttcagaagaggggatggcagaaacaaaactcccaaaggacagctgggctttttggcatccttcctcacaaagacaaggagacctcctctccccgcactccccaacacgcagtaaccacagccacacaatgtctacacacagggcacaaacggcattgtttctaactgatctcatggttcagccagtctcgggggcatcagctgttctgtaatgcatgacaaatcactgtggttaacttaacccatccttgtctcctagctacagtcattagacacttgccaaaaaatgtgcagagggaatgctggggaaacaaaggagaagggtcatgtggagaaggccacgaggcccagcccctctcccrcacatctggaggcttctggagctctgccagactcctggagttcagatgcagcaccagcccaggctttggagacaggggataggagatgagagtggtggccttgaattaggagcaagtcacagatcttcagttagtgagtttgctctcagtcttcatttggccccagttttctttttctttttctttttttttttcttgagactcagtctcactctgtcatctagtcaagtgatcatggctcactgcaggctcgacctccttgggctcaggtgattctcccacctcagcctccccaagtagctgggactacaggtgcaccaccacgcctggctaattttgtattttttgtagagacagggttttgccatgttgctcaggaaagtcttgaactcctgggctcaagtgatccactggcctcagcttcccaaagggctggggattagaggtgtgagccattgctcccagcctggccccagttttcaaggctttgtttagaacagtgattcttaaatttgagcatgcatcagagtcccctggaggacaggttaaaacagattgctgggccccttccccagagtttctggttgagtaggcctggggtgaggcctgagaatgtgcctgtctaaaaactttcaagtgatgctgattctgctgcacagggggacgctgatttgagaaccactggcttagagctgctgtgcatgacggtggctctcaggtagcagcaggaagagactcagactcttcttcctcttccttccctttgggctgaggtaggaactaacgatgaatgaccaaagggggaaccaatatcaccaatactctaagatcactgtgaaccaggaaccaggagacttgaggtgttatcctgcccctgaatgatctttctgtgtggtgttgcaaggtcaactctgctctctgggtctcagtttgcccctctgtacaataggcaggtggtgtttttctgcatgtgttgtcgtttccactaacaaacagttttataaaataaggaggctgggcacggtggctcacgcctgtaatcccagcactttgggaggccgaggcgggcagatcacctgaggtcaggagttcaagaccagcctgaccaacatggtgaaaccccatctctactaaaaatacaaaaattacaggcccatgcctgtaatcccagctacttgggaggctgaggcaggggaatcgcttgaacccaggagacagaggttgcagtgagccaagatcgagtcattgcactccagcctgggcaacaagagtgaaactccatctcaaaataataataataataataataataataataataataataataaccaaggaaaacaaaatgaactaagtgatctccaagaaggtggaggtgggagaatctcttggcagcatcaccgtgtgcctggaagcctgggagctggaatctgacttgggtttgaatatggctctgatatttaccagctatgagtgctgtgagcactggcagagctgcccaacctggcagagtcttagactcctcttctgcaagtggggatgaggatgctgaccttacaaagttgttgcaggagtggaggtaaatgtataaaggggctggccaacaaatattagctatgatgattatatttgttatttttaatatcttttcaaggcttggcaactcagaaaggcaactcatctcctgcatccgtgcctgactgtggagcctggtgatgtttgttgatggccactcagaatttacacacatgtgtctcacgttttcccctggaatgattattctgggaaatgcttgacttgccaaattttccgtgaactgttctttctccaacttccgttcatttgattactaatttaactaatatttattaagggcctcccatgtgcccaacacagggtagccactggggatacaatgaggagagaaccccaaatgtggtccctgttccctgtgaaactcagtctgggggaagcaggtgttcatctgtgaatcacagagaatcaggagaaactcaacagcaaaaactgctgtgcaggggcccagagatggtacaacagcaggtggatttgacctggttgggaggccaggacaggcttggggaagagagaactaaaaggatgatgtctgagggtagcaggcattgactgggagaagagagagggttgggcattatgggcagagagaacagcctgttgtgcaaaggtgcctgcaaggagctaggctggagggttacccagtgtacgtgacctcagtgacttttcaccccaccttaactctgcttatctttagaaaacaggacatccgaggtcagaagttccccctcgtgactaagcagctaagactggtgggatccaagatgacagttcccttgacctctgaagaacctctaacttcattataatctaatttccaggctaaatgacactcttaccatcatgaccacagttgataatcaccatgccaatggctagaacaaaccacgaaaggacaaaaaggaaggtggcaactctggttcccagaagttctccgcccattcccagagaaggcatgaatattcctccccttgttttcaatgctcaacatctttattaaagatgccctgtatctgtgacttcccagcactcacaagctgagcagtgttgtgggaagtcaggaacccggaatggagggaccggctgaagccatggcagaagaacatggattgagaagatttcatggacatttattagttcccgaaattaatacttttataatttcttacgcctgtctttactgcaacctctgaacataaattgtgaagatttcatcgacacttatcacttccctaatcaatacccttgtgatttcctatgcctgtctttactttaatctcttaatcccatcatctttgtaaactgaggaggatgtatgtcgcctcaggaccctgtgatgattgcgttaactgcacgaattgttggtagagcatgtgtgtttaaacaatagaaaatctgggcaccttgaaaaaagaacaggatagcagcaatgttcagggaacaagagagataaccttaaactctgagcactggtgagccagatggaacagagccatatttctcttctttcaaaagcaaatgggagaaatatygctgaattctttttctcagcaaggaacatccctgagaaagagaatgcgtccctgggggtaggcctctaamatggccgcttcggggggcagccgtcttttatggtcgaagctgtagggatgaaataagcctcagtctcccgtagcgctcccaggcttattaggaagaggaaattcccgcctaataaattttggtcataccagttgtctgctctcaaaacctgtctcctgataagatgttatcaatgacaacatgtgcccgaaacttcattagcgattttaattttgccccggtcctgtggtcctgtgatcttgccctgyctccatttgccttgtgatattctattaccttgtggagcacgtgatctctgtgactcacaccctattcatacactccctccctttttgaaaatcactaataaaaacttgctggttttgcggcttgtggggcatcatggaacctgctgacagttgattcgtgagccaagctcccacttctcaattccatggccattaaataaagcctgcactgcttgatgctcactctcagttttgcgtactgactttgtgacaccaaacggagaataatacctcatttttttgagaggaccagctttgtccgtaacagaggcaggaaggtgggcacagggagtctgatctttgttccaagaggaacagagcctttggaggtttaatagcagagagggccatgtgatgtctcaaacatctctgggtgtagttggaggagagattccggggcccggagaagagtggggttatctgttaggacaaacctacagcagtgtccacagagggctgctggtggcctgctgggagatggggttgcatttgaaatggaaagaagttactgtatttggaatatcctttggagtcaactccacaggacttggaggggattgatgtggtgggtgagagaggtgactagggtggtccagctgtctgacttcctaactggctatccagggtggatggtgatggctttcagtgagctagggtggaactcctcttctccagagcatttcagagccctactggtcacttgtcacaccatgggttggaagacaaggaccctcttcctgtgtttcagagtactcatctcctccaggtgtggataaaacaggtaaacacttagcacagcagctggttctcaacaaatgatagctgcctgctggaccccctgcctctgggtcactctcgtggagctgttggcctcttgctgcagagacctatcacaagctgacactcttacttccttgtgggggcatctgggactcctgctggggtggggatattttgtctcaaccttgaacctcctcatctttatcttggaagatggagcaagaggggaagagagctggcgctcagcagaggttgtgcttttctgaagccaggggaactggccctcctctaaactagctgtgtgaccagaggcaagtctgctttcctctccagacctcagtttacctaactataaaatggagtggggcacaggactggagattgcctctcaacccctctatctccaaatctctgcatttttgtttatgctcaaaggaacgtgggtggaggctgggaccaccttgctcctcagggtcaaatcctgggccgttgcccaagccccagcccactcattacatctgtttcaaactcttgccacagtcaccttttggggatagacacctccactttgtctttctggcctacctgtcacaggagccttccatgggctctagctagtccagccttttctcctcctgcctgggaggctcatggcaggccgccccctcctgcccatgctcgtgccattcccaaccaggaacactgcttcctctctgtctcccctgtggaagcctcagcttggatccacggcagtgaaatctccctctaagcttctccttcccagagtccccagagtccctggggtcccccctggcgaccttgcatgttcatttagagcacatttctctaccctttccttacctggttttcagactttctcttgcccatgtcaggtttctcaattgcttgctggcttcatgcagccaacacggactttctgcatccctctcccccagggccttagactgaaactgttgtgttgggtgttgggagaaacacctaagacattctctcctgcgcgaagactcaaggaagacactgggaaacccagaccttgacttcctaggagggtccccagcttacacctggggatttcttcctttggccccattcacctccaaatctggggccaccttgccctctccccaccttctggcccagactctgagctaggcccccatgtccccttttcctaacaaagccttcctccgtggaagagagcttggacacacaatacttgccgataaaagcaatcattgtagccccagggaagggggcgggggtaaagaaacggggagaggttttgctctctgcttgccaaggctggctccagggaaggccgcagcccactccagcgaagcaggctgctggggccccagctgtgacctgctcctcttgacttgctttccttgaggcaggaacaagggggtggaatggagctggggcccctgagttttctaggggagtctttctgagatggccccacagcagaaaaggggcaatccttacgccatgactttttccttctgtcccgcagggttcccactctgcagcttggaaaactgagaccctgagaagggaagccattttatccagagatcatttggtgggcttgggtttgcagagggccagagctgtgaagctccagcctggtcatctcccagccttctctctctctctctctttctctctctctctctttctctctctctctctttctctctctctctttcctatctctctctctctttcctctctctctctctctctctctcacacacacacacacacacacacacacacaccctctaactttcttgctctgtcatccctcacacacagaatcctgtctggaccttgactttgcacatcatttttttttttttttgagacagggtattgctctgtcacccaggctgggtacagtggtgtgagctgaagctcagctcactgcagcttcagcctctcaggctaaagcaacccttccgcctcagcctcccaaagtgttgggactataggcgtgagccactgcacgcagccaacacacatcttaaaagaccagaaagaggagaaagaggaactctattcttcctgaatttaatatagatcaatttggttgtggcatttccaaataactggatgctctgatgtagcttggaatgcttggaatataatatactttagctttctgaacctgcttcttaaatgcactggtcctccaaaaccttggcatcatttccaagattctttattccatggttattacaaaaaaatctcctttccacaactcccacccctggattgcttgaaatatagtttatttgcaagttattagttacatatttacagagtaaagcaagagcatggatcttctgttgggttgtttgtactgactcctgacctggtctcaacaccattgcaagactagcatcaagtgctcatctctcagactcttggttctttccaccttgggatgccacagttgctactggtgtcagggatggaagtggagggcagttatcacttattgagcatctattatgtgctgtagttaacacccatttcacagataagacaactgaggctcagagctaggatttcaatcagggctgtctgactctgaagccagggctctctcctcaccggctcagccctgctcttggctaggacacaggtcagtcgtgcaccctgggctggagtctggaaaatgggtagatccaaggggtcgatggttagtgagggcatcaagaccatagtgaaagaaagagggagtctccctctaccgggaggttcactgtccaccacactcccaaatgcagccggacaccccttgggctcctggctctggaacagaaacagagagcaggccctgcggccaagaaagggggcggagcagccatagaaagcggctttgggccaccactccggggatcccaggcgtctgaggggacaatcggtccgtgcgccaggaacccctgctctgtctccgcgtggcacttccgatccccggccgcaggcagctgcactccccagccgcgcgccccgcccccgggcgcccggcgccccagctccgacccgcgcccggccccgccccgcccagtgtgcccacccccggcccgtcccgccgccccgtcgcccggctcccgcggagtcccggagcgtcactgcgcgggcgggctgaccgaccagccggcagttggcaccgggtgcgctggcgcgtcagtggccccgctctccagccggcagcctcgcgcgcccggagccagcggtccaggcggcggcgccgcgcaggggacccggagcaggcgggagggaagcagctaggcggggaggcggctgaggcggcagcggcggcagccagccggtgctccgacagcccggggcgcaccctagcctcgccgccctcagcctgggacttggggatcgggcgcttgcccagcccgcgtcccagcgcggccacatggctccactccgcgcgctgctgtcctacctgctgcctttgcactgtgcgctctgcgccgccgcgggcagccggaccccaggtgcgtgcgggttgggcgcgcgggggcccgtggggtccggggtgcacgcggtcagggtggcccaaggttgccccagccacccgggcagggttcccgcgggtgggaggcagtatgcacactctgggctgatttgctgtcttttcttccactgtgccacggcactgtcccgtgatttctctccctttctggtactagaagtagacagagaccccaggagagaatttgggagcatcgagtctcttctcgggagcagcgcatctgtctctttgtctctctgtgtttcttctttcccctcttccccaatctgtttctctgtcctgtgtgtctttctctttcaatgtcttttctgtctccaacttgtgtgagcatgggtgcaaggggtgtgtgtgtgtgtgtgtctgtgtgtggctgttacatacccagcataaggctaacaggtgattgcctcctacagcagagcatgcggggcactcacgctcctgcacagaaacacacatccttccactgcccccaacgtagcactgtcaaacgctgtggacacaggtctcttgcatacagaccagatacactccactcccgccctgcagcatggggtaccctcctggtggctctgaacatggggaggagtcaccggtcatttccaggcagggtccctccttgtttgtgagccttgttcatgtgccagagtgggtcccctcttgcagcagtcttaggggtcctctgctataatggggatgaaactagagctgtgggcatgggggattttcaggaaacaccactttctatgtttcatcagtgacgtgaactggggagacgagaggtagagctgtgtggaaatgaaaattcctcccaaactcgcattcatgaatcaccaggcctggaagccagggagctgtcattcctgcccagcctggctgggctcaaggagagctgcgtgaggatgggcctgctggcatgtggcctggagcatggggccatgacctcacagttaattcagcccaagtgggcaggtcaccccctgtatatccttttatttttgaagatctatatttatccagcttggggctcggccatacagagatctcagcggccactgtcctcctgtaaaaagttttctttctaaccttggaaaaatagagaaccgctcccctctgcagccccaccttctccttgacacgtgcccatggtcccctgggtttctaggtgtgtttgttttgccagctgcgttcttggaagcttggggaggagggcactaccccagcctgggctggtgacttcagcacactggggagtttgggcagatctgcccttccctttatttgccctgttggcttttggggaattttagtccttttctgggcagagcccaaggtcggaagtcttgttgctagtgaccgggctctgtctggtatcatttgctttcttctgctaagtttaaaaaggacctgggggctacagggagtgccacaaggtacccgaacacccttcatccaagtgtaggaatcctggagctcaggaagcaatggatggaaaatgggtgaactcaggctaagaggcccacctaagggtgacactgagagttcctatccctccctgcccgcgtgggatttctgacttccccttacctctgaaccgactgcattgaagtgactctttgtttacctccaacagagctgcacctctctggaaagctcagtgactatggtgtgacagtgccctgcagcacagactttcggggacgcttcctctcccacgtggtgtctggcccagcagcagcctctgcagggagcatggtagtggacacgccacccacactaccacgacactccagtcacctccgggtggctcgcagccctctgcacc

SEQ ID NO: 7016 - DNA, 13207 bp, Homo sapiens
atgcgtgccccagcccagccagctacccagcccctctctgtgtgcagccggagggtcctaagaatggctcccggagctaactgagggcccagccttttttctgcatgatccaggagcacataccacaaactaccacaataaaaaagctgtttttgctaattgcgatgttcatttccacttgtgtctgaaatctttgggaatgaaggaagactgggggcaaatgctggtttggggaggagggaaactgggagccggttggccctctgagccagccctgcagcttctttactgtggtctcttttcctttcctccctgccactcaacttttcctgccccttctcacatctccagggccaggcttggcccctgcatggattgacttggtaatacactcatcctggcccccttcctggtgcctgctgtcctgtggggctgtgagtggctagcacaggcttgtcacgtggctgccttggcaggaggagcctggtaagggagcggggcaggggatggacagcctgtcacaggcagcttcttgcccagccttgccacacctcccacagggcaggacctgctcagccaatcagctccaccaacctcagaactgcccgtggaaacctggctgggcttctggcttcagagctgggaattgtgggaggagggcccagatcccactggagataccgaaggagatactctttagtattgggatcccagaaaccagtcctatatctggccagagggacactgggttgtggcatctctctagctgctacccagaaggaacagggccccctggggcctataggccttgcccctgaccctgggaacacccagctcaggcctgccccagtggccacaagtcagggaggccgcaaatttttaactagaaacattgatcattaatagggggttagaaagagttcaaactaagtctcactctgggacatagaccaattgtgcttcaggcctcctgcagagatgctgggtccccaagtctggtcttctgtgaggcaggggctaagcaggagcttgtccaggaatgtgggggtctgggcctcaggggaggggaagaaggtggacattgcgggtatctacccccctgtgaccacccccttcactgccactgcagaggtggactatgggaaactggaggagaatctgcacaaactgggcaccttccccttccgaggtaagtggggctgtcctctgtgggacctggggagatgtgagtggccctttagccagagaccaagggagggtacacaggctctgtcaagctgtccagggatagtctggtactcagtgggtcattttattatgggagaggaacaggggagactggtctggagtcaggagacaggcaggaagctccacgctggcctgtaaccttaagctaaacctcacctgcttcagtttacccagctgtaaactgttaaagtgcctttgtagctcccagagtgattctgaggttggactggataatgggcgtgaaagtccttgtcaaccttgtcacttggtgcagatgtgaaggcatgtggctggggtcacgtggcagcccagccacagtcccagttccctccaaagtttgtttgtacattctcttctggacaaagcctccttgccagaattagttctcctgtgaccccttggctcctgtgactcctgttgtggctcctgtgaccccatctctctttacacatgggtctccccaactctgaggttagggaccagatgatatttgcaacaatcaacatgtaacagagtcccaggcacaataaatgaaggtagaagaaaatgtcaaattctgcctgccctgctccgcccatccccattccttactgcacaatcccctgaggcagtgctctctgtaggaccatcccacagatgggaatctgggcctcagagtgacatggtcactgcccaaggtcattcggctaacacatagctgagctgaggtttgcacctcgtctgactgcatggcccatgctccattttactccctcgctgactctcattataaaccctttggagctgctaggccacactatttcaacggagtgtctggtcagcactagctttgttgtggctgctattgaggcagtatcgtgtagactgtggactctggtttcaaatcacagctctggagtgagcgcctgtaatcccaacactttgggaggccgaggcggagggatcatgaggtcaggagttcaagaccagcctggccaacatagtgaaaccccgtctctactaaaaatgcaaaaattagctgggcgtggtggtgtgtgcctgtaatcccagctactcgggagactgaggcaggagaatcgcttgaacccgggaggcagagattgcagtgagctgagatcataccattgcactctagcccgggcgacagagcaagactccatctcaaaaaaaaaaaaaaaaatcaaatcacatctctggcactgacttagtgtgggatgattgctgtccctatcggacacatgggagtgataatgctcatattatgggatggttggacaaaaaaatctgagagaatgcaagtgaaatcgtgctataaattgtggagtaatatacattggaaggtactgattccaatggtaataatgattaaaatgacagtgtgattggcattgcagcaaagctgctttgtgactgtgacccctggcctgatggacacgttgatcattcatagctcagtactgagggaatgtgccccttccttggggacaatgaatgccctgtggagggccacgttgagcagggcacaactgttaggtttctgctggtgcttggctcgtggggcctggaggtttggtgaggtcctggttctcttgaagtgagaagcattttgagcctctaagtgaagaccttacttcagcttcaaggttcaaggatgctctagttcagggtggggagggtggactttgcatctggtgtttgcctgacacccagagaatccacagagacccccagactcttctctggaccctcccttctgggccacccacccactcttgcagagggcatggggtgcccaggagcacaggcttccgtggatttagcaggctgtgggctgcacatacccacttgtctgtctccctcgcaacctatgcaggctccagctcccatctgatcactcacccacacaccagagagccagcggggtgtggtaggaagagcccagcatcttgagttagaggacctgggcaagaatcctgccacttctgccagttaacagagaccttggggaaaccacttaacctttcaaatccagtcctcgttttagaataggaactgagccttcaggcttctagccacagggtcaatataatcctcccaaggcactgtcacagaaaacacagagatagagggtcccttccctgcttccagggtgcagccaaaatgcccaggaaggaagacacaaacaactttagctctgaaatctgtgtttctcttgccctgtcctggcccctgaggtagactttgcagcccaacactcaggctgaggagggaacgtatcacattgtaagggcctcctgcagccagttaaaggtcctctgaagaggagatgagggccaggcacagtggcttactcctgtaatcccagcactttgggaggccaaggcaggaggatctcttgagaccaggagttggagaccagcctggccaacatagtgagaccctgtctctattaaaacaaataaataggaggtggaaagctgccctggatgaatcagtgaagagttagagattcttctggaaagcactccctgaaactgtgtagcttttttttttgagacagagtcttgctctgtcgctcaggctggagtgcagtggcatgatttgcctcactgaaacctccgcttcctgggttcaagcgattctcatgcctcagcctcctgagtagctgggattacaggtgcctgccaccacgcctggctaatttttgtatttttagtagagatggggtttcaccatgttggccaagctggtcttgaactcctgacctcacggtccgccggcctcggcctcccaaagtgctgggattacaggcgtgagccaccgcgctgggcctcttatttatttatttatttttaagatggggtctcagtctgccacccaggctggactgcagtggcacgatctcggctcactgcaacctctgcctcctgggactaaagcaatctgcccatctcagcctcccgagtagctgggaccaaaggtgcacaccactatacccggctaattttttgtatttttagtagagatgggattttgccgtgttgcccaggctgatctcgaattcctgagctcaagtgatctgcctgcctctgcctcccaaaatgctgggattacaggcatgagccaccatgcccggccccgtgtagctctttttaaaaaatctttttagcattgctaatttgtactgattatttgaatagagagtattctttttgttttttctttcttttttttttttttttgtgatggagtcttgctctgtctcccaggctgcagtgcagtggcacgatctcggcttactgcaagctctgccttccaggttcacgccattttcctgcctcagcctcctgagtagctgggactacaggctcccaccaccatgcacggctaattttttttttgtgtgtgtgtatttttagtagagatggggtttcaccgtgttagccaggatggtctcaatctcctgacctcgtgatcgtccgcctcggcctcccaaagtgttgggattacaggcgtgagccacagcgcccagccaagagtattctttttaaataaaaattatgaccagagactagaggaaggggtcattacagaagggctctatggccctgaactcacacccataaacaccctcaaagatggactttgaattgttatttccaaatgaggttagccaaccacagaactagtccagcaggactgggaagatgaggttctccataaaacacttgtgtcctattccttccatacatagagtggaccatgctttcttgcaaagatataatattttgtatatattaaaaccattactctgttaaagaaaatattttgtttaaagcatcacaatgtttacaaccccattttggcatttcttatttttttttaaatgggctagatgcttttgaggggaaaaaaaaatacagtggcccaggcctgtttataccctgagaggccttggagattaattaggcttttagttgtctgcacctatggaaagcctggccagccagcccacctgctcacaacccgaaccatgcctatttatgggggggcaaattctgggtttgtaggtgcctcactaaggcaagaggtagcagctaccatcccggagtggccccagggatctagacccgatgaagtctcctgtccactctgccttctcagcccactgcttgcctctccaccctcagcccattgtgacctcatgttagttactccagaatgagctccttcctgggttcttttccctctgaactctgccctgtagtgaggcgaggggctgcaaatgaggatggaatatgccaggctggcagcagacatgggcactggatggaggtgcactggtctcagatggctaggaatggataccagcccagtcaaggggatcattctgtcatggccagcctgacccagcatactttgccccctgggggccaccagatggggagagagagaaaccaaagactggaagatacaaaggcctaagttgtagaatggattccaagcagaaggcagaaggactcagaattggagaagcagccctttcactgagcctggggacagctgtcagggtaggagacaggacccaggcctcaggcaatgcctgccaggctagacatgagggatgctgcggcctctccccaccccactctccccaccccacccgcaactgccttcctcacaatggggttcattgttgaggtggtggggggcacctagggagggtgcagcagggggcctgcctgtcagacatccttggggagcctgccctttcaagcatgaatcataccaccagagatcacccagcktgctcttagctctgcctgcctggtgtagggtcctggagaccttcttggagctcatccagcagccatcatgcaaggtggtgctggggactgccctcttgctaggaggtggaggtctcatgctgtgggttcagagaaagaggagaagaaaggaaacctctgagtgtccatcagacaaggacaagtcaccagaatcccataaagcaaagaatgaaagctggattaaatcccactttagccgcctttccgaagagaagctggccctcgacaacaatgccagcgctagtggcaatgctacccagactgagagtgggagtgaagaggtcagctccacggttcacatagagaccttcaccacgaggcacggagaagtgggctccgctctgcaccgggaatccttcaccagcaggcagaagacatctgggccctcagtgatccaagagatccaccaggagtctggaaaagccccatccactgatgaggccacgtgggccgctgtggctgcctgcaccaaggagattgacacccaggggcggcacctggctcactccatgctgcagcgggccatagcttaccagcactcaggtcacctagagtccaaggacatcaaccaggaggagctgagggccctcgaggaggtagagatgaagctgcaaaagaatttcctcacccagcgggaaaacaccatagctggtgccaatcacacacacaccttctatggccacagtcaccacagtcaccatggccacccaagccaccagagccacagcctgcctaatcgcagacactagatctgtgacttcttggaagccacctaaccatggatggagacgcccctgcccccagcaaggctggctcacacacacgtctgttttctctcctatggggccatctatgcaggccagggtgagatgctgtgcccaaatccctactttcttaggctcctcacggggattatgggctctttaaactccatgagtggggtctgccacagaagatggcccctgttggagggagagctgggaggacacagcgcaggtgagatagaccctgaggcccctgaagacccaccaagagaagacagatgggagcaggcaagagccccacactgatgtcattgcctggaacggagccaataaagctttgtgtgccttcactctgagtccaggggctctgtgggcagcctaaggtctggcagggatggagggagggggctccctctccagcagtcctctggagtggagtggagaaaaggcccccgacctggggccttttcactgggcctcatttaaagctccataaaacagctaccctggtctcaggttctggaaaaggggtacctctagacgtctcaacacccccaatctgatgttgccagggaagaggggagcagccaggtattgggcttggaggagaaacaggctttcagaggagagtaactaagccaggtgggaatgagggcccctgtcgtcttggtgctatctttgctctcaagtcatgtggcatcctacaaggcagttctctcaccagccccacctgcttcctggggccccttgggatccatgttagtacctccccaccacctaagtctacagctactgagtgagcacaacactttcttcttgtttgtttaacttaatttaatttaatttaatttaatttaattttaagttctgagttacatgggcaggatgttcaggtttgttacataggtaaacgtgtgccatggtggtttgctgcacctatcaacacgtcacctaaggtatttatttagccctgcgtgcattagctatttaacctgatcatcttgggttcttttttttcttttccctttttttcttgttttttatgtatgtatattttgagacagggtttcactcctgctgcctaggctggagtgcagaggcgtgatcacggctcactgcaacctctgcctcttgggttcgagcgatcctcccacctcagcttcccaagtagctgggactgcaggtgtgtggaaccacacctggctaattttttttttttcttttctttcattttgtgtgtgtgtgtgtgtgtgtgtgtgtgtgtgtgtgtgtgtgtgtgtgacagagtctcgcttcattgcccaggctggagtacagtggcgcgatcttggctcactgcaacctctgcctcccgggttcatgcggttctcatgcctcagcctcccgagtagctaaggccaaaggcacacaccaccatgcctggcaaattttttttgtatttttagtagagatggggttttgccatgttgcccaggctggattacagtggtgatatcatagttcactgcagcctcagactcaaactggcaaaattcaaataaagtccttagttaatgacattgtaccagtgttaattctttggttctggtcatcatattatagctaggtaagacattatcattggtggaggctgggtgaaggatgtatagaaaatccctgtacttttttttttttttttttgagacggagtcttgctctgtggcccaggctggagtgcagtggtgcgatctcggctcattgcaagcttcacctcccgggttcatgccattctcctgcctcagtctctcgagtagctgggactacaggcgcccgccaccacgcctggctaattttttccatttttagtagagacggggtttcactgtgttagccaggatgttctccatctcctgacttcgtgatccgccagcctcggcctcccaaagtgctgagattacaggtgggagccaccgtgcccagccagaaaatccctgtactatttttgaaacttttctgtaaatctaaaagtaattcaatatttcaagttaaaaaaaaagttttcagacaatttgattatgagtgtgtgtcaaagtttgattatcgttgtaatgcaagcaaaatgacctgtaagcagctaactcaaatatatactcttggtaagaatatttttattaaaaaaagaatggtcaggctgggcgtggtgactcctgtctgtaatccctgcactttgggaggccgagatgggcagatcacttgaggtcaggagtttgtgagaccagcctggacaacctcgtgaaacctcgtctctactaaatatgcaaaaatgagctgggcatggtggtgcccaccttaatcccagctgcttgggaggctgagttgggaggattgcttgaatccaggaggcggaggttgcagtgaacagtgatcgctccactgcactttagcctgggcgacagagtgagactctgtctcaaaaaaaaaaaaaaaaaaaaaagagaatggtcagatcactcactgttaagactacgtaaagacaaagaagagtagttaacagcttctaggctcttgcctgagagttggctgggagggtggctaattttccagatcaagtcttaattccattaaagttcattgggggccgaacacggcggctcacgcctgtaatcccagcactttgggaggctgaggcaggtgggtcatctgagatcaggagtttgagaccagcctggccaacatggtgaaatcccatctctactaaaaatacaaaaaattagctgggtgtggtggcaggcacctgtaatctcagctactcgggaggctgagacagaagaattgcttgaacctgggaggtggaggttgcagtgagccgagaccatgccactgccctccagcctgggtaacagagccagactctgtctcaaaaaaaacataaaaaagaaaaaaataaataaagttcatcacaaaaatgcttaagcatttcatcaggaatgtaatttctttccagagggaggttatgaattatgtcatgcaaaaaactttggccgcagaccagggcagaaaaaaataaagaacttctttttcttttgcacaacaaattgtcaacacacacctcaacacctatgctaggcaccacacaggaggccagaatgcatccaggcaaagtaaggcaagcactgggcaaggaaaacagaatgctgggtagccgacttgagcttgttggcccgcatttggaaggtgttccaggcagaagggaacaacacaagcaagggtgcagagggagggaagtgcagtgtctggggaaccatggcagtcaacttgttttttttttgagaccgagtttcactcttgtcacccaggcttgagtgcagtggcacgacctcggctcactgtaacctctgcctcccgggttcaagcgattctcctgcctcagcctcccgaatagctgggattacaagcgtgcaccaccacgcccagctaatttttgtatttttagtagagatagcgtttcaccacgttggccaggctggtctcgaactcctgacctcaagtgattggcctgccttggcctcccaaagtgctggaattataggcatgagccactgcgcctggtcttttttttttttttttttttttttgagacagagtctcactctgtcacccaggctaccgatcagtggtgcgatctgggctcactgcaacctccacctcccaggcttaagcaattctcctgcttctgactcccgagtagctgggattacaggtgcgcgcctccatgcttggctaatttttgatttttaattttttttatttttttaagacagagtcttacactgtcacccaggctgcagtgcagtagcccaatcttggctcactgcaacctctgcctcctgggttcaagcaattctcctgcctcggcctcctgagtaactgggattacaggtgcctgccaccatgcccagctaatttttgtatttttagtagagacggggtttcaccatgttggccaggctggtcttgaactcctgaccttgtggttcgcccgcctcggcgtcccaaagtgctgggatcacaagtgtgaaccattgtgcctggcctaattttaaattttttttagtagagacagggtttcaccatgttggccaggctggtctcgaactcctggcctcaaatagtccacccgtcttggcctcccaaagtgctgggattacaggtgtgagccactgtgcctggcccaatttcttattttataggagaggtcagattgaaaaattgtgtctaatcccacacatgggggtgggggtggaggattgaagagttctagggacctttgtagatgggtgctgtccatggggaaatattatacaaggaacaggtaacggaaatgcagagcagggaggcccagtggagagatcccaggaagacttctcagaggaggtggcaatgatgatggactaagaacgcataataatgtctggggacactccttatgtgattctttttagccacagtaagtcaccatgttgcttatgtgtccccagccccaaacgcccactcccctcactgccaccccagctcccagagcagcaagtgtaatcatgggggcaggggagagtatcttcctttgtcttacagctggagggggccttgtacacccactcctaatatcacagtaggtgtacaatgagaggtcattgagagcagcctccccttcaacaccagccaccctcctgatttaaggtttgagcactttctcctgactccataagaatgacagctaacacttattgagcaccaggttctattcgaagtactttataaatagtatctcatttaaacttcaaaacaactctgagaggctgggtgtgatggctcatgcccataatccccagcactttgggaggccaaggcaggcggatcacctgaggccaggagttcgagaccagcctggccaacatggtgaaaccctgtctctactaaaaatacaaaaattagccggcatggtgtcaggtgcctgtaatcccagctactcaggaggctgaggcaggataattgcttgagcctgggagacagaggctgcagtgagccgaggtcgcaccactgcactccagcctgggcaacagagtgagactctgtctcaaaacaaaacaaaacaaaactctgagaaaggcactaatatcatcactattttttaattgagttagcctgggcttctctgacttcagggcctgtgcatctgacccctcttctgtgagccctctgcttttctgctttttccccagtccctgcttcattggagatcctggccttttcctctcctctggccccctctctacactaacagggacacatcaggctcacacctggacatctaaccagggtgaaggaggggctctttggggtacccactcacagatttctgggacattttcttatcctttaaaacagtcctataagctaggattgaaatgatttcactgtcatcccatagaaaaggaaacagactcaaagatgtgatgtgacttgttcaatatccagaggtgactcttgagtctagtgctgccctgactacgccacactccctcttctccagccaggcacttcttccttcttgggagtcaggcatgagtcagttgcccccttcaatgagacagaagagagggctgtgtcatagaagctttgagcacagtgtctgcttctgactcccagagtgcaagcctcagctgtcctgctgtttagaccagctccacctgtagggcccctggaactgaccagcaggatgagaggtgaaggaagagggtgatggtggctgaatcagtggccgcagcaagaacctgccccagcccaggacggcaggcagggttggggaggaagatgactttggtattggaacagagagagtggcaagagtttgatctttgactctttagtcagagggtgctggtccaatcgtagctagattggagtcctcacccagggctggcagcttttacggagagcactgcagccccatgtagcaagacacagggaggcccttccttgggctgctagcctgacacacaggaatcaatcccccagaagcaatcccacaggagcgagaagctgtgtgcctccagacgttccctgcaatgttaccaatgcaaaataactaccaaaaaaaaaaaaaaaaaagcagctaaatatccaatgagagatatcctgatatcctggcaactcactctggaatctgacggtgtagtgaacagcatggaaaaagttggtggaatgaagtggagtctacatcacacagtgtcccctgaaggatgactcacaggaacaatttctcttggtcccagtgccaggaaactctgtgtttctccggggcagttgctt

SEQ ID NO: 7017 - DNA, 24438 bp, Homo sapiens
gatatatgcctatatatttacatttatatgtatatacatatttttaaggaaaaaatacataaagagaatatgcctaaataggattttgtgggatgaataggagttttctggatgattagaggatatgagaaacacatttaagcttattttaggaaataatataagaggtcaaagatgtctgaagtgtattattctgagaactaaaggtgtttgagtctatctatgtgaagaatgaaagtagtaccacatgatttctcacattttgcaaacttagaattctggaatagtcttttgatacttctttttttcgtgctatttactgcatcaccaatttctatcactttttcattatattatctctcgcattttttctttccttcatcatttccacaaacattaaaatatttcaaaccagcaaggtatggacaccaaaccatcagaaaaggtatgagtgataattccactgaagcccttagctaagccaagcatggctcatttagactgggggcaaagtggtgggagtgggaggagctggttgtggaggagaggttctagggaagcagggaggggactctggggagctcagggaagtggctctttaccaaccggtacagaaatccttcaacatgtcaacaataatattgccatactggggtgtgagaaataccaagcatccttgaatgagaagctgaacctcttttttttttttttttttttgagacagagcctcgctcagtcgcccaggctggagtgcagtggctcgatctccgctcactgaaagctccgcgtcctgggttcacggcatgctcctgcctcggcctcccgagtagctgggactacaggcgcccgccaccacgcccggctaatttttttgtatttttttagtagagacggggtttcaccgtgttagccaggatggtcgcgatctcctgacctcgtgatctgcccgcctcggcctcccaaagtaccgggattacagggaagctgaacctcttaactagtttttataaagacactcccacatgcccctgacttttgccttcttttctggccacacctctgctcgacttaatatccaatacttcctaatccagagctgagccattttgcaggtctgtggtgtgaattgatctacttgtcatcagcttccctcttgaaatagcgtaggtttgcccccctctgatctgataaggcctttacaattactttacctcatttccattttaaatgagtctgctaatagcctttttcttcctctctcccttcttccttcctccctccttttcttctttctttctttattctggaaatctagagtgatttttaaaaaaagcaattaggattatttatttcactcccctaattgaaatacagttaatgactgcctatttctattgaaacaaataccagactcctttcttttgcctgcaacactgtatctgctctgcacctgtgaagctcgcccgcttcattttgcatcattctacacttcagccttctttattgcagacacagagggctttcattttcttggacaagccatgtgcttttctggctccgaagcctcccacaggttttcccttctgcccataacaatcttcgttcccatttgctaccacagttcccaacctgcctgcacctcattttccgagctgattcctcctcagcattcatctcttggcttaaatgaaactttctaatctcctagacaattccagtcttctacatattctttcataataggctgggtggactttaattctgcctagcagggtacacatcacagagagaaccctcaatatcatattttagaatgaatggatagaggctgaattaatttgattctcaggctttcagtaattaatttgatactcagtcttttaagcttttttcttaattgtgtgacctgacaaatatcagtacctctgtgtgcctcttcagtttactcatctgttacgagagctgtctttccattttgagaagtcagtgagctactacagccaacagtgctgagacctctcaggctcattaaactttgagctttatgcctttttgcaaatgttctagttcccaaaacaatattttccagctagttgaggctcagttctttttttatgagctaataacccaaacttggcacttcagagatttaaagcaattttaatattcagtgaaatattaaacggactaggagtaccagctcctgcaatttcaagctgcaagatcttacggaagctttaaattttctgcaagtctcagcatcttttaaaataatattctaaaactgtaatttaaaaattcaaggagtttgtactagatttcaagtctccagcctttgtttgcactttagagatcataacaaaagtctgctgatgcaaatttgcacacagttgctgataaaggtgaagtgagagaagcttttttctggagcacccccagcttgctactttattctcttttctttaaattttgggtggagatggatgaacaggccttgcttataccttgcatatcaaacacacctttcagaaaaccagacaagcactgggagactcttaatgcctttgtgtaactttgtttcactgaactaaataaatttagatgtaattcagcatttgcaaatatgaataaaaagttgtttattggtcttagaaaactgttttggaatgtggaacattaaattgctttatagcaagtttatctgtgactcctaaattctcttgaatatagctattagagtcatatgcttgtttactggtaacctgagtttactagtaaacatgtcaatagtattgctcagacaagaaaaggaggtaaatcacattcgtttataattaaatgaaatttagtttctatcctctaaactttacgattatattttcattttcctaggtgatttcaaaaggtgtaatcattcttcatgggcaacagaaaattgagatcaacgaaaatggtgaggcctctaattttagcatataatttaatacaaatagaatgctttaattgggatatattttacatttttctttaaaagtcacaatcctcccattttaggactgtttactgccccctaaactacccttggggaacatgtaaagacatgtgaataggcacaatgccaaatgaaaaaataattacttaattaatagtgcattaattatattccaaacactactataatgggaaagggtcattgtccttccctttcttttccaagaaagacaggtaagtacttttacattcaaacaagaagggatttttaaaaagaaacaaaagtagactgaagtttgacgtaataagaaatgttcaactatttctttcttttataatttatggaataggttatgaactcctcctagaaatgctttataaattaaatttggtgggtcggggcagtctctttggcagtgggtaggatggctagaaactcagtggagggtttctgcaagatgacagtcagctatctcaccaaagcactttttcggtttgaaattttcttttcacagggaggaagggcatattttccatttctatagacattaaccctgaattagcgccctcagtacatatgcttgtctatagcttgcatcctggaggagaaatggtcactgatagcacccaattccaattgagaaatgcttcgaaaatcaggtaggtgccaaaaatgattcttttttaatttgggggaaaactaaggagaacttaagagagtgttgggtttaaactcccaatttttcatagaattgcaaaatgaaaaataaaagaaagctatggagaagttaatatgttggatgattgaagagtagcaggattatagcattcactttggatgttgttccaaatccagttgttcctaataataatattattaggtgggtaaagcacagaaagcccttttaacttatgtgtgtttttaaaaaagttaagaatagtctaaaagatgattcttctcatatggcttgccatccttttgcccttttattttcattttcaggtcaacttaaatttttctaaagaaaaaagtttaccaggatccaatgtcgatcttcaagtctcggctgcttcaaactctctttatgctctttgggcggtagaccagagggtattgctactaaggaattatggtcagctgccagcacaaactgtgagtgattaaaaccatctttgtttaccacccacagtatagttttatgtctttacctttggataaaaacaggataccttaaataaactagaggagaaaaaaattgtccagagttccaggcataaaaaatattttaggttagaaatcatgtacaatgactctactccaattatactgattctcttatggaaaaaatgagcaacacttttaaaaataaataacaattgctaaaggtctactatttgacacttgctctactgagtattcccatatctattatttaattttattctcatattaatcaaccctatagaactaatgcagtattcccattttgattaatgtctaatcttaggctcagggagatttagtaaattaaccgagaacattctctaacaatgtccttgaatgagtcctcaaagagtattgagcagtgcctttatctggaatgtattaaaatccagttgagcctcatggactttttgttagttttaatgtgatttagccagcaattatttaactgattaaatagtatttcaaagtttttacagatctaagatcctatactttctcaatatgtgtttatttggtataggtatgatgacagttctacataggatattcataggattatataggttatttatatactgcttgtggggaaaaatgaattgttttctatgaaaaaatacagttgactctcttctaccatctaggtgtatagtcagctacattccagcgaactacatggctattatttcagaggacttaacttagaagatggccttaaagtgccgtgtcttgaagatggacatatcctttacaatggaatttattacacacctgcatgggctgactttggaaaagatggctatgaccttgtgaaggtaaggcaactaagtcttaaaatggtgaatatatgtgacaatatataaataaatagaaatattcatggtgtgggtttttaatctcagaattcttagagtacaaatttacaattagtactaatgtctgagaaataatatctcaaataatgttataatagcaaaaagacttaataaagttcttatagttataattatataatagttataatattataaagctataatagttattctatatagttacaataaattatagttataatatatttttaaaagttgtattaatataattttatttaaaagttataaagttataattataaagttataaggttattataatgttataataaggttaagttataaggttattagaacttcattataaaactataataatattttaaataactaataatattataatattaggaaaagaactaatatgtgagggaattatcagctttcctgacataatattatgtacattatatactggtgtctaatataaatccccattttgctcctacgtctaccctcgaatttgatttctactattttaaagtattctactatatttaaagtgtttataagtgagataatatccctagttcaacaaaaatgccaaattcaaagtagtgaaagtacagtggggtatgatatgagatgtctttttttgtcctctcttatttaaaggttttcatcaacagctcttaattaggaaaatagagcaaaagccattagaattagagaaactaaggaactcaaagacatggaatttaggaaatgtcagtgaagtatctctaaatatatgacaattagagatggagaaataaataagtggaaattgaaaatatacatagaacaaaaaaccagtccagactgctagtctatgttgttatgtgatctaaaattgattttatcttgaaaggcaacaggattaaagatttttaccaactctcacctccggaaaccagtattgtgcaaggattctaaccatcttgamtctactgattacatacccttaggtaagtcacagtataatgcgaagggcaggtgacaggttataatctcttaatgcttttaaactgattgggaaaagaggggagrtgattattttcttttgctttgtcttttaattcatttaatgtgcctgtcatgtcagatgytagaaatacagtgagaataatgcaggtaaatctttatattcrtgaagtttacattgaatttgggatgcagacaatatacaaatggctgcatattgtcatttgtatatttcttgtgttgctgtaaagaaatayttgaggctgggtaatttacaaagaaaataggggccaagtgcggtggctcacacctataatcccagcactttgggaggctgaggcaggcagatcacctgaggtcaggagtttgagacaagcccgggtaacatgttgaaaccctgtttctactaaaaatacaaaaaattagccaggcgtggtggtgcatgcctctaatcccagctactcgggaggctgaggcagaagaatcacttgaacccagraggcagaggttgcagtgagccaagattgtgccattgcactccagcttgggcaacaagagtgaaactccttttcaaaaaaaaaaaaaaggaagaaaataggttaaactggctcacggttttgcaggctgtgcagcaaacatggtgctggcatctgctcggtttctggggaggcctcagaaaacttacagtcatggtgaaagacaagggggagcaagtgtctcacgtggccagtatgggagcaagaagaggagaggcgtcacacacttttaaacaatcagatctcacaagaagtcactcaccattgcaagaacagcaccaagcaatgaagggtctgcccccatgacccaaacacttcctgccaagccccacctccagcactggggataacagttcaacctgagatttgaggggacaaatattcaaactatatcaatggcataatttcagatggtattaagtgctctgatagttaatctttcctgaattattgctacataccaagcaacattctaagcattttacaaatgtcaacccatttattcatcacagtctatagattggaagctattaactgcaacttatcaatgagaaaaatgaagcttaggcaggttaagtaacttgtccaatgcaacagatgctaaataacagagatgggattataatccagacgttctgatcccaaagaccatgtttctctatcgtgagttactatctctcaaagaactactgtaaggaaaataaaacaagataaaggaaaagagcagaacatcaggacgctattttattttatttttattttttttttattattattgtactttaagttttagggtacatgtgcacaatgtgcaggttagttacatatgtatacatgtgccatgctggtgcactgcacccactaactcgtcatctagcattaggtatatctcccaatgctatctctccccccgcccctgaccccacaacagtccccagagtgtgatgttccccttcctgtgtccatgtgttctcattgttcagttcccacctacgagtgagaatatgcagtgtttggttttttgttattgtgatagtttactgagaatgatgatttccaatttcatccatgtccctacaaaggacatgaactcatcattttttatggctgcatagtattccatggtgtatatgtgccacattttcttaatccagtctatcattgttggacatttggcttggttccaagtctttgctattgtgaataatgccgcaataaacatacgtgtgcatgtgtctttatagcagcatgatttatagtcctttgggtatatacccagtaatgggatggctgggtcaaatggtatttctagttctagatccctgaggaattgccacactgacttccacaatggttgaactagtttacagtcccaccagcagtgtaaaagtattcctatttctccacatcctctccagcacctgttgtttcctgactttttaatgattgccattctaactggtgtgagatggtatctcattgtggttttgatttgcatttctctgatggccagtgatggtgagcattttttcatgtgttttttggctgcataaatgtcttcttttgagaagtgtctgttcatgtcctttgcgcactttttgattgggttgtttgtttttttcttgtaaatttgtttgagttcattgtagattctggatattagccctttgtcagatgagtaggttgtgataattttctcccattttgtaggttgcctgttcactctgatggtagcttcttttgctgtgcagaagctctttagtttaattaggtcccctttgtcaattttggcttttgttgctattgcttttggtgttttagacatgaagtccttgcccatgcctatgtcctgaatggtaatgcctaggttttcttctagggtttttatggttttaggtctaacgtttaagtctttaatccatcttgaattaatttttgtataaggtgtaaggaagggatccagtttcagctttctacatatggctagccagttttcccagcaccatttattaaatagggaatcctttcctcattgcttgtttttctcaggtttgtcaaagatcagatagttgtaggtatgcggcgttatctctgagggctctgttctgttccattgatctacatctctgttttggtaccagtaccatgctgttttggttactgtagccttgtagtatagtttgaagtcaggtagtgtgatgcctccagctttgttcttttggctcaggattgacttggtgatgcaggctcttttttggatccatatgaactttaaagtagttttttccaattctgtgaagaaaggcattggtagcttgatggggatgtcattgaatctgtaaattaccttgggcagtatggccattttcacgatattgattcttcctacccatgagcatggaatgttcttccatttgtttgtatcctcttttatttccttgagcagtggtttgtagttctccttgaagaggtccttcacatcccttctaagttggattcctaggtattttattctctttgaagcaattgtgaatgggagttcactcatgatttggctgtttgtctgttgttggtgtataagaatgcttgtgatttttgtacattgattttgtatcctgagactttgctgaagttgcttatcagcttaaggagattttgggctgagacaatggggttttctagataaacaatcatatcgtctgcaaacagggacaatttgacttcctcttttcctaattgaataccctttatttccttctcctgcctaattgccctggccagaacttccaacactatgttgaataggagtggtgagagagggcatccctgtcttgtgccagttttcaaagggaatgcttccagtttttgcccattcagtatgatattggctgtgggtttgcatagatagctcttatgattttgagatacgtcccatcaatacctgatttattgagagtttttagcatgaagggttgttgaattttgtcaaaggccttttctgcatctattgagataatcatgtggtttttgtctttgattctgtttatatgctggattacatttattgatttgcatatattgaaccagccttgcatcccagggatgaagcccacttgatcatggtggataagctttttgatgtgctgctggattcggtttgccagtattttatagaggatttttgcatcaatgttcatcaaggatgttggtctaaaattcacttttttggttgtgtctctgcccggctttggtatcaggatgatgctggcctcataaaatgagttagggaggattccctctttttctattgattagaatagtttcagaagtaatggtaccagttcctccttgtacctctggtagaattcggctgtgaatccatctggtcctggactctttttcgttggtaagctattgattattgccacaatttcagctcctgttattggtctattcagagattcaacttcttcctggtttagtcttgggagagtgtatatgtcaaggaatttatccatttcttctagattttctagtttatttgcgtagaggtgtttgtagtattctctgatggtagtttgtatttctgtgggatcggtggtgatatcccctttatcattttttattgcgtctatttgattcttctctctttttttctttattagtcttgctagcggtctatcaattttgttgatcctttcaaaaaaccagctcctggattcgttaattttttgaagggttttttgtgtctctatttccttcagtgctgctctgattttagttatttcttgctttctgctagcttttgaatgtgtttgctcttgcttttctagttcttttaattgtgatgttagggtatcaattttggatctttcctgctttctcttgtgggcatttagtgctttaaatttccctctacacactgctttgaatgtgtcccagagattctggtatgttgtgtctttgttctcgttggtttcaaagaacatctttatttctgccttcatttcgttatgtacccagtagtcattcaggagcaggttgttcagtttccatgtagttgagcggttttgagtgaggttcttaatcctgagttctagtttgattgcactgtggtctgagagatagtttgttataatttctgttcttttacatttgctgaggagagctttacttccaagtatgtggtcaattttggaataggtgtggtgtggtgctgaaaaaaatgtatattctgttgatttggggtggagagttctgtagatgtctattaggtccgtgcagagctgagttcaattcctgggtatccttgttgactttctgtctcgttgatctgtctaatgttgacagtggggtgttaaagtctcccattattattgtgtgggagtctaagtctctttgtaggtcactcaggacttgctttatgaatctgggtgctcctgtattgggtgcatatatatttaggatagttagctcctcttgttgaattgatccctttaccattatgtaatggccttctttgtctcttttgatctttgttggtttaaagtctgttttatcagagactaggattgcaacccctgcctttttttgttttccatttgcttggtagatcttcctccatccttttattttgagcctatgtgtgtctctgcacgtgagatgggtttcctgaatacagcacactgatgggtcttgactctttatccaatttgccagtctgtgtcttttaattggaacatttagtccatttacatttaaagttaatattgttatgtgtgaatttgatcctgtcattatgatgttagctggttattttactcgttagttgatgcagtttcttcctagtcttgatggtctgtacattttggcatgattttgcagcggctggtaccagttgttcctttccatgtttagcgcttccttcaggagctcttttagggcaggcctggtggtgacaaaatctctcagcatttgcttgtctgtaaagtattttatttctcctttgcttatgaagcttagtttggctggatatgaaattctgggttgaatattcttgtctttaagaatgttgaatattggcccccactctcttctggcttgtagggtttctgccgagagatccgctgttagtctgctgggcttccctttgagggtaacccgacctttctctctggctgcccttaacattttttccttcatttcaactttggtgaatctgacaattatgtgtcttggagttgctcttcttgaggagtatctttgtggcattctctgtatttcctgaatctgaacattggcctgccttgctagattggggaagttctcctggataatatcctgcagagtgttttccaacttggttccattctccgcatcactttcaggtacaccaatcagacgtagatttggtcttttcacatagtcccatatttcttggaggctttgctcatttctttttattcttttttctctaaacttcccttctcacttcatttcattcatttcatcttccatctctgataccctgtcttccagttgatcgcatcggctcctgaggcttctgcgttcttcacatagatctcgagccttggttttcagctccatcagctcctttaagcacttctctgtattggttattctagttatgcattcttctaaattttcttcaaagttttcaacttctttgcctttggtttgaatgtcctcctgtagctcagagtaatttgatcgtctgaagccttcttctctcagttcgtcagagtcattctccatccagctttgttccgttgctggtgaggaactgcgttcctttggaggaggagaggcgctctgctttttagagtttccagtttttctgttctgtttttttccccatctttgtggttttatctacttttggtctttgatgatggtgatgtacagatgggtttttggtgtggatgtcctttctgtttgttagttttccttctaacagacaggaccctcagctgcaggtctgttggagtactgggacgtgtgaggtgtcagtgtgcccctgctggggggtgcctcccagttaagctgctcaagggtcaggggtcagggacccacttgaggaggcagtctgcccgttctcagatctccagctgcatgctgggagaaccactgctctcttcaaagctgtcagacagggacatttaagtctgcagaggttactgctgtctttttgtttgtctgtgccctgctcccagaggtggagcctacagaggcaggcaggcctccttgagctgtggtgggttccacccagttcgagcttcccggctgctttgtttacctaagcaagcctgggcaatggtgggcgcccctcccccagcctcgctgccgccttgcagtttgatctcagactgctgtgctagcaaccagcgagactccgtggggtaggaccctccaagccaggtgcgggatataatctcgtggtgcaccgttttttaagcccgtcggaaaagcccagtattcgggtgggagtgacccgattttccaggtgccctccgtcacccctttcttcgactcggaaagggaactccctgaccccttgcgcttcccaagtgaggcaatgcctcgccctgctttggctggcgcacggtgcgcgcacccactgacctgcgcccactgtctggcactccctagtgagatgaacccggtacctcagatggaaaggcagaaatcaccgtcttctgtgtcgctcaagctgggagctgtagaccagagctgttcctattcggccatcttggctcctcccctccacagtcagtaattttttaaaaaatccctcacaggtaaattatcagcctctatctaagcacatacaataatgaggcattttgattacagaactgctctgcaataaatgagagttttaacataaaaattgaaagtactcacttttcaatgtatatcttcaaccaaaaatttagagcaacctttctcaactgttatataagaaaattgctttattgtttaactccacagagaatgtttcgagagaccatttgatgcataaatagtaccattcaggatatataggagagaatggtactatttatgcatcaataaatgtaatattaattcattacattcagtagctgtattggagacttagagataattctgttacagaactccggatggtaagggctaatttaaagttcctagcttgtttttcttttctttaattttctcagaactcttagaagtaatcagcctggtatcgttctatagcagtggaaatttgtggtccccaaatgcttgctgtcaataggcactttgtcaatggtgaacaggagattatttgattatctttttcaccagtgcatgatagggagtgctgaattttcatgccttgatatttatataattttcactggagtccacttcagttaggcagacacccatccctaaggtctcacttctatctttctcaaagayattctgcctcattaccaaagcacatgagctcctggaaagataaatatctaaatattctataaaatactgaatattacctcactaataacatctgagatgagaggcaaagattatgactatcaggaataaccagaatttggggccaaattgtcttcattgtaggwctaacagagaccrgatccatcttctggttatttattcattttccaaatgtgtaggtataattgacaagtctagcaatgatcagaattcccactgtggctcctygtgtgtggaataaacacattggagtggatgtgaaaaggttctgcctatcttatcctmaatgaactagaagttgccattatactcacagttccctgaaaataaactcttccatggcctccccatttcactcccttctgattcccagtctcagaacagagcatctcaytggtcgagcctgtcatttacctgccccctggattcaaggtaatctgggaatggagtcttctaacttctttactggaagtgaaacgcatatgttgggaaattaccaaagtatatgacaagtctacaaatggcctgaggtaaagatgtacactcttttataagccttaacaaatgtgtggcaagatgatcagggatttagaacaagacacattaagggactaattccaaggaagttgaggaatgaaattatattaaagggcttgtttctgtctcttctagagatatgtctgggaaccaaggtacggattggtagtggcttttgcagaatacttgttttccatcctyargaataggagttgttttcatttagaccttttaggatccaggaaagaagtatattttcattaacatgcttaagaatagtttcactgaattggaagctgagagtattatctggccatttggagattcccacatccagkcstctgggataacacagccaaactgtcaagaaacartacatttactgatatactttggggacaggaggatgaatgcaactaaatggatctcatggagcccctccatgtcccacaatgcagtctttacatttcatggaargagaatgttaccctcccaccacgttcaagtggaaccatctatggatcagattcctcaatttgtgaaattaagaccacacaactggtaaagaatcttaaggatctacaggcttcactgcaagaaaaaaaaagaaaaggaataaaaacatcctagtaactttttartaaattcctttactcctcaagttagcaggagagacgtaatacatttcatctctcaacgtagatggctttgataatttacttcaagcaggatcagacatttttttttacttgtatcgattggtcttgtacagatttatagatttttatatttaaagaacaatatattctatgtaagtaacatggatttagatataaaaattctgcttggctcttctaagattatttctccgagcttctcacatacctaatctccarataagaaggatctaataaaaatgaatgtcaaaaatatgagggcccttcattgcatmacttttgtaacactcaataattcatccaatcaattttgattagggttgaagttctgatttcactctgataagaatggatttgcaattcacaattccagcagaaagaacaacctggagctaattatctctaagaatgacagtattacacaccaarccctgtgagtcttcaaggcctagctagttcacaaaacatctttaatttgtttactatacaagtactttattgatgtaccagcactcttcamtatcaaaatattgacgcaaaaggtagccctgtcttcatataaaatataattcattatggatcttccagaataaaaatctaycctaaaacagttgctaaatgaacttattatgacagcttgtgtgtgtttatttgtgtaaactcaatataacattttggcaaaatatatattgaactatccatcctaaacataatctaatagggctrttttcttcttgagattacttctgcaacaagttagcaaaactatagcagagatggccagttttattagtacatcaaaaaatagacctatcagaataaacttttggcctgaattcctcatgttatgtatttaaatatttagactaggactggtcacttctagatgtaattsttccaarggttcatattttttttgacttggcctgggaagagatagaattaaatatacaaggaaaatttaagtaagttttgttaacgtgtaattcaatttgattagaacaacaattattaagccaacactttacttagacatctataccctgattacagaatgtgaattgcagccataatgcaagaaaattatatgactataataacaaggagcacagtggcttaaaattttaagctaatatgggctgtgaacatgtcatatacatttttgtgccttgagcayttggatcagtccttggaacacatctgacactctacragtgttttaaaattttatttaatytgaaaagaatgaagaaggaatgagttctggtgttctattgcacagtaggmtgacaatagtttacagtaagatttagcaaattacaaaatagctagatgagaggtttttgaatgtcttcaccataaaaaaaaaagataaatgratgaagtactggtaacactgccccaatatgatcattatactamatatatagatatgtgtgtgtgtctgtgtgtgtgtgtgtgtattgaaacatcaaattgtacccccccacttttttttttatttttgagacaaagtctcactctgtcacccaggctggagtgcagtggtatgatctcggttcactgcaaccttcacctcccacgttgaagcgattctcctgcctcagcctcccaagtagctgggattacagaggcacacgccaccatacccaactaatttttgtatttttagtagagatggggtttcacaatattacccaagctgrtcttgaactcctkggctctagtgatctgcccaccttggcatcccaaagtgctaggattacaggtgtgagccactgtgccccgccaattgtatcctttaagtatgtacaattacaatactttaaaaaaagaaaaaagaataaaggcagtacaagtttktatgaccaaagcatagtgtataatcctctaagatttatagacattagggttcttaagccctcacaggctctaccaaaagctacttgtttgtttcataagagaaaatattggcctaaaataacccttgtgaaactatccgaaactatccgaaatatggcagcaaagggtaatactctcatacaaattctgattgtttatatttttttcattattttctaggatcctcaaaacaatyggatttttcaawggcaaaatgtgacttctttccgaaatattacccaactctcgttccaactgatttcagaaccaatgtttggagattactggattgttgtgaaaagaaactcaaggragacagtgacacaccaatttgctgttaaaagatatggtaaccagttgctatttgtagctgtcctrtgtagatgaagagtttaaaggatggaccaacacaacatttrtgttagacttaggcaggagtaggtgaagctagaactggttttctttgtctcccttccttgacctggttggcttygtcatcagcactttgctgctcctctctccttccccagtatccttattctgattcctgccttctttttcccctagaaaatatacattttttctagaatccccacagtcttctaggagagatctaagagattgcaatagaaagaaaatgtgaggccrggtgtggtggctcacgcctgtaatcccagcactttgagagactgaggygagtggatcatgaggtcaggagttsgagaccagcctcaccaacatggtgaaacccagtctctactaaaaatacaaaaattagcccagcgtggtcgtgcatgcctgtaatcccagctactcgggaggctgaggcaggagaatggcttgaacccygtaggcagaggttgcagtgagccaagattgcaccactgcactccagcctgggcaacagagtgaaactccgtctcaaacaaacaaacaaaaagaaacaaaatgtgaaattctgargatagggaaaagaaaagaaagaggaagaattaatcattagtgagacaccaccatgtagaatggtgccacacaatttggggcaaatgatacatagctcatacagatggagggtacaaggaatcatagtaarctatatgactgcaataaggtttgcttgcctgtgattgtgsaggctaacgtatatttctcttcgtttccagtgctgcccaagtttgaagttayggtcaatgcaccacaaacagtaactatttcagatgatgaattccaagtggatgtatgtgctaagtgagtatttattcagagatttaccttcacaagaaaacacaaagctcagagagaatgagaagtgagattaaccatgaaactttaattatttatatgcttacattaatgttattagagaagcaatgaatcctcactgtagaaaatttgaaaaatatagagaaaaacacaagacattacctattattaatttgaccaactgccattaacattgtaatgtcactaacattgtaagtttcctctaattttaatgaatattttccatgactgcaatcatacttttctatttataataattaagaaaacatgcctacgtattatgccaatcttttcatgaattccaattttctgctgcacatatttttatgtgactatacccaatttaattattttattatataatatgttggctgtttcattttgttttcctggtaattaataattttgcagtatatgtctttgtgtataacatataataggtagcttttgaatgaaaaattgtttacttaagaaagatttccagaaaaggaattaccaagacaaaatatgtaacattcttttagtcttctgattgccatactcctcactaaacatgttgtgccagtgtaggattctagcagctggtgtgaaattctcattgaatctttactatcatggcatattttcattaaaattagaatatgagctattgaaatggcaaagtgaagataaagcatcttatcaagttaatctgaattatttgaattctcttaatgtaaaaaaatctacacgatttcagaaatttgtattttgtttttggaaaattatttttaatttttttttcttttttactgccttttctcaaatttctaataataatttataaacaattggccaggcacggtggctcacacctgtaatgccagcattttgggaggccaaggtgggggagggatcatccgaggtcaggagatcgagaccagcctggccaacatagcgaaaccccgtctctactaaaaatacaaaaaattagacgggcatggtggcaggcaccagtaatctcagctactggggaggctgaggcaggagaattgcttgcacccaggaagtggaggttgcagtgagccaagatcatgccacctcactccagcctgggcgactgagtgaaactctgtctcagaaaaaaaataataaaataaaaaataaaataaatgttttttgaatgtcaactagtttgttaagctctgcatatatcattaccacagtgctatgagataggagctattgtcatctgtattttataaagaaagataataagacacagagaattaaaataacttatcaacagtaatggagcttgttgatggcagaactaggatttagacctaggtttttcagcttcaaagctactctcctaatcaataactgtcatatactttataaaaacagttaacaatattaatatttgccatatttgttaagcactttgtttaatttatgacatgaaaattacttgcctttgagtatttccagcagtctattaaagatacattgattaaagggctgtctaatgaacgtgcaagcgtggttcttaagatgcctttgatgccccagagaatcttgcaaaccagttttcagccttcttttttttttttcagtagcatttcaaatcttcttttgactttaggaaatgattataaatttttttctaagttttaatgaagagtagttgaaaataccagaatttaatatacgtaatagatgagagactgtgtagatcactgatgttaaaaatgatgaggtgataaattcaagttggaagaaatccagaatactaaacaggtttcactagaaaagccaaacgcaaagccagagctttcagtggcattaacatctcatttatttatctgcacgatagtatgctaaaaacaaaacccacaacacattggaagaacaaaaatgtttctcaaacatggcctttggaaaatacttgcaaacctcatgctaacatggaactggtagttccttagcagtatgtcaggttacaatccatgatcctgatttcttgaaatttctttgatgttgtattttggatagagttatattaaggagtaaatcagtatcagcaataataatatcctgccaggaggccaggcagctagactggagctgtgcttgctacaaagttatttctgggcagattgtgagagcactgtttctagaaggttcacgtcagttgtatactgtgtctcaaattgtatgatactgtgtctgtgtttctttagccttttctgggatttagcttggaatggctagagaaaacaagaaaaaaattggattattttagcaaacaaagtcagagatgacttaggcttttaagagggaagaaaatttacctacagacgaagagattttaatacactgcattagcattcactgaaagcttttcaaatcacgaagggattattctgtcctgtttttaaaatttaagctacatgtcttataggcatatgttagcttacagataatacaataagacttttattttataaataaaaaacattaagtagaaataagaagaaatgttcaggtataatatgtgtggccagatctaagtctggcctttatataatcatgaaacctgacacatgattttattggtatgaattgactcagaatctcaaaagtgttaggaatttttaaatagaaagagaaaaaggtgagtggaaagaaaagggcacaggctatggagtgaggcagatctgagttcgaattttagtttcatcaattacaatgtggagaagttacttgacctcattttacaaatcagggtcactgggaaaaataaatgatatatatcagtgtccaacagttagaaaaaagtaatataatctgtgaaaataatattcacttttattatatgctagttttacatttggttgtctattaacaaaacaaaaaactccaattgactggatttgcctttggttgaacctttacaaatcttgtgttgtagttttgtgttttaggagaaaatgagatactcaaactggttatatttttggtcaaagcataaccagttcatgccagccccatagcctttatatttagtgagtggtaaataaaaattcgtgtttaaaatgttgatctggaaatgtttcaggatcctgaatcatccaagttttatatacatatatatttttctgataaaagggaaagtgctgcaatgttatgatgtttctatcagattaaaatatatttttaaaaaactcaatttaagcattaaatcatattcaatgagattttagattattttagattctgccttaccctgaattcaattttttaaaggcagccaaatcctcctgagatgaaatgcccagtttaacctgaattctgtggggaacctaaaccctcaccaatagggagaattcctaattcaatttggttagactgggttactcacagtttagagacttcctatataatttctgaagaagatcataaaatattgctatgatattgcttatctgtaatcataactacaccttcccccattaggtacacctttggccaacctgtgcaaggggaaacccaaatccgggtgtgcagagagtatttttcttcaagcaattgtgagaaaaatgacaatgaaatatgtgagcaatttattgcacaggtacagaccatgatctttactccaaaaaaagttctcactcatttttcattcttattctttctttgatttcatttataaggggaacttaacaatactattttcattttattgataatggagtttgcagctaaataaagtgaagaaagagaagaaaatacagtgcttaaagcagttttttattccatagaccatgtaaattgttctccacctatagattcatgggatttttagaatatgaaaggtatcgtgggctttgttgttttgtatatcgcctaggtggccttcctgatttttctttggagaatcgttaatcatcctttaaatgagtctgtgatattactctccatgccacctggatttttttttagtggaaacagcttacttgcaatcaactgcaattcagagtacccccactatattactttagacttgcagttcatatgtgaagtcatcatttgctctatctgcagcatcctaaccttaagtgaacaactcttcctatctctttgaaattgtcttttgactccccaaagtgaagcttgtgtacgccacatagttcatattttaagtccaattgtcctaaagttactcatcaaatttagtgaacatcctctaggtaaatatcaataattgacaaagacaagcagaatcctacctttacataggaaatgcaggcaaagaaaactagggtggaatttctccatgtcagcagtacattctgatagagttcagtcaactgttttacacaatgatgggtgttccctcagcaaatggtttatttttttcccccatgtgaaaaaaatacccataaacaatctggtagaggctaggagcagtggctcacacctctaatctgagcatgttggaaggccgaggcgggaggatcatttgactccaggagatcgaaaccagcctgggcaacatagtgagccccttctctacaaaaattagccaggcacagtggtgcacatctgtggttccagctacagggaggctgaggcaagagaatcactggagcccaggaggtcaaggctgcagtgaattgtgttcgcaccactgtactcaaggctgggcaacagagcaagacctgcctcagaaaaagaaaaaaaaaaaaaatctgtccggtggaactatctttatatatgagaggctttatttacttgaaataaatttcttagagtgagtttcctgagtcaaaggaaatatagataatgttcatagacagataattttaattttaataaatattagcatattgctctcctaaaagtttttaggcattcaaattcctgtcagaagtacatgagaatactatattttccaaattactttcagcaatatatttagaagttttaaaagtttttgtcattttgatagacacaaatttagcttgttttaacttgtgctatctaatttctatttagtttgagcaacttttcatatttttgttatcaatttggatttgagaactcttaattacccatgtttttctgttcatgtgaaatggaaactttcagtgtaagtactgccttccatcctacaagcattttttttcaagcctgttatttaaataggcaactcatttactttgtcatatttttgacatacccaccttccttatgttcctgggtttccagccttagaaaaaaaatctcactggcccctgtgttgtacatgtggctatctaagtatgctcttaagattgtttacaattttctaatagacataaagttcacttccaatgatgttctaaaatgggaatttttcttccagatgtgggctgtgttgtgttagcacctatctcacaattttgttctctctcactctttgtcctaaatcatgcccacgaaagtttcgtctattttattggttcttatttttactattttctttcttttattattttgtgttcctaaataatttattttctctttcatcttattaattcttttttctaatatttgtagttgattttgttggggtttaaaaaatatattagctgtttcttttagtaataagcacattcactgttttacatttcttctgaactgcagctgaataccattgactttgatgcgaagtattttttcattactctaatatctggattcttattggtttactttatgtattctctttgtttcaaggattcctgaaaaaaggcttttctcttattttcgaaataattaaggttcttctgatcactttctatgatttcattttaatttgactatattatcattagacaaaataaaattgcttttgttgttgatgtaatggctgttaatttaagatagagaag

SEQ ID NO: 7018 - DNA, 12682 bp, Homo sapiens
agcagttctgaagctctcagcagaaacatcggcaccagttttacataggttattggttgatttccaagggctacaaaacttctgacctgaaaaatatttgacactaagtccacaatatcctcagcaaatcatgaaaaatgtatccaacaaaagaagaggtgaggatgagatacagatgcaacataataggctctgagctctactctaagaacactataacaattatggcattgtggctaacagggactcagacatacccaacaagctggacaacggatttggaagaagcagaacttggtatgagacctagctctggtgcttacaagtcatgtgacattcgacaaatcatttcagctctctgtatctttcttcaataataatatagggccactccgggcgtggggctcacgcctgtaatccctgcactttgggaggccaagacaggcggatcatgaggtcaagagtttgagaccagcccagacaatatggtgaaactccatctctactaaaaatacaaagttagctggcgtggtggtgcatgcctgtaatcccagctacttgggaggctgaggcaggagaatcgcttgtacccaggaggtagaggttacggggagccgagatcacactattgcactccagcctgggcagcaagagcgaaactccgtctaaatataaataaataaataaataaataaataaataaataaaaataataatactaataatatggggtcactaagcgttacgaaataaaaaaaattggccaggcatggtggctcacgcctgtaatcccagcactttgggaggccaaggcaggcagatcacctgaggtcaggaatttgagaccagcctggccaacatggcgaaaccccatctctactgaaatacaaaaattagctgggcgtggtggcaggcacctgtaatcccagctactcaggaggctgaggcaggagaatagcttgaacctgggaggcaggcgctgcagtgagccgagattgtgccactgcactccagcctgagcaacaagagctaagccctgtctcagaaagaaaaaaaaaaaaaagaaaaagaaaaagaaaaaatatacacgtgaaagtggttggtaatatgtggcatgctatccaatatcaagtacaatttttatgatgaagtcgattagcaataagactattgctactggtgaaaactcaagaaataagactttacagcatgctgtttgtagatgcctacaaacccatatgaccatcccaccccaatcccctcttatgcaagtaataaaaactcatccaactagatcgatgaatggcatcagaattttaagacagagaacttttatgtttgtgaaccatattataaactggcaaaaagtagacatgaaaggcatttgctgtggtaagaaatcctgtgaattgtttagtaattagaataatcactctctaacgtttctatcattagctccattaaacatgcatacattcagatgtatgcctgccatattttaaaaatgaggtctaagctggatgcagtggctcatgcctgtcatcccagcacttgagtaggcagaggcaggaggattgcttcagttcaggagttcaagaccagcctgggaaacatcatgaaacatcatctctactaaaaataaaaaaaaattagccaggcttggtggcacacgcctatagtcccagctacttgggaggctgaggcaggaggatcacttgagcctgggaggtcaaggctgcagtaaggcaagattgtgccactgcactccagcctgggtgacagagtgacactctgtctcaaaaaaattttttttgaagtggagtcttactccacatatgtttacaaagtatttttaattgatcggtgtaccatactgatattgtaaaatcagaaagaaagaggtttcaatgtgcatcacatgttgtagattcaggatgcttcagagcacgtgaaaaagcagggtagggctaatgcacaaactctctcagccaaactcctgtgtctgccaagatcctggattaaaactcaataatggagatagcttcccaatttgttaaaggatagcactatttcaattttattattgtcctctaatcatttttcttacatcctcagtgcctgtgactattgtctctgagagaatgtgccataagatagcatttctgatttggcagaaaatgctatatttagccgttttaagtttgggttaatactaataatggtctccacgtagcacatacttgctgcatgggtgtcaaggatacaagtaaatgcctgtggttctaagcctcagcatggttctgcaagatagacacttcagtattatccctactttaaggataagggaaaggaggaatagagaagttaagtaacaaggtcacatagccagtccatggaggaaacgggaattcctctaggttgcctaactctagagcctgtgcccttaaaccggggcatatgaaatccatggtatcactcaagaaacaccataattttcaaatgccctgcttcttgaacatgtttgagaacccctggattcatgacctggtaaaaacaggaccattatcacagagtttgacataatgctggcttcatgaatatgaagttccaaaacaaaatttaatattagaacgacacagatgacatctgtatttttaggcacacattcacacacaagtgcacacacacatacacatcccataccctataccttagtcattttactagataacctgcctagatttattttattttggctgtgaatgaagatattcctcttccaattcaataaaaaagcacaacagagccataaatacagagatgaatgtaagaattcaaccatttgattgcattaattcaaagaactgattaaggagtcttcatacaatagtagaaatcagtttgatttattaagctacatcatcctcgaaatctgcacagagtggggaaaaaaataaaacctgtcactttaaagaaatacactctacaataaaaggaatgaggaaaaagaacacctaggataatttataaacatatgcataatctggagaaaccagctcacaactggatagttcattcctccaagtctgtgactgggggcagctcctccttcattccaccctccaactttcaattaggagagtaatatcgctttgttattgtttctccttaacctagaatagggcgatgcaaagacctgtaagttataaacactgctcagcaattaagcaggccattagtcttcttcagcattataacatcatggtgctcaactactctgtcctgacacatggccagggctgagtgtgacagtcaaaggttcccagcataagaggcttgcactctgctccaagggaatggaaaaagcctttgtccaaacaatgccaagagaaaacatgctaagactcttcctcctcaaagtgcggcccactggccttctgccccaggcaccacctgtgagctttttagaaatgcagtcttcctccaccctagacccactgaatcagaatgtgattttaacaaaatctccaggtggtttctaggcacagtaaagtttgagaagcactgtcctaggcttcagatgacaaccaaagcattccatcccaggagcactgctctaactgcaaggtgggtgaccagaaagttaagaaagtagaagtcttggaagaaatggttgacagagggcctggaaaagcttcacctacaaggacatggtcctactgaatcacttttaaagatttgcaagatctcatgtagcctgggatcaaggtctacttcaggaggccccaaggacaaagactgtgtagtttagaccagaatttctcagcagtggaactactaacaattttttttttttttgaaatggagtatctctctgttgcccaggctggagtgtggtggcgcgatctcgactcaccgcagcctctgcctcctgggttcaagcgattcttctgcctcagactcccgagtagctgggattacaggtgcatgtcatcatgcccggctaatttttgtattttttagtagagatggggtttcactatattgaccaggcgggtctcaaactcctgacttcaagtgatccgccttccttggcctcccaaagtgttaagattacaggtgtgaaccaatgcacccggccactactaacattttaaacagctaattctttattgtggaagggctgccctgtgcattgtaggatgtttagccatatccacggcttctacccactaaatattagtgtcacaaccaaccgccagtactgaaaatcaataaggtctccaaacattgccaactgtctccagggagataaaaatcacccccacttgagaaccactggtttagataaccgctagtttgtatgaatcaattcaatggcatgactgctgaaaatgaaatgcaataaaataatgaattgtacagtccccaattataaaaatagtataagcagaaggtcagatggaggaaggcaatgatctgtatctattctgccctgatcattccttcatgaaatactatgctcagttctggctccacgctcattaaaacaaaataaaataatttttttaaaccactggttaaattactatgttgatatgaaagcattaaagatagagatgtattggggaaccatgtcatatgaggaccaactgaggaaactgttatgttaaatatggagatgagaaacatataccaggtgtcttccaatagctgaagaattatgtgaaagaggaatcagaccaaactccacatggcttcaggaggtagaccccgtgatgttacagctgactggatattaaaaagagaaaggaccattttacagtcagagttgcccatagagaaaagggttgcaccataaggtagccaggaccctaccaccagaagacaacgcaagatgtagctagatgtcacaaaggtagagaatggaccctgtgctaagttgaaatacggcaagatcattcattcattctctcattcatgcattcagcacatatttattacacgttggatataatgcaattgcatgcatgtaatgcactacagaattgcatgttctaaggtgaaacagaattggtcttgaccttttaggagttcacagagaggtcaactggagaacacttaatgattaaggcacagttaagtgggatggaggggggatctggcccagtattctgtcctgttctataataactagccacttgataaatcttcctgaatggctggtacagagcaaagcagtgtaaggaagtagcacagggagagatcactgcagaaggagcagatttggactcttttcctgccacgtggcagctctgaaaacatggtcaagcctcaggtgggtgagaacatttctagttcaggattcaaagtgaacagagatttcaattatgctactgtggagtccctgctctctgagagcttctaattgtgcagggcacaccaggtcctaatattgagtaggtactccatgtttgctgaagaaattagacaataagcatcccataaccaaagaaggcccaaagtgagctttctccttgtgttgggtaacaatgtcctagctcatgtaaacactaaatgtttcacttcctgttaattcattttgccagttggcaaaacagacagagctgtgcagttacttaaaagaaaacagctaccaccagtacaattcttagtaactcaggcctcacctcgggccaacaatgaaaaggtcctcttagctgaacactaattatcatcacagggacacaattaactatcgttttcatgcaaatgaaggatctaaacccaatttaaatggtgttttgtattttcttgtaatgtggcacaatgctgacaaggagaccaaagtaaatgtctccatgtgtctttaataataaccttagaggaagacatattttatcctaaaagaagtgggtcagtcacatgaccctaccaagcaagtattaaaacagctgttctatgcatagaataacattcctttaatttactgtgtttgctttttagaccctattttgtttttccattttgaagaactaaatgccccagatgaatcagtcaacaatatgtyggctgctctcacattcagccttctgctgttttataatagtacccttatcttatttcaagaaaagaatgacaaacttatagctgcaaatgctaaatttatggggttctttgtggcaggcattactgagaacagggctaaggaaacaggtaagacgtcctggaaagaagaaacctccataaatacaaggccaggcctcaattttcatctgagccctgcaatccaagcagttttcactacctatttgaattttttaaagatgtatggggcaatcaaaggtgctgagtgctaattagatggacaaatgaatggtcaccctcaaaaggcacattatgcctagtcacagctcttctgaatgccctggtcgctactttaatagctctktgactttcaatggtacaaggtcaagaagagttgccttttgctggaaccttcccaacagaccccattctgcccaccagaaccggaagttgtgtctttgcaaaagcaaccagttagaatgggaggaatgcaagcctttgtttcaccaacatgatgtcaaattattagtagggggcaccttttgtttttgctgaatggtctggttttcactccctctggcattttaggaactgagtaggcacaacttttgatgaagggaattccattcaatgtacaattaggaggcctgtaaaaatgaatctcaagagtggctttgaccaaagagcatcccaggaaacacaagtttcacaagatgctttgtagaaaaaaataagttttcacaaataattttaggaaattatataaaattaggacacattccatcattgtcttggagattcatattgtactttggaacattaaaggcttgagaagctgcaaagaaaggaagcttgcttgactttgtttgatagagtattttgtggccttttgataaaaaattcctttttcatataactcctttctggatcatcaagcacatattggactttccatccaagtgtctgacccatggtctgtctgcagagacaggttgatatggtagctagagcacttccagtgaataacttaagcactggagagaacaaagcctaacgttttccaactgcctcataagctaagaagctacatcttacagatccaacatgagactttgcacctttcaggattcccatgtgtgccacaagtattatcaaagcagcaaaataatgcctggacatgtgagcctatgtgagattcaagctcataattctattatgttcatttttctactcttcattcctttctctcttcatcctaccttgtgtacccggatacccaaacagtgttagagcccaggcatccctgactgccccatgacaaaaaaataatggaagcagatgtcaggaaagaagtgttaggagcctcagattttcccttccattttccaagggcatgggatgcaattgagatgctcctgattccaaaaactttttctcaaaacacaaatcttatcctgttcttgtccatccgaaataactcagtggttcccctactacaaacaggccaaatctaagcacttctgcaacagactcaaaattcttcatactctagtccctgtatacctcttagcccagtggtaaccccaacctccttgcaaatgttgctcaagcaatactgcacaccactaattttctgctatatcctgtcccttcaagtctctgtacctttgcactggctctactccctgcctgaataaatgccattatttgtccaccatcaaaatatcaagtatgggttgacgcaagttagtgctttcaagctaaataatgaatacacagattctacctcctcactttacagtcatcatttctcctgaaagctccagttagaattagcttctcctgctgcaggcctctccttatacacattttatcacattttactataattttctgcttggatctctgactccctagggccatgctttactcatttttgaagctcactgcctatcacagtgactggcacattgcagacagcaacacatttttgttttctggtcagtttcatgggcatatattctgttcactgtcattgaagattgcacagctactagaagtacataaaaaataagggcacattcatcttagcttcttctcttcccagagatatgcgataataataacatctggtgtatttgggattaaaaataacaataaaacaaaactcaatattctaaaagagcctaaggatccccagatgaattttctgggaaagttcttggtcaaatgacaccaccagttgttagcctcagaggtgcctttcctttaaataccggatctttccagtcatggacttccgaaatcactttaaaagagaatgattgaagcagggagcctaattattatttaaaatgacacaatgaaaacagtctgcaatcaaagacatgtttaaattttttaagtacagaaacaaaaacagtgatactttaatggagcactatcccctgcgatggcaaatatgcatttccatcttggctccccgcttcctttatcttccatcacattgctaacaggcctgactttgcaggaacagcaaggaaactccgacacatgtacagcttcaagaaacacgctcatatctctaactaaatatttatgcaacctagccttagtccagcgatgaccactctccaaagcattttatatagcatttatagaagccataaatgttttaaaagaggaggggcatacttaaaaacattttataaagtctttaatttgctttcaaatatattgtaaggcattatgagtcacagagttcataaagtagtgggatatatgcataccttttcaggccttcaatttaacttcacaacacattgttcggagcagtgcaagtctgagctctacctaactaaatcacagggtaatagactagagagagcacgcccattcttacctttagcaggaatgactacaaagagttccaagttagtcctactctttttagaaattgctgggaaagatttctaaaaaatttccctccataataggatgtcttaatttatgacagtttaaatgaatcttatgttgctgcttaaatcacatccagccaatgaaattttaactatcaacaagaaacagcaattttcaatacccctcctattttaaccatttcattttctgagatattcagggagccatgcattcaatagctggtatacctcaagatgattggcattgaaatagccagggctgatcttaagatgcgtaaaattactcaaactcaagaagttccatctgcatgttgactagtcgcaggccttttggagggctatttttgtcaaatggaacagctgtagtttcttctcttggcccctggtctgatcaattgttaaataaagaactggacagttgggacaatctgcaccaaaatcaccatggaacttactgaagaaaatgaagagtcccaagctctgtgtcatatctaagaaattagactcactggaggtggttcccaggaatctgcatatttaacaagcactctagaatattctaaaagagcacactagaatctaagaaccaaggaagcaagtgactgctgtttacttttaacttaggagtgttggtaacagacttgggaagcatatcaccctatccaatgccaacaagtttttcacacttacacaaaggactagacgaccctactccatagatgttttccccacaggcataccgcacgcgagacctgggtttgttattctgctgtcttggccaatttgcccacaagtctttttctgtacctcccatgtgttcttgctcattttgaacctggtgccactcccagaagatgtcctggaacctttgtcatgatcagggcctgtgtgggaaaaggctttttctaacgatcgtttccagtgacttggaagtaagttggatacatcacttataaataatctcatgccctttgcaaggtaatcgaaagagtcattttggcatttccttaaccagccactggaatcccttcatgggatttaaggacccaaactgcagacagtctgtcactaaacagctgctttcactgccctcctaaaagggccctacagggtggtttccatgcctcagaaatctgacatttagaagcaaacacctgccttctatccactctccaactcaccagccacattccccaagttgcctagccattagctcaaacacagactctcaattcagttgatttaatctaaggcagtcatgggcatcagcctcttatcaggggctgaggtgtttggggaaaggttagaaggaatgaagtgacaaaggattcaaatatcctgcagttaaattgagtaaatagccgctcatttcaaagcttcagatttggaaagaaaacagctcagggctatagaggaaaatggggaggggacactcaacaccatccaggatctatgtattctgtctgatttatttaaatagaaagagacatagtgcatttataagaatcactttagcttttgtatttatcagtgcaccccatcttaccgccattacagctctgacagaataattaatttcagtcaatcaatcatttaacaaaaactcgcaggtgacctcaacataccatataagccacagagaactagtcacaacagcagtcttcaaattcccttggaaaggaaaattaagcctgctatgtgtggcttggggcaacctaagccgtaaatctctcttttctgatctcttcatatagatgaaagagcaaagccgctcggggttacatacaacaattatgtgttcaccaaacttagggaatcagcttgcagacagccctaatcattaccaattaaccacgtctgctgacatcctgtaagagctgccccagtgctgctgaatacccggccctcccttcaggcaaccaatcccttatattacagcgtatgtgttttggaaggcctattaatgtttgttgacaattccaaatagaggtcacctgttgtcatggtgcaaaataccctctttccccctctgaatgctaggcagggagggcagctttgttagaaacacttcaatgcatttctatattgccaccaacattcagatctgatgaaaagagatttagggtctcccaacttttcaatggcaattcccacctgctaccacacacccatctgggactgaaaggaatctcctccttggataataaacttgacagaatgtgttcaggccctaggcctccaaaggaaaatgtccagtcactggcagtcaaatcaaaacatgaagatttaccaaaattgtcagaaatgtaaaccttgaaaaaggttttcattccactggaggcaaagtggccttttcccatttaaattattctcatttaatccctagacccccagaacttgcatttagggattctgttgccaattttgcacagaagtcttttcctgtacttccagggcgtattcttgttcagcttgaaaatgatgccactttagaaaaatccgagtggaaattttttttttaaatcctaatttaattaaatgtaatcattgtttaattacttaatccagttcaatttctctcatttgtgccgaggaaagagaagcattctgcaaaaatgaccagtttgaattgtgagccttcagacagagaatctttgtccaccttgagcttgtgacagtctccccaagattgcttcttccttgaggtcgaggctatgctagcacaagaaacaagtcccacagtacctgttggagctggctaccaaggaggaacccagtgcagggctactagttgcggtgcgtagccagatttcacttcaccctctagaatcataaaatttgatgcactgtgtgcagggcgcatcttcctttagtggtgggtcagaggtgagcctgaaagccactataaggacaggagactagacaagcactcctttcctccaggttttggattatctgagagcatcttgtgctcaggatctaggctcccagctgtatgctgaagggccctgggtcaccacagcaaacacataggaacactgtgggacatttaaattaatttgaacttaattttgaaatatgttaaattttcaaggaaaatacagcaatacatgacatctgtcactctgcaaaccagtaggtcaatgtagttctcagtgtcaacattagatcatgctacattccttctgattatgccatatcttttcaaaagtgagatttcagtggttgctgtgataaaaagcaagtactgcatgaaaatcagtggggaacacaaaaacagggtggtactgtccaacctgattccaagatttgtgatgctgtgcagtacccaacaggtacacacatctcactggtaactaatttggttatttaagaataaaaacttttttttttttgagacagaatctcgctctgtcacccaggctggagtgcagtcgcacaatcttagctcactgaaacttccgactccagcgtcaaagcgattctcctgcctcagcctcccaagtagctgggatgacaggcacacaccaccatgcccagctaattttgtatttttagtagagatggggtttcaccatcttgggcaggctggtctcaaactcccaacctcaagtgatccacccgcctcagcttccaaaagtgctggcattacaggc

SEQ ID NO: 7019 - DNA, 20257 bp, Homo sapiens
attagtcactgttgtgctcctccagggaccaaaggggaaggctaggaaggttagagaaagccgtgaaagggccttcagggctgtcatcaggggagaaaactgagttgtagtgaggccttcttgtcacacagctcagtcggcagaagggggtgctgtagtgtaacctatttaggatgcaaatagagtgtctcccgagctgcagatgaaagcgagcgtgttagccgctgcctggcaggtcctcagcagtactgaatgtcatattcctgcttgtcactgctcactgcaggtcattaatagaactcagaatggtgttactaaatgtgcacattaaaaaactgatcaccaaaaaaaaaaaaaaagagtggcaatcccattcccagggaattcaactcatccagctcggtgaagatttgtttattcaagatcactggagttcaacaattttattagcttagattgacaactatctatcacagatgtactacccactaaatgatagaggaagaagggagttaaggcctcatgtgcgcgcctgtgtgcagtaagaaagaagagatcactgagagctagaggtttcacagatagtgcccagcaagtgagcgctggacgggcacctctcccttcttcttggttggacttccacagaagtggaacaaaagactcagaacaaaacctccagcttcacagaaccacgccagctggtacttatgctttattttttgacgcagtcaggtgttcattctgccaagcaagttttcattcttccctttactccagccaattcctgttttcttcaactggagctccccaagactcatcaaaaacacgatttaattacatctccaaaaaaaaaaaaaaaaaagggaggagtgtaaacatgactcctttttatctcctgatacatctggacaagtagacaatgtgctaaaacaaaataaatctgccctgacagtcacatcaaagagttcagcaaggggcttgcagctacttaaagcacaggaatgctgttgctaagcatcggcctacaacttatcagtccctggaagaaatgcttttttctttctttcagggggagatgaggaaagttagagtgggaaccagactgcaaaaggagattggggattttcagggattttgaagcttaaaatgaattgtgtgaagaaaaggggttttgttgcgttgtgttttccttttaacaaactgtctatatttttataaaggtattacatggaaaccttctagaaagggctacttaggactcgcagaaataagtggtcacacaaaacacttctatacaaatttgtgccatatctcatttttgtggatttctctgtatgagaagaatcaagtgttagttcagggtctgaggaaatatctcacaatcaccaaagtcaacagtgaaaaatccttaggttgccataataagaaataaatcatccaatatcacaaaccacaaacattttctctaaaaggcaagaaacaagagtatccactccagcaatcacaatacaaaagaaaacagaatccccaccaccaccccccaaaaaaaagaaaccaagcgtgaactgccatgtgcaatgaaataaatctagccagatgaccccaaatacatggcacagtctcacaactaaagtgttcacagtaaacacaaaatggaagtgaccctgaaacatggccaacaccttcagccttttctccttaccaccccccagggaagatagtgaaacacatgctgtggaaattcagtctgatcttcatcccatatgctggttctcaagatggagcaacagggagatttttctcttcccatgaacacatcctcaggtaggtagctctgctccacttcctccctccagcaaggctactaaatttagttgtgctggaaaatctgaactgaacatgaaatggcattgctgagaagtatgttccatgagcacctgagggcgctctggaaaaaaaaaatagagccagttcaaaataacccaccagttctcaatatgcatcagacaacgccacagagattctgtcctcaaaactgaggggctaaaaatatgcagatactttactccagcctagggaggccatgaacattttaagcaaacaacttgctatttccttttcttagatcaaaggaaacaaattctaaaactactgtgatctccacacaggaaaatgctcaacaacatgaacaattaccaagtctgtgatattgcacaaataaataacacttcccattatctctagcgcgatcgtatttattaaacagtgacagagggcatcagtaaccatttttattatcccatatagctcctattttctaattaaacaaaaggttatttctactgttaacagccatttgtctacttgggtcttacataatactttttgccaagcatgacagaatataagaaattatgctctgtggtgggtttttttgttttaaattttgcatgctgagttgctacttagagagatccgtcagttcataatcaaagcaagaggccattgtgtggtgaattcataaatatactttggcaatttttcctaaaacgtgatgaagcaagcacttggtcctaccctttagcctcaatccaagggcaatgatctgtattattaaagatataggtcaagccagcttgcgcttcttcgtcctgtgggatgttttagaagctgctgtcacattaccaagatctgttctgtggttcctaattattcctcttggcagctttggattccaagtgattcctctcacatgtatgtaaaaatttataagctgtttcatataacagcatgagttatttccttgttgtctgtaattgctgaagatactgattagaaacatgctctaatttcactgacaaggataatggtaacttaataaaatttgcattgtgtcttctgcagacctcaaaaatactttgtatcaacaattgaaatggtaattttttaaatttttaatataactgagggcagggctatttctctcctgaacatcttaaccagaaggaaaaaaaacaaatagcatggatttcctcctcattgtcaaaatttgattggtccaaaagcatatattaagttgccactatgagcaaagaactaagggaaggagcctaatggttactaagcatgtactatgtacttggcatgttcccataagccctcctgtttaactcccaaaaacaagatggtggggcagatagaacaatcctacaatggtattcttggggaaaccaagtgcctggattccatcacagaattccattctgattctatattcctagggcttcctgatgcaagtgctgtgctctttgcaccatgttgagaggagtaaactgttgcaaattaaggtaacttacactgttgtaggaggaaatgagataagtcaataactaccatagaaaaagggattggggcaaatgcccatagaagagagtccaaacaaaacagcctagggtctgaatgatggaagagatttcatctgttccaggagagaaagacagagaacctgttacactgtctgattttcacatgtgaagtatgttggaaaggtattaacttctctattagacagatgagaacacagagacggaaataaagggccttccccaggcattgatggcttgcccaggatagaacacagctttcttgcctgctttcctaccatgatcaatggataatatctcgactttgtgaaatgccttcccactgaggaatttcctgatagcctgagtttaaattttgtgccaacaacccagagtgtccccaaatgtagctgcacaacttttcttgatttcaaataaaacaaagttctacctccacaagtggcaatcccacctttgatgactacagatctcacagtctatttttaatgagaaatatttacaactctttaaataccaccaatcaaatatgttcataggtacatggttagtcatatatcagtttctactgaaaacactcaattgtttggtttattctcaattctgccactatatatctgcccctatacaaggaagagataagaacagatctttcatacctattatgccatgactacccctagttttagaacagatttagagtttctctcatttctttagagattgggttgaagttaggggaggtatgaggaagtattatttcctttacaaagatgtaaagcagaaagctgagcaaattgtccgattttatctgaatcttaatcctacaaagcttgagtctcaggcctccatttctttgtacaatgaagacggacatctttctagaggacaaaactcattcattcctacaaccagccaaaggttagctcttactggtgttgaaaatgaagacagcagattgcgaagattcctccaaccctctaattagcaagttttggcccccaggcagtagtcctgagaggaatgagaaagttattctgcaggaaacaactgtccttgcaggaatgagtcccataaaaaaaaaaaaaaagaaaggaaggggggtggttcaaaggcattctaactgaccattcattgtacaagcagagcagagcaagtataaaaagggaagggagcacggattccacatctgacctcttcccaaagtttagcttctgtatgaacttctgggtccaggtaaaaccttttgagaagcaaaagaaggtatttaagggctatgattaactggaagacagtggtgtatctagataaagtaaaatggcatagtctcacatctaaaggaatgaacattttattaaacctactctccagagcctctggaagtccaagtcatttttaaaggttgtatcagccatgcaaactgcaggactcctgagaaacctcaatatcccagaacatatggacacacacaatatacttaaaacatattgcgcgtgcgtgcatgcacacacacacacacacacacacacacacacacggctcttctctaacagcagatgttcctgacgtatatgcaggaggaacatctatctggtatgttctgtctcattgccttagttaaaagtgaaagcaactaatttctaatttaataatttcttattttctaaggaaaataagtcaaagaaaatatttctaatcaagaaaatggaagaaggtggccaaccaacaatacccactccccaagtttttggagctgtaaggaaaatcaagaatactgaagagatacagtcccatcccagaagggtttatatagctgagtaacatgatgccagaaacaattagacccacatgatggagagaagagaggatccattggaccttccatcatacagtcacaaaacaatttgttaaaacctataagaaactgagtagaatggtatgcttcatggaagaaagaattctagaaagtaactttttaaggcacagcccatgttgttcctttaactacatgcttccttgatgaaattctattcactcttcaaggttcagcttaagcatcatctctttggctaccccaggcctcttagggttgcacggcacgtcatgggtgcctatgtgaaagtacttggtggtgactgagttcttgacagactttgagagtctccaagtcagagttcatttcctctcctacctttgtaatttaggcactagtaccaggcctgacacagaaggccctttgcacaggctcagttaatgagtaagtaaaggacaaggagagaggatggcagccactccagattatttctgtcttcctgccttcctctccaatgctgcttggaagcagctgacaatctctcaccacgtccagctcagccaactggatttctccaatatgcagctggtaccagctccttccctatgctgctaactggttgggggtgggaggcagagatgttagcatgatgttttactcagcaggcatagcatcaaggcgcatttttaatgatttaccagttctacttgactgagcctgcaccctgtaagtggatcatatgatcagtgatcacaagttaaactgcttttgttgctcgcaaggcatgcatggtgggctggctgcatggcaccagcagctcgcacgcagctgtgtgtaagacaaggagaggttacgtacaacaggcagttaatggctcataccagcaagccctcgacttcagtcggcacatgcggctgcattttaaaaaggtaaatgaccttgcagctggaagctttaactatgtgcttttacctatttgtacctggataagtaaacatttgcagcacgccaaaaggccctgaaagctctattgtagccataggctaatccttttctctctggatgaaagactccaaaacaaaccgggggagggggaaatcattttctgcctcaagtagcacaaaggtaaaggggggcaatggtgataatgacttccatttgttataactttcagaagtcaccaaggtttcagtccaaaccagctgcccatatttaggattctactttccaggaagaatgacagaaacgacaggcccccagacacagaatgattccaaccagagtcgaacagaacgacctcctacttaacagtgactctgacacaaggaagctggaatgaacaactccaagcttgttctactaccccaaagggttgcttctgccaactgctgtcactcagggccaaaaaagtaggcccatcttagttctcttctgctttaacttcaaatccacagggcagtcagtatttgtgttgcggaatctaggcctttactacaaattccctgtatcccactctaagttatctgataaccatttagctccttctggtaaaagccccttcagatacctcttacaagagtggggctgcccaagccatatctgaaatagtggttagccaccctgaatgctttccaaagagtggaatatttgcgatttacaatgtgagtgggaactttggtaatgctgttattttaagaactcrtcaatcaattgagattaagataacatttattgcaacataaactgggattgccatgagaacaggcagaaggtatctgcggatcatttaagacatttcacaggcagtgaatcaagggagggccattgtgtgagtgataggagcactggactgagagctcagagctccaggctcttccatggctctgcccatcaacagctgtgtgactctcagcatctcacgccacttctttgcacttgagatcacaatcccctctgtgacaactctatcaacttcctgctatgtgctagaaagcacactaggcactaaaatcaagcatgttgggatcactaggtatccatcaaatatgttcatgcaaatgaattaacaaacaagaaaaactatactctgatgctagtcaccatctgttgaaccaaaataatctttaaatgaccagaaatactttcttccctgcaattctgttactatgggttggtctaatgaggttggtttatatccatgagagaaaacagcactccttggtccaatatactgttttaataaactttattaaatttccattgatccatatgcaaaaataatttgtttacaatttgaactcagcctactaaatggtgtctaactcaataaaggaagaggctgagaaacaacagctgtatggctattaacacattatgccgttaaaaacattaaatagttgggtttggtgaaggagtcaaagttaaccctttgagtagctctaaaccagagatcattttactttgcaatgggaagccagggacttggaagagaatttttctccacctcgtgaataagcctgcaggagtggsagcacatctgcctatggctctgcagcttagccttccagaaacctattctaaacgtgcaaccttggcctcataacagagatgacaaggggttattagggtttagaagaatgtctaaataataagcaaactaggcttatttgatagttaatataattcacatgatgccctatcctttagatacttaaataaattggttagttttgaccttgtgctgatgargccaaagtcagggcacaattcttttcagccagttggttctgtgtggtgatcatatttgtaatcaaatcagtaaatcaataaaatgtattcatgcagtactcagtaaggcaaagtccctaatcccaaattacgtactatggagattgggagataaaattaagagacakgaaaatgtgaaaacaattaagcactatgctagataattccaaagatgtatcagtcccaaagaaagggatgagtgaagattagcatgagtgaagattagcaaagaggtgactttwggaaggaaatggaattgagctgagccttggaaaaaatggtaggatttccattgcaaggagaaaatgaagggtcaagggagaatctgaaagtggaactgaagagggctagaggaggtggggcagagatagcttaagcaagagttagagggcagtgaaaggcaatagggatactatagtccttttagcacttattggttataagggttaccagagaggagagctagaatcagccagtgcatgtccgtgacactaccacaaaagcaaagcagagggcacacccaaagaggtggcggcagcagtgtccatgaaagctcattcaacttttagaaactcaaactgtgcctggtatccaggtttagtgaccatgtgatatttctaactgagaatgctatataataacctgaatacaaacaaggaaatgactgaaaatgtataggcaaactttgaaattctcagtataacaatgaatttgaattcaaatgagtccttgcatcctgcaaggttgacctgtccagcttcccacacagacgtagacatctcttctacaatgccttacaaaaatggtcttccagctctgctcttagctcttccagaacaatcagcacccacatctttgtaaggaagaatatcattttgtttaataagatcctttaataaaactttcttcttacattgtgccaaaacttccctccttataccattaaaccatagtcctaggtttctcctttacaaatgctacatcctcatccccacaataatgtttcaactatttgagataatgttctatgtaccatcttaatctcctctattctatgccaaatatttccgtaacactcaacagcctagtgcctctcctgaagatccccattagtttttctggttttcctaaaacatgaacctctgacctgaacctagtcctctagatgatgggtgaactgtatgaatcccaagaagacaatgtgacccaaagcctccatcacatccaagttggcaataccttcccaagctatagtctacgctggtatatatcaaacctcagtcaaataaaatatcccaatgcctttgatttgaaacactgccaagccagacctttcaagcacatacttcaataatagatttttgaaaatataaagctaggacttctaacttacaatcctattaaattttgtctgataggtgtcaggcagtgttttagcttgctgggaccrcttggaaccatgatctaaaacctgtggaatgttctgacctctccaactttatactttgaaagttaataaaaaaggcctttttccagctccttacatgttcttgataaaaatgtttactaggtcagggacaaggacaaattcaagtctgaagttaaaatatatggataaggcctcagacttaggaaaggaaataagatgtgttttatacgttctttgggaaatatgaagatagacaccaagagatgacttcaccagtataaaggtaaatacttagatgagccatgttgcttttcccctgaagatctacttgtattaggtctggagcaatcagcaaagcaaagagtttccagtgtgaactctctcagcttaatcaagaaatttaaaaagagaaactaagaactatccaagtgaacctattgctcttggaaggattaacacaaacacacacacacaaaatgagttcactctggtcataggcccaaaaacttaataccaagtttagaacgtattttccgcaagagattgctggatgaatttatgagcaaacatcagcacagccamtatcagaacacccagcttgtcaactcctctcctatccagtggagtgggaaagtgtatttactgtagaagttcaagaaagcattattaaaaacaagcaccaaaacaacctccaagtgcacactgtggctaaagaatggctactaaatccaataatggagaatatgaatgtgaactgtttaattatgactgagtgacatgaagctaaatattacaatgttacaacaaaccagagagtaaacagatttaagggtcttgagttatttctcagagataaatgggaggaatagatggtggtttgagccatttttcatagcccagctggaatcctatatataagagataaggtaacatgagaattttataatgtttacagaaatcatagataactctgccacatgtggcctttggctcattaatttgactaattacaaagacccctaactcctcatagttatctccctaaggcttgaacttaaagaaccaaaccacatgtttatgggaactcttagtcttttgtaaaagctaaactatggctaccaacctaggccaaatcacctgtatgatgccactaggaagatacttagaagcaaaaatctgaaatgacatcaatgcaaacatgagacatcatttgtatcactcttcttcacatttttctaaatgtttcaacaaaattaccattttgggtagtctaatcaacacatgagcatcataaggcaaacattaccctctcgttttacagacatggggctaaagagataacatatttgcctaaagatatacaatgattaaggcacacagactakgctgggcatggtgggtcagacctgtaattccagcactttgggaggccgaggtgggcagatcacttgaggccaggagtttaaaaacagcttggccaacatggcaaaacaatgactttactaaaaacacaaaaattagccaggtgtggtggcacatgcctrtagtcccagctacttgggaagctgaggcaagagaattgcatgaacctgggaggcgggaggtggagcttgcagtgagccgagccgagattgtgctgctgcattacagactgggtgacagagcaagaatccatcataaataaataaataattaaatacacacactgtttccccattttgcaaatttgcaagcacagcagtcctagttatttggtttctgacatttcagagtggccttttgttcacagatggagccaccctgtttagccatgtctatggcatcttaatgcccaattgggatagtatgacacttctctatattaactgtccaatctacaagccaattgtcacacggctttctggtgtcagtcaaagcaggcctgtgtaacatcagcccaatctatctagaatgcaggagcgacacaagcgtgtgcataaagagtcataaagtagtatcatggggacttgtcaccagaaacaccattagttgataaaaatggaagtaaagcctatcattatttcatcagtgtagtcaatcttcattggaaacaaatatacagagatttgccattatattcctggctacaacatgagcaaagatgctgcacatccagctacatttcaagcaaattgcccattcaaggcaacaatttagcctaaagagactctgctagaaaccctgtgaactggaagcaacatggtggggtaaaaaagcagactagggtcccaaggatgtggagtccaggctctgctccgtcaccacccagctctgtgagcttggttgtgcaagtgatctgatggctctaagcctttattttcccttctgccaaactgtggatatacacctcgaattccttcagtggattactatggaaattaagtgggatgttgcattggaaggctatatattaatatatgttgtacagataggaggaactaaaatgcatctttatctcagtgattgtttaatgcaggcctctgggcaaccttgtactgacctctcttggcctgcaccagataatttagtgccactatcatcattagtaaacatccaccgggggcctgctatgggcttaattatacattgacttgtatggttcactgacattttcatgtgtatatgtctggtcttctttaagcaactgtatgctcatccagggacaagaatttgtgtgtgtgtgtgtgtgtgcacgtgtgtgtgtgtgtgtgcacgtgtgggtgtatatataatctgtatatacatattagcccagcaaaatgaaaatatacactaaattctcaataaagaggtaacttgattgtcttagaaaccaaagatagaaaactaaaaagtagtgaaaacaatagagttagaaaataaaacacttaagaaaaatctaagatcttttttaagggatgggcataatagcagcatttccctctgtaatctcacatagaaggatgtttaaagaaaaaaaaaatcctaccaagggtcttaatcaagctattccacttaagagcattaatgctaagtatgcaaacgttcacctgactgatcattaaggtatcaagaactaattttcctccttttaagagcttatatgtcacatcccaccccttgggccttccagaaatgcatttaaatgcctaactaggagaaagaaaagcattccagacagccaggtgttagtgattcagccattaaaacttcagttataaaatatcccccacaattgtaaaacatttcagtcattagaagatcataaatagattgagatgacattttaaattattatgacatcatgtgtatgaaatgtacattgttcatcacaatatcccagatgattgtgactctgattatctgaagttaaagatgaagtgtctgtgttatttattttgagacccaacagtgaaagacagggaggagggagggtgaagacagcagacagacaagtagaaattgtgaatgttgcatccctcctaagacagagaaaaacttcagattcattttgcagtaacactcattgaccgctccttgagcaaaaataaatccttgtttcctttttggaggatcaggctgaagtaccaaagaaaagtgctcccaaaacccgtcattttgaaaccatcatctaaagtgtcatggtactcgctcttctttgagctattatatataaattgaaagattttaattagaggtcaacattaatttacatctgaaactagcaaagtagttcatgactctttttcacatcacacatacccatactacttctcagagtcaactggyctctcatctcttcattatatactaaataagcaaggtatgtctccaccttgaaggtatagcacctccttataagaagtaagacaggtttctctagaaatgtccayctaaccaccaccattggaatagaggacagagtctgagggcagtggctcaggcctgtaatcccagcactttggaaggctgaggctggtggatcacctaaggttaagagttygagaccagcctggccaacatggtgaaatcctgtctctactaaaaatataaaattagccagctgtggtggcatacgcctgtaatcccagctactggggaggctgaggcacaagaatcccctgaacccaggaggcagaggttacaatgagctgaaatcgcaccactgcacgccagccagcctgggcaacagagtgagactctgtctcaaaaaaaaaaaaaaaaaaaaaaaagagaaaataaacctaaattgtacagttacttataagattgtcataagaaatcactaatataaatamttcagtcttgctgcagacccatgcttttcaactcagtcttaacaaggaaataaattcctttcagarttgagcattttgggaaatatgtttaagggctaatgtaccttacgtaactctttaaaccagctgactcacctgaaggataaggcccattaaagagattgtaacaataaagtttgggagtatttaggataccctaaaagtctgttttattctgctacatacactggtaactcattctgccaaagtaggcagggataggtatgcatgaatatggacctaggcacacagttaatagtggttacaatttaatcttgtcctaaaaattttgaagaatttgttgggactagaaatgcagaagccttgcaggcattggagaacctgatgtaaatgctccccctcaaaattcttctctcagaatcaacagtgaaacttcctctgttttcctctagatgatcgtggttcttcggaataatcctgcccaaaaagtgtccaaacctaaagacatgaagtcaataacctggcaccatcagatgctcgaaaaggattggtttgaaagagggtaattaaagggcaattcatcaggacaattactgatccattttgcctggtcagttatgaggcacatttgagaaacagccaccaggtttttgctacatgtatggaattggaagacaccaagcccaatgcctcaccgtacacataaatgtattcctgaaaatgccagactatagttaaccagaatctatccaaatatcgcctgtaatagggagattagacaatgcgttttattagataactcttcctaatattgaactccttataaactacttcctgtaatactgcatagggtaatggaaatgctccatgtctgtggagcactttaagtgttctctgcattacaaacactaaggaggagatgttgaaaaaaataacattggaaatagtcataaaagaaggcgacctcacattctcagaggccaattctgccactctgatgatttggcaggtacaacttagggtgtcaaaaagagactgtctatttttctgtctgtacatattaaaaacttgggaatgggaaacaattcagtaaagtccaagtccactttttgtttcttttctccgaatttccccctcattgaggaaggctctggaaatatctgcttcagcaccacacaggccaagtttgtccttcctagagaaagataccatcaatgttctctaatcttatgcaaatccaacatcccacctccaccttccactgtaatatgtccttgcccttggtttgggcaaaccattaataaattattcattcattaaattattgaataaacccttgtggaatgaacatattaaatatcttttatgtttgtttgtttccataactactactttattggaggaaactgttcttgtaacataatctttatcatcatgggcagagagcaaggcttcatttgatttgcaaggggctggccctccatcatgttttctgattgactgattggctctggctttgtacatcccaagcaattttccaagaatctcttcctttctcctacggaaaccacagtttctccttatattgtagtaactaacattgaggggtttggggttggaggtgcaaatctggtcatagcatttaaaaagaattatagtagtactgaagaattctactgttaaataaaatttatgggaagccatgcttttagactgagctcctgcactaggccccaacagaacagaccaaaccaaaatggagtcactctgatgatagtttcttttgctgtgaagaagctctttagtttaattatatcccatttgtcaatttttgcttttgtttcaattgcttttggcgtcttcaccatgaaatctttgcccatgcctgtggctgcatagtattccatagtgggtatgtgccacattttctttatccagtctactgttgatgggcatttaggttccattccatatctttgctattatgaaatgtgctgagatgaacacacacgtgcatgtgtcttttatagtagaatgatttatattcctttaggtatatacccaataatgggattgttgggtcaaatggtaattctgttttaagttttttcagaaattgccgaactgctttcaacaatggctgaactaatttacaagcagtgtataagcattccctttcctccacaacctcatcagcatctgttatttttcaaaaactgacttttttccatttccaacaaagcacttctatttttagattaagatgctgcctagttcatgaatcactaataaaaggccattatattgttaacctaaatatgttgaaattttggtttttgacagtactcaaataaatgaactggaaattaaacgaagaagctgagctctttgaaaccagtcctgactcagtgcttgttttctgggtctttgtcatttctctaatgcaaaatgaatcccaaaccacgtagtgcagcacaacaaagatattcaaatggaattaaggttcttattagatctgaagggcctggtgtggctgtggttcctccagaggagacttgtttgtttgctggtctttttacagagtttatggaacagaattttatttttagcaagaactttttttcctcttggaaatgaattaatgatggtgttgccagagagtgtttatgaatacaatgttaaaaagtggaccaaacaaaacacaccttatttccactcactaagaatgcattgcctttcctaacaggagcaggctggcataaatattattttattataataaatacttttgttattatgttaaatatctaccactacagaagataccaaagaattgcaggatctctgtcctcaaattgcttagagtcaagttagattaagaaaaataaaccaataatgaatagtataagacactgtgttatacagtaggagcatttttggtcccaattaggttctgaaggaattcagaacaggatctttgtggaatctagagtggctgggcaggaattcctataaggatgaaatctggtctggcccttgacaaatgggatgtttagatagaaacaaaactaagattacatgaataaagatagtccacagccacctgtatgctgagagtggggcaggcagatggcaaataaagaagaagccacaaccagattcaccaccaaaatgtagagataagtgaaacaggaggtttcagataaaagaaatcccttagggataagaggggacatttagtatatgttatatcttctagtttcagaagatctctatccaataaattcaaaagcatgagttccagcataaataattatatcattgtctctgccattaataatagaggacataataataaagtttgaggtacataaaataatagtaaagagagtgctagacatttgagaagaggatgccagcctgcttttaccactatagatcccccatgtcaagatgctcagagctgctatgacattatgggctggcaaagctaggatttggagaaacaaatttggaaaaacattaaaactctggacaaatcagcaaatctgaataaacaaatcctttaagttatttctactcccaaaagaatggatgactcaattcattgtgcttgatccaacatctgccttgacaaactttagggagaaattgccccaaatatcttagacacctaaagtgtttggcagaatctttgaagctttcctaggccatggtgggttgatttttgctattgaagtgagctactctgcacaaaggggtgggagtctgagagcctgaagcccatcagctggtctcatccttaactgctgctcaccccatcccctctctggtcactcagcagagctgctaagatacagtgacaaaatattcgtacctcttgaaatgcagtttgaaaaccactgttctttcacaaccctctcactttaaaaatgtggaacaatgaaggccccaagactagaaaagcccggggtcaccgggttggttaatggacaggcaggggttagaatccaggtcatctgatttccagcccaatgtgctttctccactccgcacagccctttaatgcatcggtgacaaactgcccattttaaaatatggtaaagtagggcatctaatgaagaatctccagcgggaagatcttcattgtctttttcaccttccatactgtgtcaaatattgatatttataaaataatggaagaactggcatcagaaaatgtatgctacagcgactctttgaatgagggccagaaagagaataaaaagcccagagtgacctgctgtacacccacactgcttccccaattaactccaaacagactttgtctgggatgaaatgatttagcctcaacgcaaggtcagtcccacatatccagaataaagattgccgaatatgcttatttgagctgaattacatttggtagtttaataatatgaatttactgccttttcaagagggactctagcactggggagaactttaaaatgcatcacacttaaaacataaaattaaattcaattaacttttattgggaggctaatacactagtactctagagggagaaacgaagctctcagctttcccaggattttcaaaccaggtctctagaatccaggccaaagatactggcctgtctccatccctcataaagagcttcattggcaactttaacatctgtactcagtggagtggactatgcctataagtctccagctaaaagaccctcaggggcataaaacctggaataatacataggtagaaaacactccctacctacctatcacataaaagacaaaaagccaatgcgggcatgaaaacatgtgagggtctcagagacaatatgctttttattaaaccctcctaccttcctgctatcaggataaagggttacatctatttttttttttaatatttagcacaattagccactcacattgacttattagagattcttcagccagcctcggctttcctaaggccttactgccccctccctccactgagatatccaagtttgcagacaactgtaagtagagtgcctgactactccctttgtgacttcataaagagcaagctatgacatttgctggttgagttgtggaaaaaactgaattccagacagattggccaactatatcctggaaataggatgaagtaatctccttgactcatttaacaaatatttaatgagtgcctactgcataccatataccatactaggcatcagagattcatgagtgaatgaaacagacatgatcacttcccttatggctacaaaagaggggagaatggggaaacatggaaatcaaaaagcatccctgtattatctattctcatactgctaacaaagacatacttgagactgggtaatttataaagaaaaagaggtttgatggactcacatttccacatggatggggaggcctcacaatcatggtggaaggtgaaggaggagcaaaggcatgtcttacatggtggcaggcaagaaagcatgtgcaggggaactgccctttataaaaccagcagatctcatgagagttattcactatcatgagaacaatatgggaaaaatccaccctcaagattcaattacctcccgctgggtccctaccacaacacctggggattatgggagccacaattcaagatgagatttgggtgggacacagtcaaaccatatcagtccctatcttaaacaaataatacaaaaaaaacccaagatttcaaaatcagggttaaactctctgtcaagctggttggaatttgcaagacagaatcagtttcccagtgctgctgtaacaagttcacatgaacttagcagcttcaaacaacacaagttcattgtcttagagttctggaggtcagatgtctgaaaaaggccctatagaggcaaaattgaggtgaggggagaacacgtttccttgcctttcccagctcctagtggctgcctgtgttccctgtcttgcacccctggctccattttcaaaagcacattgctccaatctctgcttgcttcatcacatctccttctcccctgactctgacttccctgagtcctcttcggaaccgttgtgcttacctcaggcccacctggataatgcagaataacctccacaatttatgattttttaatcacacctgcaaagtcccttttgccatataaggtaatcccagtttctaagaattaggacatggacatattcggatgattgttattcagcctatcacaaagaccaaaaataacatcccaaactttaggtactttcgtggaaaaagaaatgacctgagctcttgaagatgtgaccaggatgcagaacagtggaattgcctccctaattacattcatattctctgtctaacagcagtaaaacaagaaaggtgtggtggtggtgcatgcctgtagtcccaactgtttgggaggctgaggctggcagatcacttgaaccaaggagttcaagatcagcctgggcaatagagtgagacctcctctccatttaaaaagaaaaagaaaagcagtgaaacacagtgg

SEQ ID NO: 7020 - DNA, 18430 bp, Homo sapiens
  misc_feature (1)...(18430): n = A,T,C or G, or insertion/deletion polymorphism (see Tables 1-2)
tcccaacagagtgcattcggtcctaaccacactctgcctgagagactacctctgcttccactagtaagaagctctggaaatgtttataacttgttgtaacggctttaatgccaaataaaacaagtttacacaccctgattatgttcagtagtggtaactcagaggagagcactgtgagcctgccctcatgacacagccccaccacagatacttatgcttgtgggtcttcacacaaagagaggccttaagggagagaacagatgagcattgcttaccattggttggtatgaaccagctgcctactgaggctctggacaaagggcttctcaagaacaggttttgcagagggaatgacgggttcccatttgtcccatgactcatggtaagttcctggcaaatttccctaaacccttcatcaattggctacgaagaaacactgcatgctttgcaaagtgatcacagccaaaagttgcaaaatgatttgaattatttccagaagctttgtattttcttaatatcaaaaatgatcaatactacctaaagattcatactttaaagaaagtgaagcaagaaaggtggtgaaaacacaggagagaagttatattctgaaaatgactttggaagagtgaatagatcttcactaagcttggaagcataatttattctttttcttatttttctttttacttttcatgagtatatattaatttttattttttaatagtatatattacctataaacttcagttactttgcattgtagggaaaggcatcttgaatataaaatgttttcttatattaaatatatgaatattcactgccataaaagcagacaatgtttattaataacattattccaaagtattcacaatatactcagacttggacttatgtcttacttgtgttttattttgacaattactgaactcatttttttaatttcataaaataaattgctgctgttaaaaaattataataaaaggcatcccagatgcatttttttaaaacattagagcaatgatcttaaagttagaagcattgatttagattttgtttagaatccttttttgtagtaatggtaaggaggctttagcccagcattgcacttttatagttgtaatgaaacacatctctgctttacaggatgaggaagtgaacattggaatgtatgtgaataaagagggatttttttcatatgctggaaacggcattcccagtttgcctaacagacaacccacaccatcatttttcccactctctccacacccttaactttatgaatgagatccttcttgtctagtaaatgatgaaatcttttcccacagtagaaggggatttcccatgcgtagactgagaattagaaacaactgctctgtatcctgtatgcaaataacattgttattgtactgtaaaaaacttacgtatgtctgtgttcatgtgtatatgtgttctgttattcttactgtttcccatttaaacagttagaagacttttaccaaatttagaaggtgtattagggaggtctatatttatatctatctctcaatttggataatgtttatgtacaaagttcacttttgagatctgggggaaaatctaaaaaaatgaacaatcataccttaagtcagatgtaacttagagagttggaggcaagtataaataatattaatagaattactccatatgtattataattccatggaataagaaaataaatcataattctaaacatgagtcccagatagaaggttagggcatttactccaaattttaggtgctaactggcaatctagaaaattctcatatgtgcaagtcagtgtagtatgctcatatatttatttatcagaggggtattattcaaatatttaatagttatgatttcttcaatcaaatcagatagatgagattgtatgtgtgtttataaagatgaatttaattctccttataaaagataagtgcactgcaagatccaccttctactcaacaaattcaaacatttgtactaatttgtcttttggaaatttcttatattaactttcctgttatcgatgttagatttggatttctaaattgtaatgggttaataaagtctgagaaagcatttgatctccagatgtgccctactattggtatgatttatattttgcattttaattagtaaagatgctctatatgtaagtacatgcctgactgtgttcctcaaatagtaagtgatcattttagattcacactttggaatgagtgttgtagcaaggggtaacgaaaccccaaggaatcagtaacaggcaaacataaagagaggtaggtttgggtgttgcttttcacaaagaacaacacaagtagtcactaatctgagactgttagccaactgggatataaagaggaaggagtagattgaaagcataaagtccattgtcttagtcaaatgattaagggcaattgtctttagatttggccaaaatttcataggtaaagaagtgcatgataacaggctttttagaaagggttatgtgaaaatagagtaacaataaaataaaagctaatgtctcattaagttgaccataccctaaatacagatactggctttaatcttttctagttctctgtaatatatagcagtgggaaaccagcagaagacattattagtcagaaagatgcgtctgcttctcactgcattacaaaacctgtgtaaaacctctggatagaaagctagcaccccaataatgggtttgctttaaaagtctgggagtcaagagtgcttacttcaaatgcagcataggatgggttgaatggaaagaagtgaatggaaagaagctctcctcctgggagggttaatattctcctattttgctccccaagaatatggttagttgtacacagacacaagattctatggaaaacctgagactgactaaaagtcatgattgactcaagaagtgcttgcattcatataccacccattggaaattcaacaatgaataaaacatgcaggctgtatctctgagattcccacagccaagtggcatgtattacataaaaactaaatatttgtagtgtgacatgacatcctgtaatagagatgagtacctgtgttatgggagctaaaagcagcaacaactaacttcagcttgggaattatgaaagtttgaaccgaatcacaaaagaacaaggaggatatatgtacctggtagacaggaagtcatataaagagaggttctagacagaagactgagcccacaaatacacatgtagagatgaaagggtgtggcacattgctggtgttttcagggaagaaagcagaacgtctgtgggcaagcagtgggggctataggtagataagagccttaagaaacttttttttctaaagagtttggaatttatcttgtaggtaatagtggaccattaaggatttttaaagaggatatgatataattaacttgaattttaggaaaaaacagttggtaaatagatttcctgctgttttcagtaaaagggcaatgtcagaggctgagcccaatgaaaccactttgtgatacttgataaagtcacagcaatcgtgcgattgtcttctaagagcatcttatttagtcaaaactctaaagacaaagaaacacaaaatacctggcaataattttggtaaaggaaaagaagaaaatgaaatgcaaaaaaagaaaaagtaatgcttcaataaactttcctaccaggatacttttatataaaaatatgtcgtatggaaaatacaacatcaacaattagtaataaaaaagacatggtaatatttaattttttttcaattagagcttccttaagcctttgttatttttacattgcttccattgtaataactatacagagcattgccaaccagaaattggtactgagttctcaaaatagatttagctctcaaccaagaaataatagtgagatacaaattaatttacaatgattgaatttactgaaatgggatttaatttgttcttgaaattttcactcataggcattgtaaattatgtctaggaaatgctgatgcaagactgttttgtaaattagataacacacctaatgacatgtaacacactgggagatggctaaaatttaaacatgacttaaactttaagaatgactcaggaaatactggcaaaatctcctgcatggatatatagtcccatactcggcttccctgactagtgagaacgtctgggctcctagaacactgacctgtatgtggatctagcagacacggcatattgactttttcttcatctcattggatcatgatgtggaagataatacatctgggtgtttttctctttcatctgtctctttctcagtctccaaacttgtcagtgattacacagtttattatttcacatggaaggcaaatagagcttggtattaaaaattcaggctgggcacagtggcttacgcctgcaatcccagcactttgggaggctgagatgggcggatcacctgaggtcaggagttcaagaccagcctggccaacatagtgaaatgaaaccccatctttactaaaaatacaaaaattagccgggtgtggtagcatgagcctgtaatcccagctactctggagtctgagactggagaatcgcttaaacctgggaggcggaggttgcagtgaggcaagatcgtgccactgggcactccagcctgggcgacagagggagactctgtctagaaaaaaaaaaataaataataataataataataattaaacattacatttttattgcagtgatttgattttaaataattttatcattttacaatataacccaaaatatgctcatgggactagtaaatttcaaatttggttggcatcatcatctctgcctcgtagatatccagaatgctgagtaagagctgtaacagtgctatatttatgttgaggaagaggtgtctgacagctgctggggaaggaactggacaaacagtaggcaaatataaaacagaatgtgctgtgtcagtttgggggcaaaagcattgtacaagaacactgatgatgttaacctttatagaactaatgacaaattacctgctgatttttaattgggatttcctttttgacttttaaaaatttaattcatatgccaacatctttctgtttcatacagatttagccatttgatgtatttctaacatttaaaaataacatacttctcttaaactcaaaaattcttcaattaacacaataattgctaagtaactaatcacacattcaattgtaatggtcttgcttgaattttgtaggcagtatgttctgctgattccttctgttctacaagaaggctctttggataaagcttgtgcccagctttttaatctcactgaatctgttgttttgacggtctccctcaactatggtgaggtccagaccaaaatatttgaagaaaatgttactggagaaaatttcttcaaatgcatcagctttgaggtaaatacttctttctgcttaatatagaaaagaatattacaggtgcatgaacaccacccacataactgattttttagggacagagatcaggctatttgactgtatgtgtaaagttattttaatttttaaaagaataatatagtcctcagtatgagatgatgttaagtacagtcataaatggtaacaagggcaagagccaaaacatttgattttatgatagaaaattgttgaagggaataagacatatagaaagaatgactcttgtgcagaaaagggaagttttaagaaaggcaaaagaatccatttaaatggtgagataaggaagtgacaaagcaagagaaataaacaaggttggttattgaagaaatagatatgacaaattatgaattaaaacttttagtgataccaacacacagtgatagagatttcttaacaaaaaatcagtttcatggagtatttatttgttccctaggttcctcaggccagatctgacccactggcatttattacattttctgctaaaggagccactctcaacctggaagagaggagatctgtggcaatcagatccagagagartgtggtctttgtacagactgataaacccacctacaagcctggacagaaaggtgagtgtacctaaatcaggttaccctcaactaatgtcacttatatgatatttgaattgatggtacacaatacaagctcagaaattttattgtattaaagtttattagagaacctgcttaaaaatacaaaataaaaatatagattacatagcctaaatgttagagatttcatttccatgagtctggggkggggagcctcagaaagtgyatttttaaagagcaccttattctattctaataatatccatattattctaataatattctaataatatccgtattattctaataacattctaatcacatatttggggattttgaatttaatttacacaaacttacaagcttatggttgaaatagaaacaaaagagcaacaaagtatgtcatgaacatgtaatgagatacccctagtgactagagaattgcccaagtaatagaatgatcagcatgatgttgaattaagctgaaaagcctcctctctcctcctgggtacagaaggagttgatgaatacagattacagcagtcagaagatagacatttctgatgagatgaatggtacataaaaaagcactgaggtagaattaatttaaaaaccatgccgtaaaatgagaagtagatagacttatttggagtaaagaaacccaaatgtccatcaatgatagattgaatgaagaaaatgtggcacatatacaccatggaatactatgcagccataaaaaaggatgaattcatgtcctttgcagggacatggatgaagctggaaaccgtcattctgagaaaactattgcaaggacagaaaaccaaacaccacatgttctcacttataggtgggaattgaacaatgagaacacttggacacagggtggggaacatcacacaacaaggcctgtcgtgcagtggggagagggggagggatagcactaggagaaatacctaatgtaaatgacgagttaatgggtgcagcacagmaacatggcacatgtatacatatgtaacaaacctgcacgttgtgcacaagtaccctagaacttaaagtataataattaaaaataaaataaaatgtgatataataaaagaaaaaaaaaggaaggaaaagaagctgcagtgaatagaagagttaaaggaaatccctgaatatagaactaaagaggcattttcatgtagttaagtaacacccatgaggagtcactacagatgtggggatcatggcttgaggaggcagtcgtggatgaactgggaatcacagtaatcagagcctgcttaggcaccaacacactgtgatcccagaacaacacaagcagagggaggtgagggatatgtgctggagatggaggaatgcactgcatgcattgtgctatccccagccttccactcctcttcccctgaccctttgcctccctccctcacttcacaaaagagggcattcaggtcagtatttaggcaccagagaaagaaggactagacaagaaagacagggcatggctgtacagtttgggctggcaccaacaacggtggaacaaacattacgagagcatgcatgctggcgtgggaggtgcttatgagggggaagagtatatgtgcttgacacaagaggatgtccaaggaaggcttctaggattcttgctaaggagagctatagaaggcagaggtggggaaggtggctgctacttcaaagagcacagaaacattaaaccttaatttaaaattgcttttttaaaatttcttatccatccacagtctagtaaagagtctaatgcacagaggaaaggttataacatagcaaagaaattgagccaggagtcttacacaattgagagatattcagttttcaaaaaattgatcattacaatctgagattataatgctacaaatattcataatctacycagcatcatgcttctttttgaataaaaatatggtgtgatattaactatgattgctaaaacctcattgcacagtttattgttgcttcatatttataatgcartatattaactactatatagtggcatgaacaaaatatgaaaaagcatagtaaacagataaaatagaaagtgagaccagactaayatggtgatggtagtctaagacagtatttcagcagaagactacaatctagctagcgacaatctgagaaccaaggcgatcaacagtgaaaactgtcaaaagacaacgaatyatgacctggacttcagtctttacaacaggatacctgacaaatttcatttcatgtagtttagaaacctgttagaactaagcattcttttgtggtctctcagatcaatctatcaactgagcgcagttacgaagaagcttctgaagcttacagaagctgtgcagatggtttctctgttagtgccttttcctccctccaaattgtacttcatccttaagacatcgtcacttttaatccacctcctttccccatcttctatagttatgctacattcactagactgttgcttaattttaatttccagagcaggaatctaatttttagtgctccaaagaccttgtagtaatctaaatccgaaatcacttcngtaagatagcatgtggttcctgttctccttggttcatggttgaagcttctatttctaagaatgcaactcctctatttaaccaangcagtgagaatttctactgcaatcctttgacaatcatccttgattggaagcaccatggggaagtaaaggncttcttgaaaatcaaagcagctgcagcattatcataactcccttattagttctcaccccccgaatgttgacttattattgtcaattaggccaaatatgattanccaactccctgctttagtaataactacatttgcataagaacaggattaatggactgttccctcaaatatgggtcatagataagaagatcrtttgtaccaaatgtttatggcaaggagtttccatggcacaacaaactgcatgtgcttatgtatagagatggaaattgatgtagcatttccaaaaatgatggcagctaagagattatgtggttttatctttgcaagccagtgtttctaattgctggacattatctggttcagtattccatttagataaatagattcaatgcatggctggcctatgagatttgggyattcataataaatttgactacataataaaaatatagtaatgatgcaactgggctcattatcaaatgagccaagatatrgagcatatacctagtttcttctgcccaaatcytacatcggtcttttctttcattttctgcaatttcattgctgatggtgcctttcttttcctttaagtcagtgttttgtagartattcaaacatactttttccagaaagtttcatttgcatcaagaagtttcagatctttctttaaacttatcttaagacctggaactactagtcctctaaaaagaggccctgtgtatggacagggagagatagtatgaaccagaaggggacatgaaggagttgttgtattggttcttggctggtttatacaagatttagtgcagacagtcattagtgactasagcagaatcagcctcattttaataattgtttttagagaaaaatcaagcagcttagaacaatgaaaatgtgattttactaggttcttgttcactagttttttgaaatagaccaagctgagtttaaaaaaaaatctaaaaaaaaargacaaattaagtaataaaaactaaatttgttgaacacagttgaagccatctgcattggaagtattacaaatagcaaacaaaaagggatagtactctaggttcatttctcattattagaatctcatccaaatggttaacgtcttcccatggcacctttgggtaatatawtcattttcttcctatgaggaaatctcatgagaagctctacctctcttaatgcttgagttaatgttgcagcagtagctttcttcaataccatctcaatatttcatcaagattcaattccatgaatttagaataacaagtaggcccttaattcaactgttatatttctcagttccaagaattctggacaaggtttatgaatcctgttcytatctccagacacattacgttttattagtgaatgaatgctgcaattagtgggaaggagcacttagcaacttggggagtgggcaaaggaccctatgtactcatttttaaaattctcatcagcctattcacatgagggcttctggcctaggagtctttaatttcaacttgttagttttaaggtcctgagagaaaacactaagagatgaaagtcaaactgttgactataggtttagagggggcaagagtggtaaacatggagagaactgagaggagatacagagaggtggaaggagaaggaagaaggagaggaaactctgcaagggaaacttgggcaaatgtctacrtttatttacttgtctgataaggaaatggtggagtataggaatggccaataatctaagacaaaaamaattagtgctagatacagaaatcaaaattgaagcatttcaaaaagaggcaaccagcagtgtaaaacattgcaactgtcagagtgaagactgaccacgaatttgttgataaggaagttatkattcatctaagagggcatttttattatgttggagagacccaagggcaggrttgcttactgagactgcagggtgtatgttgtgaaagagagagaagtaaatgaaaattcttgaaaactaggcagatgagtttcaatataatcaatagatattcaaactttcagtcagaaatcagtatttgtttgggttgtcctaaatgtgtttatgtttctttgcttmataatagatttataattaacctcttcactcatctagaaaaaaaaccttgagttcatatattaacattatttttatttttatttcagtatccagtgatcacccttcaggtaagataactaatagttgaagaattgttttctcattttttgaacatctctcyaaacctcaaaatcaaaaggcagctcacagggaagattgtctatttaaattgtygcagaattattaatttcatgyagacagccycaagaggacagaaataggtttccacccccaccaccatgtgattcatattagcatgcacccattaatacagacaataataatatagacaacgggcaagtatgattgtatttaatttaatgtttagttgttgaatgtatataaatgtacacttaatgttttatgcactggggataaaatatggctcgcctttaagaaatcagagattgacacagaaaataaatgtaaaaaaatcacagctagctctaaaatatactaagtrctgtaatatgcatctatgtgacctcagataggagagtaaccaattctccttgggtgatgtgaggacgcactcatgttttgaatcctaagtaagttggaaacctaagtaggaaacaccttgctgaaactttataatgaataaaaacatccagcatgcaaaaatacgctttcttattctcaggatccagaaggcartcgaatacaacagtgggtgaatgaggagtctgtgggagggattctacaactctccttccagttaatctcagagcccatcctcggatggtatgaaatcaccrtggagatgctcaatgagaagaaaacatatcactccttctctgtggaagaatatggtaaataatagcaatgaaaatattacctatyaataaaaaaattataaaatmtttccaattttgcaagggcargattattaaataatgaattttcaagtgagtatctcttcctttcctctttccttgtcctctgttactattttagggttctccatctactgtgatttttatctcctagttcagcccataatcttcctgcaattctctgttaacctaggctatctatcttccttttgtagtatctggattctattttatatgatagtttctgggatgtaaagcacttcttatgagaagaatggaattaacattagtcatatgttagccattagtcccttcatattttctcctaaaatcttcataaaatttctattgtagtatctttattactattttaaagatgaagatattgagaaacactttcccaagttcaacacctgaraagtgatgaatttggaattcaaaatatgcatttttctatccaattccaaaatccagtcttaggcacttcarcgtcctcctcacactgtttattaatggcaaacataagcaaaggttgatggtttgtaaaggagaaacaattgttttgtatgaatgtatttatgttaatatgtatttatgttaataatatataatatacacattataatataatatatattttttttttactggcagtgttacccaaatttcaaatgactgtggatgcaccagaaaatatcttagttgtggactctgaattcaaagtgaatgtctgtgccttgtaagttgaaattgtacacaatagaataatgtattcatagaaagatattagaatgggatagatggctaaaaagaagtaaaatataaatgtgtagaaggtaagggaaaaagaaggtgttaaattattttgctgattttatgaattcttccatgcatctataattcttttaatgcatgttatgacacgtggttttatgtaacagtttaagacaactgactactgtctttcttacatcataagataacatattgttttgcaccagccaatacagtagccgtgaccacatgtggttatttaagttttaattaaaactaaatattcagttgcgttagccacatttcaagctgtcacatgtgactagtggccactgaattggagagcatagacataaaacatagaacattccatctcccagaaatttccattggacaatatcttctgtttatgatgatttctcaattcaatctttatgtattacatgattataaaagaaagctgaagctcaagatgtatcacagagaaaactgctgtaagagttacaagtggctctagggtaatggcggggcacagtgtggaggatactaagggcagacagggacttaggggcaaatagtgaggattaacgtgtggcaggagtagcagtgaagcaggtcaggttgttttcccctcttgtcactaagttaagcaacattcacagagtttatataaccagcaaagagagccagggtgcaaacattaaaactttgtctcctcagacctgatgtgtactacttttccctgactcatgtgtactacttttccttttaattttgcataattaaaaataaaaaagtgacctggaaatttctagttattaggagagcttcactacagtaatctaaaattccatgccaaactttaaggtgaaagctttgcctgtcctccttcctgtgtctactttaggctggaagtctttaagagtcaagaagaagcatggctaactttttgatgtcactaccttgtgcttcacctccagagttggaagaatacagaaaaggcagagactgaaaagtctcattgtagttgggtcataaaggcagggaattgccagcattgctggaaaatcccctgagtaacagaaatccccaaagcccaaatgtctaggtacttccctatcacagtggctgtgtgttggctcctgtgtcatttttactggagaagtattgcataagcaaaataaagcactctaggacaagccagctgggaatcccaaaacataagcatgaatcactaaatggttgaagattctaatgacttgaaatcaaggtattatataaacaaaaaaaagagcaatatatacctgagaaaactgttgaacatcaatcagaaaaaaatttagaaataagtaaaatgtgtatactcagatatgagtcaatagtgtaactttaaaaataattaaagaccttggaagtaggcatattattaatttaaaaatatatgtgtagaaaggctgactagaaggatcgatgatgcttaagagagaattagtaatttggaagatgaaattgagaaattgtcataaaacgtagcccagaggaatctactgttattccttacaagcaattttgttctttgctctttctacctatttaaaattttttaaattatactttaagttctagggtacatgtgcacaacatgcaggtttgttacaaatgtatacatgtgccacgttgctgtgctgcacccattaacttgtcatttacattaggtatatctcctaatgctatccctccccactgcccccaccccacgacaggccccagtgtgggatgttccccacccggtgtccaagtgttctcattgttcagttcccacctatgagtgagaacatgcggtgttcggttttctgtccttgcgatagtttgctcagaatgttggtatccagcttcatccatgtccctacaaaggacatgaactcatccattttcatggctgcatagtattccatggtgtatatgtccatctatcattgatggacatttgggttggttccaagtctttgctattgtgaatagtgccgcaataaacataagtgtgcatgtgtctttatagcagcatgatttataatcctttgggtatatacccagtaatgagatagctgggtcaaatggtatttctagttctagatccttgaggagtcaccacactgtcttccacaatggttgaactaatttacagtcccaccaacagtgtaaaaatgttcctatttctccacatcctctccagcacctgttgtttcctgactttttaatgattgccattctaactggtgtgagatggtatctcactgtggttttgattttcatttctctaatggccagtgatgatgagcattgtttcatgtgtctgttggctgcttaaatgttttcttttgagaagtgtctgttcatatccttcgcccactttctgatggggttgtttgattttttcttgtaaatttgtttaagttctttgtagattctggatattagccctttgtcagatgggtagattgtaaacattttctcccattctgtcagttgcctgttcactctgatggtagtttcttttgctgtgcagaagctctttagtttaattagatcccatttgtcaattttggcttgtgttgccattgcttttggtgttttagacatgaagtccttgcctatgcctatgtcctgaatggtattgcctaggttttcttctagggtttttatggctttaggtctaacatttaagtctttaataatctgtcttgaattaatttttgtataaggtgtaaggaagggatccagtttcagctttctacatatggctagccagttttcccagcaccatttattaaatagggaatcctttccgcatttcttgtttttgtcaggtttgtcaaaggtcagatggttgtagatgtgtggtattatttctgagggctctgttctgttccattggtctatatctctgttttggtaccagtaccatgctgttttggttactgtagccttgtagtatagtttgaatcaggtagagtgatgcctccagctttgttcttttggcttaggattgtcttggcaatgcgggcttttttttggttccatatgaactttaaagtagctttttccaattctgtgaagaaagtcaatgttagtttgatgggaatagcattgtatctataagttactttgggcagcatggccactttcacgatgttgattcttcctatccatgagcatggattgtctttccatttgtttgtgtcctctcttatttccttgagcagtggtttgtagttctccttgaagaggtccttcacatcccttggaagttggattcctgacttcaaactataccacaaggctatggtaaccaaaacagcatggtactggtacaaaaacagatatatagaccaatggaacagagcagtggcctcagaaatagcaccacacatctacaaccatttgacctatgacaaacctgatgaaaacaagcaatggggaaaggattccctatttaataaacggtgttgggaaaactggctagccatatgcagaaaactgaaactggaccccttccttacaccttatacaaaaattaactcaagatggattaaagatttaaatgttagacctaaaaccataaaaaccctggaacaaaacctaggcaataccatttaggacataggcatgggcaaatactttatgactaaaacgccaaaagcaattgcaccaaaagccaatattgacaaatgggatctaattaaactaaagagcttctgcatagcaaaagaaactataatcagagtgaacaggcaacatacagaatgggagaaaaattttgcaatctatccatctgagaaagggctaatatccagaatctataaggaacttaaataaatttacaagaaaaagcaaacaaccccatcaaaaagtgggtgaaggatatgaacagacactgcttaaaagaagacatttatgcagccaacaaacatatgaaaaaaagctcatcatcactggtcattagagaaatccaaatcaaaaccacagtgagataccatctcatgccagttaaaatggcgatcattaaaaagtcagtaaacaacaggtgctggagaggatgtggagaaataggaacgcttttacactgttgttgggagtgtaaattagttcaaccactgtggaagacacagtggccattcctcaaagatctagaaccagaaataccatttgaccagcaattgcattagtgggtatatacccaaaggattataaatcattctactataaagacacctgcacacgtacgtttattgcagcactattcacaataacaaagacttggaaccaatccaaatgcccatcaatgttagactgggtaaagaaaatggggcacatacacaccatggaatactatgcagccataaaaaagaatgagttcatgtcctttgcagggacatggatgaaactggaaaccatcattatctgcaaactatcacaggaacagaaaaccaaacaccacatgttctcactcagaagtaggagttgaacaatgagaacatatgggcacagggaggggaacatcacacaccggggcctgtcgggggttgggggcaaggggagggatagcattaagagaaatacttaatgtagatgatgggttgatgggtgcagcaaaccaccataacacatgtatacctatgtaacaaacctgcaccttctgcacatatatcccagaacttaaaatataataataaaaaataatgaacagttttacttctttccaaaacaaacaaaaagaaattaccccaaaatctgatgacttaaaatgacatttataaaaaataaataaataaatataatttacattttaaaagtaaaaaccataaaatatgctcataatagcagtttaaaaacaaaaaaactaaaagaagcaaaatgttattttatttcattttttgtttttcaatactccattgctatcagtatgcaaaaaatattatttttaatgaaataatgactgatgtatttttttgtttttttgtttacattgtattttagtgacttagatatataacgtctacatgcctatttcaacctttttaattaaaatatatttttgcctaaagcattcaactcaattttagtccataccattgttttagatttcctccagaaaataaaatttatggtaactagctatttaaatgttgttacagtgctggtttcagctactaaataaaggtttcaaaaccctatacagattaaaaacgaccttgacctctgtaattgtgttattgttatattcttctattagatatacctatggtgaacctgtggacgggaaggtccaacttagtgtgtgcagagaatctacggcttatcattcatgtgctcatcttatcagttcactctgtaaaaattttaccattcaggtaagaggtatatcagcaaaattataaataggtttgcgttaactttttatcctcaccttccatttaccttcctttcttcttgttttcctctttacagttaaaatatatacttttattctatatttctattcctatttgtaaattttatattcctcttttgtcatgctaagtttcattttctattgactgacaaaaagcaaattatagtatcagaaactgagtagtaaatttcgattcttaattaaaaatacatttggtttcatatcaaaatctacaccctatcaatttactgggaacatatgtcctgttctttattttatactttgtgaatttagtcagggagatgtgatgtttctgcatattcaagagtattagatgtataattattttcctctcaacctattctcactggaaataagtgtatataggagctccagatgggaaccctatcagtcaggttcttaaccactaaagagaagaatcaacttttccaaact

SEQ ID NO: 7021 - DNA, 13150 bp, Homo sapiens
atatgggatccaccttcaccatcgtcccgggagctgtcttctgtgttatgtctcctgttttcatatgctgtgtcattctcattcatggtttattgccttattttgttggaacacatcttccacttacaaaggggtaatgtttttggaaacgttgcatttctaaaaaaggtcttttttctaccttcatactttaccggtatttgggcaagaaatggaattctaggatgggggactatttcttgtaggagttttgaagtcactggtagatgattgtctagattccagtattgctgtgactccttttccctcactgtggcctgtgctttattttctggacgttctccttcccttccccccaccaatcttctgtttttcttctgtgttctgatgtgccttggtgtatgtctgcttttatacattgtgttggggtctctatggaactttttaatgtggaaacatatgtcattttggggaattaagttgaaattgtttttggttatttctctgttttcccaattctctttttctagaactcctgttattcaagttgcttgacttacttgactggtctaattttattattagccttttttatcttctttgtcttttttttttccaacttcctaggggagatattttcaacttctcttaattttcctattgagctcttagtattttgtttagttttttttggacagagtgtctgtcacacaggctagagtgcagtggcccagtcgtaactcaccatagccttgaactcctgggctcaagcagtctttctgcctcagcctcctgagtagctgggactgtgggtgcatgccaccacacctgacttatttttatggtttttttttttgtacagatgggatcttgctgtgttgcccaggctggccttaaactcctggcctcaagcagttcacctgccttggcctccaaagtgctgggattacaggaatgaaccactgtgcctggcctgtttttcatattttaattccaaaatactttttttaaaaaaattctctctcaccacgtttctttctttcttgctttcctcccttctcatattcctctgcaacctgaatgtaccaccatctgacctctctcaggataccagtgatggatttttagtagcatctttttatacagtctctggttctttcaagttgtgtttactatttgttttgttctctcttccatccttggggtgttcttaaaagtctgtctctccatggttggctctgacctaaggcactaatggtaacttgagagcactgagttcaggcacgggcgtacactgtgagcttcactgggtggtccctggactgggccagattcccccctgccttttctctttagatggatagaggcccagggaaagatcttcccacctctagccttggggggataagccctggctggcattctgagagcaagtggaagcagagggctggatttttctgtaatcagtacgtaaatattcacttggctcctctcattttcaacaaggcacctctacaattgttcctcctctagtttctcagtccagacctgctgtctgagcctgcagtgagccgccaggggctgggaggggcagtcactgtgctctctggaagcattgggaagctggggctttaattactacagactttcagacagtattgttatttttcctcccatcttttacatttattattattttaattttattattattattttttctgagacacggtcttactgtgcccaggctggaatgcagtgacgcagtcatggctcactgcagcctgaaattccccagggtcaggtgatcctcccacctcagcctcctaggtggctgggactacaggtatgcactatcatgcctggcttttttttttttaatattaaaattgttttattatcattattattttgagacggagtgttgctgttgcccaggctggagtgcagtggcgcaatctcagctcactgcaacctctgcctcccgggttcaagcgattctcctgcctcagcctcctgagtaggtgggattacaggtgcccgccactatgcccggctaattgttttgtatttttagtagagacttgctttcaccatgttggccaggctggtttcaaactcttgacctcaagtgatccacccaccttggcctcccaaagtgctaggattacaggcgtaagccaccacacccagccaaaattgttttattattatattttagagacaagctcactgtagccttgaacccctgggctcaagagatcctccaccttagcctcccaagtagctggactatgggcacaggtgcacaccaccacacgttggtgatttttccagtttttttgtagagatggggcctcactacgttccccagactagtctggagctcctgggcttgagtgatcctcctgtccctgcctcccaaagcactgggagtataggcataaactaccgtgcctggccccttcccatccttgttccggtgttctgacattcttggttctccccattccagagcctcttaccggctctgttggggaagtcttgctgcttcttggctttccccacagttaccttggggttccctttcttggttctgcaaaatgtgtcgcctctgggccatctgcttctcagcttccaaaaactgtgtttccctcatttccctctgttctctttgtctttgtgcgattatgcttggaaacaacaacaacaacaacaacaacaacaacaacaacaacaacatcatccccgcgtgtattgtggtttcagtgggctttcagtaggaaataaaaataagtgtgtctttttgatatgatgtttttaccctttcatttttatctttgtgttcacagcgttctgaatcacctctgccattcttccctgctgctcacacccttccccctgctcagggtcctcctcttgtgccctgtccctctggtctgctcattctgctaaaacctccccatgaagacctttccaagtgagagtgatctttccttcctgaattcacaaaacattttttttttggtgtagttttctttgaacacgtggtctacctcttttttatgacttatattttgtcagataaattttattttatttttgagatggagtctcactctgttgctcaggctggagtgcagtggtgtgatctcagctcactgcaacctccgcctcccaggttcaagtgattctcctgggactacaggagaaagaggagctgggactacaggcgcacgccaccatgcctggctaatttttatgctttttgtagagacagggtttcatcatgtcggccaggctggtctctaactcctgacctcaggtgacccacctgcctcagcctcccaaagtactgggattataggtgtgagccactgcgcctggcctgtcagataaattttaatttctgatgttgggtgatgattgtttctttgccttcatgcaatgctttgcatgtagtaaatactcaaattttttttttatcaacatagatttttttcagtgatctttttctggtcttaagttagacaggatattgaccattgctgtatgccatggttaatgaaaaagtagggtgctatttctagttgcagatacttttcttgaaatttgcacatgtgggtaatatgcggagcctatgcattatacatgtcataactcacaaaagctcgccttaggactttgcactgttttctcttaccacatcctggagtagagtgggcctcagcattccttgcaacttgcatcttgtagagttacctctgcttccattcttagtcttaggaaatgttttgtctagcactaggcaaggtgaagttgatgttctttatctgaataagagcagtgattcttcatgtggttttgtctccaggtttcttcggtgggtttggacctatccttgggagccttgccccatgaggacattcactgcttgatcatctatttgatggatgaactctgcccctcgtttattgctgtgtgtgatggacttttggttgtcataatacacaattattgttagtgtttaactcttttgttattttaaatggacatatcctgaatgagaaacattcttcttcttttttagttgaatgttctgtcatgtttgtttattcacccaatgactgatacaattattgtagaattagaatttattggtagtataaaaagtggcttatcataacttttatcttccccctaagagacggggcctcactctgttgcccaggctggagtgcagtgatacaatcacagctcactgcagccttgaatttttgtgctcaagggatccccctgccttagtctcccaattagctgggactgcaggtgtgggtcactatgccttggccttctaaagttctgggattacagggatgagccatcatgccggaccttatcacaattttttgctcagctacatttctgagtgtctatggactggacagtagagattcctactgttattattttaaactttttaatgcaaactactacaaagtggaatcaataagtatgcgctaactttttctcactggatactggactcttgccttgaaaataaagcaagtcctctgttcattgaaagagaattatggtatgaaagctgccagttaaaatttcccaaaagaccactgttctacggagttgtatttttcagtggcaaaaatatccttcctggtttttaaactcttgtgggaggaggtcatttttatatgtttattttttatgttttatttattattttttttatttttaatgcagcatgctctgttggggttactgttgatctcctgctcagttcttttcaaaacgtcatatccattcagcacatttttgtggagtggcatttaataagtggcagcctgatatttgccttggcatgatgttatcatgattgcttggcatagctgactgttgagtcaggacccctccggaggcaggagtcaaccattgactctcaaaattagaaaagccttgatcagttagttggaggattacaagccaagtttatagagtatttcaaagagagggtaacatattctgctgatagaccaaataagatgaggacagacaacagacttttgtgttaagcatcgtggaggctgctgtggatatgatggaagaggaagcctgattggaatggggttatgggaggaagacacacttgaagcaagtatagacaatttttaaaaaaaatttgctgtgaagatcatcaaagaattggtataataaccggaaggtaaagtagtgtcaacgaaaggttttgtgctgcatatgtaaaaataattcacagcctttaaaggctcacgcttgacacctgactctatcttccatacgattgtggtttttaggaacattaacagtgggacaggctgggctcagtggctcatgcctatcatcccagcactttgggaggctgaggtgggaggattgcttgagcccaggagttggaggctgcattgagctatgattgcaccattgtacttcagcttggatgacagagcgagactgtctctaaacaaaagaaaacagtgggctggagttagactgctgatctgctttgggggtgtgatggtcaggaaaagctcttggagaagaggatgcctgagaagtcttgatggacagacagggctggcctggagggtaaggtgtggtccaggcattggaggccttgggcacagagtggggggaaaatggtgcagggcctaacaggctgtgaaagggaaagtgctggggaaaaggtggaaatgtagcaagttctgaaggatgaagttatgaggttgagaaagtccataggtgcggatttatttccaaggggtggctacaaatattatataaaggctgcagataatgatctcatctggagggagtgaacaggattaggaggcttaaagaatggtttcataagccacattttggaggttggtgtgcttgtgtgtgtggaagtattttagaaacgaaagttgatatttaagttgattgggtcacccttgagcttgcttggtgggaagaggtgggcaggatgtggctattctaagtggccaggggacacctctttcttattcacccccaggacattatttccaattttccttgaagaggaaataccatttaccatcagtaaatggttttgggacttcattctttggggwctcaacacatctggagatgccaaattctggagctgtctcagtggcaggtgtcccagggactcctggatgatgttgtaattgggattcatgtgcagtcagaataggccccacaaatgaagaggatgccaacgtgtgtgtgtgtgtgtgtgtgtgwgtgtktgttttacaaacttactctctgtgttctagataaatgattcctttcatagaggtccagatagatgagggtgcagaggaactctgttacttgcaaaatggttttaacggtaatgtttaataactttgaggattaaggtctgagttacttgctgtgctggttaaaaagtgacaaggattggtcattctgcatttttaaaataagtgttccgtttcagtgatwcttaggcatgctttgttagagatggacttggagagcttcttaataatatggattctccccgcacccctgctccagggtcttagtcagtagatctggaacagggtccaggaatctgtattttaactcttcattaatcattagcctccttcttccaatctttgcttcaggaaagaactgtatcaaacatcatctttaggtatgaagaatggaggattgaacttctggatagcaattgtgttgcagaatgaaagcagtagggaatggtgaaacatgcaatttagtatattttcatctgaatatgtacgtaagagtgatgtagaagttcagaaacacacaactatgtttcttcttcaratcatttgaaagcagagttttaaggattttaaaatatrcgtacaccatatagaagtgtataaaatttaaaatgatgtccttttttttccttctcctcaatcccactgcaggataaccactgcaaattttgaggggkgtgtgtgtgtgtgtgtgtgtttacgcattttaatakgtgtgtgtgtgtgtgtgtgtgtgtcattttgtctctgtaaaaagaggctcaagccacacaggatgtgctttgttcactacggtcttgtcagcatccttctgtgtccctatctttagacctatttgtaagaaacacttggagccaccagggtgtgcaaactactttttgcagataagcaaaaatacaaattcttcagacacataatatatgctgtttgcttattagaatatttctgtagattgcattgggggttaataagtataataagtatttcatatattgggcaataggaaatctagtatgctttagagaaatcagtattacttatgcagtacatattgcaggtttgtgcagttcctatcataatagagtatcagcatcagagccaaagggaagagtgtgtatgagtcactccatcataaaaggagcagtgactcaataccaaacttagggtgctgtctgaatttttaatcagttgcagtattgttgatatgaggttgattcctttttatgggcaggaagttatcacggtttaaaatgtctaattcccttttggtgatgctaacttgctatattcagtgtttctgttctttcgtataggatccaaactactggatacaggtgcatcgcttggaacatggagatggaggaatactagaccttgatgacattctttgtgatgtagcagacgataaagacagagtgagttcaggtcctggggaacctgttctgaatgcatttttttttttttgaggactagggagcgggtgcgattcttttcctttctgttttagacacatactttaaattatgtgtgggccacccactctagtatattttcttttataataagtatcatgaatcttcactgtcctgaataccaaggtataatgattttcttgatacctgggacttaacactaggttttggggttttaaaactacacttttacaatggaaatatcacaaaaagatttctatgccatattccgccttaatttaaccaaacataacatctttcttcacaactcgggcctgtccttatcatctccgtgtatacaacatacagccattctgcattctggtcccagcgttggcccagagaagatccatcccaaccgtggccttggcggtgcaccgtgctcctgtgcagtgggcgagtgtgtcccaggcagcctaccctgtgcagggcctggccctcaggaagctcagccttgctgtgcgatgggccatttgtgtcccgggcagcctctcctgtgcagggcctggatctcaggaagctcggccttttctccatcagtgctctgatgctctgtgtgtgcttccccagtctttactgtggtctgtgagtttggctcctggacctatccacctactgctcttcagtgttccctcccactaccccactttttttctgtactcttgagaggaatgaggaagaggaagaggagggggaggaggaacgttcagcgttttgagaatgtgtgacaggatgttcggctctggatgtagaagtcagcaaattctttttttttttttttttttgagatggagtcttgctctgttgcccagactggaatgcagtggcgtgatctcggctgctcactgcaacctctgcctcctgggttcaagcgattctcctgcctcagccttttgactagctgggattataggcgtgcaccaccacgcctggctaatttttgtatttttagtagagacatggtttcaccatgttggtcaggctggtcttgaactcctgacctcatgatccgcctgctttggcctctcaaagtgttggcattacagatgtgagccaccacacccggccctggccactccttttgtatttggcttataaggaattgcagaagggctcatagccacatacatagttacatcagcatggtagtatggaggcagcggcctggtcgactgtctcctaaaacctccctgcagtagcacagggtatttaaccagctaggttacatcgtgaggtcagaagatggtaagatcacccagatattcactctgcttcctactggggctccttctcattcctggccctctccccgccggcctgctcttctttccctcagctgtgagctgggtgcacacagctgttgtgtcttgttcacacctatattcctgacagttagcatcatgcctggctgagagttggtgcatatcttaaatgttttcttgaaatttcaagtaagacaaaaaatatcaaataccaaatagtgtataaatttggaagattagattcactgttgcacctgtcatggtggaatttgtcccatgtggctcctgtgggtcaggaatacattgtatcaaaaaatgcagatcctggctaacaaggtgaaaccccgtctctattaaaaatacaaaaaattagccggctgtggtggcgggtgcctgtagtcccagatactcaggaggctgaggcaggagaatggcgtgaacctgggaggtggagcttgcagtgagctgagatcacaccactgcactccaacctgggcaacagagctagtcttaaaaaaaaaaaaaaaaaaaaaaagcagaagttttctgccgacttatgttctgatgctatttttcttggtgccgtttctccttcttgggcttttgagtgagccaggcttagggtaactctgaaatccttttctgcagtccacgtgaagagtaccatctttcatttattgtgtggctcaattccaacactcaaggcaactacagagatttatgaagaatttaaacaggtgctctttttccaccagagtattagaaagcgatgaattaacgtatcaatctttcaatgtcttcctcttctcccttcttcttcgtccttcttttttttgtttctttttttttttcttctccctctctttctcagtccctctctcttgctgttacttcctatgtaaaaatagcacaactccttgtgaggaaaaattggaaaatgcagaaacatacaaaggaattaatcacctgacatcctgctattgctgagagcttatcactgttgtttgagattttcatcctgactcttccctttcttcagatagatagaaacacagtctttttcttttaaataaagagacttgaatagtagttttttgttttgaggttagcatatatatatttctgtgtccatgaaccatagctatgccaacatggctgtgtagtcttttgttttaatttaatttatttatttagagacccaggctggagtgcagtggtgtaattatagctcactgcagcctcaacctcccaggttcaagtgatcctcctgcctcagcctcttatttttaaaaaagttttattctagattcaggggtacatgtgcaggtttgttatataggtaaattgagtgtcataggggtttggcatacagattagtcaccccaggtgataaacatagtacccaataggctaattttttgatcctctccctcttcaagtaggccctgctgtctgttgttttcctctttatgtccacgtgagatcatgcattatttggttttctcttcccatgttagttcacttagcaataatagcctctagctccattcatgttgttgcaaaaaacatgaccttgttattttttatggctgcctagtgttccatggtatgtttgtaccacattttctttatccactctaccactgaaagatatttaggttgattccatgtctttgctattgtgaatagtgttgtgatgaacatatgtgtgcatgtgtctttatggcagaacagtttatatttctttggatatatacacagtaatgggattgctgggttgaatgataaccctgttttaaattcattgggaaattgccacactgctttccacaatggccaaactaatttacattcccaccagcagcgtataaacattcccttttctccacacccttgccagcatctgttattttttgacttttaatttttttcttcgaatttctcacacgacacggatgtattgttttatttaataattgccactctgactggtgtgaggtggtgtctcattgtggttttgatttgcatttctctaatgatagtaatgttgaacattttttcataagcttattggccatgtgtatgtattcttttgaaaagcgtctgttcttgttctttgtccactttgttttgagatggagtctcgctcttttgtccaagctggagtgaagtggcacaatctcagctcactgcaacctccatcccctgggtttaagcgattctctggcctcagcctcccgagtagctgggattacaggtgcccgccaccatgcccggctaatttttgtatttttagtagatatgggttttgtcacgttggccagactggtctcaaactcctgacctcaggtgatccaccctccttggcctcccaaagtgctaggattacaggcgtaagccaccacgcctggcctctttgcccactttttaatggggttgttttatgcttgttagtttgcttaagttctttatagatgctggatattcaacctttgttggatgcataatttgcaaatattttctcccattctgtaggttgtctgtttactctgttgatagtttcttttgctgtgcagaaggtttttagtttaattaggtcccatttgtcaatttttgtttttgttgcaattgtttttgctgtcttcatcatgaagtctcgtccaggacctatggtcagaatggtatttcctaggttatcttccagggtttttatagttttagattttatatttaattctttaatccatcttgaattgattttttttttttttttgaaatgaagtctcgctcttatcacccaggctggagtgcaatggcgcgatctcagctcactgcaacctctgcctcccaggttcaagtgattttcctgcctcagcctcctgagtagctgggattacaggtgcacgtcaccatgcctggctaatttttgtatttttagtagagatgggatttcaccatgttggccatgctggtctcgaactcctgacctcaggcaatccacctgcctcggcctccaaagtactgggattacaggcgtgggccaccatgcccagccctttgaattgatttttatgtgtggtgtaaggaaggggtccagtgtcaatattcagcatatggctagcctgttatcccagcaccatttattgaatggggtgttctttccctgttgcttgtttttgtcagctttgtcaaagatcagatagatggttgtaggtgtgtggcattatttctgggctctctcttctgttccatgggtctgtgtgtccatttttgtaccagtaccatgctgttttggttactgtagccttgtactgtagtttatagttgggtaatgtgatgcctccagctttgttctttttgcttaggattgccttggctattcaggctctttttcagttctatgtgaattattctttttttccaattctgtgaagattgtcattggtatagtttgataggggtagcattgaatctgtaaattgctttggacagtgtggccattttaacaatatttgttgtttcaatccaagagcatggaacatttttccatttgtttatatcatatctggtttctttgagcagtgtttttaaattctcattgtagagatctttcgtttctttggttagctgtattcctaggcatgttattctttttgtggctattgggaatgggattgtgtttctgatttggctcttagtttggatgttgttggtgtgtaggaatgctactgatttttatacattggttttgcatcctgaaactttgctgaagttgtttatcagatcaaggagcttttgggcagagactgtggggttttctaggtatagaaccatatcatctgcaaacagggagagtttgacttcctctcttcctatttgggtgccacctcacctcttgagtagttgggactataggcatactgcacgatgcctggctaatttatgtaaacatttttgtagagacagggtctcattgtgttgccaaggcttgtctcaaactcgtgggctcaagtgctcctcctgcctccacctcccaaagtgctgggactacaggcatgagccactgcgc

SEQ ID NO: 7022 - DNA, 19858 bp, Homo sapiens
ttggtgagaggagagtggtattttcctctgggtgtatatggcaatatgtctggtgattagcctggctcagcttgcctcgtctccatcaccaaagagctaaagaaagaaaagaaaagaaaagaaaagaaaagaaaagaaaagagctaaagaaagaaaaggccctgctcccaaggtcatactgaaaagcaattcagcttctccccatgtattaaatgttatatttttcctagtttcctggaacaaagagatctgtagtatcatccatgcaaaacccaagaccgcatgcagagaggttcttaatgctttcaatgatgatttgttgattgatttgcatattgaaattatgaaatttttatccaaaatatataataactcatggattgcttacccatggctattgacagctttgctaatattatgtgggtgagtacttcacaacagaagagaagcatatctggggtttaacttctggttttctcagttcctcagatcttttgggttggcctttggagaatacactcctgctaaaatctgtctctgttctatgattggtgacaaaagcaaagattatttagaaaatggccataataatgatgtctttttgacccctccatagttaatctggacttctcccctccacaggtagtacctagtgctggtcccatcacacctctacactggagttcctgaaaagacctgtgtcatccttaatcacctgaatgagatggtggcactgaaagtaactctgatgtacaaaatgcagaagagatccctcctcacagacctggtgacgaagaggaactatttctactgcagttccttcatggtcagtactgatccttgaaataagggagctggatagagaaagagcacattagctgatacctttggttctaatcctttgaaaataaaaaatgcataatgaaagaaaaataagaagtacagagtgaatctcaatttagattttaagaatggaagttctactgaatatgctcacagcttacatgatatttacaaacagagtgccatgcataaaatttaacagtagttatagaaaggatttaatctgatcttaaacttctgaggtaaataatattcataccattacagatagaaacactgagatttataaagtcaaataacttatctaagatctcaccaatggttgatagtggatgtattgtccttttaatcttttactacttaaggtattaattgtttaatcatatgtagttaccacaaataataacataaaattttttttgagacagggtctctttctggcacccaggctggagtgcagtggtgccatcacggctcactgcagccttgacctcccaggctcaggtgatcctcccacctcagcctcctgagtaactgggactatagataggcaccaccatgcctggatgattttttgattttctgtagaggtgggggtctcactatggttcccaggctggtcttgaactcctgggctcaagcaatctgcccaccttggcctcccgaagtgctgggactataggcatgagccaccgtgcctggccagataatatataatgttgttgacctttgaaaaataaaatttaataattattttaatatcaccattttgctgtgaaaatgcaagcatcccatttcagtcataactggcttgaagaattagctcattttattgcaatattttctccttcaatcatgttactgtcatgttacaacatcataataatctacttttaagacaaggagcattatccttgactttgtcccttactaattctcagggactaaccaggaagacagaaactcctaatggctgagaaattcagaagtaagtctgggcagattcttcagctcatttctgttttacagattccagaattaccatcttcctgggtggtcattgctgtggaggtagagggggcaactctgcatttcacaaagagcaaatcaatatatataactacagcagagaacctagtctttgtccagacagacaaacccatatacaaaccaggacaaacaggtatgaggaatcaaatgagcaaggggaactttgggagaggggaggagcttctttattactttattctgcaatcctgggaattcaggcatgctattactaccccaggctccacggggtgatttcacaggaaaatacctctgtttcagtgaaattccgtgttgtctctacggatgtcaatttccaccctttggatgaaatggtgagtctcgtaatgatgggtgatggctgagggaaaaaggaaggcctattcttttgggaaacttgagaccagttaaagaggtattttaagcccaccacatgaagatctcataagggtatctctgctagaagaataagggatgtcagaatcaaggcactccataaactgcattcttaaaatgaattcagtatgcagttgaagctgtcctcttaaagattccagttactttcattgaataaatgtgtgaatttgatttccctcttaaacaaatataatctgtgaaataataataaacttattattcggacctttttatctaaataggtttcctcaattgtatgttatttaacaataggaaagtcatgacttcgtgaaagatgtatgtcccaaactaaacatacaaagtgctgtgaaccaaatggggtatttcctcatttggaatatagagacttactttctctggcccatatactctgtcagtgctggtgtcatggttttctccttctatattctaccatgtgctcatactatctttttttcttttcagtttccggtggtttatattgaggtaagtggtatgttgtacattacaactggaatgaggactctctacaagttacattaaattgcctctctcccttccctcaccatttcaccaaagctaaacaaatactgtttttctgtccactttaaattctaagtggataacatgtaaatgcaggaacatttcttgagatgatgcaatttagtgactcatccaatatttctgaccaaaataaatatacataataccaaaaagaggcatcagtacgaaatgttatctgtaatatctcatagctagtaaacttattgcccttatctcaggttggaattcctataaaactttgctaatacctttgggccaatttaccaaccatctgtgatacagctgcctatgtcgttcttacccgcaaagctgcccttctactcaaaggtatatatttcaattgtttctatgaactcataatatttttacctataggaccccaggaagaaccaaattttccaaaggcaaagtctcaaattgcaagggggactcaaccaactctctttcccgctatcagtggagcccattctgggttcccacaagatcatgctgcagagagagtcagggaagaaaatacagcactcatttgagatgaatgaatatggtaagaatgctctatgtgtaaggcatttataacgtcagagtatttaagattagataatttttacatataggtaagaatcaaaggtctagcatacaatagttgaaaattagcaagcttttaaatttacccatatatttgctaagtgctttttatgtactacctcatttaattctcacaatgcccctctgggacagatactattattattcccattttgcaaatgagcatatcagtactggaaaagttagtaacttaaaaaaatcacagagtcattaaggggtaggaaagatttgaattgatactcaaacataaattgttatccaatacattgtgtcagctacatacactatgtatgttttttatattttataactgaaagtatttccagggattattttatggttgtctataacctacacctatactactctaatcaactatgattcctaaaccatataatttagtaatcaactaaactatagttcaactaagtatggtagtcaactaaactttaacacaattgatctagtcagtactcaaccatagttgattactaagtcagacattgaagccatcttattagttatcagttatgtggattttgtaatgtaaattaaatattttatgccatggctgagaagtcctatcacaaaacatggttcccaaaactcgtcagaactgccatcaaaatcacagaatagtattatattgtaggaataacaccttacaaaactgtgagagaagctagaaaagtaagaggccatcaggaggagttgacaggtgagagaaaattactagccagttctgaagcatgattaggggtgtataaatgtgagcttgcaaaggtctgggaagcgagggaccctcagctgcccaagtgcaccaaccatgcagaggagctgacagaagaatctgtggaagattattacctctgcactctgcatagctaccactttagtaggcttatagccaggtgtcagatgatgggcctcagacctctgttagtcagcagggctggcatttgggaagaagagctgggcctagggagggaaagaataagaatacattgaaacctattggtccctctttaccacatctaactgtgatgatcttcagggactaatcatgctgccttccctctatctgggaaatctggcacaaattcagagaaagagagtctagggaatgtattatcaagttaaccaagtgaacatagtacaaactgctcatggtaatgaatggcttctccttctcagtattgtccctgggctccctgttgtagctgaagtcatttcatgtgaccacatgttaaaggttctgtcatagcatctactaccaatacttgtaagatctctggcccactctcacctttttttttcttttttatcaaaacagttttgcctaaatttgaggtccaagtaaaaatgcccaaggttattggttttctagatgaagaatttgtgataacaacctgtgccttgtgagttgcatttttttcatctcatttctatttctgtactctatctgaggggaggtattgtaaataacagttactgaagttggaagtgttttaattaggagaggaatacctctctttgtagcttgcctaagctcacagtagggagcaggtacagtagcagatgacacacatctgctaatcataaaatcatttactggacatttaaaatgggccagacaatgttctaattggcttgtgtgtactaatatttttattctgtaagtaatcctataaaaaggagaagcttggggaactgaccctacaccttatctgccccatcatttgggctaaagcaataggtttcaaacgtcagtgttcaacagaatctatggggtggggagtgtgcttacttcaaatgcagattctctggccccatgtccaaagattccaatcatacatctgaggaaagtctcagaaatctgcatgtcaacatgtatcccagatcgtttcaatgctggtggtccacaaaacacgttttgagagacaacaaattagttatggctttgtgtcatttccttctatcatattaggcagagtcaaactgagtcatgatacaacatttttgttttatagctactacttttccatctaacttcacatttattttcttaaagtacctataaatcaaggagaactcagaaatacactctctacatagtcttaatatgttgccctaagacaatgtaggaggtgttgtcaaagctggaatcatgacctagataatctgacagcagagaaagagggaaataggaccatcttatagtaaaaccgcaactaagagggaagaaagatctgagaaaaactaaattggtaattttccatttggagctgtttcaaaaagattcttccagtactttttctgagagttatggacaattaagacacggcctttcagaagaagggtttataaaatggaaataatatggaaggtaatacaacagcttaaggtggatgtatgaaaggatcaagtcagttgaagaaacatcagtattatttccattaagtagcttttcgcatggccaccttattgttataggtacacatatggagagcctgtccctggtctggtgacacttagtgtatgcagaagatattcactatgccgttccgactgccacaacacacattcacaaagtatctgtgaagaattcaatcaacagktatgtggaaaccactctsctcaggacactaataccaaggttttctcttctcatggattacaatagtgaatacaatacaacagagaatagtgtttgaaatacccatcaagcaaaatggtggagtgggggaaaattgtaagatggtctggcagtgttgggggctcacttgagggttgggctcgtgggtatctagtggtatttatctggttagtttggtaatgtccttccaacggcaatccaaatgccagatataagggcataaaaggatgtggaaggatccagagttgtcttttatcaaacagaaaacagaaaaatgtgtgtggcaggtgttaagaatttggctagtgggagaatcaaatggaatgtcgtggaaagtaaactgcgctggaggaatgttaaaccrgtataaggctgaaggaaggaagrcttccaaggacaatggattagatgcccaaaacacgtcaaggaagaagtggaataagaataattaaggggaacagctgaaagtagaatgtgatgtattaaaaaataaaaggcaaaaattactgattccagaggcagagtatgtaaaaagtccagggtgtggcagtatgagcagaccctgtaagggtgacgcagggcaggtaagctccsaaatggggttttagcccaagagggttcttttcttcacccaggaaagaattcaagggcaagccagaggtgttagagacagcaacgtttattgaagcagcagcgtacagcagcagcagaggtactgttccttgcagagcagggctaccccataagcagtgtgcccayagtagcagctcaaagggagtactgcagtcatatttacacccattttagttacatggaaattaagaggcagattatgcagaaatttccaggaaaaagtggtaacttctgggttgtcaggccattgccatgraaagaggcattaacttcgggtgtcgccacrgcaatggtaaactgacatggcacactggtaggcacgtctaatggaaagcagccaccctgcatccctgttttagtaagttctcaatttggyccggtgtctgagacctgcttccaaagttgagtcccacctcttacctcaagggtatggaaaagaaagttatcaaagctgcagagagcaaatgaatgagaggccagagtaacgaatataataatgaacaccaaggcagacactgacaagcaagatactataagaggaatctagctgcccaaatctgtaatgtatcagggagactagtattaacttctgttttcaagtgagtcatgacatacatctatataaaaataaattaatatgattaaatttattatgcaataaagattttcttataaataaatttaaaatgaaaacaaatctttattaaaacatgtaccccaacatttagtttgaaaacttggttatggtgaggattcatctatttaataaatgtatatattcctattaatatcctagatattgagaatatacagttaagaacataacaatcctggctgggtgcagtggcttacacctgtaatcccagcactttgagaggctgaggtgagaaaatcgcttgagcccaggagtttgagaccaacctgtgcaatatagtgagacccctgcccctataaaaaataaaatatcagccaggtgtggtggcacatacctgtcgtcccaaccactcgggaggctgaggtaggaggatcacttgagcccaggaggttgaggctgcagtgagccatgatcatggccactgcactctagcctgggtgacagagtgagactctgactcaaaaaaagaaaaaaaacaaaacaaaacatagcaatccttagtcaatatttataggaatgaaagccttctcagaatatgttatgtctgagttaagttttgaggagcctaactgttggctacggtaagaatgggaaaaagagaattatcatttgaggaacaacacatgcatagagatagaattatgaaataccatggcacgtttggaaactctagaaagttgaatatggcagaaatggaatcagttttcagaagagaggggagaagccaaaggttgataatgaataaatcaatgatgaacgaagaaactttatgtcattcttgggcttgggaaaagataagcaccaaaagratggtcagaacatttgttacatttatttttatggccagtaaaaaaattctcataaattgacagctgactttttaagtagcaaattggaagacctgagaattctctttctttctcttcaggcagacactgaaggatgtttcacacaacttgtaaacactaaaatatttcagctgagacaaaaagagtatgacatgacgatacatgtcaaagcgaaggtcaaagaggagggaaccggtttgtattatttttaaatatttattaatgtgatacatatttatcaaacttccattccatgtaaaacactttatagtttctggagattatgaaaataacacggtccctgccctcaaggaattaggcacctaaaaatagaaattaagtgtgtgtgtgcacatagccataataaaatttctgcaagaaatacaaaaaagggccaagtgagtatgaagagaggtaattaattctagtataccttctagagcccaaagaaaaccttattgctaaaatagcatttcaactgatttatatagggtaggtaatactttgaaagattaatgatggaaagggaaaacgtgataagcatcaaaaactatgatctcagaagaatctgaaaatggaggctggtgctaagctgtggagaaaagtaaatcatacactaaagagtttaaatttattctgaaaagcttggatatctttcaatatatttgagaagaatcgtctaaataaattgatattcttaaaaggtaagtctagcagacctgaagaggataggctagatgaaaaaatgtgctaccatgtggtacgtcagacgattagtcaaaggtgaccccaaagattccaaatttggggcctgggaaatggaaataccattaaccaagataatgagtcaatgaaaaagaactgttatgatgagatgtgttaaaaataattttttttttttgagatggagtttcgctccttgcccaggctagagtgtaataactcgatgtcggctcactgcaacctccacctcccaggttcaagtgattctcctgcctcagcctcctgagtagctgggattacaggcatgcgccaccacgcccggctaattttgtacttttagtagagacagggtttctccatgttggtcaggctggtctcaaactcccgacctcaagtgatccgcccgccttggccttccaaagtgctgggattacaggtgtgagccaccgcgccaggccaatgttaaagataactacagcttggaatatcaaaacggaagtggatgtatttagctgataattttaaaacagagccagagttaaattaggaccagaaatgtaaatctaaatccattctcgttgtgtctatgtcctcttaagagtgagtgcggccgggcgcggtggctcacgcctgtaatcccagcactttgggaggccaaggcggacggatcacgaggtcaggagatcgagaccatcctggcaaaacacggtgaaaccccgtctctactaaaaatacaacaaaattagccgggcgtgttggcgggcgcttgtagtcccagctactcgggaggctgaggcaggagaatggcgtgaacccgggaggcggagcttgcagtgagcggagatcgcgccactgcactccagcctgggcgacagagtgagactccgtcccaaaaaaaaaaaaaaaaaaatagtgagtgcaaatgctctgaaagtgagctcatttagcactgctaaatttaggatagagacaggacaaagaggcgtccaaggacagaaacaactgcatttaggagatagacagtaacaaataaatcagcataattaaataagaagccagagagctggggcaaaaacaacgaggataattttttagaagcccctggaaggaagagtttcagtggtacttagtgtggagtactaccgagagttcatgtacaatgaagtctgagatgagaattcgatatggagggcaagtagggaatcttttaagaatttgatagcactgtgtttttgataagaacaagatacagrgtacacatcattgaatggaaaagcaccaggtgttcactatcctttggatagctcacgcagggaaacgacaggtctttctggaaataaagtttgtattagaaattcaagcatattttgggccagtgtgattgtgaagaatccaaccatgtacagaaagttgtggagggagagcagggatgtgagagagggaaaaacaaagatggagcaagatcacagaggagttgagaaaataaagaacataggtggaaaaccagaggaatgagggaygatggataccaataatgtttcatgtgaaggtgaagctaatgtccagttgctggtcaaatagcttgtaaatgtgggaaactggcaagaataaagaaaagagaatgtggatggtattttgttatgatgaagtgaggctgaggaggaagtaggaggtgagtttttaatacatagaatggttcaacttcatttatttttcaggattggaattaactgggcatggatcatatgaaatcacagataccttaaggatactgagatttactaaagtagattcacattacagaagtggactcccctggtatggacaggtaaaaaaaatgtttttaacataatcacaatttggggcatgaggtttttaagaaaatgaagttttaaatcacaaaatcaaaatttatttaaaaaaataatatttcaaataggaaaaaagtacagcagattataatttaaaaagcaaatataatcacaaaatccagaaaaacaaagcatgttttattaacttcctaacacacctctgtaatacatttgtgtagttcagctgcatactctttgattgtctctttataaacaatgattttgtaacataatttttataggaagaattcaaacacattctttcatctagatgattgaattttttattactggtagtttttaaagttgttttccatttcaaagtttcatatagataccaatattgatacattttagagccaataatttagtaaactatccattttctttcatataagagatgcaagatttctaggtattttaaattatattttgtagtaaataatctttgaattaacagttcatgggcaaatgcttcaagctgtattttgaattttatatttgatattttatacttgaattttacattttcttcatttatcctagtatttcatattaaattatcaagaaattaataactatatagatatagtttcatatggccatttcaggtagagagaagatcatgagaaaaactgatgacttgaaaggtgagtatgacatggtcagaaatgtaagataaaagggagaatgtctaaggctctgggtatgaaacagtttttcaagagcaaagaactaaaaagcagccagtgtgatgacagctaaggttaaagacatgaccgaattcactgaataattgcaggcaagcaagaacagttattaaggtcttttaagatatggtaagaattttggattgagaagtgactaatggttttaagaaagagagtaacatgatcaggttagctcaggmtgtatagaatggtttagacaagaatgaagcagcaaggaaatgcagaagattaaatagctactggaaaccagatgggaaaaaatgtgattttaactagaatggtagcagcagatttggagagaagcagatagaatcaatatatatttgatgggagatggggagaggagatagcacttgacaatgagtttgagataagcagtgaaagaaaatgactcattaaaaaaaacccaattcctcagtattcctgcgtcagttayctgatagatggaagacccatatactgaaagagagaacagtggaagtggagaaagtttgggaaggtagtgtgatgatcccacttttggatgttctcaatttgagkccccatgagatatccaaatagaactattcaagattttgagatgtattgcataacaggataattatagtcagtaataatatattgtacatttcaaaataataaattataaatgtctcatctgaaaaagtggtaagtgacgtgatatatatgttagtatatttaatcattccacgttgtatacatatatcaaaacatcacattgtacccaggaaatgtatataattatgatttgtgaatttagaataataatggaaaataaactgccatttagctttcaaaataatttttaaaaagaagtattaaaaagaaaaatcatagtttagagctcagaaaacaagtctcgttttcagattctaagatcttcagtaaatgacagggagtgacctggcggtaaatgtgacggagtggaagatgttattgccatatgacaatttaaccagctatgacttttatatctctaggttcttctagtcaatgaaaaccatcagccaatcaccaacaaaactgtagatgttcatgtgaatactagatactatttcagtgcaactactgatgagcatggtttggtgaacatttccatggacaccaccaactacatatcaccttttctcacartttcagtaagtggaaaggggcatctgggaccaaaaatagagaaattactgtggccagagataatttaaagatatttgagaggcatgtgaactctaggaattaaaaaaaaagtgataaagagtaaaatgtaggccgggcgcagtggctcatgcctgtaatccaagcactttgggaggccgaggtgggtggatcacgaggtcaggagatggagaccatcctggctaatgcggtgaaacccgtctctactaaaaatacaaaaaaattagccgggcgtggtggcgggcgcctgtagtcccagctactccagaggctgaggtaggagaatggcgtgaacccgggaggtggagcttgcagtgagccgagatcgcgccactgcactccagcctgggagacagagcaagactccatctcaaaaaataaaataaaataaaataaaagagtaaaatgtaaattaagcaatatggagacctaaattataaaaagagaaaagtctgccagaaatcttttacttgtaggtaaactctgttgacaatatgatttaggttcaagagacattgaatagatcatcttgatattcctttgaaaaattgaatatttttatgattctaatacaagtaagatcttgcttggtttctttggcatactactattttgttttgtgttgaatattcaaatgttcttatgcaatttgcagccatagcgtgttaagagaaagtaattgaccttgtttgtgaatgaataacatctactaaatcagtacagcataagcttaaatgatctcgaggggaakcagtttacagattctgctatatttaagaaagcagccttcttatatggctttattatattgctttatgtatatatatacaaacatatataatatgcatatttttatatatttttgcaatyatatatatattatatataaaacagcttatttattcttccattaggtcaaatacaaagagagtaacaattgttctgataactggtggcttgatgaatttcatacgcaaacatctcatactgcaaagcattttttttccccaagcaagagttatattcacctcaaacctattattggtactttgacctgtggacaaacccaggagattcaagcacactacattctgaataaacagattctcagggatgaaaaagaattaaccttctactatttggtaagaataagacccactgtagctccttctgattgtgtagactccaaaattgctgggttcctgtctaagtaatgccatttataagataacaataatatattttgtattgtttttgtgctagaagagaagttacttcctaacaaatattaatgctttaatttctcatttatgctctattcaccactgaaacttttagaatttttccttgcagagttccaatggcaacttattgagcaggagaggaaagagcctaggataaaatgtttttagtcaaagagaaaatgttttcttagaactcagtagataaagaagcaaaagctaagaaccatgaactcattcaaaaggaaataaaacttataaacaatcttctggaaaaatattcaattctaattattttacaaagctcatgactggtgtgattgcaaggaaaaggtatattaacaggcagactataaattggagtgatacttttgaggccaatattcccacgaatgcccccaaattgaaaatgtccaaggctcatagttactcaaataagtcattttaagaagaaaaagttaaatatagggaattctgtataagagcattaactataaataacattttcttaattccataaaaaaatagaaaaattaacaataaatttgaatttcctagatttattgcttcctagatacatgaccttggataacttacctaatttcatctggaaagagaaatgtcaatcatctcactttagtcctggagataatattaatacctacttcatgaaattatagtgtaaattaacagtaaattacttagttcagttcctggcatatagagaatgctcaatacatttagtttttttaaaatagaggcaatattagagaatacttatttatactttatatctgccttcactatatattgctttgcataaggtagatgtttgaaatgtttgttgaaaaaatacataaattctgtttacatatttacatatatttattagaagtgataaatattaaataaaataataaaacgttatacaattatatattttttatttaaagtatgtaaagacacatatatgaagatattgaaaaggaagtttagtgatcaaaataacttctaggttggggtaataagattatggttcacaaatatatcatgaatgttttaaagttaggttaaaatgtattcttttaaacaataatgaatatatttccttctgccttcagatcaaagcaagaggaaaaatctcccaatcaggaatccatgtgttatccattgaacaaggaaacagtaaatgttttcaagatttcctttttctttcctctttcatcttgtcaaattctgaacaatttagcaatttggagctattctcacattagaagaaacagtcaccaacctcttcatccaaagatgaagaagctgatgtaataggatgacatactgggtttgctttagcccagttaaaattttttcttcttttatagcattcctacattttaaattttattcctaaactaatacatattcattttatgtctttaatgtcttcaaaaggcagaaaataactgaaaaaatatggaaaataaccacagaaaaattttactttgtgtgcttgtgtatgcattgcctattactactgtaacagattatcacaaatttatgggcttaaaacaatacttctagttcttcgttttagtgccttaaaacaccacttgtatcttctagttctggaggtcagaagtctcactaggctaaactcaaggtgtcaggactgcattcctgctggagcttgaggggagactctttccttgccttttccagcttctagagacctcttgcattctttgcttgcggttcctttctctatcttcaaattcagccacataccatcttcaaatctctctcatcttcctgtcttcctcctagaaagacccttgtgattacattgggcccacttggataatccagaataaacttcacacctcaagatccttaatttaatcatttctgcaaaggcccttttgccatataaagtaacatatgcagaagttttggaaattgagtatcttcaggggccattattctatttaccacaatcttcccattggccccagagattcatattcatccctcatgcaaagtgcattcactctatccatcataacattaacataagattaaaagctcacagtctcattagctcaaaagttccaaatctcatcatctcagtcatctaaattaggtgttaatgaggtcctggacataatccatcctagggcaaaaagagtctttagtcccaagaagtgctgatatctggctaggaaaacagcatagttttaacacctgggaataatcctctttaattcatttctctattgtctgggctcaaggatccactcatgaaatcatttgccctttttcatgaaggatgtgtttgcagctgaattgttttatcagatctcgtttcctgcttgcatgatttgagaggtctgatattcttcttttattctatactctctctgtcccttttagttgaagctgacaatgtttctattagtataaacttttcaagaaccatgtaggtctcctgtgtgtcacagagattcattccgttaaacaaaaagccttttcattgacatttgatggataattctatctccaattttggcttttgttgtgatgggtaagggtatctaagagtcatgcacttaatattttcgaagagccctttttttgtggctaaattactctgacattttaatttttctgcaaatcaagtctttagcaaaaagttgtccagtcacatcatagctttttttctagagcacaatttcctgacagcgaatgtcttaattttaccgatttttgcaatttagataagctgagaaatttccgaattatcaagtcctagttcatttttgatgactacttcctcattcaatttatttttctcctctccagttttgttataagcaggaagaaggaagcacttttctataaaagctttaacacttttctgtaaaagctcctccctaaatatctgaattcattaatatttggtatttctttttcttaaatattttgttgaatttaccagtgatctggacatagaattttctttgtgagaagattttaaatacaaatttattttctttaatgaagtgcaaggtaagtttgctactactttagttaattttttggttgtgtatgtcatttaaaatcttgtctatttttctaaactgtctaatttattgacataaaatagtccataatattgttttaaaatatctgtaatttctatagtgatagaagctctttcattcaagatacttataatttatgtcttcttttgatcagtttggctagaagtttctcaattgtactgatcatttcaaacaactggtttttggtttaattgatttttcttgtttttttttttatttttatgtcattggtatccactgatctttatcaattaaagattgattttaatttagtcttctttttatactttcttcatgaggatgttggggtcattgattgagacctttcttctttactaatacaagtgtttattgttacacattttcctgttaataatgctttagttgcatcgtttaatatttacatgtgaaactttcattttgaatcagttcaagatattttctactttcttttttgatttcttctttgaaccatgagttattcagaagtgtgttatttagtttctaaatgggagatattttagagatctttctgttactgatttctaatttaatgacattatgattgtatgactttaattcttttaaatttatggagacattttatagctcagaaaatatggtctatcttgataaatgttagaatgtgtattctgctgctattaagtggagtgttctctgaacgtcattgaggtcaactgggttaatagagtttctctatcttagatcacacttttcttctttatttctttgaatcataaatatctttatttatttatttatttatttatttatttatttatgtattttgagacggagtcttgctctgtcacccaggctggagtgcagtggcgcgatctcggctcactgcaagctccgcctcccgggtccacgccattctcctccctctgcctcccaagtccctgggaccacaggcacccgccaccacgcccagctaattttttgtattgttagtagagatggggtttcaccgtgtcagccaggatggtctccatctcctgacttcgtgatccgcccgcctcggcctcccaaagtgctgggattacaggcatgagccaccgtgcccggtgcataaatatctgttaatttctgttatcctaggaagaatgtttaacatatcataaaaagataagtaaaaatatattttttttacaaaagataagtacagctggcctatttacttgttacctcttgtccccaagttgaatctcataaggaaaaaatagacttctttttgtttgtttgtttcaaattttgaaacaaaattgaatatttatgagctatcattgactgaaggaacttttattaacagagctcaaataaattttcaaataaaaattgatttttaattagtcatctaactcaactatttacaacttttcctttaaataatcatgtaaagtttgattaaaaaacttttttttttttttcgagatggagtctcactctgtcacccaggctggagtgcagtggtgtgatctcagctcactgcaagctctgcctcccgggttcatgccattctcctgtctcagcctcccgagtagctgggactacaggcgcccgccaacacgccggattaattttttttgtatttttagtagagacagcgtttcaccgtgttagccaagatggtctcgatctcctgacctcgtgatccacccgcctcggcctcccaaagtgctgggattacaggcgtgagccaccgcgcccagcctaagatacctttttaattaatcacgaatttaagtttgatttcaaaatattaatgtttgtttgtaattttttgagttccagattagcctcttaataaatttcctgtaactctacttctagatgaaaacctttttttcatagactttctcccagtctttttgagccagaaagaggcttctaaggtcatgataaggatgcagtacccacactctaaaacgccactcaccataggttcttcttcggtctgtaacatctcttaggtctatataatctcttactgattgttttctttctgcttgaaataaagcacaaaatttgaatacgttcattcaaatatgaaacattgactctaaatttccatttaatccctgattttatgttattggacattgtattgatttttttagagcaggtaaggttgtctctaataacatatgaaaaagtcactgcctcacaaagcagtatcttcaaagtttgtttctgcagtagagtttaaatcctgtatggattgggtcctaaggtggtgggatgggaagaagaagtgtccctctctttaagaaaaaatatacttcattttatttaatgacagctatgtaaatgattgttttgactttgtctttgacatttcggaaactcagtgaaaaacttaagtactctagtgtaataaccatttcattgcagcttcctaataaaattaactcctatgtttaaccctgcttcagaattccacattcatttggctttcgtcttactgtttcaaattattttgactctgctgtttctctgtattttcatgaaagctgccctcaaatcttttatagatacaggaagggtacaatttttaaagaataattttatgctacaaagatcaaacttagaacatttatgaaaataatcaagtggaatgttacataagctctatgtagttcacacagaggacaaccactgagatgaacacacagaattctattataaa

SEQ ID NO: 7023 - DNA, 16777 bp, Homo sapiens
gagacttttaaagttctagttcctctttaaagaaaacaaaacaggaaattttagagctacatagtaagaatggtttgtacaaagtagtccatgctaagctttagtcaacagatccatatgcaaaagaaaagacctaagcctatatggaaagagcagcaaattaatttgattcacatgatttaaatcaaaatgtttacatatgaatgtagcattttaaccaacttaaaaaaaaacaacaacaacaaactagccaactactggttcagatcacagtgtataaagtgcttctgctcactaatacttgcccataaaatcaaagtctggtagttttgtttagaggtgaaaggagagaattggcaaagaaattaattctccaataacttgcctggattccatttttcttttgccatggaattcaggttctagatggtaacaggaaaagcaggcatttccaggtcgggaaaagcgggttctagatggcaacaggagaagcagaaggtgtgtgtgtggaggaaaatgagggttttcagaccctgggacagctcccaagtccgccgcagtgttcctgctggatgcaagccatgggggcagcacagatgggaaaccctgagttggtgtggatgggaacaatgaagagcaggaggctgaagttctgtcaatgcttttcaggtcaagagtgggaggtggctcaggaatgtggcccctgacgtcagcccgtgcaactcttgtcaacaaagagagctcccagttggagaaattaaaagcaaactttgactgggaatgtgtgggaagtggtagctcagtgagtgaggccagatgccacatcagctcaaagtaaagccatgcacttggctttactgatggagatgatggatgtttatgatccccagtgtgaaaaatccttgcaatgagatccatccctgaactcctcttctcccatctgtgaagatgcccaaagactctagactggccttggagcagtccctgggcatagcatgccctagagtacaaggcgagggacctttttggttgacacaattccccactgtctagcccagagctcatcagggaggcaatcattaaagacgtgaaagcgttgagcaggatgtattctatctaaggcaaattcatgtgctagaggacctcctggctgtgttccaaggagcgtctaccttattctaacaattgtgagggatactcagtggagtccaattggagacttatctatcctaagtaaaataaaccctctgttgcacatatgaaagtgataaataatttaaatacaattttaaaatattggtgcttctcagcatctcccactcctcatggttctctctttgacacctccagagtcccctagaaagggtgactttattctcaagcatcattccagtgtgcttcctaaccaataccagcagtgccagggccatccaattgacaagtgaaccctgggctgctggcccacccattattgtcactcatctgtgggctgatacccccttcactttgctcaagctcccagcttggccattggtgctcctccatcctgcagtcctaccccttagcctgccacagcccttgacttttcaggcccaccttcagccaggcctcactctcctacttctggccaggctgttgcccaaattgccatctccagtgggtagaagactatttatagctcccactgcaaattggttcggagactgaacgctggtctcctgaaatagacctttagtgtggacagagctcatggcaaaccttcttgggcgtagggtactcagctctgtccccctctccctagaggatgtgcacatggctaatgctacaggagtgggggtgggttctaagaaatacccagaaccactgttcactcctaccctcaggtccttttgctaaaccaggcttgtttgtggatcttccttccctaggagtgggcctcttctcagtgtggggttccacagttctgctctttaccagtggggttctgtttctcacctttccccagcacccacacttgtatatacctacacacacaccccttccactgccatgccttccaatggtctgggaagtgttttagtgggaaatagtctaaagtagaagttcatagcaaggggtcttcaaccagactactgggattcaattcctagctcttctactctctggctttgctaccctgggtaaattacttaacctctctgatttcagtttcttcatatgtaaaatggggtaataaccatatttactttataaaggctattataaagaataaatgaggttttcttttgtattttgaggagtacctggcatgtagtaagcccttaataaatattaactattaatataatatctgaacaccagtcactgtggctgctcaaagttttttttttttttggacacttcttgactactgtgaatcagtagatacaaaagatactgggtgcaggacgagttcccagcttcatacccaatctccacttagactcatccagaatattttcttacacctctagccgtaaatattcaaaaattgctacatatgttgctagcccatcaagttattagtaaggaaccccatttgggtaggctactagtgtggaacctcacctctgttactctcagttactctttgtgtttaaaatgtcttagaattctttgtatctttaaattttaattagggattgataacaggttctgataacttgtaaatggagactgatcatttgttagcctgtgttttgatacgtagactttaaaaaaaagaaaaacttcttcggtcagaagctgttgttctgtgaaactagaccagactgtgttttggcttgtgtgagaagggaaagcatattgtttgtaggtgaacagtttgcacgactattgtgataatctatcctgtctccctgccttctgtgtctacccagcttagcctatctttttttttatgagacgaagtttcactcttgttacccaggctggagtgcaaaggtgcgatctcagctcactgcaacctctgcctcctgggtttaagcgattctcctgcctcggccttccaagtagctgggattacaggtgcccaccaccatgcccagctaatgttttgtatttttttagtagagacggggtttcaccatgttggccaggcttgtcttaaactcttgacctcaggtgatccactcgcctcggcctcccaaagtgctggaattacaggtgtgagccaccatgcctggccccacctagcctattgtatacaatgcaagtggagtaatcttccaagggcatgattttgattatgtattttttcattccggaaagcagcgagggccaccccgttgcctaccaaaaatgcacatttatggtccatggcaacctgttgcaccttaatgggtgagagagctgctctttccactgcccccttcaccatcttggtgcttccgccgaattggctgactcctgcttgtcacaaatgctttttgccttcttctgtctctgcctttttagttcccacccacccactttcctattgtatccttgtctggaacagcataccacattcctgtgcattgttcaggactcaatgtaaagccacttctcccaggaatctttccctaattcctctcagccaaacagaatcacccctgaggtgccatagcccttcatcccccatcacgtgggtatcatataccatttctagtgtgaggtataaggatattttcaatggacatttttatgtttgaatcttgtatatacctgcaatgatcactttaggaaatagtcttagaaatatttaagatctttgatgcatattgcaaaattgccttttaggcaatattattccatttattctctactgtctgtgtattggggcccattttcccatattctctataaccctgggtattattttcttgccaccttttgctattttgatggtttttttttttaaagaaaaacctttgttttaattcatattgcattgctctaatttctagtgagactgaacatttcaaaaatgtgcttattagccatgcacattctctctgaattgtccgttgacagggcacttgacactttatatcatagtagttttgtgaacttgtcagctaccaaggatctatacgacaaacagctatactgtcagcccagctactgtgcttagaacatgataggtatgtactaaacatttgttgaaaggttgagtgaatgaatatatatggctgatgatggttaatgttccttaagcatttaaaaatgtgtagactctaatttacctccagtacaacaattcaagatgcaaatcttgaatgcaccattcagtgtgatcatgacagtgcctttcacttagtaagtcttccacttgtgaggttggttaagaggagcgtgaggttagatttgcaaacataaaaacctctggggtagggaggtcttttggtcactctctatgatcctggaacatcacgtgctctttatttatacttctggacttcaccaaaatagaggtggtgattttggagcccaagaagcaggaaggcagggtgagagcagacctgtgcttgagagatgtctgcttttcagaggagatggtgtagtgacaacttcagggactgatgcctggctattaggatcgagtcttcttagatgtcagctcatttccttgtagaaaatgaaatctaatgaaagctggtttatctggtattccatcaagcagaacattttttattacatcatattcatacgaatgaccctaaggcacagcaagatgatgttcagggtcacattggagttaaaggtcttataaattatattgtcattcttttgaaaattggtgattgtggcagatgtggtaattttccattcaccagaatgcctgagttaccaaaagcaaagatttctgcagactgggaaagttttgtgggagcgtgtatgtttacatgtgtaggtgagcgcatgagtacgagtatcggagtacgagtatcggaggaacaatgagctggagtccactagagagtgaaacttacagagtcttgaccattcatcattctgattctcagatttcaccagctgacaagcaccttcttttttggcggggggggtcagagtttcgctctgttgaccaggttggagtgcagtggcactatcttggctcactgcaagctccgcctcccaggttcacgccattctcccgcctcagcctcctgagtagctgggactacaggcatccaccaccacgcccggcttttttttttttttttttttttttttttgtatttttagtagagacagggtttcaccgtgttagccaggatggtctcaatctcctgacctcgtgatccgcccgcctcagcctcccaaagtgctgggattacaagcgtgagccactgagcccggccaacaagcaccttctaagggtgacttcactttggaattgtttggttgaagcaagggaagtaaggaaaccaaaacctcttcaacgctatgctaagtgttacttaatctcatttcataaaggaaatatgaggctggattatatttatttcgtgtgtgtgtgtgtgtgtaaattttcttaagaaagcagtaagtggttttttccttgtatgcaggtagcacctgccaacctgacctgttgacagataattgcttgacagcctggcctttgatgttaagcgtcacttaggcagaaagaaagtttccctgcacctccctaccagtcctgggtggtcttgtctgctttccttccccagaaccttgcccaggaaacccatgaattcaggcccccgggtgcaggtagggtcagcaaacgccagaccactccccaatgtgtggagagcgaggaggggcctgcaaactctgcttaaaacaaacaagtgctaaattaaaaagaatgttaaatacagatcagctgcctggctcctgacagcagatttaattcttccctcctctcacctgatggagcttcgcctgcagggtttgcatcaattactcgacgacatgtggaaaatgattgatgagctgcctgcggcactgaagtacactttgtcaaccgctcatcatttatacatcttatctctgccagaacaaaagataggacaacctcacactgaagttggggatgggaaggggggagatgaggatgggggtgagggaggcaagtcaggcaaagttgttgggtgcccacagggacgagcttgggtggtgaggcccctgctgttgcctcagaactgtctggtcagtcagctctgccacaggccctggctttgccaaagctctttgactgtcctcacctcccccacccccaacaaagtccaggaacagagaactgcatgctgttttaattacagcatcatctcagagagctttcgaggcactgcagccactctgcagctgaccctttgctttaatcaaccactcctaaggcagggtttgtaaccatccctgacaaagatgaatcacggcccgtggatccagtttctgagagaatttcggggggagctgcccaggcagcagcggctgttggggccagcttttgggaaattggggcatctgatgatggtgagacttggcggtgatattcatggttttatttcaagccatgttcccaaggccggaatgagacccaaatgtttttgttcagattgagatggaaggttggtggtgatgctgactccttgtttgttccccagctgtggccttaggactaagacccctcctaacatgggaacaaaaaatatcacctcgcatatggctgtcttctctttcctggggacactattatagccacaaatccaggtgatgacctaacaatcatttctaggcaataactgctgaaaatagctattttattatgagctgatctctattaattcactctctattaaaggcatcccatttattgatttttttttctttgaaagaaagggtactgacaaatataaagtcaagtgacctagttatataatttgagtgattgacccaacagattccttagtaattggtcagggggtggaaaggaattaagttagaaaacttcaaccttataatataataggatttccctccaataaaatttgatacattacttacaaattgctaaataataaataagaatgaaaaatgaacatacctactgaatgaattataaaagcaagtaatacaactatgaggcaaaatcatgccagaaaagaaatagctccacataagagaattatgaaatggaaaaaggactcaatacccaggagaatatttctgcggcctttgaaaatttaaaaacagtattttgaactcttccaccagtttagttggtattgttagaggaaaggttttacctatgctcaagaatttgtagatgagataacagtgacaggtaaataatcatcatgatatcaaatgtttttataaaaatttcatggagcatgaattatactatacagaaggaccctcttggaccagaagagaagggcagccactgaggatctcataatgcccacaaatgtgctagcgttggcagatcatccatagtgcgtctctgttctgaatgaaagaaagcccttgcaggcttgatgaactgcaaagggacagcaccaaatggaggcatgtggtccctttaaggtggaccttaagatttgatttcagatttaagtggtagtcctatgcaccacaatgaatggagttttacattttttgtgcttttgataacccttcaaggcttctatcttgggaaatggtcacctatttggtattcattttgaaaggtttgaaagctatttgtattattttcctaaaactgctgtaacaaagcacaaccaactaggtggtttaaacagcagaaatgtattgtcttacatttctggaggccagaagtctaaaatcaatgtgtctgcaagggttggttccttctgagcgctgtgagggagaatctattccattcctgtctcctagctcctgacagcctcaggtgctccttgacttgtagatggcatttttactctgtcttcaccttgtcttccctctatggatgtctgtccttgtgttcaaattttctttcttttttttttttttaaggacatcagtctcattggatttgggcccatcctaatgaccttatgttaaattgatcatctgcaaaggccctatttccaaataaggttacactcacacttacctggggttaggacttcaacatctttttgggagaacacaattcaacccataattgtattacccaagaactttaattcgagagattctaccttcagtgctttatcttgtagtttaaggcatagattgttatcttgaagcaggagtcgtgtcatgtctgatctaagagtgggcatatagtaactacttgataaatatttgttaaattaatgaatggatgagactttaatcttgaacttccttggaaaaggcatttttatatgacatttgtaccaggaaaatttactaatttacaatttatgaagtcaatgaactccagagggacacaaaagttttagcaaaaaaggctttctttcaaaaataatatgaagctcagagtgtggccatttatagggaatcttctttttgtgaatggcactttagagagaagaattccctagataattctgtttttgcagaagtcagtgccttgtgctggatttattttcttgccaatacattgtcacttggggaaaaaattccccatggaaactttatattataagtttgttaaaactggctcaatattgtttatattatctggttcacatgctgatatataagggagattcaatattatgagtaaactattacctaatatgtgcaaatgattgagtcttgagttagtaaggaggaaggttttgtgtcttccagaaacatatttacatacaagtgaacttttaaacatattaaaaaaaaagcagcaaaaatgactatatttgataaaaacttgtccaaaaaatgtagatatagcaagtttagagattaagatgtttatttgtataaaatagatgagcactttttgttcttaaactttctatatttatattttacataagtttttaaaatccgatacagtcaatatttgtttattaaaattatatgatggaccatataatataccaggctgaggaggaccaagcgtatcaataccccaaggaagcacgtccatgtgggtaatgttaaggatacctatatgtcaggccctaaccaaaggaggtttgtggaacttggagagatccaggaggtaacaccaaaaagctgcatttagcaatgcctgcctagccctcctgtacagctcatgttattttgttgccttaggccaccttacaccaaaccattcctatctccatgcttttgtttatgctgttgcctccttttagaagggccacgctccaccgctctgctgtgttgatactaccgacccttcctttagttcctgttcaattcccaagccttctgccaagccttcttggacattcccatcccatgctgactattccttaagctaaaacccttagagttaatatgatacacttggctacctcattgtttcatatcagtcattcctgtctctagctataatcggctcagccaaggaagatatatttatatggacaatgtctttgtgccttggctgtaaacagtgttgaataattaatctcacttgatgaggtcttacttaatgatagcctccaattattcaccaagacgaggggcaacgatgcttgtccattgtctgtgcaggctagactggaggaaagggccttggggaggaacttaaggtagatggaatttgctgatggaaatgttatttacttgatcaaattttccactggcattggtacatacttccctaaagagggttaaaaataagaaaggccctcctgggagtcaggagaagtgatgagatgtgctgtagctaggcccttcctttgtgaaatggagtttatgctatagccagatgtcacaatgctcaacaaatgactgaagtccatcgtaaacaacaccaaaaacaacgaaatgcatttattttaaaactactattttgaaaaaacacagtccctatggcaaaaaaaaamaaaacaaacaaaaaaccctaaactttgacttggggtgacaatgtgtcggaatcctggcaaggctgaatgtccctttaagagacttgatcagagagggatccatcaacatcccaggggttggctggggggactgtgattctaaaattaggaacagaaggaagaactgaggagcggtgagaactaaattaggagaatgttttaggaagattataatttcagggaggatagctcataggagttgtgtattgcccttttgcaactgtagacattttttaccttataattccctgtttaaacctggacaactttaattggggattaaaaaattatggctgaaacacagagccatgttctaatgatgaagggctgcaatttacagaccaattaggatggcatttgttttcattctgcagcaactttttccccccagtgtacccctcaataacagcaaaacagattcctgggtccaaaagtggttttccggagctgacagctgccatatgcctttggctgacaggtgggggacaggttctggacagcttccagagaaccactccttgaattttgcccattttgtagagccactctctctgcaaaacaatgccatttaacttcaagctctgacaccttgcctatttctacttcactataaataaacctactccccccatttgcttgcctcccccaggtcaggcattcctcaattatagtcttaaacctggccaagcgagaacaaatggtgaccttaagttatatcttaaagtcctgcctcatattgggacgcagagtaagtttttttggcattctctttgacaggctgcttgtagatagaacagttttccataaggaattgaaatcatacatcaaatgtattgttttatatgtaagccactggagaccaatgaaagcagttggtagagcccaaataccattacaaatagatttattgtagtgtgttttctcccacctttttctagaagttattactttaatcttaagaatttatgtaagtatgcttgtggcttttatatggtttatgcattcactttggagacttttagctatttagtggcgaggtgtttaaaacaagtgttatcaaggaaataattttggctttacatcattttttttatatttgcctctgaatgctacatatagaatagccaatcggcaatataaaagagttactgtggatgtcatggaaacttatctttccagtgccctttagtttggtgtgttcatctgcacctccaaaaagcaagcggagataaacatgctgtattcctttgctgccaaattagaaaaagctctgtgccttccttcctgaaccgtttcaaagacagacagagaacattagacttcacagcaattaaactcactgtagtgtacatttactaaaaggactggaaatctttttttcagccagccccacagtaacagagctgttagaaaatttaaaaagaaaaatcctgaatgatgctgttagtagataaattaagtgatcttgcaagacccttctcatttattatattaatacttcaactacatcatatttagttaaaaattttttgcatattatcctacaatttaacctgtttagtaatttttttttcacaaaccccttttaatttaccaccttcctctacacacgcacagacgcacatgcttacttactctggtttcaaatattatgcataaactgatgttttgatttggtagccataatttctaagtctgttgatagaaacttgtcaatcatttccaaggcaatatgttgccatctaactgttttgatatatgtgaagctcttgtggtttgtctagttcttataaaaatactgcgtatcccctttgatccttcgtgtactttcaaaacttgatactggtggggaacttgactcttcagtttcttttgaacttgttttagaattatgacagtgtttttctagtacagaaaagtagacacacctaggggacccaaagagacctgactgttatgtcaaactaagagtgcacgtgttattcttctgacagttattgagattaaaaagcaggttagcagttttcttagaccatatcaggccctgaagaggagacagtggcttttaaatctctctgtggagcatgtttaggagggacagtgcctctctggggatggaggtgccttccagttcaaatactgtttggaaagtggggtgactgaaatcaattttctgaccctgtttgtgtcatcttccagaacacaaaggactcttttcatagacttttaagtttaagctctgttccaatctgagccagtctccaccctttggaaaccagaatatgccaccccaaaatatgtctctctagcgtaaggattattttgagctgattatttggaggtctacagccataggagaagcgccgacaacagaataaaagttaccctgttaaaagggaaatttacatctctcaagggaatttccattcatgaaggtggcttctgtctgtaccaagaaaagaaggctgactgcagcaccagagactcctttcactggagaaggtgccagctgaaatctgcagaacaaaatctgaaatctgaaatctgtttttgtggaccatacttcacctgaatacctacccagtatatgtctccctccactcccacccaacatccttctttctctgtttcatttcaagatggtatttaagcctgaactcaagccacctttttaagatttgctcactttttttctgggtatctcccttgtataaatgagttatcactggagctcagaaaacagtaccccaaaggatggcactttggcagcatgggaactttgaaatgaagcaaatgaaaagatcttagaagcagcttcagaaccaaagactttctcaccttctgtttctctccccaagtacagggtggaactctctctctctctctgaagttctctcatttgaagcttctcgagaagaatgaacacaattgccttcaatctcctccctgaaatttcattagccagaaaagattaaactcatattgcaggaaggaagactaaggaatgccaccacacctagacagactttgtcacaagctgtttgctgttctttggtcccattcagtttccaaaaagaattatttagaaactattgcctatttacaaattattctttgggtccaaccaactctcctaaaaatcatactcttttcaaaattgcctacattcccccatctccctctcccctaagaagagggcagtatttaagcttgaaccatctggtccttctttgagtcttgtattttgtatggctcccatgcacaccagcacattattaaatgtgtataccttttctgctaatctattatcagtttctttcagcaggctcaaactttcagaagaggagggaaaaattctctttgctcctatatcacacatgttaataagcttctatttgttcttctctgttaatctgtcttttgttatgggggtccattccaactaagaacatgaagggtggagagaaaatgatttttcctctcctataaccctttttggcagcaatggattactaaaagattattttcaaagcacagttttaattaatactttgaaatacacctggtaatacatactagtagctggcgcagtgcccttcagttgagaacctcttttaatgtctagttaaagatcatgtgtaattaacatactgattgttatagaacaaatgaatttagatatgtatgtcaagtttgtacacctaagtaggttaagtactcccacctgatgtgtctcatgctattaatttgctgagtaaacactatttttatagttgaaagatcagttccattccagccattccaaattagttttgttcaaactaatgagaccttattaaattcgaaaggtgatctagattggggattatagtcttgtcacaaatctctctgaaattggacgtatatccagctttcaagccccttggtccatcagccccaaagcgtaattccttctaaggtttgcaaaccatagagttttacctgtacctttggtttttgctttttatcatcaacttgacttcaacataactgtcctcctagttattttctgtctcgttttaattgttttgtgcagaactttagtttctttgtcttttctaacttccactggatatcctgtttgaatcgtggatgcatttacatgttgcccccttacctagattctactcttgactcataatactgccccacttgggctagttttgggagaagcccttatctcaacttttcaccttgtctctatccatagcttctctgtggtcctaggctgcaagaaattttctacctcaaggtcaatactggaagacatctttttctgctttaagatttggctatcccctaatgtagatgatttttttctttcaatggatttcaggtgcatggaattgaattaatcataattcttggtttatgacacactatcaattggtttatgcgtaacatttataattatatgtgtgcatttacatagtcttaaaaatgcaatgaatgaaccaacccaagaattagaatatagataataacttatgtttttctgtgtggtcctcttcagtgtaatcattatcttgaattttgtgtgtaatatgccatttcatttttaaaatatttaactacaaatacatttatgtacctaaataatatattgcttagtttggggctgtttaaaactttggtaaaaacaaagcttgtcacgcttgattttttttttctgggatttacttttttcactcaacattgtgttactaaacttcatctgtgttgatgctatagcagctgtttctgcattttcaatgctgtataatattccatcatattcaagtgcaacagtttattctccagaagatggtcattatgttattatctttattattattattattattatactttaagttttagggtacatgtgcacaatgtgcaggtttgttacatatgtatacatgtgccatgttggtgtgctgcacccattaactcgtcatttagcattagatatatctcctaatgctatccttcccccctccccctacccaacaacagtccccagtgtgtgatgttccccttcctgtgtccatgtgttctcattgttcaattcccacctatgagtgagaacatgcggtgtttggttttttgtccttgcgatagtttactgagaatgatggtttccagtttcatccatgtccctacaaaggacatgaacgcatcattttttatggctgcatagtattccatggtgtatatgtgccacattttcttaatccagtctatcgttattggacatttaggttggttccaagtctttgctattgtgaatagtgccactgtaaacatacgtgtgcatgtgtctttatagcagcatgatttattatcctttgggtatatacctagtaatgggatggctgggtcaaatggcatttctagttctagatccctgagaaatcgccacactgacttccacaagggttgaactagtttacagtcccaccaacagtgtaaaagtgttcctatttctccacattctctccagcacctgttgtttcctgactttttaatgattgccattctaactggtgtgagatgatatctcattgtggttttgatttgcatttctctgatggccagtgatgatgagcattttttcatgtgttttttggctgcataaatgtcttcttttgagaagtgtctgttcatatcctttgcccactttttgatggggttgtttgtttttttcttgtaaatttgtttgagttcattgtagattctggatattagccctttgtcagatgagtaggttgcaaaaattttctcccattctgtaggttgcctgttcactctgatggtagtttgttttgctgtgcagaagctgttgagtttaattagatcccatttgtcaattttggcttttgttgccattgcttttggggttttaaacatgaagtccttgcccatgcctatgtcctgaatggtattgcctaggttttcttctagagtttttatggttttaggtctaacatttaagtctttaatccatcttgaattaatttttgtataagttgtaaggaagggatccagtttcagcttctacatatggctagccagttttcccagcaccatttattaaatagggaatcctttccccattgcttgtttttgtcaggtttgttaaagatcagatagttgtagacatgcggcattatttctgagggctgtgttctgttctattggtctatatctctgttttggtaccagtaccatgctgttttggttactgtagccttgtagtatagtttgaagttaggtagtgtgatgcctccagctttgttcttttggcttaggattgacttggcgatgcgggctcttttttggttccatatgaactttaaagtagttttttccaattctgtgaagaaagccattggtagcttgatggagatggcattgaatctataaattaccttgggcagtatggccattttcatgatattgatttttcctatccatgagcttggaatgttcttccatttgtttgtatcctcttttatttccttgagcagtggtttgtagttctccttgaagaggtccttcacatcccttgtaagttggattcctaggtattttattctctttgaaacaattgtgaatgggagttcactcatgatttggctctctgtttgtctgttattggtgtataa

SEQ ID NO: 7024 - DNA, 12797 bp, Homo sapiens
atgacaaattctcatggctcactagtgttgacacttgccatacatatctacaggtagatcatttcaaagttgcataataaagacagtatttaaagagaaggttgaagggaccattgaaaattgatgttcaagtagatgaaggtgtctttggaaggagtagactaatcaaaattttgttcctgggtttgaggattttttgatttggggagagggcaagtagggttggtttgttatttacattacagagagactgtcagaaaatgaaatttaagtcacacacaattaagaattcttgaccaaaatgactctatggggaccacttgctacatttccagggtaagttgtagaatctcccttgttgaacagttcaggaaaataagattatccttttgatggtaagtcatgaaatccacctcaaagtgctttaagtttaaaaagaggagcagggggctttaatgagctcaaggtatatggtttcatatatggttagatccaggtgttcaaacttctcatcagaaatttctatctcagctttgtttcttggtttctccacgtggtggcctcccaggagccccccacatctgtacctcaccatcttcaaagacaaaagaaagagtttctctttcctgtaagttccaacaaaatctgggaatccgtggcctgctttgggttatgtgcctatcctggaaagaatctcctcacccatgagaaagaaccctctacctgattgagcctggctcctgtgccactcctagtgctgagagagcagctggccccatcagaccactattgattaagggtggtcacatggtggttccacagagttaggtctatcccagaatacagtgtagtggacaccaaagaggccaaaagggcaaattccccttcgaaagcagacgacctcctgtgtaagtcttcaggagcccctcactgcatcccagacattcaaaacatctcatcattatctttaggccaaactgaactcattatgcagtggctcaatcctgacatcaacatcaacaaaaggcctccacctccagaaaaccctccccacgaggtcttgcagatatcataaagtttatacctttcaggatcttagttgacatcaggcaggtttatcatacaattttattcttctaagctttggtatcccacagaagattaaaaacagccacaggcatctaaatagagcaacatgaggggtaggcaagggtagctgctggggtcacagtatgacatggaaaaagaaacaaccacaaaaagctagactaagagctgaaccacaagatgctgcaacagacctctgaaatgatgacaccccaggcttcctccactcctccacacatatatatgtcaacaggataaagttaaactcagtgtggtatgttctgtttaagtgaggagtaatacagtatatttaattactaattagcatgtgtcaagcaactactggtatcaattctgggaatgagacatcatacacattttgtccacacattaaacagataataccacaagagaatatgtgaccagtacaaaagagtagcacgaggaagtcctctgggaacaacagtctaaaaagttttaattttgacatatgcaaacctcaaaggtatgggaaaattaattctaatgtgcatctctcattttccaaaagcatttccccattactctatcactcggccctctttatctttcaggcctatttctaaaagagatgccaaggatgtttgccttgaatatatccaagcctccaggttcattgtgttgaggatgaggacaatgtgtcctggacagcttaggtaagcccctgaagatccatgccccgtgtcatgtgtgacttaggatgtggaactgaagacctacagacttaggactagctgctacacttgagtttcatttcccccaagagacccaaagaaagtaggcaggattctctgcttagcaattcaacagcacccactatagcaaccaaagggggatatgtacaaatgctctgctaggctgctaaaactcttctgggctagagcccacatgctctcagtgtctatatcaggatagctaaaatctgaagaagaaccatgaagcttggatgctaacatttggaattccaaaagggctgcagtatgcaaaagtatgtgtgtatgtgttgattgcagaggagaggataaggatataaaaaaactctgagttccaaacccaatctttctttgtaaagttaatactaatcctcagcctgtgtacctttctagataagaacttaacttttctagataaggactctacattattaaatattaattttcacaatactaatgtgtttattataaaatatagttaatatagtagattggagccaagggaaatggtggaaaatagcttaatagatggaaagtcatttgagaaataacccccaaaaatcttttctcctttattttcttttttcaaaattatctgtaaattattcacagagccgttcttgaaagaggccttttttatttgctttatactatcaataactgttaacatcaaaagtttcattcatctaaacgtatacatatgtgtgaagctatttccttgagagattccagacccaaatatatgattactacaagaaaaatgactaatcaagtatcataatcagtaagtctgatgtcctgtgcaatatttctaaccattctagcagccttattctccctgaagccaaaggaaatgcaaaatttaagtttattttctaaagaaacactaccctgtgcccatcttagtcttcaactctcaaacacattgtggtctagagggactcagtcactgacaaagtatgcatgaacctaccctgggtgggagatcccattctaggtatatgttttgctcaggacagtccaatgtcctgaccatgaaagaaagaaagaggaagggagggagaaaagaaaaagaaaaaagatgttttgaggttactttccaaatgagttttcatccattaaaacattttccaacatttttcctgactccgttctaccatctactgtcttttgtaccaattataagatagaaagggcccacacatgctacaagccctcttttctcttattccatatccaggattcctaggttttgaaaggtaaacacggccacagaaactcctctgctttctccagctcctgggtttatcctgcaagtgcacttgcacagacagattacagaagggtaaggcatggtagtgagacacacaaagaagacctgtaacccagatggttacagagctcaaaggactccacgaagattcacaaggaaactggggcccctctgcttaaaaacgtagtgattcaccttgctcttggggtaagcaaagagcaccatccatttcctagaaggccctctgccccagcccctgccttctcagcctctcttttgccttcactcctcaccctgagagtcatcacgtggtgttctcctgctcccgcagggcactgtgccccatcctgctggagatctttgcaaagcctagtcttccttcctaactccctcccaacatgctttgcctgagttgtccccctactagacactttgctccttgagggcagcgccctactccacctgggtggcccatagtatcttctcgataaatactaaatggtaaattaaatgaacttaaaatattgaacaaatagcattccctggcctccaagggtggaggataacaataagtccacatcttcccaggctaagtcagcctctgcactgtcctctgatgggagctctctaccccataccccaacccctgcaaacagggcttctcagtgttggacaggtggcatgcatagttcctccctccaaaattccccatgtggacactcctttctagcagagcccagttgatttctcgtatgtgaaaggactacaagtttaaggtgcgcttctgccaaatggagtcatccaaaaggtgtttagaacaaacaaaggaaaacctccttcctgtacttcagactgggctacaaatgggaaacacaaaaccaagcctgtagtttctaagatgcattcagtggcgtctgtctgggatttgggatctggcaggagggaccccagccaggagtgatctaaggtagcacctgcttggctcagctttctttttgttatacccatctttctgtctccttcaatggatggtttttgttcctttcctctgacgaatgagtaattaaaagtataatccaaatgaagcccccaggagtgcaggtacgcacaccattagtcactgttgtgctcctccagggaccaaaggggaaggctaggaaggttagagaaagccgtgaaagggccttcagggctgtcatcaggggagaaaactgagttgtagtgaggccttcttgtcacacagctcagtcggcagaagggggtgctgtagtgtaacctatttaggatgcaaatagagtgtctcccgagctgcagatgaaagcgagcgtgttagccgctgcctggcaggtcctcagcagtactgaatgtcatattcctgcttgtcactgctcactgcaggtcattaatagaactcagaatggtgttactaaatgtgcacattaaaaaactgatcaccaaaaaaaaaaaaaaagagtggcaatcccattcccagggaattcaactcatccagctcggtgaagatttgtttattcaagatcactggagttcaacaattttattagcttagattgacaactatctatcacagatgtactacccactaaatgatagaggaagaagggagttaaggcctcatgtgcgcgcctgtgtgcagtaagaaagaagagatcactgagagctagaggtttcacagatagtgcccagcaagtgagcgctggacgggcacctctcccttcttcttggttggacttccacagaagtggaacaaaagactcagaacaaaacctccagcttcacagaaccacgccagctggtacttatgctttattttttgacgcagtcaggtgttcattctgccaagcaagttttcattcttccctttactccagccaattcctgttttcttcaactggagctccccaagactcatcaaaaacacgatttaattacatctccaaaaaaaaaaaaaaaaaagggaggagtgtaaacatgactcctttttatctcctgatacatctggacaagtagacaatgtgctaaaacaaaataaatctgccctgacagtcacatcaaagagttcagcaaggggcttgcagctacttaaagcacaggaatgctgttgctaagcatcggcctacaacttatcagtccctggaagaaatgcttttttctttctttcagggggagatgaggaaagttagagtgggaaccagactgcaaaaggagattggggattttcagggattttgaagcttaaaatgaattgtgtgaagaaaaggggttttgttgcgttgtgttttccttttaacaaactgtctatatttttataaaggtattacatggaaaccttctagaaagggctacttaggactcgcagaaataagtggtcacacaaaacacttctatacaaatttgtgccatatctcatttttgtggatttctctgtatgagaagaatcaagtgttagttcagggtctgaggaaatatctcacaatcaccaaagtcaacagtgaaaaatccttaggttgccataataagaaataaatcatccaatatcacaaaccacaaacattttctctaaaaggcaagaaacaagagtatccactccagcaatcacaatacaaaagaaaacagaatccccaccaccaccccccaaaaaaaagaaaccaagcgtgaactgccatgtgcaatgaaataaatctagccagatgaccccaaatacatggcacagtctcacaactaaagtgttcacagtaaacacaaaatggaagtgaccctgaaacatggccaacaccttcagccttttctccttaccaccccccagggaagatagtgaaacacatgctgtggaaattcagtctgatcttcatcccatatgctggttctcaagatggagcaacagggagatttttctcttcccatgaacacatcctcaggtaggtagctctgctccacttcctccctccagcaaggctactaaatttagttgtgctggaaaatctgaactgaacatgaaatggcattgctgagaastatgttccatgagcacctgagggcgctctggaaaaaaaaaatagagccagttcaaaataacscaccagttctcaatatgcatcagacaacgccacagagattctgtcctcaaaactgaggggctaaaaatatgcagatactttactccagcctagggaggccatgaacattttaagcaaacaacttgctatttccttttcttagatcaaaggaaacaaattctaaaactactgtgatctccacacaggaaaatgctcaacaacatgaacaattaccaagtctgtgatattgcacaaataaataacacttcccattatctctagcgcgatcgtatttattaaacagtgacagagggcatcagtaaccatttttattrtcccatatagctcctattttctaattaaacaaaaggttatttctactgttaacagccatttgtctacttgggtcttacataatactttttgccaagcatgacagaatataagaaattatgctctgtggtgggtttttttgttttaaattttgcatgctgagttgctacttagagagatccgtcagttcataatcaaagcaagaggccattgtgtggtgaattcataaatatactttggcaatttttcctaaaacgtgatgaagcaagcacttggtcctaccctttagcctcaatccaagggcaatgatctgtattattaaagatataggtcaagccagcttgcgcttcttcgtcctgtgggatgttttagaagctgctgtcacattaccaagatctgttctgtggttcctaattattcctcttggcagctttggattccaagtgattcctctcacatgtatgtaaaaatttataagctgtttcatataacagcatgagttatttccttgttgtctgtaattgctgaagatactgattagaaacatgctctaatttcactgacaaggataatggtaacttaataaaatttgcattgtgtcttctgcagacctcaaaaatactttgtatcaacaattgaaatggtaattttttaaatttttaatataactgagggcagggctatttctctcctgaacatcttaaccagaaggaaaaaaaacaaatagcatggatttcctcctcattgtcaaaatttgattggtccaaaagcatatattaagttgccactatgagcaaagaactaagggaaggagcctaatggttactaagcatgtactatgtacttggcatgttcccataagccctcctgtttaactcccaaaaacaagatggtggggcagatagaacaatcctacaatggtattcttggggaaaccaagtgcctggattccatcacagaattccattctgattctatattcctagggcttcctgatgcaagtgctgtgctctttgcaccatgttgagaggagtaaactgttgcaaattaaggtaacttacactgttgtaggaggaaatgagataagtcaataactaccatagaaaaagggattggggcaaatgcccatagaagagagtccaaacaaaacagcctagggtctgaatgatggaagagatttcatctgttccaggagagaaagacagagaacctgttacactgtctgattttcacatgtgaagtatgttggaaaggtattaacttctctattagacagatgagaacacagagacggaaataaagggccttccccaggcattgatggcttgcccaggatagaacacagctttcttgcctgctttcctaccatgatcaatggataatatctcgactttgtgaaatgccttcccactgaggaatttcctgatagcctgagtttaaattttgtgccaacaacccagagtgtccccaaatgtagctgcacaacttttcttgatttcaaataaaacaaagttctacctccacaagtggcaatcccacctttgatgactacagatctcacagtctatttttaatgagaaatatttacaactctttaaataccaccaatcaaatatgttcataggtacatggttagtcatatatcagtttctactgaaaacactcaattgtttggtttattctcaattctgccactatatatctgcccctatacaaggaagagataagaacagatctttcatacctattatgccatgactacccctagttttagaacagatttagagtttctctcatttctttagagattgggttgaagttaggggaggtatgaggaagtattatttcctttacaaagatgtaaagcagaaagctgagcaaattgtccgattttatctgaatcttaatcctacaaagcttgagtctcaggcctccatttctttgtacaatgaagacggacatctttctagaggacaaaactcattcattcctacaaccagccaaaggttagctcttactggtgttgaaaatgaagacagcagattgcgaagattcctccaaccctctaattagcaagttttggcccccaggcagtagtcctgagaggaatgagaaagttattctgcaggaaacaactgtccttgcaggaatgagtcccataaaaaaaaaaaaaaagaaaggaaggggggtggttcaaaggcattctaactgaccattcattgtacaagcagagcagagcaagtataaaaagggaagggagcacggattccacatctgacctcttcccaaagtttagcttctgtatgaacttctgggtccaggtaaaaccttttgagaagcaaaagaaggtatttaagggctatgattaactggaagacagtggtgtatctagataaagtaaaatggcatagtctcacatctaaaggaatgaacattttattaaacctactctccagagcctctggaagtccaagtcatttttaaaggttgtatcagccatgcaaactgcaggactcctgagaaacctcaatatcccagaacatatggacacacacaatatacttaaaacatattgcgcgtgcgtgcatgcacacacacacacacacacacacacacacacacggctcttctctaacagcagatgttcctgacgtatatgcaggaggaacatctatctggtatgttctgtctcattgccttagttaaaagtgaaagcaactaatttctaatttaataatttcttattttctaaggaaaataagtcaaagaaaatatttctaatcaagaaaatggaagaaggtggccaaccaacaatacccactccccaagtttttggagctgtaaggaaaatcaagaatactgaagagatacagtcccatcccagaagggtttatatagctgagtaacatgatgccagaaacaattagacccacatgatggagagaagagaggatccattggaccttccatcatacagtcacaaaacaatttgttaaaacctataagaaactgagtagaatggtatgcttcatggaagaaagaattctagaaagtaactttttaaggcacagcccatgttgttcctttaactacatgcttccttgatgaaattctattcactcttcaaggttcagcttaagcatcatctctttggctaccccaggcctcttagggttgcacggcacgtcatgggtgcctatgtgaaagtacttggtggtgactgagttcttgacagactttgagagtctccaagtcagagttcatttcctctcctacctttgtaatttaggcactagtaccaggcctgacacagaaggccctttgcacaggctcagttaatgagtaagtaaaggacaaggagagaggatggcagccactccagattatttctgtcttcctgccttcctctccaatgctgcttggaagcagctgacaatctctcaccacgtccagctcagccaactggatttctccaatatgcagctggtaccagctccttccctatgctgctaactggttgggggtgggaggcagagatgttagcatgatgttttactcagcaggcatagcatcaaggcgcatttttaatgatttaccagttctacttgactgagcctgcaccctgtaagtggatcatatgatcagtgatcacaagttaaactgcttttgttgctcgcaaggcatgcatggtgggctggctgcatggcaccagcagctcgcacgcagctgtgtgtaagacaaggagaggttacgtacaacaggcagttaatggctcataccagcaagccctcgacttcagtcggcacatgcggctgcattttaaaaaggtaaatgaccttgcagctggaagctttaactatgtgcttttacctatttgtacctggataagtaaacatttgcagcacgccaaaaggccctgaaagctctattgtagccataggctaatccttttctctctggatgaaagactccaaaacaaaccgggggagggggaaatcattttctgcctcaagtagcacaaaggtaaaggggggcaatggtgataatgacttccatttgttataactttcagaagtcaccaaggtttcagtccaaaccagctgcccatatttaggattctactttccaggaagaatgacagaaacgacaggcccccagacacagaatgattccaaccagagtcgaacagaacgacctcctacttaacagtgactctgacacaaggaagctggaatgaacaactccaagcttgttctactaccccaaagggttgcttctgccaactgctgtcactcagggccaaaaaagtaggcccatcttagttctcttctgctttaacttcaaatccacagggcagtcagtatttgtgttgcggaatctaggcctttactacaaattccctgtatcccactctaagttatctgataaccatttagctccttctggtaaaagccccttcagatacctcttacaagagtggggctgcccaagccatatctgaaatagtggttagccaccctgaatgctttccaaagagtggaatatttgcgatttacaatgtgagtgggaactttggtaatgctgttattttaagaactcgtcaatcaattgagattaagataacatttattgcaacataaactgggattgccatgagaacaggcagaaggtatctgcggatcatttaagacatttcacaggcagtgaatcaagggagggccattgtgtgagtgataggagcactggactgagagctcagagctccaggctcttccatggctctgcccatcaacagctgtgtgactctcagcatctcacgccacttctttgcacttgagatcacaatcccctctgtgacaactctatcaacttcctgctatgtgctagaaagcacactaggcactaaaatcaagcatgttgggatcactaggtatccatcaaatatgttcatgcaaatgaattaacaaacaagaaaaactatactctgatgctagtcaccatctgttgaaccaaaataatctttaaatgaccagaaatactttcttccctgcaattctgttactatgggttggtctaatgaggttggtttatatccatgagagaaaacagcactccttggtccaatatactgttttaataaactttattaaatttccattgatccatatgcaaaaataatttgtttacaatttgaactcagcctactaaatggtgtctaactcaataaaggaagaggctgagaaacaacagctgtatggctattaacacattatgccgttaaaaacattaaatagttgggtttggtgaaggagtcaaagttaaccctttgagtagctctaaaccagagatcattttactttgcaatgggaagccagggacttggaagagaatttttctccacctcgtgaataagcctgcaggagtggcagcacatctgcctatggctctgcagcttagccttccagaaacctattctaaacgtgcaaccttggcctcataacagagatgacaaggggttattagggtttagaagaatgtctaaataataagcaaactaggcttatttgatagttaatataattcacatgatgccctatcctttagatacttaaataaattggttagttttgaccttgtgctgatgaggccaaagtcagggcacaattcttttcagccagttggttctgtgtggtgatcatatttgtaatcaaatcagtaaatcaataaaatgtattcatgcagtactcagtaaggcaaagtccctaatcccaaattacgtactatggagattgggagataaaattaagagacaggaaaatgtgaaaacaattaagcactatgctagataattccaaagatgtatcagtcccaaagaaagggatgagtgaagattagcatgagtgaagattagcaaagaggtgactttaggaaggaaatggaattgagctgagccttggaaaaaatggtaggatttccattgcaaggagaaaatgaagggtcaagggagaatctgaaagtggaactgaagagggctagaggaggtggggcagagatagcttaagcaagagttagagggcagtgaaaggcaatagggatactatagtccttttagcacttattggttataagggttaccagagaggagagctagaatcagccagtgcatgtccgtgacactaccacaaaagcaaagcagagggcacacccaaagaggtggcggcagcagtgtccatgaaagctcattcaacttttagaaac

SEQ ID NO: 7025 - DNA, 18486 bp, Homo sapiens
aaaagctttattgaaatgcaatttaccataaaatttacccacgtaaggtgtaagatttaatggtttttgtgtatttacagaattgtacaaccatcaccagaatcaattttagaacattttcaccaaccccaaaagaaaatctactgtttagatatcaccctccaatcctccccaacccctggctagcactaatctgctgtttctctatatatttgcccattttggatatttcacagaaatgggatcataataatatgtggtcttttgtgactggcatcttccagttagtataatgttttccggtttcatctatatagcagcacacagcagtacttcattctttttcttttttaaaattgaagtaaaattcatataaaattcaccattttaaagtgtataatttagtggccgttagtacattcacaacgttgtacaattatcatcattatcaattccagaatgttttcattaccccaaaaagaaaccctgtacccttaagcagtcattccttctcttctcccccttaactcctggtaccactaatttgttttctgtctctatagatttgcctgttctggacatttcatataaatgggctcatacagtagtgcctttttctgtcttatcttcctttactcagcctaatgttttcagagttcatctatgttgtagcatgtattggtacttcattcctctttatggccaaataatactctattgcatggatataccacattttgtttatccattcatccattgatagccatttggatttacacattttggttattatgtaatgctgctataaacatttgtgtataagtttttgtttggacatatgttttaatttctcttgagtgtatacctagctgtacactgagcaactgctgggtcataaggtaactctgtttaatcttttaaggaactgccagtttgttttccaaagttgctgtatcgttttacagtcttaccagaagtatatatgggtaacgatttctccacatccatgtcaacacttgttgtcatctgtctttgattctaaccatcctagtgggtgtgaagtaatatctcattgtggttttggtgtgcatttccttaatgattaatgatgctgagctgagcatcttttcttgtgcttactggagaaatgtcccttcagattcttcgactatttttaattggattattgttattattattatttttggaccagggtcttgctctgtcacccaggctataatgcagtggcgtgatcatggctcactgaagccacagcttcctgggttcaagcagtcctcctgtctcagcttcctgagtaactgggactacaggtgtgcaccaccatggccgactaattttttattttattgtagagacagggccccactatgttgcctaggctggtcttgaactcctgggctcaggcaatcctcctgcttcagcctcccaaagtgctgggattacaggtgtaagccactgtgcctggctagcattctttttacatgctagatacaggtccctgaacagatatatgatatgatatgatatatgatttacaaatgatatatgacttacaaatattttctccactctgtgggttgtcttttcattttcttgataatatcctttaatgcacaaacattctttttttttttttttttttttgagacggagtcttgctctgtcgccaggctggagtacagtggcactatctgggctcactgcaacctccgcctcctgggttcaagtgattctcctgcctcagcctcctgagtagctgggactacaggcgtgcatcaccacgcccagctaatttttgtatttttagtagagacggggtttcaccatgttggacaggatggtctcaatctcttgaccttatgatccgcccgccttggcctcccaaagtgctgggattacaggcatgagccaccgcgcctggcctacacaaaaattcttaattttgagaaagtccagttcatcctgtttttttctttcattgcttatgcttttggtgtcatatgaaataaattattgcaaaatgccacaacttaattttagaacatttctatcatccccccaaaattccctacattgactccctaatcctaccccaggccaatgatctgttttcggtcttttatttatttatttatttatttatttatttagagatggagtttcactctgttgcccaggccggagtgcagtggcgtgatctctgctcactgcagcctctgcctcctgggttcaagtggttctcctgcctcagcctcccaagtagctgggactataggcatgtgccaccacgtccggctaattttttgtatttttagtggagatggggtttcactatgttagccaggctggtctcctgccctctggtgatccgcccacctcagtcccccaaagtgctgggattacaggcatgagcctggcctgttttcaatcttttttttttttttttttttttttgagacagtcttgctctgtcgcccaggctggagtgcagtggcgcgatctcggctcactgcaacctcagcctcctgggttcaagggattctactgcctcggcctcccgagtagctgggattacaggtgtgcaccacgacgcctggctaatttttgtatttttagtagagacggggtttcaccatgttggccaggatggtctcaatctcttgacctcgtgatccgcccaccttggcctcccaaagagctaggattacaggcatgagccactgtacccagcctgttttcaatctttataagtttgtaatcctagcactttggaaggccgaggccagtggattgcctgagctcaggagttcgagaccagcctgggcaacatggtgaaaccccgtctctactaaaatacaaaaaagttagctgggcgtggtggtgtgcacctgtaatcccagttactcgggaggctgaggtaggagaattgcttgaacccaggaggcggaggttgcagtgagccgagattgcgccactgcactccagcccgggcaacagagcgagactccgtctcaaaaaaaaaaaagtttgttggtgcactcttttgccccttttcattgctaaatcattggctttgaccaactgatggacattttgattgttttcagtttttagctattatgaacatttttagctactatgagtatttgcaacaaatctcagtgtggacgtatgttttcatttctcttgggagtattctttggagtggaattgctgagtcttatggtaaatttgtgattgacttttttttctttttttttttttgagatggagtcttgctctgtcacccaggctggagtgcagtggcggggtcttggctcactgcaagctccacttcctgggttcacgccattctcctgcctcagcctcttgagtagctgggactacaggtgcccgccaccacgcctggctaattttttgtatttttagtagagacggggtttcactgtgttagccaggatggtctcgatctactgacatcgtgattcacctgccttggcctcccaaagtgctgggattacaggaataagccactgcgcccggcctatgattaactttttaagaaactgccaaacttttctgaagtgagtgtactattttatattcccaccagcagtgtatgagggttcctcatacacatcctcaccaacacttggtataatctgtttttattgtagtcattttatgtatgtatgtgtatagtgtttttatttttatttatttatttttgagacagagtctcactctgtcacccaggctggagtgcagtggcatggtctcagctcactgcaacctccgtttcccaggttcaagtgattgtcatgcctcagcctcctgagtagctgggattacaggtgtctgccaccatgcccagctaatttttgtatttgcagtagagacagggttttgccctgttggcttggctggtctcaaactcctggcctcaagtgatccacctgcctcagcctcccaaagtgctgggattaaaggtgtgagccaccacgcccggctgtgtgaagcgtttttttattttttgagacgaagtctcgctgtgtcacctaggctagagttcagtggcaggatctcggctcactgcaacctccaccttccgggttcaagccattctcccacctcagcttcccaggtagctgggattacaggcatgcaccaccatgcctgcctaatttttgtatttttagtagagacgaggtttcaccaagttggccatgctggtcttgaactcctgacctcaagtgatccatccacctcagcctcccaaagtgctgggattacaggcataacatggcccggccctggccatgtttttaactgtgtttctctaatagctaataatgccgagcatctttttatgtgtttcttagccattagtagatcttttttggtaaaatgtctttttttttttttttggtccatcttaaaattgttttttgttttgttttgagacagggtctcactttgttgcccacgctggagtgcagtggctcaatcatggctcactgcagcttcgacatccctgagctcaggtgatcctcccacctaagtttcccgagtagatgggactacaggtgtgtgccaccatgcccagctaatttttgtattttttttgtagaggtggggttttgctatgttgcccaggcaggtcttaaacttctgaggctcaaatgatcctcccacctcagcctcccaaagtgctgggataacaggcatgaaccaccacacccagctaagattgtttttaaaaatctttttcttgagttttgggagtttttatgtgttagggataccagtcccttatgaggtatataattagcaagtagtttctcccactctgtgactgtgacctttctttttttgaggcagggtctcactctgttactcaggctggagggcagtggtgtgatcatggctcactgcaacctggaactcctaggctcaagggctcctcccacctcagcctcccaagtagctgggtctacaggtgtgttattgtgccagggttaatgttttaaattttttgtagagataatgtctctacaaaagacaccatctttgttgcctaggctggtcttgaactcctggcttcagggaatcctccagcctcagcctcccaaagtgctgggattacagcatgagccacatccagcctatgatttttcttcttttcttttcttttctttttttttttttttgagatggagtctcgctgttgcgcaggctggagtgcagtggggcgatctcggctcactgcaggctctggcccgcggggttcacgcctttctcctgcctcagcctcccgagtagctgggactacaggcgcccgccacatcgcccggctaattttttgtatttttagtagagacggggtttcaccgtgttagccatgatggtctcgatctcctgacctcgtgatccgcccgcctcggtctcccaaagtgctgggatcgcaggcgtgagccacggcgcccggccccagcgtatgacttcttaatgatgtctttgtagtacaagagtttttaattttaataaagttaacttttttttaaattgtacaagcttttagtgctgtgtctaacaacttgttgccaaacccaaggtcataaagctgttctcttacgttttcttttttttttttttttgagacggagtctcactctgtcacccaggctggagtgcaatggcacgatgtcggctcactgcaacctccgccacccgggttcaagcgattcttccgcctcagcctccggggtagctgggattacaggcgcacgacaccacgccctgctaatttttgtatttttgtagagaaggtttcaccatgttagttaggctgctttacgttttcttttagaagttttatatttttggctcttatatttagtttgtgatccattgagttgattttatgtacgtatgtatggtcgcgttcttttctttcctgtcttttttttttttttttttttgcatatggatattcaattctcctagctccatttaatttgaaatgattgggcaggtacttttgagcagtgcaagtacagagcggcactgccagcagactacacgcggtagaaagccgaccttggtgagcgtgttggtgctcgacagtgagcagagaaaggatggacgattacggagcgccctcgtctccagttaccgctttctggaaacaccatccgccggggcggagctgttccgccccggtgcggtactacgactcccagcatgcacctcgcagtcggccctcggtggaagcgggaacccaggaggacctgggggtgtggcagcgaggaagggccgagccacggactgtggggccgaaactcgctcccgcccaccctttctcgaggctgtggcctccgcgrgagccgagcgggccgcaccgccggccgtgcgactgccccagtcagacacgaccccggcttctagcccgcctaagcctgtttggggttgctgactcgtttcctccccgagtttcccgcgggaactaactcttcaagaggaccaaccgcagcccagagcttcgcagacccggccaaccagaggcgaggttgagagcccggcgggccgcggggagagagcgtcccatctgtcctggaaagcctgggcgggtggattgggaccccgagagaagcaggggagctcggcggggtgcagaagtgcccaggcccctccccgctggggttgggagcttgggcaggccagcttcacccttcctaagtccgcttctggtctccgggcccagcctcggccaccatgtcccgccagaccacctytgtgggctccagctgcctggacctgtggagggaaaagaatgaccggctcgttcgacaggccaaggtaacacggttgctggcaccctcggtttgcagcctcaagatccctgaaagcgggtttgcagtggatttaccccaacmgatggggagggactgagcttgaccaaagagccagaaatgactggagaatgcatcccttgccactgctgcaaggggagaaaaaaggattgatcctcagtgacaacccctccctcatgtggcaggtggctcagaactccggtctgactctgaggcgacagcagttggctcaggatgcactggaagggctcagagggctcctccatagtctgcaaggtaggcgggtcctccccaggatggtcagttcccctcttccatagccagagaaacatccgctcctgcgtttttgggatcgatataattactcggggcagggagtcctgtttaaggcacagaggagactggagtggaatcatctttgtacaggcaaatccctctcttccttacacactcacagagtggcatttgaaaaatggtttccaagatggtctgatctggataacttttttgccctttccagactctctgtccaaaggttgggttctttttttaaatccttagctaattggctggagggtrggttctttattgtagctgttttggttggagtggggtgatctctgagttgggattttatttggaggatcttccatgggggagcagtctgtaagaccaacattgttgctccagggctccctgcagctkttcctgttcttcccttggagctgactgtcacctgcaacttcattatcctgagggcaagcttggcccagggtttcacagaggatcaggcccaggatatccagcggagcctagagagaggtgagggccagagattgtccctgattcccctgccatcttcagtctgggtttaagttattgcagggagatgggaggataaacaacatctgtcacctccatggagagaggtgcccttctctgtgctcttcagaccaggttgaggtattattattgtgacctttggggtcctgcaggagaggaaagccagagtgtgtggggagatggaggatgaggtgctacttcagctgtgtgtgtgtctatgtgtgtgtgtatactctacagtgctgkagacacaggagcagcaggggcccaggttggaacaggggctcagggagctgtgggactctgtccttcgtgcttcctgccttctgccggagctgctgtctgccctgcaccgcctggttggcctgcaggctgccctctggttgagtgctgaccgtcttggggacctggccttgttactagagaccctgaatggcagccaggtaatagggaaagtgacctgaagctgagggtctcctcyttccttcctcctcctttctctccagctgcagtagcatcatcatgtactggacaggcggctgggttggtggtcggaaaacctggattctctctgggactcttgggtgaccttgccctggttggtctctcattgtggggattctcttaggagtgttttttaaaaattggacaggcatggtggctcatacctgtaatctcagcactttgggaggctgaggtaggaggatcacttgaacccaagaggtggaggcaacagtgagttgtgagctatgatcacgccactgcactccagccctgcagcctgggtgacagagggagaccctgtctcaaaaaaaaaaaaaatttttttttggatagggatagggctcttgtgatcttgctcaagtcagctctcagccttagtctccttattagtaactcaaatatggtccttgccctgagtgaggaggcacgctggaatagatcatcactgccccaggtttttcttccttttttttaattcttgcctcatagctatctatctcttagaattgggggaaactacaggcattatgcatagcttcttgctttgtaagggtagctgaggcctgtgtcctcaaggatcaagaggacccttgagctcaaggtctagccaggatagatggagataggagaagacgrggaggttgtaggcttggagcttctggttgtccttctttccccagagtggagcctctaaggatctgctgttacttctgaaaacttggagtcccccagctkaggaatkagatgctccattgaccctgcaggatgcccagggattgaaggatgtcctcctgacagcatttgcctaccgccaaggtcagctagcarcctgactcatctcttctacctttaagtggtcctccagactcatgcyctctctcttgtcccattcagttccatgggcttcttagacccttgttccccatcatgacccctgctctatagccctctccaagctcacaccctgactgtcctcaggtctcyaggagctgatcacagggaacccagacaaggcactaagcagccttcatgaagcggcctcaggcctgtgtccacggcctgtgttggtccaggtgtayacagcactggggtcctgtcaccgtaagatggtaaagacagtcctagggtggattggggaaaccacaagcattatgtatagctttttgctttgtaagggtagctgaggcccgtgtcctcctatccctttagggaaatccacagagagcactgttgtacttggttgcagccctgaaagagggatcagcctggggtcctccacttctggaggcctctaggctctatcagcaactgggggacacaayagcagagctggagagtctggagctgctagttgaggtagggaactgccaggtgaagatgtggggtggaggattcctgaggtgcttgtgatggggtgacttgactagtcaagatccaagtataaggaagtatggctcccaaagattatagatacaatttttttctttctcttttaggccttgaatgtcccatgcagttccaaagccccgcagtttctcattgaggtagaattactactgccaccacctgacctagcctcaccccttcattgtggcactcagagccagaccaagcacatactagcaagcaggtgcctayagacggggaggtgaggttccccttgctcacctgagcttctcttcccacttctgatgcctcccctggggtgtgactctgcttttgttcttgtgacttgggggatgaatgaggcagtggcaggacataggtcgccactcctcagcctcttaccttgcttctagacctgaactgaggactcttctctaagacattaaccttctctatctttgacactctgaagtctcttccccagtccattctgtaactggggtagatccatactgagccaaaattggagccctaagaccttccctccctttctcctcctcagggcccatgaacatccatctgttagctaagagagaacattctcaggacccttgcaggttccctgctagggcctagggtgaggcttatgggcttttactcctcagggcaggagacgctgcagagcattacttggacctgctggccctgttgctggatagctyggagccaagggtgggtgtgtcttcaagcttctctgcaatggggtagacgggttggtgtcccctttgaaatacagcaagactgcaattttttgttttttcctctattctgtctgtccagtctgggggcccaggactctgcatggtaccagagcctggtgaagaggttggggatggtggctcatgcctttcaagacactgcttcttcttcccactccagttctccccacccccctcccctccagggccctgtatgcctgaggtgtttttggaggcagcggtagcactgatccaggcaggcagagcccaagatgccttgactctatgtgaggagttgctcagccgcacatcatctctgctacccaagatgtcccggctgtgggaagatgccagaaaaggaaccaaggaactgccatactgcccactctgggtctctgccacccacctgcttcagggccaggcctgggttcaactgggtgcccaaaaagtggcaattagtgaatttagcaggtgagcccggggtcctagagggggtgtggagggatgattttctgattgggacctgagttggtgagctccatgttcacctacttaccctagagtttctgaaattgattcctcttcacccctgttctgtgtcctacttcaggtgcctcgagctgctcttccgggccacacctgaggaaaaagaacaaggtgatctaaactttcagttttcctcttacctcctggaagtggtagtggtggaagtgggttccctttaatgtgtcccagcccaccaggagacttaagagaaagggactgtggacacaagaagaaatagaggaggatttggggttttggtgactgtgaggctgggaagacacttcttgactttgggagtggtccccaggggcagctttcaactgtgagcagggatgtaagtcagatgcggcactgcagcagcttcgggcagccgccctaattagtcgtgractggaatgggtagccagcggccaggataccaaagccttacaggacttcctcctcagtgtgcagatgtgcccaggtatgtrtacttgcatgacgtcggctatgcatagatgtgcaaggacagagaggcccatgggaaatacttgggcgtaagtgtaagagtggtgttctcagacaggaggggtgattggggttgtgctatatatacctagggatatatccaggtgttcaaatatacacagtgtrtatgcagggctcccaagagttccctggtttccccgatatcctcagacacaaagaccatgactctgctgttgtgsgttgcacaggagtagggggcagatgatggacactgggatgggaatggttgtgaatgatctgcccccgcttccatatgtgagtgtaggcaagatacttcctctctctaggcctcagtttccctttttataaaacaatgcctaagactatgtcaagttctaagactctgtactctgggctggggctacaggtaatygagacacttactttcacctgcttcagactctgaagaggctagatcggagggatgaggccactgcactctggtrgaggctggaggcccaaactaaggggtcacatgaagatgctctgtggtgaggctcaggcctgctggcttggggctgaggggcagttggtgtcctagagtccttggacctattgtgggtggtgaacactgaaagcgggggtatggctgcccagctttctgccaatctttcacccttaggcatcatccttctttctctccaggtctctccccctgtacctagaaagctatttgagctggatccgtccctctgatcgtgacgccttccttgaagaatttcggacatctctgccaaagtcttgtgacctgtagctgccacgttttgaagagcttgagctgggtccccagtgggctgtctctctgtggggagggctttctgcttcaccatcattaggaatgtgaccattcctatataattcctggactggtgagattggtggtaggcctgtgaaatttgccctagttactaccattctcgttttggaggaaacaatctctgccaccaccaagtcattgactttgctcgaggcaccttttttcctgtttctccttttctgttgtcgagtaaaatttcatatttatctcgtctgcctactacatatacttgcgtgggaaggcttgtgaccgtctagttgagtgctagttgtctatgatgccctttcctgacatcgtctaccttatgaacttgaagtctgggtatgaggaaagggctacaggaatcctcactttggaggcagtggctttagtccttcacattgcctgaatgcagagccccaaagcccaggacagtgacaatgagtggagttgggtctgaagggtggtctagataggcctctcaggacaagggcaggtacctgttacttagagacaggcaggtttctctcagagtaactcttcactcccttcctaattccaaattctagaaattcgactcgtcttagtcaaatgtgtctgtgtgggtacagggtgaaaggtgaattgagtcagcatatcaccaacagctgcctgttgactactaacagggacccctgttatttggggcccaaggattttcaagtcccagcatatgcagttttcttgctaatttgggttctactgaattggctgtgtgttctgtggttgccctttgacttctctggatttgagtgccttattataaggtattaatattaatgacgggaggaagaaaggcacaagcgctgagaaactgcaaaggctgtgggattggggttaccagagggtgcagtgacaatggggtaggagtggggtgctagtcagaaagttcagagtaggggtggttggaggcagcgttgagaaggagcaagaagtgtcagggtggtgatggcgtcttagaagatctccaggttttgggagaagatgggtgtatgggttaccacaataggactagactaatacaagggttcagtctattgtgccacgttcttccaggaggataaactccggagccaatgaactggagccaagtgggagagtccgcctctaagggattaaagggtctcctttcactaatcgatctcgccctattcctttcgttgattggctgagaattccaatccgtcgaggaagcgtagcgttgcggccaattgacgtggcgttactaggcgtgtcgcatcactgaggcgggagccaggccgcaagcgaatttcctgattggctgtgatctgcgggttgctggggagaggcgcggagaggcgggcgagagtccgcagggcaggcgctgattggctgaggtgggagcagcttcccttccgatgattcggctcttctcggctcagtctcagcgaagcgtctgcgaccgtcgtttgagtcgtcgctgccgctgccgctgccactgccactgccacctcgcggatcaggagccagcgttgttcgcccgacgcctcgctgccggtgggaggaagcgagagggaagccgcttgcgggtttgtcgccgctgctcgcccaccgcctggaagagccgagccccggcccagtcggtcgcttgccaccgctcgtagccgttacccgcgggccgccacagccgccggccgggagaggcgcgcgccatggcttctggagccgagtgagtgtgcgcgcgccgttcgcttgctgcggcggcgcgcaccgggaccagccgcgcagggtaggcccggcggggcctggccgtgggcgcgtcagagaggtggagaccaggaaagagggaagggaagctagggggcgagtgaggggccgtggacccggcaggcccggctggggccagctgcgcacccgcgcgccccctaggcggggcttgcgttgggtccgggtcggagcctgggccggatcgtgctgtgtcatgcaggccccggcccgcccgattggctcccttagaacggacgtctgggcctggccaggtcttccggcccactccgccggcgcggcgccccggggctttggggcgccagtctgccgtccggcctaccacccgccgaaagcctttggtccccggagagagcaggccccgcgagcccgaggccccagccgggcccggtgggcgtggactttgcgccatgtgaaggcctcaggagctctgccaccgaggcggagcccggggtcggggaaggcccgccgagctcagggaagctcacagccgcctttttggagccgggtcggcggggccggaggtgggcatcctctgtgtgtgacctgagtcgtgaaggactgttagggagagggcgagccctacctttcgcttctggtcttcttactttaggcctgttgttcatactagaaagtttgagccagttttccttaatgttatgactcgtgggtggggagaaaggaatttttctttaacattttaggttcttgctaaagttggaatctcagttcgtgttttgtgcgcctttccagatttccaggtttcgtggtgtgcagtttagagttgcactaactcttcaaaaacacaaacgtgcgcgcactcctttccccaaccagctatattgagaaattacccgggctctggggctttctgaccccacctccatccttaggaaagcgttagataaaacttggctacctcagcccattcaatttagaatagagagcttttagaggcaaaaaaaaaaaaaaaaaaaaaacacagccagcccaaggaaactctatgcaaattaccttccttccttgaagagattagttttttgaggtgtgttcctttttctcaagtttctgaattcggataaagtattactcagttgcttatttaaaagagtcacttattctgaaagtattcttttggtttatatgcagtcagcctcttattttcaaaagtaaaaatctaaaattcttggaacctggcatcatcagctgtttctaacctcttggtcaccttgatgactcttagctgaaacccttccaagtcccgtggagtcccctgtgcagttctggaaagggattgacttatacagaagacaatggaggattgccccaaagagtgtccagaactgctgttggcccatggtcaggccaaattcagtcttttagagattaccacatctgatctcagtaggtagatggggaattagaggctttaccttaagaaaagggcataccactcatctccagagccagagtccgggatggtaggcagaatggaggttttcctaggatacagctttgagattaaaatacaaactattgaccgggcacagtggctcaggcctgtaatcccagcattttgggaggccgaggcaggcagatcacttgaggtcaggagtttgagaccagcccgggcaacatggagaaaccccatctctattaaaatgcaaaaagtagccaggcatggtgatggtgcacacctgtagtcccagccactctggaggctgagacaggagaatcacttgaacccagggaggcagagattgcagtgagggagatcgcgccactgcactccagcctgggcaacagagggagactccgtttcaaaaaataaaaaactatggtgactagaggcatctggcgttttatttttctccagtcccagttctataagtcaagcaagaagatgggcagtccctggaagagtattttgatgggacaggagtgggagagctcgtgggtttacattgctctcaactgtcacattgagcatgcttggcctctagtgtgttgataagcattggaagagtctgcctactcagcagcattgtgcctggagtggcagacttttggaatgggggaagcaaatttgagcagaggaaactgtcgttagaaactagtttagaggcagtggttaaaaatgcagcctatgtgtgagggttagcagaaggcctaccattttgttagatgaatggggtttgtttttctcttgggtgtatcaggacccaaagatgtaagaaccccatggcttcctagctgagcacagcatttttctttgtctcttgcaaattgtgaggatatttccaatgggaatactattttgtcttgttttgttgacttcagtatccccagcccttagaacaatgcctggtacataatagagactcatgaatttgttgaatgaagaaattcgttttaaaaatttattttctttgcttccttcattgtctggccttcctactttggttaatgcttatgttttcctgagccttactaacacgaggccgctcttaaaaaagagagagcgctgggtgctgtggctcacgcctgtaatcccagtactttgggaggccgaggtgggcagatcacctgaggtcaggagttcgagaccagcctgaccaccatggtgaaaccccatctctagtaaaaatgcaaaattagccagttgtggtggcgcatgcctgtaatcccagctactcgggaggctgaggcaggagaatcacttgaacccgggaggtggaggttgcagttagctgagatcgcagcattgcattccagcctggacaacaaaagcgaaactccatctcaaaaaaaaaaaaaaaaaaaaaaaaagggagagggagcttgctgagtctagtaagtgacagctggaaacgggctaggtaataagttggtgtcactgtctggtgaatgatcctagcttctaggaaataacactgagtgtagacccagtcgactttgatttgggtgagagggatttggatttgccccatgtctcagcatttcttggttttgattttttgagccaactttatggaattgtgtacttttgcagatattactgtgaagttccttttgaccttgagcctctttctggcggtttgatgtctgttagtgttttttccaaatatgatggtctttatgcttggcattcctttggtactatggaatgccctggcatcagtaggtttagcctataaggagggtagcaccaatgattctgcttcgttgtccccaggcttgcttggtagaacttaaggcctccctgagcctcaagggaggttgtctggcttacttaattccctggaaagttagcttatgctttactctatactgttaatcatggtgaccattaataccatgtgccaggtattatgttaagcattttacattcattatctcccttaagacaataagcctctgagataagtattatattccttcttttatagaggaggacatcaaagttcagaggttaggtaacttgcccaagatcacaattaagcagtggcataattggaattcagacccaatgggtctgactatagagttcctgctcttaaccactcttctgtaagtctaagactatttttatttctctaacaactattcagcctccatttctattatgtcttcttcttaggccattattttctgaccctggggcaggatcactcacttggggccttatagctgggacactgacgctcaaaataccaggagctgctggaatgggtattgtaatatgtatggtagatactgctcctcgtgaccttggctgcctttccttcatctgagctttctggtctagggacagcttcatctattcactgtttctttcctaagtatgagttttagagactggcgaggcgcttggggcaggagtatctactgactccatttcctccttctagttcaaaaggtgatgacctatcaacagccattctcaaacagaagaaccgtcccaatcggttaattgttgatgaagccatcaatgaggacaacagtgtggtgtccttgtcccaggtaagctgtggccacagactagtctttccttactgcacttacttgagggattttcccaggtttcttttctcatttttcttgcagtgactgcagatagagtggggtttactgggaatcccaatctccagggctgctgcttactccccgtcagcccaatgacccaaaggccttaactttctttcctcagcccaagatggatgaattgcagttgttccgaggtgacacagtgttgctgaaaggaaagaagagacgagaagctgtttgcatcgtcctttctgatgatacttgttctgatgagaagattcggatgaatagagttgttcggaataaccttcgtgtacgcctaggggatgtcatcaggtgtgtgtggggtttttggcttcacagggatgggaggccagagatagcctgcattacaggcagg

SEQ ID NO: 7026 - DNA, 20270 bp, Homo sapiens
aggctgctgaccatcatccccatgttaccaccttttcctatgcatctcacaggccccattcttgggaatctcccctgcccactctcagccctacctctcagtctgcatagagatggctattctgctggctccgattctcatgactctcccctccattcaggggcctagtcttgcattcctgttctcttgggttttcttaccagtgacacctcagccttctgaggacttatttcttggtaggagctgctgcttttctgggcatgttccatgtgttgactccctacatactccaggactagcttaggtcccaacccaatagttcccagccttctgaggacccatgactcctctttccagggtttgaacatcctcatccctgtgttagaccggatccgatatgtgcagagtctcaaggaaattgtcatcaacgtgcctgagcagtcggctgtgactctcggtgaggggttcagggtgacatgggtgctctgaggctattaggatgtggttgctgtagatccagagcttagtagaaagaactggttgggacctagaggcctgactttccccgttttctctcctggttctacagacaatgtaactctgcaaatcgatggagtcctttacctgcgcatcatggacccttacaaggtacctgtcccctactttatccagccttttcagttgccctcttcactaaaatcttgtgcccaagcttcttacactatccgtgtccatctcaggcaagctacggtgtggaggaccctgagtatgccgtcacccagctagctcaaacaaccatgagatcagagctcggcaaactctctctggacaaagtcttccgggtaagcagatctgagccagagttagggtttgaagacacaaacctgacactcttaatcttttctgaaggtcaagatcagtcccaggcccttctcagtgtaggcccttgataggtaggttgaggctgtggggcttacacctctttttccaggaacgggagtccctgaatgccagcattgtggatgccatcaaccaagctgctgactgctggggtatccgctgcctccgttatgagatcaaggatatccatgtgccaccccgggtgaaagagtctatgcagatgcaggtgggggccaaggaggggtgggaaaagggcctcagggctccagtaccaggaggatccagacttccctcctgttatgatgggtagagttgcatgtctgtatcagtctcccttggcttgttgattgggattgttgtgggcttccaggtggaggcagagcggcggaaacgggccacagttctagagtctgaggggacccgagagtcggccatcaatgtggcagaagggaagaaacaggcccagatcctggcctccgaagcagaaaaggctgaacagataaatcaggcagcaggtcaggagagggtagaggctgagggaggagcaaggcatgggcctttgaagattggtgctggggcaggatctttggggtactttgacttcatgggtcaagcaagctctgtcccttctcttgcaggagaggccagtgcagttctggcgaaggccaaggctaaagctgaagctattcgaatcctggctgcagctctgacacaacatgtgagaggcccctgggtgggaatggggacaggaattgacagtggaaggggttctcttatctacgcttgaggagagttccgcctctgtgggctctgttgagccagattacatggtcctttttattgtgaactgctttcttcattccccatcccccccttcttctccgtatcggtgatctctgatttttatccccctgtgatcacagaatggagatgcagcagcttcactgactgtggccgagcagtatgtcagcgcgttctccaaactggccaaggactccaacactatcctactgccctccaaccctggcgatgtcaccagcatggtggctcaggttagagctctctgaggacccagcacagagcactggtgccagggaccaaactgagaccccaccaccgtcatcaacacttacataccataaaggtcttcagagtgccttggccctagacctcccttcgttctttgtagagatggaatctaagaatgaaacatctccactcagtcctgcaaatatggaagttcttgagatacctttttttggtagatacttgtgctggtattctgagagtcactttactctgatggtttgcaagattcctaaaatcaactccagagcttacaagacaggtttgagagagggagaaaggaaaaccaacttactggcccccatgccatcttttcccgtttagccattggtaggctgggctgcacctctgtcaagtgtcctcatggtattctctctgttcctctcctcaggccatgggtgtatatggagccctcaccaaagccccagtgccagggactccagactcactctccagtgggagcagcagagatgtccagggtacagatgcaagtcttgatgaggaacttgatcgagtcaagatgagttagtggagctgggcttggccagggagtctggggacaaggaagcagattttcctgattctggctctagcttccctgccaagattttggtttttatttttttatttgaactttagtcgtgtaataaactcaccagtggcaaaccagaaactgtcctctttgattggggaatgaagttgggaaagtcactagcattttccttggatccagtcctgtcagcatgatgcctccatgaataagagtgaacttcttgtaaagtgaaactatcatttttgtcttcaagagaaactgtgggatagggtggaagtgttaaaccatatgttcactgaactgctggctgggaagtgaagtccccttcctgctaagtgtggggctgtgtgtttgaggcaggtgtttgggggttttttcgtgggaaagaagtactttcatgagaaactactaccctgcactggcatacttaaagggttttcagggactgagggtgctcctcattcatttattcaaaaacattgaatgtctaccaagtgccaagctcattactagacactggattacaaaaatacctgaaacccagtggtccctgctttcacagaatacaaggtcaggtagggaaaacagacaggaagcagacagtgatagaaagtgataaatgtggccgggcgtggtggctcaacacctgtaatcccagcactttgggaggctgaggtgtgcagatcatgaggtcaggagattgagaccatcctggccaatatggtgaaaccccgtctactaaaaatacaaaaactagctgggcgtggtagcatgtgcgggtagtcccagttgcttgggaggctgaggcaggagaattgcatgaacctgggaggtggaggctgcagtgagccgtgatcacgccattgcactccagcctggcaacagtgagacactctgttaaaaaaaaaaaaaaaagtgataaatgctgtggtagaggaaagttctggctgagggatcttggtgggaagagcatatcagcttatgagtagcagcgttgctgattgccactgaactcaggctggaaaagttagcaagttttcaccaagtcaggtcctggactagaataaacaaaggctcactgcttgagagaagttggctgaagggtatagtgttaagggggatgtgactacatggcaagggccaagtcacaaggaatgagattcttgttgaaggggttggacattatccctagggtaatagggattttttgtttgtttgtttgagacagcgtctccctctgttgtccaggctggagtgcaatggcatgatctcggctcactgcaacctccgcctcccgggttcaagcaattctcctgcctcagcctccttagtagctgggattacaggcatgcgccaccatacctggctaatttttttgttttttgtagagacagggtttcaccatgttggtcaggctgatctcgaactccagacctcgtgatctgcccgcctgagcctcccaaagtgctgggattacaggcgtgagccactgtgcccggcctatgaagggtttttttcccttcccatgaagaattttaagataaaacatcacattggccaggcacagtgactcatacctgtgatcccagcactttgggaggctgaggtgggaggatcacttgagcccaggagttgaccagcctgggcaacatggtaagaccctatctctacaaaaaagaaaaaaataacagtaatcacattaatgttttagttagagctgtcttgctgcaatgtggagaagggatagtagggagacacaggaggctgggaggacagtgagaaggctgcctcagtgatcctggagaagggatgaggtctgaactgagataaggggctatggggatgaaggtgggagaataactcaactttttttaaaaattaacatattcctttattcgtttggtcagtatgtgaacctcaaatatatgctaggtgctgaggatatcataatgaagaaaacagaattccctgacctcaatgagctcacattctactcggagggtataaaccataaatacgtgtagaatttcagatgctgatgagttgtgctatggaagaaattaaggaagtgaggggaaatttttccagggggtgtggtggtgggaggtgctgaactagtaaagtaggggattgcaggaagccttgctgatgttacagttgagcttcaatatgaaggtgatggagatccatttcggcatcgggaactgaagctgacagaggagatggcaaatgcaaaggtcctgaggcagaactgctgtggatggaacagagttagggaagcaaagaagtggcagctagatgaatcagaaggggaagaggcagatagtgtgcagggccatgtagagccaatgcaagaacttttactctgagatgagaaaccagtggacgggttttgtttctttttgagacagagtctcgctctgtcgcctaggctggagtgcagtagcacgatctcagctcactgtagcctctgcctcctggcttcaagcaattctccagtctcagcctcctcagtagctgggactacaggtacacatcgccacgcctggctaaattttgtaatttttagtagagttggggtttcagcatgttggccaggctggtctccaattcctgacttcaactgattctccagcctcagcctcccaaagtgctgggcttacaggtgtgagtcatcgtgcctggcattttttttttttttttttgagagggagtcttgctctgttgcccaggctggagtgcagtggtgcaatctcggctcactgcaacctccgcctcctgggttcgagtgattctcctgcctcagcctcccaggtatctgggatcacaggcgcccgccaccactcccgggtaacttttgtattttcagtagagacggcgtttcgtcatattggccgggctggtcttgaactcctgaccttaggtgatccacctgccttgacctcccaaagtgctgggattacaggtgtgaaccactgggcccagcctcccctcctccactccgaaggattatttgcttaattattcagtcgtaagatttagttacaggctttgaaaggaggagtaatgaaatctcagttggactcagctaagcaaaaaagggaaaataagtattatctccattttacagatgaggtaatgcctaatgatgacaatatgtgcggccaagctaggattcaagtcaagtttgactccagcagccgtgctcttagtcgtaaccatgaatggacagtggttccctgaactcttcctccagcttggtcccctgtccccaattttcaattactaaatatcccatcaaactggggccagccccacgctcctggccaaacttccaccgaggtgccggcagatggcgatggagccaccgacgggccactctgtctggcgcacgcatctctgtgctgccaggtcgcaggcgccgccgccgccgcacttccgggtgccattgcaggtgagccagggtctcccgagaacctcaccccccggtattcccctcaccctgaagtaagggagtctccctcttcccctcagctcctaaccaaggtgctcagtaccgcggctagggtgcccagcgggaggctgggtagttaccggaggaggcagagccggtcgcacgcctgggtcccagcggaggcccagtcgactctcgacccgggccccagcctccttgcgtggcgaaggtcgtgcctcaggtctcctggcgaacctggccgcccggaagcggagagtgactcctccccttcgtcccctcggtgcccgccaggcggcgccgtcggctgggcccggattcccctgcggcttcgatccctttccactgggtattgagattggcgaggggagaggcgcagaaacggcgtgtaagagagcctgactaccaattggaataagtttccctcctgactgttcacatgtacaggcagcattagcatttcctgcctgtacatgtgaacgttcctatgctctacccctcgaagatcctgattcagtagatctggggtgggacctcatgaaacggcgtctccctctgttgtccagactctagtgcagtggttcaatctcggctcactgcaacctccgcctccccgattcaagcgattctcctgcgtcagcctccccagtagctgagactacaggtgcccgccacccatttttgtatttttagtagggacggggtttcgccattttggccaggctggtctcgaactcctcacctcaggtgatccgcccgcctcggcctcccaaagtgctgggattacaggcgtgagccaccatgcccagcctggaaataggaggagagtaatattgcgaggggttggctgtgaaatggtttatctccaggaaggtttccgggaggaagtgattctagctgggcttgtattcagggaccagaatatccactggttctttgccccacagtaatgaatttacttccccacccctatcaggatgcagaaagcctcagtgttgctcttcctggcctgggtctgcttcctcttctacgctggcattgccctcttcaccagtggcttcctgctcacccgtttggagctcaccaaccatagcagctgccaagagcccccaggccctgggtccctgccatgkgggagccaagggaaacctggggcctgctggatggcttcccgattttcgcgggttgtgttggtgctgatagatgctctgcgatttgacttcgcccagccccagcattcacacgtgcctagagagcctcctgtctccctacccttcctgggcaaactaagctccttgcagaggatcctggagattcagccccaccatgcccggctctaccgatctcaggttgaccctcctaccaccaccatgcagcgcctcaaggccctcaccactggctcactgcctacctttattgatgctggtagtaacttcgccagccacgccatagtggaagacaatctcattaagcagctcaccagtgcaggtcagtgtgggccactttgaaggccagaagtaccttggcaaatttcttcaaaatttgaagtcagggagtcagacctttgggtgcccagatrcacacttgattatggtgtagggggacagaggagaagaaagaggccagggccctgctggtagggagctcagtttgggggacagaggagaagaaagaggccagggccctgctggtagggagctcagtttgggagacagaggagaagggatctgggctttgttcctatgaagcttctaatctgaatggagtgtaagttttattcttggagacctctcagtaaaagggagaagggaagaagagaagatgtggatcttggcttgcaagtgtggagaagaaagcagagaaatacaggccctgttcattcactgactgggaagaagcaggatacacccaggaaaaacaactcagtagagatacccagagacagaactaggagagcattttgtaggaaggataagtgtgaggtctgggtggagtacggttatcagggaaagcttcctggtggaaaatgttaggccctgaaggataaggattgctgtatggaattgctgtactttaggttgcatggttgggacttctgatgggtctttaaagggcctcttttcctcttttctcctaaccctgacgtttgctcaggctctgacttctytttcatgtccctgcaggaaggcgtgtagtcttcatgggagatgatacctggaaagaccttttccctggtgctttctccaaagctttcttcttcccatccttcaatgtcagagacctagacacagtggacaatggcatcctggaacacctctaccccaccagtgagcmtggggccagagcacttagttctaagactgggagctggggagaactgctttagtccacaaattctgagccacctatgggtgtaacagcctgggcttgtatccctggacatagaggagtgtcaaagcctggctggggttgaggagtgggtcttagtcttctgtgctcagtgttctccccttcacagtggacagtggtgaatgggacgtgctgattgctcacttcctgggtgtggaccactgtggccacaagcatggccctcaccaccctgaaatggccaagaaacttagccagatggaccaggtgatccagtgagtgtggggtattggctgggggagtgggtttgtgtctgagaatctygaaraagctcttatcttagagcttctttcctggctgaattctstcttctctaggccttctgctgaagctagaggctccatccatcttgattaactcaatgtgtagctttgggcatcaggatcatggccgaagacatgtctctttgcyaaaggtctaggccttactaatggagttatagctggggatgaataggcccctggagaaaaatcttttttctttttgagaaaaatatttatccgtttctactcctgacacatttattggcccccaggggacttgtggagcgtctggagaatgacacactgctggtagtggctggggaccatgggatgaccacaaatggagaccatggaggggacagtgagctggaggtctcagctgctctctttctgtatagccccacagcagtcttccccagcaccccaccagaggtgaggcctgggatgttcctcatctgttctcccagtaatcagcccatgttaccattacagcatcctcatgaatacctctattttaggcccccaaatycatgatcctgggtatcctccactctcatttcttacctaggcccctatgtctgccatcccaaacattgacttcagctttgtgatgaatctgttgaccactgtcattttcctttaggagccagaggtgattcctcaagttagccttgtgcccacgctggccctgctgctgggcctgcccatcccatttgggaatatcggggaagtgatggctgagctattctcagggggtgaggactcccagccccactcctctgctttagcccaagcctcagctctccatctcaatgctcagcaggtaggtragcgggctgggtttccaggtgacagagctagggtgggcatgaaagaagcataatgaaccactcttttgtcctttgactagtcttagtcccaccttccatacctatccctcttccgttatccctcccttccccgattctggacagagtttgggtccttgacttccaggtacccccttttgtaatacctattcttgcctctgccccaatttatgtctctgacctgttccccttggcctctgaccttttctctgccaggtgtcccgatttcttcatacctactcagctgctactcaggaccttcaagctaaggagcttcatcagctgcagaacctcttctccaaggcctctgctgactaccagtggcttctccagagccccaagggggctgaggcgacactgccgactgtgattgctgagctgcagcagttcctgcggggagctcgggccatgtgcatcgagtcttgggctcgtttctctctggtccgcatggcggggggtactgctctcttggctgcttcctgctttatctgcctgctggcmtctcagtgggcaatatccccaggctttccattctgccctctactcctgacacctgtggcctggggcctggttggggccatagcgtatgctggactcctgggaactattgagctgaagctagatctagtgcttctaggggctgtggctgcagtgagctcattcctcccttttctgtggaaagcctgggctggctgggggtccaagaggcccctggcaaccctgtttcccatccctgggcccgtcctgttactcctgctgtttcgcttggctgtgttcttctctgatagttttgttgtagctgaggccagggccacccccttccttttgggctcattcatcctgctcctggttgtccagcttcactgggagggccagctgcttccacctaagctactcacaatgccccgccttggcacttcagccacaacaaaccccccacggcacaatggtgcatatgccctgaggcttggaattgggttgcttttatgtacaaggctagctgggctttttcatcgttgccctgaagagacacctgtttgccactcctctccctggctgagtcctctggcatccatggtgggtggtcgagccaagaatttrtggtatggagcttgtgtggcggcgctggtggccctsttagctgccgtgcgcttgtggcttcgccgctatggtaatctcaagagccccgagccacccatgctctttgtgcgctggggactgcccctaatggcattgggtactgctgcctactgggcattggcgtcgggggcagatgaggctcccccccgtctccgggtcctggtctctggggcatccatggtgctgcctcgggctgtagcagggctggctgcttcagggctcgcgctgctgctctggaagcctgtgacagtgctggtgaaggctggggcaggcgctccaaggaccaggactgtcctcactcccttctcaggcccccccacttctcaagctgacttggattatgtggtccctcaaatctaccgacacatgcaggaggagttccggggccggttagagaggaccaaatctcagggtcccctgactgtggctgcttatcagttggggagtgtctactcagctgctatggtcacagccctcaccctgttggccttcccacttctgctgttgcatgcggagcgcatcagccttgtgttcctgcttctgtttctgcagagcttccttctcctacatctgcttgctgctgggatacccgtcaccacccctggtaaatatctcagctctgattcacttaaagacaatagtgatgtgagttcggcccctcttgttttcaaggaggtgttgctcctyatgttcctgagcttgacagagggtcccatgccccacacaactaggaaggtcttcttggtgtcctctctcttacctgccatagccaagcaaattgatccctcctgttggttcccagggttcatggagaggagagacaaggagtcctctaagactccctgtggaaatgctgcatcctcatgagcacatttcttgattttccagtgatggaagtagtaaattgtgaatatataatggcactgagctgtatgtgtttgagagaaagaaagagattggccatagcaggattcagataagcctgatggcgcttttgtaccacagagagaattagaataacagaatgttgactgtaaggaggttgggctgataggcatktgagtgtgtatgagaattgatactgaagtagtaggagtatatgattgtggagcagtagcctrtggattagggaataagaagtgactgkaacgtggcatatcttttcttccaggtccttttactgtgccatggcaggcagtctcggcttgggccctcatggccacacagaccttctactccacaggccaccagcctgtctttccagccatccattggcatgcagccttcgtgggattcccagagggtcatggctcctgtacttggctgcctgctttgctagtgggagccaacacctttgcctcccacctcctctttgcaggtaccccctcctccttcacttgcttccattgtttactctggctttgtggaaagaaaggaaacccctggatttgaatggagagatatgggtttgttggatctttggcaccccttggcctaggctaattggaacctgagccagccagggtggcctgttgattccagccataccctctcttgaggcagtaggttgcccactgctcctgctctggcctttcctgtgtgagagtcaagggctgcggaagagacagcagcccccagggaatgaagctgatgccagagtcagacccgaggaggaagaggagccactgatggagatgcggctcygggatgcgcctcagcacttctatgcagcactgctgcagctgggcctcaagtacctctttatccttggtattcaggtgggtgtaggagagagatcagggagttggtgttttttctctgtgtgtgcatcactttctttcagaccttcaaaaccgtgggagagagccttgactgagtttcacataagtgaagtggttgcccaagcccagtggcctcaaatggcagttctgagacttgaacctgggtctccttaatcctagtcctggatcatttcccctctacaacctagatctggaccccgctagttgcatttgaggattactctatcagtggacagactggaaaaactgaggtgatagccaggattttcttcccaaactgtggtcatggatcctcttcctttcctccagaggcagatgtggcactgatatcttcctccatcctgggggcacagcctgagtgttagcattgcagatggatactgacttgcccaaagtcacatagtgagtcagtgcttggggcagggcaggaagtaggtctcctaactcctagcccaggacatgcaatattttttccactgacatgcactattctcctgcttccattttttacaggggcctatagaaactctccttttgctcygcttcctcctctccttcacaagtaacgtggcccctcctctcctcctctagattctggcctgtgccttggcagcctccatccttcgcaggcatctyatggtctggaaagtgtttgcccctaagtgagtagatttgcttgagaagtagaggtggtggggagggagaaacttggaacaaagtatgaagatcctaaacatccaggatggccaaggttttgcctctacagggaaaaggcagtagacctactctgttgcctgagattctccgcctttctttgcaggttcatatttgaggctgtgggcttcattgtgagcagcgtgggacttctcctgggcatagctttggtgatgagagtggatggtgctgtgagctcctggttcaggcagctatttctggcccagcagaggtagcctagtctgtgattactggcacttggctacagagagtgctkgagaacagtgtagcctggcctgtacaggtactggatgatctgcaagacaggctcagccatactcttactatcatgcagccaggggccgctgacatctaggacttcattattctataattcaggaccacagtggagtatgatccctaactcctgatttggatgcatctgagggacaaggggggcggtctccgaagtggaataaaataggccgggcgtggtgacttgsacctataatcccagcactttgggaggcagaggtgggaggattgcttggtcccaggagttcaagaccagcctgtggaacataacaagaccccgtctctactatttaaaaaaaagtgtaataaaatgataatataattatgtgtgtctgagatgtgggggagccccactgttctataggggttgtgaggaggatcagtctctcctgccaccaggcacagatgagatcagtcatcttaggaaagcctggctgcacctgagaacctttatgaagtggttggagttgtctgaattcactgcctccacctcttcccaaatcaatcctattatcccaccgctattttcctttgccatgcaacacattttgttaagttcctgttctttgtctgataaagagagaagactgagaagacaagcccaggcatcatgcagcaccgactttaactgtctgaagccccaaatagtgctatgcccccgctccactgggccttttcactatagaacaccctttgcccttcccttctgtggaagcctcccttgtttcccaacctgtgccactctttatcagatctacatgcccatcttatgtagcattccaccttgtcccattcattattcctgacttgaagccaaaattgtgtgaatccactggttcttttctcatgtgtatgttttgtgccctctgttcaccccagcactcctgtcatgtttgaaatgctggcatgaaatcctcctagagatgtccatcaaaagagttgggaagaggccctggagagaagcatcaggactgggatttgaggtttgacagtacctagaacaagaggagctgataccactgaaaaacagaacagatgttaaaaccatgggatagcacctacttttagctggcataaagtagagaagctgagtagtagtggttgtgaagtataaacgttcactgctgtggtaggtagctaagggaagaattgaaattatttttattgttactatcattttaaagacatatttttgctctattgtccaggctggagggcagtggtgcaatcatagctccctgtagtttcaaactcctgggctcaagtgatccatctcagcctcctcagtatctgggaccatgcctggctaatttttaaatttctgtacagacagagtcttgctacattgcccaggctgttcgtgaactcctggcctcaagcgatccttccaccttggcctctcaaagcactaggattacaggtgtgagccacagcacctggctaagttcagattattaatggccagtggtccctagtgttacagatgccaaatagtaagatgatgaaaagtatggttcagctgggtgtggtgcctcatgcctgtaatctcagcactttggggagccaaggcgggtggatcacctgaggtcaggagtttgagaccagcctggccaacatggcaaaaccccatctctactaaaaatacaaaaattagccaggtgtggtggtgtgcacctgtaattccggctactcaggaggctgaggcaggagaatcgcttgaacctgggaggcagaggttacagtgagccaagatcacgctactgcactccagcctgggagacagagccagactctctctcaaaaaaaaaaaaaaaaaaaaaagggataggttgttaaccatggtagaaagaggtttaataatgcaagggggtgaagttggccccagctggcctgtaagatgaattagaaaaacgcttctccccaagtctggtggacacaactcccaagcatagttcggtgagcaaatggtgtctttttgagaaaggggaaaaaaaccaaaacaaaaacctttcctccatccctagcacccatggaaggattttaggccctagttcctccacttctcagccaggtaccctgcactttttgcagtagcctccttgcctggagcctaaggctaatttgctgatctgccaaccactgtctattctttctcctggtgtatctataagattctattagataaagacattagtacattgatttacgctattaaaaattatttctagccaggcactgtggcatgtccctatagtcccagctacttgggaggcagaggtgggaggatcacttgaggatagcaagactccgtctctacaaaaataaaaaaattagccaggcatggtcccagctatgtagaggctgaggtggatcacttgagcccaggagttagaggctgtagtgcacaatgaatgcacctgtgaatagccactgcactccagcctgggcaacatagatcctctctcttttaaaaagaaaaattatcttatccctcccttttccttgaaatcagagtccattccacactaactcaatgattctttttttttttcctttaattttttgtagaggtgggggtcttgctgtcttgcctaggctggtcttgaactcctggcctcaagccatcctcctgcctcgacctcctcaagtgttgggattgcaggtgtgagccattgcacccagccctgattcttttttaaaaaagctttattgaaatgcaatttaccataaaatttacccacgtaaggtgtaagatttaatggtttttgtgtatttacagaattgtacaaccatcaccagaatcaattttagaacattttcaccaaccccaaaagaaaatctactgtttagatatcaccctccaatcctccccaacccctggctagcactaatctgctgtttctctatatatttgcccattttggatatttcacagaaatgggatcataataatatgtggtcttttgtgactggcatcttccagttagtataatgttttccggtttcatctatatagcagcacacagcagtacttcattctttttcttttttaaaattgaagtaaaattcatataaaattcaccattttaaagtgtataatttagtggccgttagtacattcacaacgttgtacaattatcatcattatcaattccagaatgttttcattaccccaaaaagaaaccctgtacccttaagcagtcattccttctcttctcccccttaactcctggtaccactaatttgttttctgtctctatagatttgcctgttctggacatttcatataaatgggctcatacagtagtgcctttttctgtcttatcttcctttactcagcctaatgttttcagagttcatctatgttgtagcatgtattggtacttcattcctctttatggccaaataatactctattgcatggatataccacattttgtttatccattcatccattgatagccatttggatttacacattttggttattatgtaatgctgctataaacatttgtgtataagtttttgtttggacatatgttttaatttctcttgagtgtatacctagctgtacactgagcaactgctgggtcataaggtaactctgtttaatcttttaaggaactgccagtttgttttccaaagttgctgtatcgttttacagtcttaccagaagtatatatgggtaacgatttctccacatccatgtcaacacttgttgtcatctgtctttgattctaaccatcctagtgggtgtgaagtaatatctcattgtggttttggtgtgcatttccttaatgattaatgatgctgagctgagcatcttttcttgtgcttactggagaaatgtcccttcagattcttcgactatttttaattggattattgttattattattatttttggaccagggtcttgctctgtcacccaggctataatgcagtggcgtgatcatggctcactgaagccacagcttcctgggttcaagcagtcctcctgtctcagcttcctgagtaactgggactacaggtgtgcaccaccatggccgactaattttttattttattgtagagacagggccccactatgttgcctaggctggtcttgaactcctgggctcaggcaatcctcctgcttcagcctcccaaagtgctgggattacaggtgtaagccactgtgcctggctagcattctttttacatgctagatacaggtccctgaacagatatatgatatgatatgatatatgatttacaaatgatatatgacttacaaatattttctccactctgtgggttgtcttttcattttcttgataatatcctttaatgcacaaacattctttttttttttttttttttttgagacggagtcttgctctgtcgccaggctggagtacagtggcactatctgggctcactgcaacctccgcctcctgggttcaagtgattctcctgcctcagcctcctgagtagctgggactacaggcgtgcatcaccacgcccagctaatttttgtatttttagtagagacggggtttcaccatgttggacaggatggtctcaatctcttgaccttatgatccgcccgccttggcctcccaaagtgctgggattacaggcatgagccaccgcgcctggcctacacaaaaattcttaattttgagaaagtccagttcatcctgtttttttctttcattgcttatgcttttggtgtcatatgaaataaattattgcaaaatgccacaacttaattttagaacatttctatcatccccccaaaattccctacattgactccctaatcctaccccaggccaatgatctgttttcggtcttttatttatttatttatttatttatttatttagagatggagtttcactctgttgcccaggccggagtgcagtggcgtgatctctgctcactgcagcctctgcctcctgggttcaagtggttctcctgcctcagcctcccaagtagctgggactataggcatgtgccaccacgtccggctaattttttgtatttttagtggagatggggtttcactatgttagccaggctggtctcctgccctctggtgatccgcccacctcagtcccccaaagtgctgggattacaggcatgagcctggcctgttttcaatcttttttttttttttttttttttttgagacagtcttgctctgtcgcccaggctggagtgcagtggcgcgatctcggctcactgcaacctcagcctcctgggttcaagggattctactgcctcggcctcccgagtagctgggattacaggtgtgcaccacgacgcctggctaatttttgtatttttagtagagacggggtttcaccatgttggccaggatggtctcaatctcttgacctcgtgatccgcccaccttggcctcccaaagagctaggattacaggcatgagccactgtacccagcctgttttcaatctttataagtttgtaatcctagcactttggaaggccgaggccagtggattgcctgagctcaggagttcgagaccagcctgggcaacatggtgaaaccccgtctctactaaaatacaaaaaagttagctgggcgtggtggtgtgcacctgtaatcccagttactcgggaggctgaggtaggagaattgcttgaacccaggaggcggaggttgcagtgagccgagattgcgccactgcactccagcccgggcaacagagcgagactccgtctcaaaaaaaaaaaagtttgttggtgcactcttttgccccttttcattgctaaatcattggctttgaccaactgatggacattttgattgttttcagtttttagctattatgaacatttttagctactatgagtatttgcaacaaatctcagtgtggacgtatgttttcatttctcttgggagtattctttggagtggaattgctgagtcttatggtaaatttgtgattgacttttttttctttttttttttttgagatggagtcttgctctgtcacccaggctggagtgcagtggcggggtcttggctcactgcaagctccacttcctgggttcacgccattctcctgcctcagcctcttgagtagctgggactacaggtgcccgccaccacgcctggctaattttttgtatttttagtagagacggggtttcactgtgttagccaggatggtctcgatctactgacatcgtgattcacctgccttggcctcccaaagtgctgggattacaggaataagccactgcgcccggcctatgattaactttttaagaaactgccaaacttttctgaagtgagtgtactattttatattcccaccagcagtgtatgagggttcctcatacacatcctcaccaacacttggtataatctgtttttattgtagtcattttatgtatgtatgtgtatagtgtttttatttttatttatttatttttgagacagagtctcactctgtcacccaggctggagtgcagtggcatggtctcagctcactgcaacctccgtttcccaggttcaagtgattgtcatgcctcagcctcctgagtagctgggattacaggtgtctgccaccatgcccagctaatttttgtatttgcagtagagacagggttttgccctgttggcttggctggtctcaaactcctggcctcaagtgatccacctgcctcagcctcccaaagtgctgggattaaaggtgtgagccaccacgcccgg

SEQ ID NO: 7027 - DNA, 24164 bp, Homo sapiens
cagtggctcatgcctgtaatcctagcactttgagaggtctaggtgggtggaatacttgaggccaggagttcgagaccagcctggccaacatggcgaaacccccatctctactaaaaatacaaaaaattagctgggtgtggtggtaggcacctgtaatcccagatactcaggagcctgaggcaggagaatcacttgaacccagaaggtgggggttgcagtgagctggaatcacaccactgcattccaacctaggcaacagagcgtgattctgtctcaaaaaaaagccatattttttatatctattttatatatatataaaatatatatataaataaaatatatatacacacacatatttaaagaacattgatgtccaaatattcaattttgacttgtttatataggtatattttttccttatattacccccaaatattcggtaatgcctgctactcatacagatgccttccataagaaatttggggagggcaagaaataaagaaataattatatttctaggctagagagaaaaaaaaagaaaggggccaggtgcagtggctcacacctgtcatctcagcatttagggaggcagaggcaagaggatcatttgaggccaggagttcaagaccagcttggccaatatagtgagacctcatttttacaaaagaacagaaaaacttagcagggcatggtggtacatgtctgttatcccacctagttgggaggtggtggtggaggatcacttgagcccaggaattcaaggctgtggtaagccatgattgtgccactgcactccagcctaggtaacagagcaagaccctgactcaaaaaatcaaaaagaaagagagaaagaacagctgcaggggtgaaaccagtgaattgtaaattcagcaagggccagcaaaaatggtcaacagtcaagaggaatcaagctccttctcaatcctagaattcacaaaaggatctatgatgacactggacttcccatttaatgtgaggtaaaacattacatgcaattttatttaatctcaaaaagaaagggtaaccccaactgacattttagttacaatatgtgaaaataagtaattcaaaatctaagtgtctcacacatccgtgtgaaaagaccaccaaacaggctttgtgtgagcaacaaggctgtttatttcacctgggtgcaggcaggctgagtccaaaaaaggagtcagcaaagggtggtgggattatcattagttcttataggttttgcgataggtggtggagttaggagcaatgttttgtgggcagagggtggatttcacaaaatacattctcaagggtggggagaattacaaagaaccttcttaagggtgggggagattacgaagtacattgatcagttagggtggggcagaaacaaatcacaatggtggaatgtcatcagttaaggctattttcgcttgttttgtggatcttcagttgcttcaggtgatctggatgtatacttgcaggtcacaggggatatgatggcttagcttgggctcaggcctgacagtaacaatctctttggaaaacatattggcaatatctactgaagctaaacatacacatgactagtagctcagcaattcgattcctaggtatatacccagtagaaatacatgtacatcaatcacagttgttgttgtttgtttgtttttgttttgagacgaagtctcgctcttgtccaccaggctggagtgcgctgacgtgatctcggcttactgcaacctccgcctcccgggttcaagcgattctcctgcctcggcccccactatgcccagtagctgggattacaggtgcctgctaccacgccaggctaatttttgtatttattttagtagagacggggtttcaccatgttggccaggctggtctagaactcctgacctcaggtgatccacctgcctcggcctcccaaagtgctgggattataggcatgagccactgtgcctggcctagttttttttaataggaaaaataaataccaatttgagatagtggtcaactctgggaacaaaaagtgaagagggaggaagagaagggaatgagattagagaggagtatgtgagggctacaactttatttgaaatactaatttctttaacagagaacttgaagtaaatgtaaaatattaagatttggtaaagctatgtgataaaaatgttttttttttgttttttttttttggaaacagggtctcgctctgttacccaggctggagtgcagtggagcaatctctgctcacagcaatttctgcctcccaggctcaaccaattctcgcacctcagcctcccgagtaactgggactacagggatgtgccacaacacccagctaatttttgtctttttagtagagatggggtttcaccatgttggccaggctggtctcgaactcatgaccacaagtgatccacctgcttcagcctcccaaagtgttgggattacaggtgtgaggcaccacacctggccagaatatgggtatttgttataatattctttagagcttcctgtatgcctcaagtatttcataaagaagttctaaaaatcttgtagaaaaataaagactcagactgcttagctaccactgttgtttttttttttttttaaagactgcaatatgatgccaggtgctctggctcacacttgtaatcccagcactttgggaagctgaggcaggaggataacttgaggccaggagttgtagaccagtatgggcaacctagcaagccctatctctacaatagaagattaaaggccaggcgctggtggctcacgcctataatcccagcactttgggaggccaaggtaggcggatcacttgaggacaggagtttgagaccagtctggccaatatgataaaaccctgtctctactaaatatacaaaaattaattagccaggtgtgatggcttatgcctgtaatcccactactcaggaggctgaggcaggagaatcacttgaacctgggaggcagaggttgcaatgagctgagatcacaccgttgtactccagcctcagtgacagagcgagactccatctcaaataaaataaaatataataaaaaattaaaaaaaataaaaaattaaaatttttttttcttttttggtagcatgtgtttgtagtcctagctactctggaggctgaggcaggagtatccctcgagcccaggagctcaaagttacaagggctatgattgcaccactgtacttcagcctgggtgacagaatgagaccctgtctcttaaaaaacaaaactagtccaggagcggtggctcacgcctgtaatcccagcactttggaaggccaaggcgggtggatcacctgaggtcgggagttcgagatcagccatgaccaacatggagaaaccctcatctctacaaaaaatacaaaattagccaggcgtggtggcacatgcctgtaatcccaggtactcagaaggctgaggcaggagaatcgcttgaacccaggaggcggaggttgcagtgagccaagattgcgccattgcactccagcctgggcaacaagagcaaaactctgtctcaaaataaaacaacaacaaccaaaaaaaaaaaaaaaaaacggccgggcacagtggctcatgcctgtaatcccaacagtttgagaggctgaggcgggtgggtcacaacgtcaggagatcaagaccatccggggcaatatggtgaaaccttgtctctactacaaatacaaaaattagcccggcgtggtggcatgcacctgtagtcccatctactcaggaggctgaggtgggagaatcgcttgaacccaggaggcagagattgcagtgagccaagatcgtgccactgcactccagcctgggcgaaagagcaagactctgtctcaaaacaaaacaaaaactgttaaggtcatcaaaaacaaggaagtttgaaaaactgtcacagccaagaggagccaaaggagacatgatgtctaaatgtaatgttccagcttgggttagattttggcacagaaaaaggacataaggcaaaaactaagaaaatcagaataggccgggcgcggtggctcacacctgtaattccaacactttgagaggccgaggcgggtggatcacctgaggtcgggagttcgagaccagcctgaccaacatggagaaaccctatctctactaaaaatacaaaattagccaggcgtggtggcacatgcctgtaatcccagctactcgggaggctgaggcaggagaatctcttgaaaccagaaggtggaggttacagtgagccgagatcttgccactgcactccagcctgggtgaaagagcgacaactccgtctcaaaaaaacaaaaagaaaatcagaataaagtgtgggttttagttattgttaatgtatcaatattggcttattaattgtaataaatgaaccatataaggaaagatgttaataataggagaaactaggtgtagggtatatatgaaaactctctgcactatttttacaagttttctgtaaatctaaaattgttctaaaattaattttttaaagtcaaataatttacctaaatctatacagctagtaaatactcaaaggtatgagacaaactcataagttgaacccataagttgaagtttgaagttgaagttgaagaagtttagatgacttcaaactctgtggttttcccactacccaaaacctttcttagtttacccttctgggattatgtaggcatttgtatcactgtctaaataataagttccttatggccagagaaaatacttttttctttcttttttttgcgcttccacaccactgacgttgagtaaaccagtttaagttaactactgacaaagtcacagagcctaaagaatctgagatttggccgggtgctgtggctcacgccagtaatcccaacactttgggcagccgaggcgggcggatcgcttgaggtcaggaatttgagaccagcctggccaacatggtgaaacctgtctctaccaaaaatacgaaaattagcccggcctggtggcgcgcgcttgtaatcccagctactctgaaggctgaggcaggagaattgcttgaacccagtaggcggaggttgcagtgagccgagatcgcaccactgcactccagtttgggcgaaagagcgagacgccgtctcaaaaaaaaataaaaaagaatgtgacttttgtagaacttgatcaaatccagacccaaacggtccgctcctcggagaggccacagatcggcgctgagctgggctgtctcagttctgcaagtgtcctgtgctgccatctaccggtgtctgggaagcgtcgccctcccttattgtatctcctggggagaggttggagagggcgccgcttaaactgcagaacatatgtaactgtcatgcagttcattagacacctgtacaagggaaaggcctcacttttctccagcaattgcaggccctcctaactccatatcaacactcatctcgtaaaattcacagatctcgctgacctgcctcagtaggtactgatctgactcctactgtccatcccatcccagaacccacacccgcctgcacagcgtaggcttcagaaactgctcaacctcgcagacctgaaccccaccgcccagattccctcattttcacagacccctgagattccttgcactaccttgcaatccctacggacctcccctattagtgcaaatgcacgcgcccacccagacatccctacaaagaggttagagttccggcggcagctcacaccggtgcgaaagcagcgagatagccccaacccggctcagagccctcaggctggtggctttggccctggctccatctccccacctctgccctgatccgctccgctcaggctagcagcctgccggccgaggccccgcccctctagacttgtcatcacagaagccgcacgtggccggggtgggacctcaggcgacctgcgaccatcactttgtctcctccttcctcctttggggccgccaccgccaatcagagccagcggatcctggttggagtgcgaccgcccgggtgaggcgtgagggagaaggggcggaaggaggaggggctctgagatgggagggggatcgtggtggaagggtcttggcgcgacttctgccaggctggaatccgagggggcgggtcctggtgaaaggcggagagaccgagaggaggcggggatcgggggtggggcctgggaaaagctgaggatcctggggaaatgcaaagaaaacgcgaaggaggtgcgaggtcagaagggggcggggcccgggctacaggggaggagctcgagaaattaaacgaggaaagggacaagtccacagaaggtggaaggtgggacaagggagagggtgggcccgggcgttgcgggggcggggctcagactgaaggggcgaggtttgcaggcggaggctacagctagggctgctcagtaactgccccaaccactaccacgtccccaagtgcaacgggacccacggaactacaggtgtggggcagggtgagcgtggaagaagggacgcggatgggggtgcgctttgcagacgatctggagactgctgtgtgttgagggaagatacgaagtcgcgggagcagttggggactcaatgtgtgggcaacaaggtgcattctccagaggcctctatgggggaagggcgggagcgctttgttgtgggggggttgcgaggtacattgtgagggggctgtctctgtctgatgtggggggttggaggaggtacatgaggggcaggggacatggaggtgctttgaaggaaggggggctgtttaatggagaaggagtgtagcggtgtcggagggtctgcgggcactatctaggggaaggggttgtaggcccaacttgaggcaggagaacagaacccccagtactttgacaaagtaacagtttagggcattgtagtaactacaggaagacacttgtgttctgggttctaagagcaagggtgttggggttagtggggtgaagaggccaatctattgcactcctgtctgctcagcttttaactccgccttctggcctgggcactcagagaggagtcagaccctgcttgtcactagggcttgtgtgaatgtctcctcagtctattttggatctgtccagctgagactggggtttcttccctaagctgaggtcccgggggacccttcccccgctgggttcctgtcaaccccccatcctagttcctgttcctcccagagccggccttggtctctgtctcccccctcccccgccctgcccttatgctctgggtgtgctcatttcccacttccttccttgccccagggcctggcctggcccttgcccatctaggagctgtgccctgcccggtactttgttatcaatgaccagagaccctggtaaccagcggcagggctcagaccccacccccaccactaccacccaggtctctcgcatagatccccaagtgactggtagccacatttaaccacttgccacaaacagattttccccacccttatccttctgggtagggaacgctagggcttctgtgggaggggggaagtggtgaggagtattgagggtcttctgtctgttttgagaggtgggccacgactgtaagctgaacccagtaagggttgtgaggttccagccacagctaggggaggaagagggagtggctccccacactccaggctyggaagcactatcagaacaggctaggacctagttctcttgagggctcctctgcttccctgaggggatttgatggagtgctagagttctttttgcccctgggctggctgggagagggtgggaaaggcttgagttccacacagtggctaaatgagtgtgacagtgttgctaaaaggggccccaagccagcctcctcacacaaccacccaggagctgagagacyggctggggaggggggtgggtctgctgaggacagacaaagccctggggtagggtggggtaaaaaagggcaggctgaagccttttgaggaggagctgattgctatggcaacactgcttcccagacagtctctcagagagggcgggcctagggcagactctccagcttcctcaggactggggcggtttgtgtgagtgggtggggcatgaagagaaagggcatcagtttgctgtgctgagactggaggatatagcctttctgctttggtacaggcagcagagcattcgaatgcctggagctatcctctgatatggagatgagtgaacaacagtcattagaattgtagagctgcagaggccctcagcagtcattgtttatacaaacacctcattttacaggtttggaaatttatggctaaagagactgtgattccccagatgtcacagtgaaagggcagaagataggatccagatcgccggattgctgttcactcagcccagggcctgttgttttcttcagtcaatgtttattgaacattgccagggactaatgttggctctgggaatatgagcatgaacgaaacaaagttgctgctctcatggagcttccattctattaaggggagaaagaaattgtggagggggagggagaagtcaagtagtgataaccgctatataaaaaaaaataaagcaggataaatttagggcaggaaggtaaggcctctttatttatttatttatttatttatttatttatttatttatttttgagacggagtctcactcactctgtcacccaggctggagtgcagtggtgcgatcttggctcactrcaacctccgcctcctgggttcaagtgattctcctgcctcagcctcctgagtagctgggattacaggtgcgcgccaccacactcagctaatttttgtatttttagtagagacggggtttcaccatgttagtcaggcyggtctcgaactcctgagcttgtgatccgcccactttggcctcccaaagtgctgggattacaggcgtgagccaccgtacctggtggtaagtcctcttggttgtaccctgctgctttcccagggtacactgaggcctggaacatctttgatccttcaccctgaactattgtcctctgacctttgtaggtaaccaaggcctggcctatggtagtggcagaaagatagaataaggtggggttgctaagggattatttttttcctacagtgttctacgtctctgttttcctagtaagtttttattaaggcaagtaggctcttacattgatacactgtaattttgacaagggcattgaaaatttccttaaccctgttccttacactagggaaccggcaaggaagtcagcccaagggaactgggttcttattcagagttttcctcttgaaaagggtggtctagggtgaggtaaggagaagggagcttagagggactgttacttgcttgtgtctcccaagtctaggactgagggactagggggaagaggaaggagcctctttttactatctagtgatataacctcagggccctggggggtccacagcacaggcaaggcagaaacaaggaccttgggctctctgtggcctctgaactgtagaagaatggactttccctctttggctctggtgtttgcctcctgcttctgtgaaggaccgggagaaaaagcctcctaagtcccaaattatccgacttgctgacaagtgcagagggcagggtagacaggactattgcttttcttagtttacctctagagtaccctctagaaagtgtctttgaatgctcaatccttgcaaaggtttccatcctggtcatttaaagaataggaggacaagggttagggatgccggttctgctgccatttgatttgactgggtctgaactggrctggggcccagtgactcagtgggagggtggatagttttgagggagctgtgagtcatggggttgagctccatcacaagagytgggctcatttcccccattctgggcagaagctctcctatcccacttccctgtatgctctgtctccttgaacatgggcctgtgagtagaaagagtgctggcaggctgatctcagaaagggagttcagaggcacaaagaataatgctggtccctgagattaaaatgtatccctatcttaggaacccgtggggctcctctaaagaaggcaaaagaacatcaatttaagagtaacagagggaaaagtaccacttcttaacatggaaggagatagggtcccacctcaggcctttttcttctctggcatkgaggaagcttcctgggcttcactagttctccagctctgaagctttggtttggaaggtggggaaagacaaatgggagtgaggtatttggggtctggggtctggtatagacagcaggcagactttgagggttgtcaaaccgtatctttaaagccctcgggcttcctattaaccgtcctggaaggaggaagggcgggggagtagggcggaggggtaagatgtggaaggcctacgcctttgaaagggttaaatggcagggcagggtgttgctttggactccggcagctgtcgggttaaggagaagggcggagcgaccttgggtaagcctacccccttatggaccaataggcgtgtgcctcttggagggggcgtgcctcgcacttgaggtcgcggggaggctggcttcctatggaccaatgagcatggtcgctttccagggagggcgtagcctgaggggggcgtggcggccgtggccgccgcggcgcgggtggtggggcactgggcggggcgggcggccccatcagctggtaggaaatggcctgtgagtcagaggggcagtggagtcggcggcgcggagccggggcggccccggggagggaccgtcgcagggaggggcgcggcagcggctggggggctgcgggcgccagggcccgctagtgttgcacacgaagctgaacagcgaagagcctagcagagcagggctcagcctgagccaccctttgtctgggttgggggcccgtggcagggaggaccggggaaccaaggggagggaccgggacgggacgggacggaagggcccggagcagcggccacctccgcggagccaatttgggagcggggtgagtgtgctagagggaaagagcaaatctccgaagctccagtatagtatggggcctgtcccaggctgtggggaggagaggagtgagaagggacctgggaggctgggcagggggtaagggatcgtccagaagaaggagtccaggagtcaggtgagtctgcctggcttagtttagagagtctgctaaggtctgctctctcccctctgaagatagagggctctaggctgggggccgaggggttggtaagagagaagaagtcgaccttcctacccacagtggtggtccgtgggaacagcccccctagcttgtgtggatgtatgtagggacaaaatagagagcagctggcagcagttctctttgcataggatgagggtggaaagcacatggataggaattcatcctgtcactctccttgatcatggtagaaatggaaatctttaatactgaagggaaggggagaatgagccttgaagctgatacctataccaatacccacctcacccacctcccaggcctcaaaagtgtctaaaggtacaracgtattctgggacttgttgtttttgctggccttgctccctcagcatgttgggagctgtagtccttgccagccacagcctggcacagctgtttgatgccagctgctgcccaccccctgaacgaagagtgaggcttggcctactctgccctgcccccctcccctgcagtcctgccccatgagtcagcttgaagccatggtctagagccagactggctgggtggcaggggagtgaatatagagcgtcttgttgacakggtgggaactgagagggctctggggttaataagcagatgccaggtatgctggggtcaagtagggcatcatgtcatcccctggcttccccagggcaaggggtcaagagggcaactgggatgacctggaagtggtggtgctagggaaaaggcccctcctgaatctgtatggcttgggtggaggaaagaagggtagaaattagtgcaggttgtaccttctgacaaggttggttgcaggtaggatagtgcaggttgcgattggtgttctgccctttccagccatcccgcccaccacagggaaccaggattttcttagggatcccaattcttaggagaatttggtgaaatgggatagtggggtacaatgatgggaacttggtgtaggagagcttttcagtccctgggtacaaatctctcctttctgcctgctccccacccccacctctgttcctgattttcccttgtacaattaatctctctgcttctctcatctgggaaatttttctctccactctcaggactgctgcycagatgtctgggacttgcattctactttttttgagccctgctgtgtgcttacccctgtacttggggttggatggaggggtgggacacagatctgtcctcaggaactctatggtcggtctagaagatgccttacccacaggagtgagcagaactgttagtgagcttacaggaagtagtaacactgccataggtgaggtctcagagaagggagagatgcttatggtctggggtggacagagcagactttctggaggagatggcatttgacctatccaaggaggaaaagtcttgggtaggcattcaaagggcacttcttgaaggggaaagagcaccgtgaatgtcagacagcaaaagagaaggctgaccctgggggcagytggctttcaacttgacattcccctcaccctagtatgggctggaatagttagtgaagaccatcttatgcaccvgtggtttggggttttggtgttgggtgtgtgagcactgggggaggggcgtggagaggtactccctagttgcttccagctgactgactgctgcggccttatctctagtttgcagggccttgcgggagggccctggaaagtgccttctggcagtgaccccttccccttccccttcttgtttttggtcggatttgttgcctcttgttaaagagacaggctgctggaggcaatttggagttcagggctgaaaggccagctctgagctgacttgaaatttgtacctctgaggaccgctgatggggtataactgtgtgggagacctctgcccttagtgccctaggatggcacttgtccctttggagatagacatataagaaggagttgtgcaatttggtggctttgagtaagaaagctgaattcttcccctggccgcctctcagctgacacggtctcttggatcttgggggtctctcatcccttcctccatgtagggcaggagtcctcaaatggtggccctgacaagtagttattctacctcaactcacttgtcacatccttattatactgagccaagacctgcctctttgactccttaggtagcccaactctgccatctgtgccctggaccccaagcctaccctttctgttcctgaagagcctctcacatgggagaaggatgtcctggagtgtactattagcctataattggtgacaggccttaccgctggctccagtgatcctggcttacrtctgttcttctctcctcagggtcctgctgagctcaggagctgcacggaatggtggcagtcaccttgccagtgcagcaggcatggatcagactgcaagctaggggcacgaggcatcagttgggaagaggggacgcacagctaggcttgaggcctcttcatcggggtaagtaccagggagaagrgggggaagtgtgtccagtaagaagyctgagctaaacctgtcaccctctcaggagttctgagagtggtctctatattccattagtccatccagggatttgtacacattcatccttgggaacccatcaaagtcacccctttaggcaaggagagggtctgaaactcagctggaaggaagaagactcattgattcccctgaccaccttttcttctcttctcttacacagatgtccccaggccccccagcccaggcccagcataaaggccgtgttggggggcccccctgaccyaaggggggcttcatgcgccacgtgcaggcggagccrtctccatcctcagagccggaggctggcccttcacagcctccagtcaggcagggggccctccagggtggcctgctcatgggctacagcccagcagggggggcgacatcccccggggtctaccaggtatccatcttttcccctccggctggtacctctgagcctcatagggccctgaaacgacaagccccatccactgagggtccccgggagctgaagagaggccctgggctgggggccagagagggactaccccctgaagaaccatctactgtggggctcttaggcccagagggaccggggctgggactaggtgtggccagccagcatttctcccaccgtggcctctgtgttgtggaacagagaagtagtgtcacctcatcttggacttcrggggcctggagtcccccctgccccccatcaaatgcttcctgcaatactttgcacaccagagactgggcctccccagatccagggggacaggkttccctgggggagtccccagggccarcccctccaggccagctgcacacacttgacactgatttgcacagtcttgcacaaatagggggtaagagcccagtggctggggtgggcaatgggggtagcctctggcctagggagtcccctggcactgccaatgggcacagtcccgagcacacaccccctggccctggacccccaggcccctgccccaccaagcgaaggctgcttcctgctggagaagccccagatgtcagctctgaggaagaggggccagcccctcggaggcgccggggatccctgggccaccctactgctgccaacagttctgatgccaaagccacacccttctggagccacctgctgcctgggcccaaagagcctgttttggtaagccaataaaggacctcatttactctttttttacttttttttttttttttttttttttgagatgggatctcactccatcactgctggagtgcagtggcacaatctcagctgactgcaacctcctcctcccaggctcaagggatcctccaacctcagcctcccaagtatctgggaccacaggcacatgacattgcacccagctaatttttggtatttttggtaraaatggggtttygccatgttgcccmagctggtctcgaactcctgagctcaaatcatcgacccaccttggccttctaaagtgttgtgattacaggcgctcaagccactgcgcctgtccttcatgtactcttaagtggatatttgtgtgggtaaaggtggaggcctggggggcagggtgttcctttgagagtttgtgatgagcttctgccccaaaacatacatggccttcaccctgtgtcttttcccaatcatttctctccgtaggacccaacagactgcggtcccatggggcggaggctgaaaggagcccgtcgcctgaagctgtaagtgaccagctttttcctctaccctgtccctgagaatgggggcagaagtctgtactctttccagcatccgagtaggggaccccagggcagaagccctacatagtggcagagggtggagtccaagggcataagcaggaatcccagaatacctcaagccaaccccctgtgtttcccttcctctaccaggagcccccttcgaagcctccggaaggggccaggcctgctgagcccccccagtgcctcccctgttcctacccctgctgtcagccgtaccctgctgggcaactttgaggtagctcccgttggggtttgtgattgccggggtcctgggagaggtgggatggtggaatgtggcttggatggataaggaaaagaattggcatctctctcttcatgtgttttccctaccctaatcccaggaatcattgctgcgaggacgttttgcaccatctggccacattgagggcttcacagcagaaattggagctagtgggtcatactgcccccagcacgtcacrctgcctgtcactgtcacattctttgatgtttctgagcaaaatgccccggctcccttcctggtatgccttgactccaaccccaaagtcagctcatcaagaggatgaggatttgggggcggggccagggggcaagaggtatttcttacttattcctcacctagaagtgagtcagggccaggtgaggagaactctactgtagggcaggggcaggttcagggtgagagcttgtggagagggacatgtgtttagggcccagggttttcctagtccccaccttgactgatggctccctggccttccagggcatcgtggatctgaaccccttggggaggaagggttacagcgtgcccaaggtgggcaccgtccaagtggtgagtttgccctgagggagtgggagtggggagagaggaaagcagccctcaggccctaccaaccttgactgtcctgtccctagaccttatttaaccccaaccagactgtggtaaagatgttccttgtgacctttgacttctcggacatgcctgctgcccacatgaccttcctgcgccatcgcctctttttggtgcctgtgggtgaggagggaaatgctaaccccacccaccgcctcctctgctacttgctgcacctcaggtgaggagagggcccagggatggctggggaggcccaggtatcccctccctgaagaggatctctccttgcttcgatactgtccggattcttgcttagtttatttttaaatttttatgtatgtatgtacatatatatgtatgtattcatttatttttagagatggggtctcgctatgttgcttaggctggtctccaactcctgggctcaagcagtcctcccacctgggtctcccaaagcactggaattacaggcatgagccactgaacccagcctggattcttacgttgatcacattgtcctcctccaggttccggagctcccgctcaggccgcttaagcctgcatggagatatccgcctgcttttttcccgccggagcctggagctggacacagggctcccctacgaactgcaggctgtgacygaggcccctcataatccacgttattcacctttgccctgattgccagcactctgaacccatgcgggctaatgacctgcccatcctgctccatcttagagaacatatatggagagacagcaagagacccttcaggcttgaattaaagccctcaccatgctcacrcccaaatggattatttgggtgtttaaagcttctgattcttactacaccctgccctacttcgggtactccatgtgcctgtcccctcccttgggtttcccaggccagcttaggtagtagggaggaactggagctaccctgagattttctcaagttcccaggcaagttatgccagcgttgcctccctgtcctgggcaggggccacttgttattttatttatttttaatttataatttattcaaattggattgccttggtaacctcccacacctgataattggcatcactcctccccgcttcccactctcagatattgctccaacctcaggagttgaagaggcttatgcggtgggggcaggaggagaactgctttccctcagctgagggaagaggggctattccagagggactgagtcagtagccaaagactcagcttcccctgtcsttccccagtcccttcacttcccctaccctctgacctatctctgaaagccaagttatgcgtatgtgtgtgtgcacaagcttgtctttgtgtggtatgtgtgtgtgagtgtgcatgtatgcacacacacaggggttaaccacccctcacctagggctccagactccagttgtccctctcctcctacctgtgtctccttgttttggggtcctgactgaagaaggtgtccagggggcagagtcagggccaagcactggggtgcctcctytcacctggccagactctgacccacctacctcagctggggtgaggggcacccctcaaactcagtcatgtggttccaaactaccccattccccactccagactctgacccagcctcagtcctaactcctggggctgggctgaggggaacaagcatttgctgaaacttgaaaaaacaaagcaaatcaaaaacaggaaaaaattgtacctggtacttttttttagaaaaaaagattaaaaaagaaagaataaattcttgtttggaaacttgaactaagctctacttttgttgttgttgttgttgttggggagagggtgtgaagggggatggagggccttcctggagctgggactcagccctttctaccagagaggcaacaggcctgggcccatgaggtcttaggctagtccctgctgattcctggggcctggtttttctcctttcggaggggttggtgggtaaagttcagccgtagaagctgaactctgaattgtagatcaggattctaatactggttctattaatgactttagcccctcagaacttcagtgccctcatatgtaaaatggaggtgactacggaggtctcttgactaccagagcattagggatgtgggcaaggtgacatgctccagacaaggttgaacgttgaggctgtttgctggactctatttaagaccgggcataacaaaccttgcttgggaagacagggaaggagctgcagtgtctttgaggaaagaggggaggggaaaatctcggcccaatcgccaggcaatattaggcccagtttccatggcaacgggattggggtcagtccccagtgggagtcctgggcacaacacagcgggactaccagagaatatcactatggcaaccatggcaacgagtcagctccaatccactagtcgctatggtgacagatgggggcgatactacgctctggtgggcaaactgagtctcgggtgaggacgaataattcagtgcgtggtgtctgagtgataatgcccgcgaaaaatagcctccattttggccatcaggccggggatcttcggcgtgaacagctaaacccagaacaaccacagccttcgcccttctctagaaggtctgcgtttcccagggaacaacttgacgcgccgttcgaccaagtaacgctgattgggtgagtgttgaagcgggggagggagctgccggaagtacatccgggggagcggaactgcaagaggaaaggctcgggtaggcttctgggagcgaccgctccgctcgtctcgttggttccggaggtcgctgcggcggtgggaaatgctggcgcgcgcggcgcggggcactggggcccttttgctgagggtgagagcgaggcaacctttccagagggtcaggacagagattacctgggttctccgctggaaaagagcgaaattccaacttttggagaggactggggtcagaggtcatggtccccatgtgattctccgaggatcctgagggtcgtggtttatggagatgccttcaggaccgaggggcggcgtgtctggccagatgggatctctgctcaccctcttctttccttcagggctctctactggcttctggccgcgctccgcgccgcgcctcctctggattgccccgaaacaccgtggtactgttcgtgccgcagcaggaggcctgggtggtggagcgaatgggccgattccaccggatcctggagcctgtgagaaacctcttctgcccaccctgggccagccagatgaccaatccctcacgacatgcaatgtcgggaggacttcctttgggcctgcccgcactgttagctcccgactctgtaggccagacctgacagggcccaggctgctgaccatcatccccatgttaccaccttttcctatgcatctcacaggccccattcttgggaatctcccctgcccactctcagccctacctctcagtctgcatagagatggctattctgctggctccgattctcatgactctcccctccattcaggggcctagtcttgcattcctgttctcttgggttttcttaccagtgacacctcagccttctgaggacttatttcttggtaggagctgctgcttttctgggcatgttccatgtgttgactccctacatactccaggactagcttaggtcccaacccaatagttcccagccttctgaggacccatgactcctctttccagggtttgaacatcctcatccctgtgttagaccggatccgatatgtgcagagtctcaaggaaattgtcatcaacgtgcctgagcagtcggctgtgactctcggtgaggggttcagggtgacatgggtgctctgaggctattaggatgtggttgctgtagatccagagcttagtagaaagaactggttgggacctagaggcctgactttccccgttttctctcctggttctacagacaatgtaactctgcaaatcgatggagtcctttacctgcgcatcatggacccttacaaggtacctgtcccctactttatccagccttttcagttgccctcttcactaaaatcttgtgcccaagcttcttacactatccgtgtccatctcaggcaagctacggtgtggaggaccctgagtatgccgtcacccagctagctcaaacaaccatgagatcagagctcggcaaactctctctggacaaagtcttccgggtaagcagatctgagccagagttagggtttgaagacacaaacctgacactcttaatcttttctgaaggtcaagatcagtcccaggcccttctcagtgtaggcccttgataggtaggttgaggctgtggggcttacacctctttttccaggaacgggagtccctgaatgccagcattgtggatgccatcaaccaagctgctgactgctggggtatccgctgcctccgttatgagatcaaggatatccatgtgccaccccgggtgaaagagtctatgcagatgcaggtgggggccaaggaggggtgggaaaagggcctcagggctccagtaccaggaggatccagacttccctcctgttatgatgggtagagttgcatgtctgtatcagtctcccttggcttgttgattgggattgttgtgggcttccaggtggaggcagagcggcggaaacgggccacagttctagagtctgaggggacccgagagtcggccatcaatgtggcagaagggaagaaacaggcccagatcctggcctccgaagcagaaaaggctgaacagataaatcaggcagcaggtcaggagagggtagaggctgagggaggagcaaggcatgggcctttgaagattggtgctggggcaggatctttggggtactttgacttcatgggtcaagcaagctctgtcccttctcttgcaggagaggccagtgcagttctggcgaaggccaaggctaaagctgaagctattcgaatcctggctgcagctctgacacaacatgtgagaggcccctgggtgggaatggggacaggaattgacagtggaaggggttctcttatctacgcttgaggagagttccgcctctgtgggctctgttgagccagattacatggtcctttttattgtgaactgctttcttcattccccatcccccccttcttctccgtatcggtgatctctgatttttatccccctgtgatcacagaatggagatgcagcagcttcactgactgtggccgagcagtatgtcagcgcgttctccaaactggccaaggactccaacactatcctactgccctccaaccctggcgatgtcaccagcatggtggctcaggttagagctctctgaggacccagcacagagcactggtgccagggaccaaactgagaccccaccaccgtcatcaacacttacataccataaaggtcttcagagtgccttggccctagacctcccttcgttctttgtagagatggaatctaagaatgaaacatctccactcagtcctgcaaatatggaagttcttgagatacctttttttggtagatacttgtgctggtattctgagagtcactttactctgatggtttgcaagattcctaaaatcaactccagagcttacaagacaggtttgagagagggagaaaggaaaaccaacttactggcccccatgccatcttttcccgtttagccattggtaggctgggctgcacctctgtcaagtgtcctcatggtattctctctgttcctctcctcaggccatgggtgtatatggagccctcaccaaagccccagtgccagggactccagactcactctccagtgggagcagcagagatgtccagggtacagatgcaagtcttgatgaggaacttgatcgagtcaagatgagttagtggagctgggcttggccagggagtctggggacaaggaagcagattttcctgattctggctctagcttccctgccaagattttggtttttatttttttatttgaactttagtcgtgtaataaactcaccagtggcaaaccagaaactgtcctctttgattggggaatgaagttgggaaagtcactagcattttccttggatccagtcctgtcagcatgatgcctccatgaataagagtgaacttcttgtaaagtgaaactatcatttttgtcttcaagagaaactgtgggatagggtggaagtgttaaaccatatgttcactgaactgctggctgggaagtgaagtccccttcctgctaagtgtggggctgtgtgtttgaggcaggtgtttgggggttttttcgtgggaaagaagtactttcatgagaaactactaccctgcactggcatacttaaagggttttcagggactgagggtgctcctcattcatttattcaaaaacattgaatgtctaccaagtgccaagctcattactagacactggattacaaaaatacctgaaacccagtggtccctgctttcacagaatacaaggtcaggtagggaaaacagacaggaagcagacagtgatagaaagtgataaatgtggccgggcgtggtggctcaacacctgtaatcccagcactttgggaggctgaggtgtgcagatcatgaggtcaggagattgagaccatcctggccaatatggtgaaaccccgtctactaaaaatacaaaaactagctgggcgtggtagcatgtgcgggtagtcccagttgcttgggaggctgaggcaggagaattgcatgaacctgggaggtggaggctgcagtgagccgtgatcacgccattgcactccagcctggcaacagtgagacactctgttaaaaaaaaaaaaaaaagtgataaatgctgtggtagaggaaagttctggctgagggatcttggtgggaagagcatatcagcttatgagtagcagcgttgctgattgccactgaactcaggctggaaaagttagcaagttttcaccaagtcaggtcctggactagaataaacaaaggctcactgcttgagagaagttggctgaagggtatagtgttaagggggatgtgactacatggcaagggccaagtcacaaggaatgagattcttgttgaaggggttggacattatccctagggtaatagggattttttgtttgtttgtttgagacagcgtctccctctgttgtccaggctggagtgcaatggcatgatctcggctcactgcaacctccgcctcccgggttcaagcaattctcctgcctcagcctccttagtagctgggattacaggcatgcgccaccatacctggctaatttttttgttttttgtagagacagggtttcaccatgttggtcaggctgatctcgaactccagacctcgtgatctgcccgcctgagcctcccaaagtgctgggattacaggcgtgagccactgtgcccggcctatgaagggtttttttcccttcccatgaagaattttaagataaaacatcacattggccaggcacagtgactcatacctgtgatcccagcactttgggaggctgaggtgggaggatcacttgagcccaggagttgaccagcctgggcaacatggtaagaccctatctctacaaaaaagaaaaaaataacagtaatcacattaatgttttagttagagctgtcttgctgcaatgtggagaagggatagtagggagacacaggaggctgggaggacagtgagaaggctgcctcagtgatcctggagaagggatgaggtctgaactgagataaggggctatggggatgaaggtgggagaataactcaactttttttaaaaattaacatattcct

SEQ ID NO: 7028 - DNA, 29177 bp, Homo sapiens
gtggcaggtggctcagaactccggtctgactctgaggcgacagcagttggctcaggatgcactggaagggctcagagggctcctccatagtctgcaaggtaggcgggtcctccccaggatggtcagttcccctcttccatagccagagaaacatccgctcctgcgtttttgggatcgatataattactcggggcagggagtcctgtttaaggcacagaggagactggagtggaatcatctttgtacaggcaaatccctctcttccttacacactcacagagtggcatttgaaaaatggtttccaagatggtctgatctggataacttttttgccctttccagactctctgtccaaaggttgggttctttttttaaatccttagctaattggctggagggtgggttctttattgtagctgttttggttggagtggggtgatctctgagttgggattttatttggaggatcttccatgggggagcagtctgtaagaccaacattgttgctccagggctccctgcagctgttcctgttcttcccttggagctgactgtcacctgcaacttcattatcctgagggcaagcttggcccagggtttcacagaggatcaggcccaggatatccagcggagcctagagagaggtgagggccagagattgtccctgattcccctgccatcttcagtctgggtttaagttattgcagggagatgggaggataaacaacatctgtcacctccatggagagaggtgcccttctctgtgctcttcagaccaggttgaggtattattattgtgacctttggggtcctgcaggagaggaaagccagagtgtgtggggagatggaggatgaggtgctacttcagctgtgtgtgtgtctatgtgtgtgtgtatactctacagtgctggagacacaggagcagcaggggcccaggttggaacaggggctcagggagctgtgggactctgtccttcgtgcttcctgccttctgccggagctgctgtctgccctgcaccgcctggttggcctgcaggctgccctctggttgagtgctgaccgtcttggggacctggccttgttactagagaccctgaatggcagccaggtaatagggaaagtgacctgaagctgagggtctcctccttccttcctcctcctttctctccagctgcagtagcatcatcatgtactggacaggcggctgggttggtggtcggaaaacctggattctctctgggactcttgggtgaccttgccctggttggtctctcattgtggggattctcttaggagtgttttttaaaaattggacaggcatggtggctcatacctgtaatctcagcactttgggaggctgaggtaggaggatcacttgaacccaagaggtggaggcaacagtgagttgtgagctatgatcacgccactgcactccagccctgcagcctgggtgacagagggagaccctgtctcaaaaaaaaaaaaaatttttttttggatagggatagggctcttgtgatcttgctcaagtcagctctcagccttagtctccttattagtaactcaaatatggtccttgccctgagtgaggaggcacgctggaatagatcatcactgccccaggtttttcttccttttttttaattcttgcctcatagctatctatctcttagaattgggggaaactacaggcattatgcatagcttcttgctttgtaagggtagctgaggcctgtgtcctcaaggatcaagaggacccttgagctcaaggtctagccaggatagatggagataggagaagacggggaggttgtaggcttggagcttctggttgtccttctttccccagagtggagcctctaaggatctgctgttacttctgaaaacttggagtcccccagctgaggaattagatgctccattgaccctgcaggatgcccagggattgaaggatgtcctcctgacagcatttgcctaccgccaaggtcagctagcaacctgactcatctcttctacctttaagtggtcctccagactcatgccctctctcttgtcccattcagttccatgggcttcttagacccttgttccccatcatgacccctgctctatagccctctccaagctcacaccctgactgtcctcaggtctccaggagctgatcacagggaacccagacaaggcactaagcagccttcatgaagcggcctcaggcctgtgtccacggcctgtgttggtccaggtgtacacagcactggggtcctgtcaccgtaagatggtaaagacagtcctagggtggattggggaaaccacaagcattatgtatagctttttgctttgtaagggtagctgaggcccgtgtcctcctatccctttagggaaatccacagagagcactgttgtacttggttgcagccctgaaagagggatcagcctggggtcctccacttctggaggcctctaggctctatcagcaactgggggacacaacagcagagctggagagtctggagctgctagttgaggtagggaactgccaggtgaagatgtggggtggaggattcctgaggtgcttgtgatggggtgacttgactagtcaagatccaagtataaggaagtatggctcccaaagattatagatacaatttttttctttctcttttaggccttgaatgtcccatgcagttccaaagccccgcagtttctcattgaggtagaattactactgccaccacctgacctagcctcaccccttcattgtggcactcagagccagaccaagcacatactagcaagcaggtgcctacagacggggaggtgaggttccccttgctcacctgagcttctcttcccacttctgatgcctcccctggggtgtgactctgcttttgttcttgtgacttgggggatgaatgaggcagtggcaggacataggtcgccactcctcagcctcttaccttgcttctagacctgaactgaggactcttctctaagacattaaccttctctatctttgacactctgaagtctcttccccagtccattctgtaactggggtagatccatactgagccaaaattggagccctaagaccttccctccctttctcctcctcagggcccatgaacatccatctgttagctaagagagaacattctcaggacccttgcaggttccctgctagggcctagggtgaggcttatgggcttttactcctcagggcaggagacgctgcagagcattacttggacctgctggccctgttgctggatagctcggagccaagggtgggtgtgtcttcaagcttctctgcaatggggtagacgggttggtgtcccctttgaaatacagcaagactgcaattttttgttttttcctctattctgtctgtccagtctgggggcccaggactctgcatggtaccagagcctggtgaagaggttggggatggtggctcatgcctttcaagacactgcttcttcttcccactccagttctccccacccccctcccctccagggccctgtatgcctgaggtgtttttggaggcagcggtagcactgatccaggcaggcagagcccaagatgccttgactctatgtgaggagttgctcagccgcacatcatctctgctacccaagatgtcccggctgtgggaagatgccagaaaaggaaccaaggaactgccatactgcccactctgggtctctgccacccacctgcttcagggccaggcctgggttcaactgggtgcccaaaaagtggcaattagtgaatttagcaggtgagcccggggtcctagagggggtgtggagggatgattttctgattgggacctgagttggtgagctccatgttcacctacttaccctagagtttctgaaattgattcctcttcacccctgttctgtgtcctacttcaggtgcctcgagctgctcttccgggccacacctgaggaaaaagaacaaggtgatctaaactttcagttttcctcttacctcctggaagtggtagtggtggaagtgggttccctttaatgtgtcccagcccaccaggagacttaagagaaagggactgtggacacaagaagaaatagaggaggatttggggttttggtgactgtgaggctgggaagacacttcttgactttgggagtggtccccaggggcagctttcaactgtgagcagggatgtaagtcagatgcggcactgcagcagcttcgggcagccgccctaattagtcgtggactggaatgggtagccagcggccaggataccaaagccttacaggacttcctcctcagtgtgcagatgtgcccaggtatgtatacttgcatgacgtcggctatgcatagatgtgcaaggacagagaggcccatgggaaatacttgggcgtaagtgtaagagtggtgttctcagacaggaggggtgattggggttgtgctatatatacctagggatatatccaggtgttcaaatatacacagtgtgtatgcagggctcccaagagttccctggtttccccgatatcctcagacacaaagaccatgactctgctgttgtgggttgcacaggagtagggggcagatgatggacactgggatgggaatggttgtgaatgatctgcccccgcttccatatgtgagtgtaggcaagatacttcctctctctaggcctcagtttccctttttataaaacaatgcctaagactatgtcaagttctaagactctgtactctgggctggggctacaggtaatcgagacacttactttcacctgcttcagactctgaagaggctagatcggagggatgaggccactgcactctggtggaggctggaggcccaaactaaggggtcacatgaagatgctctgtggtgaggctcaggcctgctggcttggggctgaggggcagttggtgtcctagagtccttggacctattgtgggtggtgaacactgaaagcgggggtatggctgcccagctttctgccaatctttcacccttaggcatcatccttctttctctccaggtctctccccctgtacctagaaagctatttgagctggatccgtccctctgatcgtgacgccttccttgaagaatttcggacatctctgccaaagtcttgtgacctgtagctgccacgttttgaagagcttgagctgggtccccagtgggctgtctctctgtggggagggctttctgcttcaccatcattaggaatgtgaccattcctatataattcctggactggtgagattggtggtaggcctgtgaaatttgccctagttactaccattctcgttttggaggaaacaatctctgccaccaccaagtcattgactttgctcgaggcaccttttttcctgtttctccttttctgttgtcgagtaaaatttcatatttatctcgtctgcctactacatatacttgcgtgggaaggcttgtgaccgtctagttgagtgctagttgtctatgatgccctttcctgacatcgtctaccttatgaacttgaagtctgggtatgaggaaagggctacaggaatcctcactttggaggcagtggctttagtccttcacattgcctgaatgcagagccccaaagcccaggacagtgacaatgagtggagttgggtctgaagggtggtctagataggcctctcaggacaagggcaggtacctgttacttagagacaggcaggtttctctcagagtaactcttcactcccttcctaattccaaattctagaaattcgactcgtcttagtcaaatgtgtctgtgtgggtacagggtgaaaggtgaattgagtcagcatatcaccaacagctgcctgttgactactaacagggacccctgttatttggggcccaaggattttcaagtcccagcatatgcagttttcttgctaatttgggttctactgaattggctgtgtgttctgtggttgccctttgacttctctggatttgagtgccttattataaggtattaatattaatgacgggaggaagaaaggcacaagcgctgagaaactgcaaaggctgtgggattggggttaccagagggtgcagtgacaatggggtaggagtggggtgctagtcagaaagttcagagtaggggtggttggaggcagcgttgagaaggagcaagaagtgtcagggtggtgatggcgtcttagaagatctccaggttttgggagaagatgggtgtatgggttaccacaataggactagactaatacaagggttcagtctattgtgccacgttcttccaggaggataaactccggagccaatgaactggagccaagtgggagagtccgcctctaagggattaaagggtctcctttcactaatcgatctcgccctattcctttcgttgattggctgagaattccaatccgtcgaggaagcgtagcgttgcggccaattgacgtggcgttactaggcgtgtcgcatcactgaggcgggagccaggccgcaagcgaatttcctgattggctgtgatctgcgggttgctggggagaggcscggagaggcgggcgagagtccgcagggcaggcgctgattggctgaggtgggagcagcttcccttccgatgattcggctcttctcggctcagtctcagcgaagcgtctgcgaccgtcgtttgagtcgtcgctgccgctgccgctgccrctgccactgccacctcgcggatcaggagccagcgttgttcgcccgacgcctcgctgccggtgggaggaagcgagagggaagccgcttgcgggtttgtcgccgctgctcgcccaccgcctggaagagccgagccccggcccagtcggtcgcttgccaccgctcgtagccgttacccgcgggccgccacagccgccggccgggagaggcgcgcgccatggcttctggagccgagtgagtgtgcgcgcgccgttcgcttgctgcggcggcgcgcaccgggaccagccgcgcagggtaggcccggcggggcctggccgtgggcgcgtcagagaggtggagaccaggaaagagggaagggaagctagggggcgagtgaggggccgtggacccggcaggcccggctggggccagctgcgcacccgcgcgccccctaggcggggcttgcgttgggtccgggtcggagcctgggccggatcgtgctgtgtcatgcaggccccggcccgcccgattggctcccttagaacggacgtctgggcctggccaggtcttccggcccactccgccggsgcggcgccccggggctttggggcgccagtctgccgtccggcctaccacccgccgaaagcctttggtccccggagagagcaggccccgcgagcccgaggccccagccgggcccggtgggcgtggactttgcgccatgtgaaggcctcaggagctctgccaccgaggcggagcccggggtcggggaaggcccgccgagctcagggaagctcacagccgcctttttggagccgggtcggcggggccggaggtgggcatcctctgtgtgtgacctgagtcgtgaaggactgttagggagagggcgagccctacctttcgcttctggtcttcttactttaggcctgttgttcatactagaaagtttgagccagttttccttaatgttatgactcgtgggtggggagaaaggaatttttctttaacattttaggttcttgctaaagttggaatctcagttcgtgttttgtgcgcctttccagatttccaggtttcgtggtgtgcagtttagagttgcactaactcttcaaaaacacaaacgtgcgcgcactcctttccccaaccagctatattgagaaattacccgggctctggggctttctgaccccacctccatccttaggaaagcgttagataaaacttggctacctcagcccattcaatttagaatagagagcttttagaggcaaaaaaaaaaaaaaaaaaaaaacacagccagcccaaggaaactctatgcaaattaccttccttccttgaagagattagttttttgaggtgtgttcctttttctcaagtttctgaattcggataaagtattactcagttgcttatttaaaagagtcacttattctgaaagtattcttttggtttatatgcagtcagcctcttattttcaaaagtaaaaatctraaattcttggaacctggcatcatcagctgtttctaacctcttggtcaccttgatgactcttagctgaaacccttccaagtcccgtggagtcccctgtgcagttctggaaagggattgacttatacagaagacaatggaggattgccccaaagagtgtccagaactgctgttggcccatggtcaggccaaattcagtcttttagagattaccacatctgatctcagtaggtagatggggaattagaggctttaccttaagaaaagggcataccactcatctccagagccagagtccgggatggtaggcagaatggaggttttcctaggatacagctttgagattaaaatacaaactattgaccggrcacagtggctcaggcctgtaatcccagcattttgggaggccgaggcaggcagatcacttgaggtcaggagtttgagaccagcccgggcaacatggagaaaccccatctctattaaaatgcaaaaagtagccaggcatggtgatggtgcacacctgtagtcccagccactctggaggctgagacaggagaatcacttgaacccagggaggcagagattgcagtgagggagatcgcgccactgcactccagcctgggcaacagagggagactccgtttcaaaaaataaaaaactatggtgactagaggcatctggcgttttatttttctccagtcccagttctataagtcaagcaagaagatgggcagtccctggaagagtattttgatgggacaggagtgggagagctcgtgggtttacattgctctcaactgtcacattgagcatgcttggcctctagtgtgttgataagcattggaagagtctgcctactcagcagcattgtgcctggagtggcagacttktggaatgggggaagcaaatttgagcagaggaaactgtcgttagaaactagtttagaggcagtggttaaaaatgcagcctatgtgtgagggttagcagaaggcctaccattttgttagatgaatggggtttgtttttctcttgggtgtatcaggacccaaagatgtaagaaccccatggcttcctagctgagcacagcatttttctttgtctcttgcaaattgtgaggatatttccaatgggaatactattttgtcttgttttgttgacttcagtatccccagcccttagaacaatgcctggtacataatagagactcatgaatttgttgaatgaagaaattcgttttaaaaatttattttctttgcttccttcattgtctggccttcctactttggttaatgcttatgttttcctgagccttactaacacgaggccgctcttaaaaaagagagagcgctgggtgctgtggctcacgcctgtaatcccagtactttgggaggccgaggtgggcagatcacctgaggtcaggagttcgagaccagcctgaccaccatggtgaaaccccatctctagtaaaaatgcaaaattagccagktgtggtggcgcatgcctgtaatcccagctactcgggaggctgaggcaggagaatcacttgaacccgggaggtggaggttgcagttagctgagatcgcagcattgcattccagcctggacaacaaaagcgaaactccatctcaaaaaaaaaaaaaaaaaaaaaaaaagggagagggagcttgctgagtctagtaagtgacagctggaaacgggctaggtaataagttggtgtcactgtctggtgaatgatcctagcttctaggaaataacactgagtgtagacccagtcgactttgatttgggtgagagggatttggatttgccccatgtctcagcatttcttggttttgattttttgagccaactttatggaattgtgtacttttgcagatattactgtgaagttccttttgaccttgagcctctttctggcggtttgatgtctgttagtgttttttccaaatatgatggtctttatgcttggcattcctttggtactatggaatgccctggcatcagtaggtttagcctataaggagggtagcaccaatgattctgcttcgttgtccccaggcttgcttggtagaacttaaggcctccctgagcctcaagggaggttgtctggcttacttaattccctggaaagttagcttatgctttrctctatactgttaatcatggtgaccattaataccatgtgccaggtattatgttaagcattttacattcattatctcccttaagacaataagcctctgagataagtattatattccttcttttatagaggaggacatcaaagttcagaggttaggtaacttgcccaagatcacaattaagcagtggcataattggaattcagacccaatgggtctgactatagagttcctgctcttaaccactcttctgtaagtctaagactatttttatttctctaacaactattcagcctccatttctattatgtcwtcttcttaggccattattttctgaccctggggcaggatcactcacttggggccttatagctgggacactgacgctcaaaataccaggagctgctggaatgggtattgtaatatgtatggtagatactgctcctcgtgaccttggctgcctttccttcatctgagctttctggtctagggacagcttcatctattcactgtttctttcctaagtatgagttttagagactggcgaggcgcttggggcaggagtatctactgactccatttcctcctyctagttcaaaaggtgatgacctatcaacagccattctcaaacagaagaaccgtcccaatcggttaattgttgatgaagccatcaatgaggacaacagtgtggtgtccttgtcccaggtaagctgtggccacagactagtctttccttactrcacttacttgarggattttcccaggtttcttttctcatttttcttgcagtgactgcagatagagtggggtttactgggaatcccaatctccagggctgctgcttactccccgtcagcccaatgacccaaaggccttaactttctttcctcagcccaagatggatgaattgcagttgttccgaggtgacacagtgttgctgaaaggaaagaagagacgagaagctgtttgcatcgtcctttctgatgatacttgttctgatgagaagattcggatgaatagagttgttcggaataaccttcgtgtacgcctaggggatgtcatcaggtgtgtgtggggtttttggcttcacagggatgggaggccagagatagcctgcattacaggcaggacccatgtattacaggcaggaccaagttcttggcacctgtcgatgcaggaagcctcctggtcatgggaagacttatgcttcagggttgtctttaggttttggttctgcctccctgggacttcaaaatccatttctgcaggtcccttgagacaaattggcgttcctgtaactttcttgatggctttattttttcctactagaggtgtaatttatcatacttatatcctggcttaggataccactcgagggtgtgtatgtatatgccaaataatctcctcactactctcactagtatgtctaattgatggcttgtgttggggttggaatgaggtgggggtatgggcatggaaggtgagctgctagcaggtcttttaagcccctaagttaacccgggagagaggaatagttggagccagacctgggatagctctcaatgtgagtgattttgcttgttcttgcataattttaggcaagaggttaccccatcttggagtcatctctagccactcctacccaaccaaccatcacctggccaggatcatctcaggcttttgattcttttgaatggagtctaagtttcatgtagctttcttcttgggagtgcttagtcacttcctcaaggtgttctgaccacctggctgagataattttgtttttttcacttctgtttcactgaccctgacaattgttagcttaagaccttcccttgtaatattgggtcaccagtattagctagaaggggatcatccttggatatctccctgaagaccctgcatgtctttgtggggtttctaaatgtgtggctcttgattttggctcactgattaggagtgagtggggctgttccttcgccctcacttccaccctgttctccttcctctcttcgcctaaagccatcctgccttttctttttcacttactatcagctatctgtgccaggcccttttggacacccagtgcttgggcccgaagtgtggttggtaatatggagtctgcttgtcatcctcagcatccagccatgccctgatgtgaagtacggcaaacgtatccatgtgctgcccattgatgacacagtggaaggcattactggtaatctcttcgaggtataccttaagccgtacttcctggaagcgtatcgacccatccggaaaggtgagagctaattctgagcttaaggattattgactgtagggaataaaccttggaacatctttatctcattttctttttcttttttttttttttaaatcttttatgcttttcccctgtatttatttattcattttttaagagatggggtcagctgggcaccgtggctcacacctataatcccagcaatttgggaggctgaggcgggtggatcacttgaggccaggagtttgagaccagcctggccaacatggcgaaaccccatcgtgggcacctgtaatcccagctacctgggaggctgaggcatgagaattgcttgaacccaagaggtggaggttgcagtgagccaagattgggccacagtactgcagcctgggtgacagagcaagactctgtctcaaaaaaaaaaaaaagagacagggtctcactatgatgcccaggctggtctcaaactgctgggctcaagtgatccatctgccatggcctcccaaagtgctgggattacaggcatgagccatcaagcctagtctcattttcttttcttttttttttgagacagagtgtcgcgctgtcccccaggctggagcgcagtggtgcaatctcggctcactgcaacctccgcctcctgggttcaagcaattctcctgcctcagcctcccaagtagctgggattacaggcgtctgccaccacgcccggctaatttttgtgtttttagtagagacggggtttcaccatgttggtcaggctcgtctcgaactcttgacctcaggtgagccactgtgcccggccgctagactcattttcatatatttgtatacacacacatgcaaaccctgcacacatattcatatgtcttaccctctttttttcctccatccttcctttgctccatctctccccttctctgttccaggagagtaagctatctttatggatctctgaaggagaaagtggtccattttggctgggtcagggtccagagtgcacagttctaccattggtggttgtagtgaaaacttgggctacctatatggcagaagtcagaacttgatgggcttctgacatgtcaggttttgttcactgacctcttgtcagagggactcttcacagtttacctttctcatcttgcctgctgcttattaagacaggtggggtggagttggggagaggtagggcaatatctaatgaagggcactatctaatgagcttggcattttgaccccagggtctgatgagttctcactttgtcttgtagttgacacctctaactgtgcttgtactgtttgctctcgcaggagacatttttcttgtccgtggtgggatgcgtgctgtggagttcaaagtggtggaaacagatcctagcccttattgcattgttgctccagacacagtgatccactgcgaaggggagcctatcaaacgagaggtgagttttctccctgattccagtatccgattttatgattactcagtgtggcatcatgtggtaactgtcaggactgggtgctcggccggctgcggtggctgacacctgtaatcccagtactttgggagactgagatgggcagatcacttgaggtcaggtgttcaagaccagcctgggcaacatggtgaaatcccatctctactaaaaatacaaaaattagccaggcatggtggtacacatctgtaatcccagctactcaggaggctgaggcaggagaatcggttgaacccaggagtcggaggttgcagtgagctgagattgtgccactgcactccagcctgggtgacagagtgagactctgtctcaaaaaagaaaaagactgggtgttctttggagaactaaccatctttcagggatgagaaacctgccagctattcatttctgggcctaattgtttctyggatttacctaatgccaggaatttcaaaaaactagactgaacccaaaatatataagtgattgaaatcatttttgaagtaaagctgatggtggcttcaggcctctgcccattcccagggtttccagcttcagattttagagaccccttctcagtaagactacgagtaatgtgagaggcaaggactgtgctagaaatctttgccttgggatttttgtagttgttctttgaggccggatccctttagaggagaatcttttttaaatttaatttaatttttaatgagatggagtcttgctgtattgcccaggaactcctggactcaagcattcctcccacctctgcctcccaaagtgctgggattacagatgtgagccaccatgccgggttgagaatcttcttatacggtaggtttttgcacactaggtagtggaatgatttagagaaactcagcttttgctgatataatattcttgccttctcctttctttatctcctccatattcaggatgaggaagagtccttgaatgaagtagggtatgatgacattggtggctgcaggaagcagctagctcagataaaggagatggtggaactgcccctgagacatcctgccctctttaaggcaattggtgtgaaggtgagcatcctgggctctggaatcaagtctaaagtggtgccaatgtctaatcctgtcccaatgtctaatcctgggactgttttcatgcatggctttcattattgccttggattagaggggcaataacgtatcctttagtttacctaaggctctaaattcattagagctgatggtctaaaaccagagtaggctaatcaaattgtctgttgtgtgcgtgtgcgcacaaaacacacacacatatatatatgggtttttctttacaactcttagaatataaaagccattcttgtatcaatggaccctgtaaaaacaaatctcaccatagtttgccagcctgtctagagcaatgtcacccagtagamgtaaggaagttaaggaaattttcagagtgttaaagggttctgagtctaaaacatttgagaactaytggtctagagtgtagcttctcaatcttttcctagtgggaaagtgtttccatggaacacactgaagatgaagttactcattttcctagtgggtggcacacaaataatttcattttctatgtggacagtttacatgttctgcttgtggatgaggccatagaaagggtagtgttgaagaagaaaaatgatgattgtaaggaacagcattccagtgtgataaattctggagggcatgattactggagtgagtgatcctctggcaatgaagaaaatagaccctgctctcttaaatggcttagctagtctttggcccttggtctgtctaaaattgagcccttagtgtaatggcctcttgcctttccctagtcatgtatcttcaaacgcatttggactacagtttctctgcccttagtctcctatgcaagttgcaatcataaatgttgcccactttctagcagtattttccctgctagtaatagaaatgagtgtggcctaaagtaattgtcttcttagcatttactgcggagggcttattcttaatattgtcagggttgaagcctgattctcaccctctctggagcgctagtcaagccattttagggtttgggagaaggtgggaacctaatcacactctgcattggtccacagcctcctagaggaatcctgctttacggacctcctggaacaggaaagaccctgattgctcgagctgtagcaaatgagactggagccttcttcttcttgatcaatggtragatatttggttcatcttatgtctagctagacccaattttgaactgggcttatgagctggagcacttatgaacacatcctttttgcacccatgccctccttcatgtttatagcatatttcttatgctggggtatgttacagacagaagagcaataaagggaagatattttacattggtgctccctgtcctgccccctttgagaaagattgtggacagactgcagagcgggagcaagctagaatgagaaatcaaagggtgaatggttagtgatttgagagggtttggggcaaatgaactttgatcactggctcttggagaatgctgtttagtggtgtgccatctggtgtgccatctctcytgctctagccagaggtcctagagcatttgctgtcacctttacagttcaactgtgagaagagtatagtgagtccctgggcttctctccagccttgcctggtggctgtcctgggataatggctggtagaggatgtgagaagtaggcagaggttaccaccttctcacccaggacctgtctctgggccaaacaagcaagataactgatttttgggaggaattgggaaagactatcattttgttattgtctccattctgtatcctttcaggtcctgagatcatgagcaaattggctggtgagtctgagagcaaccttcgtaaagcctttgaggaggctgagaagaatgctcctgccatcatcttcattgatgagctagatgccatygctcccaaaagagagaaagtaggagcttacctgaggggatagaggggggttgaaaggccctgacttcacttctgaccagacatcctgttctggcagactcatggcgaggtggagcggcgcattgtatcacagttgttgaccctcatggatggcctaaagcagagggcacatgtgattgttatggcagcaaccaacagacccaacagcattgacccagctctacggcgatttggtaaggactccagatayttttgaccccgtccttgcttaggtcctacttctctccttcatctaagtcacctaatcctcttgaagcccttcacagtgattgggtccaggggtctttttcctttaccctacgtcctgtctagagtgaccaaccaccctggttttcctgagactgaaaggtttcccagagcttgagacttttttagtgctggcattaggacaatcctgtgctggctgagatggttggtcaccctaggcctgtctcttacctctggactagagatgagccctgtttatgtttgtgtactgtcccacaggtcgctttgacagggaggtagatattggaattcctgatgctacaggacgcttagagattcttcagatccataccaagaacatgaagctggcagatgatgtggacctggaacaggtgaagtgatgatgatggctgaccaggcgttacagtgtctctaggcagttgctgggaactggctagagacrtaaggttaagatgtgaggagatgggttttgatttctggacaggggaaaggaagtaatctgagattgaatccaggaaatgggagttggcatttttcatagttgacgctgcatttagagtaaatcagaattgttggagcagccttatttctaggtcccaagtccagaattaagtacttaaaacccagcccataaaggtattgatagtatatattcaaggaaatgagaggacccagggatagcagtcaggggaaggattctattgtctctgagcctcctgcagcagctgggtctttgaggcagcatagtaagtagatctttctctgcaggtagccaatgagactcacgggcatgtgggtgctgacttagcagccctgtgctcagaggctgctctgcaagccatccgcaagaagatggatctcattgacctagaggatgagaccattgatgccgaggtcatgaactctctagcagttactatggatgacttccgggtaaggaccacacccgtgcctcaggtacacacatacgtgctttgacccctcccttgrtaagtctcatccccagttttccctccttttctagtgggccttgagccagagtaacccatcagcactgcgggaaaccgtggtagaggtgccacaggtaacctgggaagacatcgggggcctagaggatgtcaaacgtgagctacaggagctggtccaggtagggcaacttggtccagggtgagtcactgtctcagtacattgtaattgayctgggtgatctcagggtgtcaacacatttgctgcaakagttgtgagagcacgacttargaacctactgttcttaggtttgaggcactaaggagtcttcttctagagaacctggatctgataccattgggtacaccatgaaataatggaggggatgcttctgtttagttaggtttctttcaaaatgtggaggtagccttgaaccctctttccttttcctcctagtatcctgtggagcacccagacaaattcctgaagtttggcatgacaccttccaagggagttctgttctatggacctcctggctgtgggaaaactttgttggccaaagccattgctaatgaatgccaggccaacttcatctccatcaagggtcctgagctgctcaccatgtggtttggggagtctgaggccaatgtcagagaaatctttgacaaggtgagctrcaataggctgaactatgtattgatttgcctgagggcaaggaatagaggctgtttttctttaagagggttgaaatattcttagtgctggctgctcaactgcacagtaagtcacttgattttctttctgaggtctgagagacctagtgttattttttttttctctctctctctygagacagggtctggctctgttgcccagrttggagggcagtggtacagtcatggctcactgtaaccttgaaacctgggcttaagcaattctcctacttcagcctcctkagtagctgggactataggcatgcgtcaccacatctggctaattttttattttttgtagagacaaagtctcagtatgttgcccatgctggtttcggatttctggcctcaagtgatcctcccaccttggcctcccaaagtgctgggaatacaggtgtgagccaccacgtttgcctagagacatctagttttgttagtgcttgaatcaatccattcctcctacaggcccgccaagctgccccctgtgtgctattctttgatgagctggattcgattgccaaggctcgtggaggtaacattggagatggtggtggggctgctgaccgagtcatcaaccagatcctgacagaaatggatggcatgtccacaaaaaaaaatgtgttcatcattggcgctaccaaccggcctgacatcattgatcctgccatcctcagacctggccgtcttgatcagctcatctacatcccacttcctgatgagaagtcccgtgttgccatcctcaaggctaacctgcgcaagtccccagttgccaaggcaggtgcaagatcatgggctgtgggagacttgcatgagtcctcaggctggtacggagtgctctttagtttctggacaagattccactggggttagggttggtctaaagggaaggtagaatttttgaggatatcaagataatctagaatcaggaataaaatggggtggccaaagaaggggcaaactgtagttgggagtgctcgggtagcccaaagatctgcgtatctcgagaggagaggctaaatgctaaggtacctctgctgctgcttttaggatgtggacttggagttcctggctaaaatgactaatggcttctctggagctgacctgacagagatttgccagcgtgcttgcaagctggccatccgtgaatccatcgagagtgagattaggcgagaacgagagaggcagacaaacccatcagccatggtgagtctgcatcctttccccagatgtgccaatcatggagagccaggcagcagccaccaccatgccctggagttgagagtagaagctgttggaaagatcatctaactgagaagaattttaatagggcatcaaagataaagaatgctgaggtgaatccattcaatttggaataaggccgagaagagatggtcaggctccattctcagtctgaaccaagctccatgagggaaatcaaagtatgagagtgcagcaaacacagcaaggttttttttgttttttgttttttgttttttttttgagacgaagtctcactctgttgcccagactggagtgcagtggcacgatcttggctcactgcaacttctgcctcccaggttcaagcgattctcctgcctcagcytcccgagtagctgggactacaggcacatgccaccatgtccggctagttttttstattttttttttagtagaaaygtggtttcaccacgttagccaggatggtctcgatctcctgaccttgtgatgtgcccacctcggcctcccaaagtgctgggattacaggcgtgaaccacagagcaaggttttgagctgagatgagactcatatacttatccctgatggttggggaagggatagggtccacagacctcccaaaatgaaaaggcaaattcatgtgtttgtaagttccataaaggtaagatctctgtcatctcacttgttttccactatgtcttgtgttacccttaattaattcattaagttccaaacatgggacttaatgagcaaataaatggctttctttcccttttgaagggtctgtgacatcccttctctctcccataaaagcttaacaactactgatgaactaatcctaggaggtagtcacataagtcacagaaattggcctctcaatggaagagataggttttgagctgggctgtgaagagagtagaatttgaataaagggaataagcagcccaaataatgtgctctagtagtaggattgcaatcattgggaaaccctgggtagatttaagagtatatatgtcactggaagtgagaccgctaggtaggatgtaatccaaatgtggtaagcactgaaagccattggcatttccttttaaagtattaaggtttattaaggtatgatataaatacaataaaattcactctttctatataccatttccatgctttatgacaagtgtgtgtaagttctataactactaccacagttgagacttaaaatttctactatctcaaaaagtttccttagccacttcagtcaacatytcccctccttaagccccatcactgatgtgatttctgtccctacagttttcccttttccagagtgcattgacaagtttttaagcagagcagtgactcaattttaggaagcatggcctagcatcttacctcaggttggattggaagggcaaggagaccaataaactgcagtaatgggaggcctgggatgaaatccaggctgggctttaactagccctagtgatctgtgtttaccaactataggaggtagaagaggatgatccagtgcctgagatccgtcgagatcactttgaagaagccatgcgctttgcgcgccgttctgtcagtgacaatgacattcggaagtatgagatgtttgcccagacccttcagcagagtcggggctttggcagcttcaggtaagttggttgggagcattagacagtgcttaagttactttggggacctacaccaaaagggatgggagtcctaaggaagctagaggggtagttgtggaaatcttacacaggccctgtcctaaccctcttttttggctttgctcttgtacacagattcccttcagggaaccagggtggagctggccccagtcagggcagtggaggcggcacaggtggcagtgtatacacagaagacaatgatgatgacctgtatggctaagtggtggtggccagcgtgcagtgagctggcctgcctggaccttgttccctgggggtgggggcgcttgcccaggagagggaccaggggtgcgcccacagcctgctccattctccagtytgaacagttcagctacagtctgactctggacagggkgtttctgttgcaaaaatacaaaacaaaagcgataaaataaaagcgattttcatttggtaggcggagagtgaattaccaacagggaattgggccttgggcctatgccatttctgttgtagtttggggcagtgcaggggacctgtgtggggtgtgaaccaaggcactactgccacctgccmcagtaaagcatytgcacttgactcaatgctgcccgagccctcccttccccctatccaacctgggtaggtgggtaggggccmcagttgctggatgtttatataragagtaggttgatttattttacatgcttttgagttaatgttggaaaactaatcacaagcagtttytaaaccaaaaaatgacatgttgtaaaaggacaataaacgttgggtcaaaatggagcctgagtcctgggccctgtgcctgcttcttttcctgggaacagccttgggctacccaccactcccaaggcattcttccaaatgtgaaatcctggaagtaagattgcaccttcttcctctcctgatcaacatcggtatgatgtctcctgttgcctcaccctttgtctgcagtatcactggataggactggtggaaagggagcagcctgacagagctccaaatgtggagaatatggcatccctccacctatatttgatgtggacggtaaggctaggcctgcaggatcccttatcctgaccaaagactgtgttggggtgccatttgaaaatcgcagggttgcaaaagaatacaatcttacttgcaggtggatattctctatactctcttttaatgcatctaaaaatcccaaacatcccctggttggtgatcacttacagttgtgtccacctttattttatgtactttgattaaaaaaaaaaaactttttgttaatataaaattttagtattgaatttttttttttttccaaacagaaaatagactatcctcttcaacagtaatcacttagtgcttctagggtcagtacagtgatgccttacccagagagagagtagtgcagagaaaataaattactaaattaaatatatgttgattggctttgggacataatctcaaaagacagtcctgaacaccgtaattttgaataaaatactgtaatctccaaagatcaaaatccctaaagtctaaaattctgaaaatcacaatcccaaaaggtcaaaatcccaaaatacaattctggaagaaatactaaacattcttcgaaaatttacttacatttttaaaagcgtatttatttgagaaacaacacaacagaacgtttcataggccactgcacgataaaatagggaatagtaacatttttgcaagataaacactcaggtataccaatgacagttgcacggatataacggtgatgagcagatgaaacattcataaagaaataggtcaaaaagtgaaatgtataaatgctttgtcactatgcttggtaattgtgggcacctagctttatataactggtcatctgtaatactgtgacagaaaacctaagtcttgatgagatggttcaaaaactgttgcgttaccactgcattgtctcccaaagagacgaggtcttgagaaattttatccttcacaaatgcacgtgtacaaaaaacagatgtctcttcgtttattgaggaactttcaacatttttatgcacacatataatgcttacacacagagtcaacattgcggtcatggagtcaaatttttaatgtccaaggcaccagaagaaaaatctgtcctaggctgggcatggtggctcatgcctgtaatcccagcactttgggatgctgaggcgggcagatcacctgaggtcgggagctcaagaccagcctgaccaaaatggagaaaccccatctctactacaaatacaaaattagccaggcgtggtggcgcttgcctgtactcccagctacttgggaggctgaggcagagaatagcttgaacccgggaggcggaggttgtcgtgagctgagatggagccattgcactccagcctgggcaacaagagcaaaactcaatcttaaaaaagaagaaaaatctatcctacctcttagagaccaatttgccttctgtatttgttctctctgggcccccgcctgttggatggtacccaccaacattgaaggcagatcttccccactcagtccactcagacttacaaactaatccccggaaacaacctcacagacacacccagataatgctttaccaggtttctaaatactccttaatccagtaaaattgacacctaaaattaagtccacaattctgctcattggcaacttggcacccttatgtgtctaaaccatacttaagacaataacaaggtaatacttctgtataacatgatgcaactgtcttgtttacaatgaaaaacatactaatcctttccccagaatttgaaattttattttgtccaggttgtgattttaaggattttgatcttttgggacttcaacatttggggttatggtgtttgggattgtgtccttcaggattatgatcaacactggtattagtcatcctagactttatgctaggcaagaccaggctccgttttggtctacatagataatcttcaaggatgcatgatacttacactggttgactaaactggagcagctctggaactcatgctgtgaaatgggtatttttgcacttttggtatttgttatttcaggaggtttttagggaacaggtggtggttggttacatgaataagttctttagtggtgatttctaagattttggtgcacctgtcatctgagcggtgtacaccgtacccaatgtgtagtcttttatccctcaccgcccccccaccttttccctgagtccccagagtccgttgtatcattcttacgcctttgcattctcatagcttagctcccatgtacgagtgagaacgtatgatgtttggttttccattcctgagtgagttcacttagaataatggtattccagttgctgcaaatgccattatttcgttccttcttatggctgagtagtattccctggatgtatatataccacaatttctttctttttttttttttttttgagatggagtctcccgttgtctcccaggctggagtgcagtggcataatctcagctcactgcaacctctgcctccctagttcaagccgtcctcctgcctcagcctcccatgtagctgggattacaggcacacgccaccacgcccagctagtttttgtatttttagtagagatggggcttcaccatattggccaggctagtcttgaactcctgacctcaggtataccacaattcaatttatttatccactcattgatgggcattcgggctggttccattagttttgcagttgcaaattgtgctgctataaacgtgcgtttacaagtatctttttcatataatgatttcttttcctctgggtagatatccagtagtgggactgctggatcaaatggtagtgctacttttagttctttaaggaatctccacactgttttccatagtggttgtactagtttacattcccaccagcagtgtaaagtgttcctgatcaccacatccacgccaacatcttttattttttgattttttgattatggccattcttacaggagtaaggtgttaccacattgtgggtttgatttgcatttccgtgatcgttggtgatgttgagcattttttaatatgtttgttggccatttgtatatcttcttttgagaattgtctattcatgtccttagagcactttttgatgggactgtttttttcttgctgatttgtttcagttccttgtagatcctggatgttagtcttttgttgggtgtataggttgcaaagattttctcccactccatgggttgtctttttactctgctgactgtttcttttgctgtgcagaagctttttaattaagtcccatctatttatctttgtttttgttgcatttacttttgggttcttgggtcatgaagtctttgcttaagccaatgtctagaagggtttttctgatattctagaatttttatggtttcaggttttagacttaagtctttgaaccatctggagttgatttttttttttttttgagacggagtctccctttgttgcccagcctcagagtactccatctcagctcagcgcaacttctgcctcccgggctcaagtgattctcctgcttcaagcctcccaagtagctgggattgcaggcatgcaccaccacacctctggctaatttttgtatttttagtagagatggggtttcacccatgttggccaggctggtctcaaactcctgacctcagatgatccacccacctcagcctcccaaagtgctgggatttcaggcatgagctgctgcaccaggcctcgagttgatttttgtataaggtaagagatgaggatccagtttcattcttctacatgtgagttgccagttatacctgtatagctgtgaacaaggtgatagctcttttggggcctcaagtttcttagtctgacaaaatgattgaaaaatgctttctaaactgtggaagcctgcatacttaaaccaagaggcaaattgtataggcagtccatctttcccctcacattatacctagaaagaaactggaatgtgatcttaccgtagctgatcactttatatagggtaaacactgcgattagaggttgggtttcagaccaagaatgtggtatcaaatagaggaccagcagtatgccatagaggcaaaaacaaagatggaacaacatatctaatgtcttaaactatgtttatatttggccaggcgcggtggctcacgtctgtaatcccagcactttgggaggctgaggcgggtggatcacgaggtcagaagatcgagaccatcctggctaacacagtgaaaccccgtctacactaaaaatacaaaaaattagctgggtggtggcaggcacctgtagtcccagctactcgggaggctgaggcaggagaatggcatgaacccgggaggcggagcttgcagtgagcctgggcgacagatggagactccgtctcaaaaaaaaaaaaaaaaatcgatctatctatatatatctagatagatcgatctaaggtactgatcctacaaattcccctgaaagttcagtggacacaatgcccgtgaaggatgcaggtcttccatttcagctgaactgtggcaagtgtcaaatggtttgctaacccttgctcagccccacaacccactaggagctttaaaatacttaatataggatttggatttttttttttataaagctactcagataagtgtgaactcacgttcccatgtaaaatggaaattcagaattgcattgtctttggagaccatagtagtgggagagggaaaagtacctttagttccacccttggccagcaggtggtgagttttggactcagaccctgttgacaggtttgagctaaataaagctttggaacagaacagtgacactagtgagaggaatcaaggaagcagcatgtaccttctgactggctgattctcaaccaaatatacagagtagagggaatatgatagagtggaaagagcactggattgagaatttgagcttgacctcagagaacctcatgttaaagccttactatcaggaaacagaagctatcaacaaggcacacagtgttaatggggctgcaaggaaggcaatgccatgtaaaatacggtttctaggccttaaaggaaggtgggaaacttgatgtggagaagtggaggagaacagtttgaggcacaggtcagaaagtacagcacttgctcataaagcttaaagttagactagcaacaagagtcctggggtaaatttggagagatcaggaaccatgttgtgaagaccctcaaatgccaggactgaactttcttacaggtgtgggtcatctggaggattcaggcaagaaagtgacataggcttcagcgttaaataattcaatttatttcttgtggcaaaaaaaaaaaaatccaaataattcatccaacggtttccaagtgtacagtacaatattgtcaatcacatgtacgtggttatgcgtagacactttacattaaataaccttttatttttatagaagcagtaatgtgcattgtagaaatttagaaaaataggccagggcgtggtggctcacactggtaatcccagcattttgggaggccaaggcaagcagatcgctttagcttgggagtttgagaccagactgggcaacttggtaagacctcatctctacaaaaaatacaaaaattagctgggtatggttgtgtgtgctggtagtcctagctacttgggaggctgaggtaggaagatcacttgagctcaggaggtagaggccacagtgaacagtgatcttaccactgcacttcagcctgggtgacagaatgagaccctgtctaagaaagaaattggtaaaaatataagcaaaattaaaaaaatatttccaataaccagaggtcatcactgttttaataactttagtgcatatgtttctggatcttttttgtgtatgtgtacgtgtctatacatgtggtatttttaaacccaaattgagatcatactgcattataactttttcgttttggtcagtatcttttttttttttttttttgagatggagtcttgctgtgttgcccaggctagagtccagtggtgagatctcggctcactgcaagctccacctcttgggttcacgccattctcctgcctcagcctccctagtagctgggactacaggcacccaccaccaagcccggctaatttttttgtatttttggtagagacagggtttcaccatgttagccaggatggtctcgatctgctgacctcgtgatccaccaccgcctcggcctcccaaagtgctgggattacagatgtgagccaccgtgcccggccttg

SEQ ID NO: 7029 - DNA, 68209 bp, Homo sapiens
tgagtttagtgctagagtcagaaaaatagttctcaagaccccgacagacatcagaatcctgtagtgatgcattatttaataaaaagtgctaaggcccctacatagacctaaggaatcaggatctctgagaatggggaagtacccttggtgattttgaggttcatcacagttgcagggcaactaggttagaggaagcagaatctgaggttagcaggttactacatttacatgtgagaatataagagttttatagactaatggcatctgtgttcagcacttgcaaatcagaatttgacttctcatgaagaaataatgacccttccaaaaataagcttgaagataagagaaatgacctttggtagaggaaatgggtaatgtaagggctatagagtcctaaaatacagccccagagcccttacaagcccagaggggccacgtgggtcatacaagaataaagcaacctgggataagggactacagagagagggaggggcttgggaccagctctgcctgtggccactacctgtgggcagtataggcccagggtttttttgtattatttttattcgacaaataaaaaaattgtatatatttatggtatataacatgatgtcttgaattatgtacatattttggaagataattatgtacatattttggaagataattagctaaatcgagctaattacattgggcattccttcacatacttatcattttcttttgtgtgtgtgtggcgagaacacttaaaatctactcttagtaattttcaagtatacaatacattgttattagctatagacatcaagttgtacactagatctcttgaacttattcctcctaactgaaattttgtatcctttgaccaatatctccctaaatcccccaactttgcccccaactagcctctggtaaccactattctactctctgcttttatggattcaaaacttttagattccacatataaacgagatcatgcagtatttgtctttctgtgagtataggcccaatttttaaaatcaagcctgaaaccttacagacattcacatgaaaaaaaacaacaacaaccagttaattaggaccaatgatctctgtgagaatggctaaaaaccaaagctaaatcctcagcaaaaaaacaagagtcttcacccgcatactctgacttcctctcgctctctttttcaagatatctgccctcacaaataaaaagtattcacatttctcatatcttatatttttatagcctcacaaaacacagaggtgaatagaaacacaatgctgcctgacttcattgaaggacaggctatcattaatgaatccaatgtcaaattgtcaaatttactctaattttgccagtttatcccagtccatgccttaacacaacctatagtaagcttgctcactttgctgggctgagtacatctgctgattgaatttgtagtcagatttgctaattcacaaggctggccttgctctaaaggtatgattttttgtttctttgttttctttgtagacggagtctcactctgtcgcccagcctggagtgcagtggcatgatcttggctcactgcaacttccacctcccaggttccagtgattctcctgccgcgacctcccgagtagctgagataacaggcacgccaccacacccagctaatttgtgtattttcagtagagttgggtttttgccatgttggccaggctggtctcaaactcctaatctcaagtgatccatgatccacccaccttggcctcctgaagtgctgggtgacaggtgtgagtcacctgcccagcctaaaggtataatcttatactaaattcactatcatttctacttagtgggactcaggctagttgtcctatataactatgattgccatttctaaatgtctaaagatggggtgactgggctgtacaacagtttatttcaaatcaagaaagcagttgtgatcaaagggaagaaccacctcatttccttccggggaaggtgaagttaccaatcttacaaaagtcaatttctctctgatttgggctttactactcacactgtcacttcaaagacagtaaaggtaggcaagtggactgaagatttgttcctgcttgagactgaattgaagatatttaattggtgttagaagtagaactatataaaaagctaaagactttttttaaagcaaggattttccagaaaataaagaggatttattaaatgttatttttccacttttatgaatatatatatacatacatagcaaaaagaaaactacacactaaggctattgtagtgttgtaccttataaggaagtacaaggtacaacatataaaattatgttgctttttatcgttttaaattattttattatttttcatcacaagtcctaaaattttaatatgtaagttctatgagtaattttttagtaacaagaaaaagtcatatatatatatgtatcccagtacatttaagaaatgctttttttcaatagtaaattataaaaataagtaataaattaaaaaataaataataaaaattatagtaatcccagctcatttaataaatgctctctctataatgtatccaataaaaaatatgagataaaaattatgtggaaatagaaaaaggtttgtgtaacatgcaaaggaacaaaaaacagactatatatagctcaaattaaacatgcaattatgtatatgtgtagacaaggctaagaatttataagtaaaatcaaaattctttacattagtgtggtgagataaagtataaatgtagtttttaaatatttgctttttgtttcacatcatgtggtcattttttctatatttacctatttaaaaataagaaagggatgggttcactgtcctaaatttggtttcaagttgctttttatcaatttcaagttttaaattgtgttattttatttttcatcataagtaaatagtctttagtacctattacaaaacatgtgctcatcaagggacttttggggcccaagataatttgccaaaagcaattaacttcctaggggctttcaagtggggggatttccttacttaggtttcagaccatctcttaagaaacagttattctctcaaactggcagtttactctggtaatctggcacccctaaagcaatgtagtagccttcaaagagattcctttgaaacactgacacttctcctatgtgtcagtataagagtattcagaaggaaattacttgtccagtgtctcaaagagcttactcagagacaacgtccaaattccagaacttctttgcctctaatttgctgctaagggtggtaactgtatttcaggcatgaacattagaggatttttcatcagtctaactatagctggtagtgggggtgctgccatttatcaatttaatttttgcttgcaaacctggccatcatttacaaatttgtgtttttccatcctggttgctaatgtcttaattcatattttatcattttattgtatttgtaagacttctcaagtcctttgtgatgtaaatatggcccattaaaaatgaaaataaacagcccaatatgttcgttaggttggcttaagaaaaattattaaattacaaattaagctacaaaaataaataaatattccattttatgctctttgggttggtttaagaaaaatgattaaattacaaattaaataactgttctttattttccccacaaaactattctgtatgactgcttgtaaatacacagctttattttccaaaggccctctccctttcctttgaccataagataaccattctacaaaatgtaaaggagagcaaactggctgtccagtgattgcctggccaatgtcctaaataatgcaagacaaaacctgttggggcccaataaaataaaaatccatggactcttagaggcttcggaattcaaatgagcctcatggatccacatcccttcaattagcaagctgggatttctgagcgagggactttccaaaacaggctgctcaagtttcttggccaataacagggtcatgcacaataaaaaaaaaaaatgcaacccacagctatttctcaaattaatttgtaaagtaagtttgactctttttctgtctcctttagaaatttgtcaactttttgggatttcaaacttttttattgtaagtgtcggagtaaaaacactcagaaataggaaagagaaaactaacaccaggaaggttgagagaaggaaagagaaagagaagcaaaaggggttaaggatggggatacttgttgactatagttatcaccagagtcagaggactaggggaagaggggaaaagcagaaaacagctccccacccatctatgtccagcccattaatagaattaaaatttgcttctgtattccaagtaattagcactttgcatctattttatttattgctactactaagaaaacataaccgtgaaggcataaaagcaaacattttctgtagacacatgaggtgacacaagagtgttgaaacttctttaaggataaaggcctgatgttaggcatgtcgtgagcgcaaaaccaatttctgtgtaactaaatttaaaagagtcatattagaggggagaaatggaagataaactgcaaaacgtaaacaatgattacttaggtgatagagttatgtctgatctttgtatttgactcatctgcatttataaattttatttaataagccttaatttcctaggccatatatcatatacaaatataagttatacctaacttataggtattataatatgtatatatacataaatgtatgaatatttacatatgcgtgtgtgtgtgtattctttcagaaaagcaaagttttcttcgggctttaaacacgcagcctctggtaaaggtgctattggtacaaaagttcaacaagcatagctccaagctttgacaattttcttacactttactaatactgctgtccaaaaactatgagattttcaaagcagccaacatagcagtggtgcaatggttaataacaagagagagaagagtgtggcctgaggttgtataaatgttttctcaatcttgaatcattaattttctccaaggaagtttctaaagaatcccaaatagtgcacactatttctgaaaggaacaggatttttttttctaatcataaaatggacccagacatctcagcctcttggtgtaatctggatatcagatgcaatcagcgaacagcctgagttttggaattagatctgagttcaatcccatatctcccatttactagctgtgtgatcttggctgaattactgaagctctctgaacctcatttcgccatctgtaaaatggggatgtggttatcttccccactacatggctctcgtgagaatccgcggagatcacatttgtaaacacttctctcgctatgcctggcactttgttggggcccaataaaataaaaatccatggactctcagaggctccggtactcaaatgagcctcctggatccacgtctctttgattagccatctgcaagctggcatttctgagcgagggacttttcaaaacaggctgctcaagtttcttggccaataataggcgccgggttctgtgcggtgggaacgagtaccaccaaccccagcaggagaccaagcagaaatcaccatgggagtgcaagctaagaaagggcaaaagaagaaagagaagggcagaaaaacaaaacaaaatgaaaccactcaggcagcgacttacagtcttaaagagagaattcccggaagggagacaaggcagtttccttttctgtgtgacaataaaaaacggtaaacaagcctccagaagctcattcagcccccatataactttttcgagaaagaaaaggtgccgttcttccgagccctccggcttaaccactgcttcggtgctgacttatttcctacgtctgagaactgccagaaaatgagcaatatctgttctgaaggctgcaggctctctccccgcccccgcggggcggcgcgcactcacccacccgcgccggagcggacctttggcttggcttgtcagggcttgtccaggagttccgctcctctctccaaccggggtccccctccagcgaccctaaagcttcccagacttccgcttcaattcctgtccgccccccacgcccacctcaacgtggagcgcagtggtctccgaggagcgccggagctgccccgcctgcccagcgggatcagcacttcgcatcaaggcccaagaaaagcaagtcctccagcgttctgagcacccgggcctgagggaaggtcctaacagcccccgggagccagtctccaacgcctcccgcagcagcccgccgctcccaggtgcccgcgtgcgccgctgccgccgcaatcccgcacgcgtcccgcgcccgccccactttgcctatccccgggactaagacggggtaagcctccacccgggcaggagagggctcaccagaggtaggagggtccagatgcccagcatggttgttgagcaatcctccgaagtgaaagagctyccccaactccgtactgagcgggtccaccaacccgcgggagaagaggcagctccgcctgggyagccagggctggcctcagggtgtgttccgtgccagtgcccgcccctgaggctccagccaagtcactcgtaaaccgcttccctcactccccagaagcgtctttgaacacctgtgtgtcactcttgcgcgagatcagagacgagctcacgaaaagccccggtggtcaggaggatgggaaggaagcctcgctggggaacgcccgggttggggagggctccattgattcagcaacttggcctgcgcgcgggtagggagggggagaagtcagggtgaggaaggagtcagggttcgttgcacaaatgggcattcctgtcccggggcgttcctgcagtggctggcatgctcacttcaggtgaggacctcgagagccggcctcctgccctttctaaaggcttctgctgtagttcaacctgggaagttggggaggtcttgaaggagaatggagctcagagcgcagaggtcctgcctgggtacaggagccttggctaattgctggagtcactcagagaaagacttgcggggcatttgactgggctgtccatgttgtggctgcaacatgagaggctcacagacgttyctggaatggacagttaaccrtatgaaaaagtacagatgttgcgccatagggctctgaaaagggagggccccttagtttttatttctcaagaggaaaacaaagctaacaacttaagccaaatcgcatagccccagctatattaaacattcacaattacttcctgtccttcgttactcattatttcctggccaattttctttaaaaaaaaatcttgtaattctttcgtgctctggtgaacactgttcaaagtcactattgctttggaacggtagatagctcttaggtagtttagcatgaattttacagaaggtatgtttggataatgacatcattactgaacctgaatttggatgcagttccagactggacacactaaaggtttcagtattcctttggcatcgtccaccaagctctgcacctcactctgcaacctctctcccttcccaattagattcaacccattaataacacattaataaccctttgcttagcccactgttcatccttcaggcttcctctcagttgacattttcttctggagcctgtttgggccctcaaatctaggttaggttaccctcctgagggctttccatcaccctgtgttttgcatctgtcactgcacttaccaccagtcttgtaggtgttgataggcttgtctctgttccacctttcagtagactgttagtgccatgaggaagaccctgggygtgccagccttgtgcacacactctgagcatctaatagacacaaaaagaagtgggataaggaggatggtatatgggcattctctgtattatctctgcaaattttttgaaatcctaaaactattccaaaatgaaaagttcatttaaataaaaaaatgtaaaaagaaggaaggaaaaggggtgtgagggaaggaaaggagaggtaagggaagaaggaatggaaggagggaagagagaaaaaaaggggaaaggacaattgacaaaatcagtatctcttgagtgtgaattataagccagcaactcacatatgtggatcttccttacttaatacttatcattatagcccagtgagatgagtgattattaaacttactttacaaataaaaaaatgtagccaaaaaagcttaagcaacattggcaaagatggttagttaataaatagcagagtcaggaattaaacttagatattcttgctcccaaggtcctgctctttctatgccatacccccttcccctaccctctrcccacgtacgtctaattatcctcaagttcaaggagataggaatatgtgctttgtggggagacatatgtttcatggtcaaataatcttagaaaattctgggttactttaayttgaaaactttctkaatccaaaacttctcagrgcccttagtatgctaatgtcaaagggttgggtaattatatatactgttccccaaacttctttgcctttggaatcctttgaagaatctattgaatgaacacctaatgaatgctggtgttctggggaaaacagtttgggcatctctaaaggttatttttattttaccagcatattcctgagagtcctcaggccttcaagggcaaagaaataaaattttaataatagaatttcaggcactccaacagatgttggagatrttttggacaaccatccttattcaaaccataccatataagttaaagcttctactcaaaagatatcctggtttctgaacattctgaataacacttaaacaagaatcttgactatgtaaaaaaacaggaagagtwaagatwaaaaamamaaaaaaaaaaaaaaacttctacatctttttaccactaaracttttgttcttttcccctttggtcctaatgtttaaaaaatgttgtcaaccaaattgtttttactaaattgcaataagttgattttaataactcccagctatagtgtatatccatgactgtttatcctgcctttctccttcttcttccttctggtaatagtacttccaagttgtctttaraaaaactgtccctctcccctcttcttaactatttgatgtgagtggttcttttagtcagggttctctagagaaatagaaccaagagaatgaataaatggaaagatagataggagttggctcacrtgattgtagaggctggcaagtccaaaactttagcattggccaacaggctggagacccatgaaaaagttatagttcaagtccaaaggccgtctgctggcataattctcactcactcagtggaagtcagtctttttttttttcttttttaaggccttcaactaactggataaggcctattgacattatagaaagcaaatgttttactcaaagtgtaaagatttaaatgttaatcccatccaaaacattgctttacagaaacatctaagatagtgtttgactaaatagccaagtgccatggcctagctaatttgatacataaaattaaccatcacagtggcattggtaccaatcccagggcttgggtatatgtgtaggtggagggaggtagtgggtgggaaatgtgacttggcttaagccaatcagcacatcacattcagttggagtagattttgggatctttactggaaacactgggacacaaaccctttctttttcattggatttgaagtagaaatatgtgagatgtgaaactgatgtggttggttgtgaagggagcttgtggccctgccagagctgaaaacagtcaactcatgctgagaggaaaccacactgagaggaaaccatgctgaaagatcaaggttggtagagctatccaagttctggatgcatttggttctkaaattgaaccctggaccacccaaagttacccaactctacaaattyttagtttctgcttaagctagattcttacaactgaaaaaatcttaactgataaattatcagaactttgatcagtataataattcttttgttacaaaagttaattgttacaaattagctattctagtttcaagctcaagtaaagataattgcttaaacaattctgtagactgctatctagggatattacttcttctaccaaagaatttttctgtcactagagggcgtcagagcccacagtggccaagtgacaaagtctattaataattatttctaccaattaatagaaatatgtatgggttcttgggaaaggaagagagaggacggagatcttagatttggataggtaatctgtgaatctaatcatatagacattgtcacctcctggagaacatattatttcctacaggattaaagaaatgacatatgcaaakcacctagtacacacaataaatactaatttttamttttacattgcttttcctaaatgaagtgacttcacaagacaaattgataatttgggggtcacagttcagatgaaaaaaagtaagttaaatggcttacaaccacttttcctgtactacttccttcctycactacttccttcctatacttcttccttcctgcactacttccttcctgtaccacttccttcctgtaccacttccttcctgcactacttccttcctgcactacttccttcctgtattacttcctttctgtactacttcctttctgtactacttccatgctcacattcctgaagsctaagaaaagtgtcctaaagcctaactgaccagggctggaaaacttggccaccaagatatgcagcaaattattaagtctcctaatttttcccactatgaaaactggtatactaacctacctcttgagcartgactgaaaaagacaatgcattaaagaatgtttagactgtggcaactaaaaagcagacagcaattgggttagtagggtgaaaacatctgttctgtgggccctggcttcttaatccaattgagtacccctcccctgacatttttgcatatggtggtcccctgaaaacacagatattctatgaaaacaaacatgagaagcatgcctaccccctgggtgttaagaactgacacaaggaaagatagggaccacttttcaagagatgttgatttgggggcagataaaatttcatcctgagtgggcttagcttaaggcaatgtttcttcaacttcaatctattttgccatttctgtagtctacttgtatatactaaatatatatttaactaataatttatttttaagtcaacttattttgttccctaagtcattttgtttttaaaataaaacattacattataaccataaatggaaaatcagcattccttgccaaaaatagaaggtatccataaaaataaatatgccactattgaaacaaaatatttgcctgcatgccaataaaaattgtttcccaaactactagtggcaagggcattatacttctggaaaggttggcttaaggcatggcagcgctttctctctactttagacttcctccctgcccccaaacaacctccagagaaaagactagctagtgtgggcctcaggccctcctcatgggcctggaagggaggtgactggaaggaacaagagacatcagaacagcatgagggaggggcagtcattgtctcccaagcccatctagtgccagggagtgggatgggggtgggggactctttaccagggcaccagcctttccctgttagaaaaggctgaggggacagcttgagggagataatggatgggcagggaggactacagggagtcctgcagagatagaaagagaatgtggaatgggatgttggaggagaatgggcaggggaggagccccagagcacttgggtagaaaggagacataggtggttttctgcagaaggcaatcttagtcgactaatacaatagtggtattaacatctagttcaactgagaaaggacaatggggagaaagagttttgatttggataatctgtgcatatgagcatatagacattttcctctccctgagaacacccccaaattagcaacttgtcctatgaaggacagagtccctagatataaatcctagttcagttacttcactagatgtgagaagctgtgcataatatttaacccctctcagcatcagttttctcacctggtaaacataagtctttccaacagtaatgatatgcccagatagattctgggagataaacttggattttgttattttatttattttattattttgttgtagcaatttgccaatggccccctaaagaccatcaccaacgccttttataggtggcagttgatataggccctgcctatattaccaactaaatgtcattttatttacctatactgctttcctcctcactaggctagagagcataagcactgcctgcagcctaacatcttggcttctccatgaagaataccatattttttaaactttccagaaaataactgaaaaggaatcatcagatcaggctctcccctcccatggtctcccattattgcctctgatcaggtctgaaggtgagaagatgtctctctctctttctctcactctagctcttgctctccctttcactctgtctcttcctatatgacttggccatttagacaggcccagtggtttcatgaataactaaacataagaagtcaagagaggcctggctcagagagcatggaccacatcagccttttgaagttcccttagtgtattaaagcaaaacaaaaatcaacacaatattgaaccagtttkcaaacactgggatatcttatgttttcatatagcaaatagatgcatttaatacttagaacttaaatgcagaatcacatttggtgctagtgtcatttgccacttgacatatgacactagtgtgctactatcatttaaggcccttcatgactgtggggtgtaatccattcctactcactcttaatagattctgacctatacaggcagaaaggtagtrtgggagagacctctgggaccataagatcaacacctcccactttagactcttctctacaacagccctaggagactacaccagccttagcttgactccttccagcactggctcctactatttctcaaggcaatttattacatatcagaacactttgcagttgttagaaattctcccgatgttataacttcctatagtttaacaagtgtttgctcaacatccactatacaaagaacactacttataaacagaactagaatagctctgtgaaaaaggaatgatagtaaccctcccctcacctgaggtaggaagaggcattttaccatctgaaacctccccacaaactctacacaaacctgcatgcatctaaagagttttttgtccaggcaacaaggataactaggcagcctaagtctctgatcacagtaaactgagggagaaattgaggcctttatcagcctttgcactgaggaaagacactaagcaggcattcctccacctggctttgaaatccccttggaatttccaagtcattcaatgggtttatcaaagttctttctgaaatttcttcaaacttatttttatttaaaccacacaaatatgttgaaaggaatggtttaaagggacagacatttaaaaataaacaaaaataagatatcagtaatatctaatgcttatawaatgtccagaacatttgtgtgtgtgtgtgtgtgtgtgttttttttttttttttttttttttttttgcataacctgttaacttatctaaaccttacaactccctgtaaagtaggtcctgttaccatcctattttatagaaaagaaacttggaaagacttgcccaaagtcacacagttactaggtaacagaagtgaacttccaaagcctatgctgaatccatttcctctttagttacctcagtggccttatcatcaagatgtaaactccctaagtaagtacaaagccttcttgttttgttgttctgttgaacacatggtttccggttgattaaaaccatactcttgtcatattattttcttaaattccgggtcatattgactaagatcataatacagtgagataagggaactctttcttgcactgggtaagtctgctaagtaagaatttttrctgtttatgttcactcctctaagaatcatagctcacatagccatgcaaattggattgaaataaagataatctaattaagacagtgtggccataactccacactctaactcagtgcatttcaaacctcaatatggatataaactacctgtcaatattattaagattaagattctgattcggtaggtctaagtatgaggttatgaatttctcaccagctcccatgtgatgttgatgccacgttctggaaaggacacatgaagtagcaagagtctttgctcagggaaaccactcatcagttcggttgtttacctcaaacagataaggaccaattaaccccacttttaccactttggccagttatattattattacagcatttctttagtggtagtagatgggaaatgtagggaaatcaacaaattcagtaatctcattataaacatatttgtatccagtctccatttagcttcatattacactgcttaggctgaatttttacttagcagaaacaagtcttacttgactacataaatacattttcctatcaagaaaaagaaaaaaaaacttagttcattttcaaagacactgagcttttatttctgtgaacagcaagaaaactggctagaagcctgctgactccctcagccaatcaggataatgtgaccataaatgtccatgaattcccccctcagtgaatctctgccttttttatttctgtcgtgggacatgtatcttacagttctgtaccacatattctgccatttatgtcttcctttcctcatttcaaaaaaaaaaagaaaaaaacacatttaagctcggtgagatctcttaccaaataatccattgtcttttatgttaaaagctgttaacttcatacacatgcaacttttaattgcttcttaatgataatacctcttcatttagatcacttagtatgagccaggtaccatttagtgggttttataaatatgatctcattcaatgctcataaaaatcttgggaggtaggtcttcttattgtgtgcacaatataggtgaaacaaacatgggcccaagcacttgaggatcttgcagtagtcacccaaccagtaagctgtagagctggggtttgaaccaaagcaattgcttctcgcatataacaacatactgccttcttgaactaacacataccagttaatcaagcactcactatgtgttagacccttttatatatactaacttatttaattctcatacccacacctacagggaaagaataactttcctgattcacatagaggtaactcgatcaagttcatgtgtcaagtaaaggtatcaagatttgcttgactctaaagcctgggctctttgcacagtatcatgataatgcctgtctttttagtgaatgggacggtttgcctcattgctgtttttcatggaaagcccatctgaaacctttacatacccacgagcacagactgaaacacgtagtatctgggactgggactaaattactttgcccaatcttttatctaccgtttcccccatccagcctctctctccctccctacagtgttcccttcccaggatatgatgcgtctcccactctgcccaccccactgcttgtggyactgttaacaaagcagctgttggattgaattgggaaatgtccctgttttgaccttggttcttcctctgtcctaggatcatacctcttcaatttgccttcctttccacggatactagtctagacctcacccaaaatgaaatttactatcaacttttcctggtgtgaatatagttaaaaagtataaatcacgacgatggaagataaagcaatggccagttctttaaaaaaaaaaaagtcatttctctcttaacccgatggttaataagtggctaatatttatcaagggtttaactgcacaggaaaagtgctttatgcacacaatgtctcatttgatcctcacctaatcttaacatctaatattatcctcattttacagattaagaaacataggttaggtgagtttaactaatttgcacacagctagtatgtggcagagctcgagttaggacacaggtctggaggctccacactgaacaccctgtggactggccccgctctctcttggatattgctgggcctgccctttgcttgtgctgacttcctcgcagttggcctccccatgccctgttcctactctgtcattcaaacatcccctctggaaggaccctattcctccatagtccaaatcccacttttcatataaggcaaaccaaagcctcctctgactcactttatccctttgtgacctttccaaatttagaactttctcagcacttttgaggagggagtgaaactgatttggcatttggagtctgggaaaattatctctctctttttaaatttacatatcagataaatccagattcatttggaattgagctatctcattctttcttatcattgccttgtaactgtacttgactttatatggcttgagtctcattcctaatcagaatgcaacttgctccagaggggggacattttggccactttctttgaatggaggctttgagcttaagtctaagatcccaacaattttccttaactaaacgaatacttacgagtacctactttgtaccatggactgtgttaggcctcagggaatagcagtaggcaggataagaacattccttgccttcctggactctacagattactggggatgacaaattagagtaattataagcatcaggcctggcctctctttgcctgtgaaatgcgtctctcttttggctcaccagacaccacagttctggctcttatttatccctggctgttgcttccctgtcacctccactgtggttatgttcagcgtcctgatgcttgctaatgtgctctcctcagtcctcaggtcccctagcttcaaagaaggcctgaagtgtcaaccatcacctcttcccagatgctcttcaaatctatacctcatgccctgacttcttagttgtacatttaaagtgcattatgtttaattcctgctcatgttccactcaccaccttgaattcttatcgtgcctaaaactgaactatttcatttctgtccagaccagaagggtgggaaaagtagaagtggtgaacaaaacttaaaaattaataaatgaaataaaatttcaagtggaaagaagtccactttatctttcggctcagctggccatcttctgaaactacagactttgcaaattagcgttgcctttttctgcatctgtcaagctccataaatagcttggaagctctttgaacgtaagaactatatcttctattattccattttgccaggatctaccccaaagcctttgtaggtgctttacacatgtgtgaggaggtgtgtggtgaggacacaggcactagaaatgacctttgctgttgctctctggatcctcctggcatttgattagagagtcaggactaaacaaatggctagcaaattatacagtcaagcacatgtaaccttttctgatcgaattgagtttagattttgtcctgatttttgataggaggatcaaaaccatggcatttatgctgttctcgccccatctctcaggttatgtagacttgttaaaaaaaaaaagkcatcattaacaattaaaagagagggagagtgagagagaacagccctagtgtgagactctcacattctctttccccatacttcattagggttattgctgcctacacttattactgtttaaaatcatcccaagatgagtagcctacattttaagggttcctgacaattatttggccagactctcatctgtcctgaatgctggcatcttctccttgtgaacgtctctctttgaagtcagcaggaatctggtctgtggtgagccacaagtcttcccttcctaggagccaaggctggcaaggcaccctgcggcagagccgggaaactcgctgacctcatttttttttttctgcttttttgtctcagtactcactttcttcccttccttatctctcctccccagatccctacgctcatacacaacatcataacccattaaaaccagcttagtagaagctaaagaatctataattttaattgtacttaatttttatccattttgttttcagtgtttcaggcagtggacagtgtttttaaacataaaaaggttttctgagctttcagttttctgatttataaaacaaatattaacagaataaactttatatgcttattaggaggatgaaaggaggtaattcatagaaaagatgctatgcagtgccagaaacagtaaattcttgatgaatattagttcctattaataataataatataataataataatagagaagagatcaaattcaaggacagaaagaataaggaaggttgcttctaatagcttcaggtgtcatagaaggctttttggagaaattaccattagacgtggaacaatttagcatgaatttgtagaagagaggattcattttaataaactccccctctcagggtgacccagacacctagacatcttcagttccctgaagtagggtgagctggagccgtggtgcaaatgaactgagcctggctcatgactagacccatctctcagcatgagcctgactggttgtcacttctttccattgagattggctttcaatagaacagaatcttttctctctcttaccactttccaacaggtcagagcaggggtgatgaaaggctgagcagagtacaacaaatgtattcacagttatgttttctcaacttcacccacttatgtgaaaaggacagtcaagagcttatcttaaattttatttatttatttatttattttttattatactttaagttttagggtacatgtgcacattatgcaggttagttacatatgtatacatgtgccatgctggtgcgctgcacccactaactcgtcatctagcattaggtatatctcccgatgctatccctcccccctccccccaccccacaacagtccccagagtgtgatattccccttccagtgtccatgtgatctcattgttcaattcccacctatgagtgagaatatgcggtgtttggttttttgttcttgcgatagtttactgagaatgatgatttccaatttcatccatgtccctacaaaggacatgaactcatcattttttatggctgcatagtattccatggtgtatatgtgccacattttcttaatccagtctatcattgttggacatttgggttggttccaagtctttgctattgtgaataatgctgcaataaacatacgtgtgcatgtgtctttatagcagcatgatttatagtcctttgggtatatacccagtaatgggatggctgggtcaaatggtatttccagttctagatccctgaggaatcgccacactgacttccacaatggttgaactagtttacagtcccaccaacagtgtaaaagtgttcctatttctccacatcctctccagcacctgttgtttcctgactttttaatgattgccattctaactggtgtgagatggtatctcattgtggttttcatttgcatttctctgatggccagtgatgatgagcattttttcatgtgttttttggctgcataaatgtcttcttttgagaagtgtctgttcatgtcctttgcccactttttgatggggctgtttgtttttttcttgtaaatttgtttgagttcattgtagattctggatattagccctttgtcagatgagtaggttgaacgccgcatatctacaactatctgatctttgacaaacctgagaaaaacaagcaatggggaaaggattccctatttaataaatggtgctgggaaaactggctagccatatgtagaaagctgaaactggatcccttccttacaccttatacaaaaatcaattcaagatggattaaagacttaaatgttagacctaaaaccataaaaaccctagaagaaaacctaggcattaccattcaggacataggcatgggcaaggacttcatgtctaaaacaccaaaagcaatggcaacaaaagccaaaattgacaaatgggatctaattaaactamagagcttctgcacagcaaaagaaactaccatcagagtgaacaggcaacctacaaaatgggagaaaattatcttaaattttttaacaattcagtccacacaagcattaattcattagatgtcaaaatagcagaaaataagcttctcctttgggatatgtaggcatacattttgctgctaatctaaaggaatctggggaatgtgggcaaaaattaccttcaccagatataaggatctcaagcacaatgcaacttctctacaaacatcagcattggtttgagcctctaagaagctctaataatatttaatgaaagaattattttattcaattttcaaacttcaactctacccagcacctggacctttacatttggttttatttagtaaaaatactttcaagaaattctgttcaacactttatttctatcatagcttcttaattatgaatacaattttgttaatttaaaattataatcatctgtctcaatagttggtgtgtattttaaaataacacaatatcattgaattgctgctgattatgttcagggtacattagagatatgttagtcattttcaatttagtggaaaggaagtgggtttttgctatagaactacaaaattttagggtcaaaacacttgaattagttcagtacaatggaaggactattcaaatgtaattaatgtactaattttctccattttccgtgatcctcataatgaaccaatatattttccttggcctatcaatccttttgttagagactaaatagtttccccttgtttactctggcatttgtgataatatcaatatattaattatatgttatctattataccaaccttgtccaacccacggcccgtgggccacatgcagcccaggatggctttgaatgcagcccaacacgaattcgtaaactttcttaaaacattatgagatttttggcgattttttttttagctcatcagctatagttagtgttagtgtattttatgtgtggcccaagacaattcttagtcttccaatgtggcccagggaagctaaaagattggacacccctgtattacacattatattatcactataaytaattgataatagtaatgtatggttgggtcctaatcgggatgggacataagattcagtggctgggtcatttgaccttgcctcaaacttgaaagagacatcagattttggtgacaattaatttgtcagccaaatgaagaggaaagaaatttggcttctattaatctcactgcatagtattatggtataacacaatgggagtagtactgtatactgatagtgcactaaaaactccccgaatctaagcatagaggacagattcaatggaggtgagcctcaaaagctcaagtcaccaagtcacctcctgctctgtcaagtatctcctggtttgtggcctttctttaattctcgaatatttattaagaggccaatatgtgccaggcactgttttatgacctggaggcgcagcattgaccaacattgaaaaaaaaaaatcctactctcatggaacttacgatccagtggaaaagtagtcagggccccattttcctaagcccagagcccacacatttatttgctgatagttccctttgctctccatgccccttcctgtaccatctctactgttccacctgattctttacgtattggagaactgggaaagcaggaatgacaggaaaattgttattatgtctagtctgtaataagaaaaaaacaaacactttcaggtactttcagtttttaaaaagtatgacagtactattgtccttctcaactaatttttctgcatggagctaatacctcattcaaatgcacacgctgctctgtacacggtttcttccgcctctgatttatctccttccttttgtataaatttagcaatcttttcctcacaaaccttaaaatagccaagcattcaaagatttggaaaatgtagaggcagtatcattgtttgctcttgcttgagagtttttttttttttaatcrttgacagcattctggtttcactttcacttcagtgggtaatttaatgtgatactaatacaacctgtaataacagttaaatgcatggagcacgaactacatgctagaaattacagtaaacaatttgcatcatctaactgaatttccaaaataaacttattattttcctcactttaaatatgccttttgagaggtgaagtaaatggcccagagtcacaagccagcaagtggctgatctgtacagtattacagtgatctagcatttaggatttagagcgctatatagtactatagtgatctcagctcatctaactgcagggccacgttccacatattttttggccccacaatattagagcattaatcaggatcccaaaaatgcttcctaattagagtgaaagagatttattttatcaaacaaagtcttaagtgaactatgccaaagtcaatgatctggtggaattcacagaaatgtttgtattacttaataaccattaactagccaggcatggtggctcatgcctataatctcagcactttgggaagctgagatgggaggacagcttgaggccaggagttcaagatcagcctggacaatatagtgagaccttgttactattaaaataaataaataaataactgatctcactggctacaagaggaattcattttttaaaagaccaccaacatttaataaattgcattctctagcaattgcttttttcatatttttcaactaattgggtaggaatttagtttcaatatcacttttaatacataaagtaccaatttgaagtgcaaaatctttagacatctattttggggaaaatgtcaagaacatttttctatttggcattggttcaccaaattgagtccttgagagcctgatttttttttttttcaccaaagagtcaagccaaatgaaattccacccacgttagtcagggtatatttctgggtcctctcaatgtctggtttagttctagttttaaaatttaaraaraatttaaagctctggagacatgtatttatgtaaatacacaaaacagaggcagggcacagtggctcatgtctgtaatcccagcactttgagaggtccaggcgggtagatcatcagaggtcaggaattcgagaccaccctggccaacagggtaaaaccccatctctactaaaaatacaaaaattagctgggcgtggtggtgcacgcctgtagtcctcgctactcgggaggctgaggcatgagaatcgcttgaacctgggaggtggaggttgcagtgagctgagactgtgccactgcactccagcctgggcgacagagygagactctgtctcataacaaaaacacacaagacatagaggtaaatatttatgtatgcaaatatatatacctgttaatatttggcctggcaaaaacagtttgctagatgatttttttggaaaaggctttggttcagtagcagaaatgaatatgggtgttattcaaatgtctgtaaattaatgagggccctttgaggttagttcagcttaagcattttgaatctgmagaatgaatggtctatgttaaagatgcttttggggaatgggaagtggtgacaaacacaacattgcatcccaaacagagccaaggtgacagggtacctggcctcacatccatgagtacttgagaaactgataatcaagatgaaatgacgtgtttttctttagaaaggaaaggcagagataatggctaacaagaaagagttgttttcatcgggaactctatgaaagattttcacaattgttcgcctggcaattcttggattacctaatcaccttctccattccacttcttgtctctctcagagctgttcagatggtgatgatgacctagagatccccaagagtgggaatccatttggtccatagccaattttcaggggctccatctccaaagcagtgccagaaattatcccagaaaggaatttctgaatctataggtcacacagaagaaagggaaggtgagaggattgggaggcaaggcccaggaaaaattaaaatagaaaaataaaacatagaagttaaaattattttttgaaagactaagtacttacaaggttagcttttaaaataaaacaactacaaactctaaatggtttcaattttgctttagtattctgcagtgtttcttttcaatagattggccctcacatataaacacatacacatacacaaacacaatctttatatttgccatctaaaacacctagtatcctacaaaattacctgtaagagtctcagttaagtagacactggaaaaacaatcagaaacagattaaaagataaatggggtctcactttgatagcacatatagttaactagaaacaacgcagagaaaaagtaaaaatcataccattgtatgaggcttataatatacattataatgggatgaacaagggtaaaatcgatttatacatttgtaaggttacagtaatttccatgaagtagatggtgagtatttaaggatgtatattgtaatccctagagcaactttgtaaaaataatgccaaaagatatagttaaaaagctaatagataaattacaatgaaatttagaaaaaaaattaaacaatataaaagaaggcaggagagaagaaagagaacaacaaaaaaggcaaaaaataaaaatagatcaaagaacagtaaatctaaatcgaactgtatcaaatattacattaaatattaacagactaaaaataaaaggagatcaatttttttcctaaactccctgttctcaaaactccttttgtgacatcaattactattacaaataacagttaccaatcccttaatttcctgctgcctgaagacaagacaatagctgaatttacactcctctccccttaatcgttagcaattgaggaccttgtttcatttcattttaaatggccagttaataagtagtccctggctgggcgtggtggctcatgcctgtaatctcagcactttgggaggctgaggcgggtggatcacaaggtcaagagattgagaccatcctggccaacatggtgaaaccctgtctctactaaaaatacaaaaattaactgggcgtggtggtgtgagcctgtagtcccagctccttaggagactgaagcaggagaatagcatgaactggggaggcagaagttgcagtgagctgagatcacgcctctgcactccagcctggcgacagagcaagactccatctaaaaaaaaaaaaaaaagtagtccccttggacagcagccttctagcgcttcagaaactataaatttggcttaaataaactgttaggcaaactgtagatctgctcaccatcagagcatcaccctctgaacaccaattcttggctgctttctagggagaaaatatgcaggaaggacaaaaagagggatattgcacaaattgctaaagccattacatgctaggactcctgtttgtattatagtcttacacgtgtcctattagttacaaaaagatagcaacaaaaaagagcagcaaaagaactcttaaagtggttggcattatgacttttattataagaaaaaaaggcaaatccaaatcatctaaaaaaggaaggagttagtcaaatgacaaaatctggatctaaacctgtatcagatgggatttgaggaaatatgtctgccactcattcttagcttattctgtttacccaaacactcagatcctaacttgaatttaaatgggccgtgttgccaaagactgcaacagaatcagatggctccatgccattggcaccctttacaaaacacaaaacatactgcatgaagttttctcattttgtgtttgtgtttgtccttagctgtacttattttatcaagttaactctttgaggatgaaaaacagatacatcatctgttacttcacacacttagagatgagatactcatttaagtagcagaagttgtgaactttaggaaaagtgaggtcaagaaaaatatctgccttttccagctcaaatgcttggtacaaactttttctgcccaaatctacaattggctaagcattgcttgaaaatcagacgccattattcgggaaaatgtctattatttgtgccatctgtagatcatgacagaagacaaggtttgcctttacatcttagtattattttatttattgcctttgggcggaggaatctgaatgtcagacatgagttcagacattatttttgtcagtttttggatgtataaatattaagtggggaattctttatatatatatacacacacacacacacacacacttttttattatactttaagttctagggtacatgtgcacaacgtgcaggtttgttacatatgtatacacgtgccatgttggtgtgctgtacccattaacttgtcatttacattaggtatatctcctaatgctatccctccccgctctccccaccccacaacaggccccggtgtgtgatgttcctcttcctgtgtccaagtgttctcattgttcaattcccaaccatcattctcagcaaactattgtaaggataaatggggaattctaatgctgtgccaactgtctaatttctggactatctaaatgcaattttagtattctggttgaatgtccttcttcctacctcctagcattcactacctctctgagttgtgagtagctagaaccagacctattcaggtagtctcagcactaactgaacrccctcctcaacaagcaggggcctaagctcctatgaagctggataaaagtgaaatggaagtcagaaaagggcacagcaatttgctgcattcaaaaggaactcagcgaagaggacagacaatcaggtcaataagactttactggaatttctgggtggttctggaaggtggaatacaagggagagattgaagagctgtttcttgagatggaaacgtccaaagacctccttaaacagggtagtgactttgcctatgagtagagaaaaagttggtaggtgccttgatccargtacagtaaaacctttctttaggtatcatatcctgaattttaacattaagtataagggatttatggactgcttgaatattagaaacattgttctatctctaaaacccatctaaattcatttttctttccagttatcagtgtggttacatctgacgtctgccatgagcaattttttccaaaaagtgtttattttatgaagagttagaggcattcattcattcgttcattcattcattcaacataaaggccttggcagagtttacaatttaacaacatccttgcaagagatatttactgagcccctcctatcccttargcactgtgctagatactgggatatgatggtgaacaatcagtgtcccttccctaggctggtgaggaagatgtatacgaatgaaataattgtatcaaatgtattactacaaactacagtaagtactatgaaggaaagatagagtgctattaacgtatatgaaaagatatagttgggaggatgatatggtggtcagaggaggtttctttccttgagaaactggtcatcccagagagccagaaacaatttgagtaggagtaaaccagccaaaaaaaaaagtgatcttgatgctgcaaacataaaactgatctaaaaaatagtctgtttgaaaaatgatcatgacagatggagcctaaagctctgaaagtctcctttgcacaacagagactatgccaatgggggcatgctttctttggatttgtaggctttttcaaatagagacatcaaaagcagagtgaccattcagccttacaagcatgagtttgggcacagctgatgccctaaggcatagcagaatgtggaaatactcacttcttccaaagatttttttttgatggaaaattgacactaaagagctttttttgggaaatgaaagaaatggcaaggtaatttggacattacggaaatctatgctgatcctatgggaataacaatgtgttccaatttcccccattctcactgcttaagattatacttcttgcctcaataatcaagatcctacttataaaagtgtttgtcttgagtattatttaataagagagaaaaaaacacaaagttgtaatacaacccagataacagctttccagacccttccttcttatttaggaggaccttctacctaaacacatttttcatctctgtgtagtattgcggggtgggggttggggggagacatcaaataatgtaatgttttatgaataccaaacctacacaaagttctgaaagacagaaacttttccaattctagatcctccacatctactttccaagaagaaggctttaaaagggatgaataaggtataagggacctgcagaatctctttaacatgcacacattatggtactagaaaagaggacagaaatgcctatatcaacagctgcctctaacatttttagcagagcctcattccaggccagccagtgagaattaaggaggaaaaggctttcagtgattcagaagctgccttcccttataaagtcaaggttctctggagtggtattttgactacttttggaggagggattgcctacatccacttctctaaagaagccagaattttctcttcctctctaccaaaaaagtactctaccgacaaacatgtgtgcaaaatgcactgtgcctgcattccttcaggtcagcagagtgcccgtgttaccaacattcacagctggttttgggataaagttattgttgtcatggattcaggaaaacaaacatgttaattgctttatgagttttaaacccaagatgatcaaaaaccctgcatatagatttgtccagctcccatcgctgaaaggaatcacctgtattacatatgctggctacaaaataagaacattcattaaatgcatagataggaccactcaaaacataattaggtgtctggttagtcaaatattctggataaatgaggatgtctatacgtaacatttctgagttaccagtttttagcgatttaaatacaaattaaatatgcaaaatacaagttaaatacatataactgcaaacacagaaactactgaattgaatagtttacttctgcagaaatgtcaagaccatgacaacacaccttaaggtcacaagtagaaaactctaattactgttatatgttacagaaaaaaaaaaggacttttatctggttactatagttgtttgatttctggataagccataaacttgaagtatgataatcatactaacaaactcttgagatatcattcatgtaaaattcaaattcatatttatttcaagtagtttctccagaggaagaaagggaacaactttgccaaccattttcctgttttaaatttagggatgattgaaatgagttctggtgtgtgagccatcatttattctgaacctgctgatgtaattcacagattcagcccattttccttgtattggtctttaccagacatggcttacagtaacaaaatcatgaaacaaaatattctattttatatgttcatcttctgtctttgaaagttcaagaaacaagggctctgatacctgatttggttagtgtttgaaggttgccaagctgcgttgcakgtaataatttgggcttaggtaacgtggattgtcataaaatgcatgtaagcatgggttagtgctgaggaatagaatattgaaagtcaccagaattcagtattccactgtattctcgcatctgtcctcatcgccacctgatgaagcaggtgttacatccttctcattttatagatgaaaaaactgaggtgagatgctagatgatttgccaagggactcaaaataaattgttgaaaactgggatatgaatccaacctacctccagagtccatactcttgcccctacctgatgatgccttttatcataggtaataagagtcttgtcctgttccaactatctcaaattccaatcaggtttaaagaactgggagctcttcagtataaaattaccctatagggtctcaattttgttggaaaaggaagtgaatgctttgaattccaagttgcagcttttaaaattcttgatgcatccaaagatatctcgagggtctcttcctgttcactttcttttctaggggctaaagtatgtctgaagctaaaataagtgttgtataaactcccaggctgatcttggcacacagcctgccctcttggcgctgtttgagccgtgttgctctttatgggatcttctcactcaagcctcaggatctcctaatggtatcctaagcttccagtgcttcccatgtcactctggacaacaaggatttaaacaccacctgacacctaatatctgacctaattaatccaaatttgagtgacaactgataatctgattggcacttaatagttttcaaaacatttgagcaggttacgtctttgacctgctcaggagccctgaaaagtggtggctggcaagtgccattgtcattttgcagatgaggaaactgatatgcaggtgattgcccaaacacagacagccagtagatgaggagatcatggttcccgggacagaattttaggcactctgtctaagtcatgctttccttttgtgaaactatcaacctcttctgcttattacctcacagacgccacagataaacagaagagtttatactgcctatttatattttcaaattcaatatttcaatcagaaattgttagaggtagacaggatattaaaataataggcccacacacttatagattacaaaatgagggccaaagggcttagtgaactcttcaaagccacacagacaatcagaggcagggcctaaaatagaatgcaggcccacagtcctgtccaatccccttccctgtctataaatctgctctccattctgttctctgaggacataagcctgggatcctataatctaacaagaaaaagctatgataatattgatgaagatcattcctyactattcttctgtatttttgagacttcagtatcacattcccttcttaccctctgtccaagtgcttctgtgtggctcttgtttaaatgcagatctctaggccccatgccagaaatcctggctcaggtgagccccaggaatgtattaggacccttactttcaatggcaaaaaccgtgattacttttgcaccaacctaatacattttaacaaattgcccaagtgattctgttgaccatggttccgtaaattcaggccatgctttaggaaactctgctctaactcaccattttcaaggactggagtggaaaaaaacattggtgtacctcatttaaggaatatttatttttggcagggctctctcaaaagttagtcattacggtgatcaataattagttaaaagcaaatcagcccaaaccagcagtggatcataaaattgacactcttccatggagtctgctgtttctttagtaaggggctctttgctcagcaatccctgggaaaatctgtgctttgcagaaacgcaggggaaagcatgatggtcacccttggatgctttgcttwatggcttgaccttgcaactatggttcaacctgtttgcccgaggacctctgttctgtgcattggcttttggtggtcgatatgttggtatacctaatgtgtttgacctcctaaggcaagtacactaggcagccgcgtgctgcttaaggaaaatagggcaaggcttttatgttataataatcctgaaatgtgctaaagaaagcctacagccagagaatgtcccttatcttatgcatcttatctgttctttccttaaaataaattagggaaactttctgaaactaacaacgtctgagatggtcattgcagacagctcttttaaggtttggggaaaatagaaagttgcttaaccaaattcctgagtttctactatatgtagaagggcagggtgccctaagggaaaaatgaacacactggctgcctccaaaagtttacaacctaatggtgaatatactgcaaatgtgagaaaatataagagcttacatcaagtaagtgtgctgatgaaatcactggagtgattggagcattctccctgtagaaaaaatgcatctaagaaggtttgctgtagatgaattttgagtagacttttaaaataaggcagaaacatgatttggcagaagaagaaaagggaagctatccccggctctggaaatagaatacacagggctggactatatgaatttgtgtgttgtggggaaggaggaaacttaagacactaaaaatgtttgtaaagcttggagtgaaagttgcaaaggagcagcaaacaggagggcagaggaaaaacaggcgggcaaaagaaagttacaaaggagcagcagaacgggtgcctcctttgaatgaccatgctttcataataccttaatttgtacagctgcaaacagggaaggagaccagttggtacaagatatgtagatactttttgctgaagggtagctgaatatgccaccccaaaatatgcctctctggcataaggattattttgggttgaaagcaatcgagaagtagatacaaaaaatctctctgccctacccctatttgcttaaaagcaggacatacacttataaaggtgtccctccttccctctctaccaagaaggacaaaggttgatcaccagggatgaccttaggcccttgcttgcctgaagatggcacagggaaatctacataacagactttactatataaccttttgtctatcattagtttcccatgtatttgttttcccacaatttgccacccctagaaactcaagatcctttccccttgtcttgttacttccccaccaatgtgttgttctttgttgatgatgccacataaaccagagttctaagccacttctttgagaattgctcattccctgggtatctcccatatatacgtgaagcctatttgttaataaacttctgttcgcttttttctttttcatctgcctttttttgcaggggttccagataagaattcggaagaatagagagagaattcttttttcctcccatacaatgcaaaatatgtgaaactaaactaaaatatattaaactaaagtaaatatatgaaactaaagtaaactaaaatatataacaaaatacacaaattatagaataaaataaaaaaatataaaaacatatgaaactaaaccaaagtaaagtaaactaatatagaactaaacttaggtagggcctgttaggaaaactaggaatacaaaattagacgccaaagtaggaaagagccttttagtctagctaaaagaggattagaaactgtagcattgtaataaagtgtggacatgcagaaaaaaagacaagtttaagaaaacctgccggaatgtatagctaaacaaagactgtacatcccatcctggttctttacaagccaaacacggatattagtttgattactccagaacctacttcttttttgacccaaaatggtaatgcccaagcttgtcaactcaccttcttcactagcctccaatgagaatggcatttggctgcagacaaaaatcaaattcaccctccagggacagagacgtgccaacactacagtgatccaaaagtatttgctattggtttaaataggtccagagatctgagcattggtaagcattgctgaaactgctgaacttcccagagtgacctctaggagagggacaaaaaatgtcttgactaaataaaataaggtgagtgtaaaaaatttaaaattctcatgagattctagtcatccctttcctagtaagtcagacttactcctgasgagtaagaaataaactactttattcatcttattatctatgtaataagtactatacttggggacatggtaggcattaaataaatgtaagttccattcccctctgagaatctctggaaataaatttacactaagacattagtaggcatttgctccaaacctatgctgctcaaaagcttcccagaaaattggcatcctggaaattttctgattttcttactgatatggtttggctgtgtccccacccaagtctcatcttgaattgtagctcccataatccccatgtcatggaagtgacctggtgggaggtaattgaatcatgggggtgggtcttttctrtgctgttctcgtgacagtgaataagtctcatgagatctgatggtttcataaaggggcgttccagcttcatccatgtgcctttttgcaaaaaaaaaaatattatatatatatatatatatatggggcattcccctgcactcactctcttgcctgctgccatttaagaagtccctttgctcttccttcaccttccaccatgattgtgaggcctcctcagccatgtggaactgtgagtccattaaacctctttcctttataagttacccagtctcaggttatgtctttattagcagcatgagaacagagtaatacacttatgaagtttattccacatcatggtaatcacgtgctgataaaatggtcatttctttttattttagacactgaaatagtgtgtgacactcttacgttcatacacttgggatataacaccatctgtggtatttgtcaccaaagacaattagccaagagcttttgttactacttccttcctaagcaaaacttacagaaccacatctaagaagctgataacaaagtaaggcaggcagatgcctgtctgaaatatcctaactgagactatctcctctttttttaaaccactaatccttgatgacatttcatacttttgttttcttattatttaattacctattgaaatactgtaggttgggttgtcaggaagcactggagctgtgattggattggttattgtttgtagatcagaatttacaaactgaagacccacagcaaacattgatttagcctgttgtccttttttaaaaatgttagttaattgccatcattttaaatgaagggatttttgcacaaaggttacaatttctaccttctcataaaaagtggaagatctggcaactctgaactagcattacaacaacagatggggctgagtggtggccaatcccttgcaggagacctaggtcctctgtttatcagaagtaccacttggccttttcagtcatccttgccccaataggcatctgaatttgcaaaacttgtcttagattttggaatatagattactgatgcatggcaaaaatatcatataaagggtgtgcacacagagaagttaagaagttaagaagtagaaaggcaaatcaatgcagccattataatcctgtcatttatattttctaaggcaccatcagtaaacactaaggtttgtgattttcactgaataataaagcctagtaccttttcattgaaacctagcaaacaccatcagagaataaggacaaagggaagactgcatagaatgtcagaactagaagaaaactgagasgtgaattagcacaaagtcttcattttaggaaagattattgagattcagagatgtaaagatcttgtcctctttcataatagcatcttgatggcaaagtcaggactgtggatctctacactgagggtctctctcttactctgtggctattcttgcctaagttatgtcttcctctgatgtgtataaatcagccagtttaagaaaagcatcacactcttctaagtgcacattgcatatgtgtaacagctgacactgatgaagaaacagagatgagcagtgacatcccagacagttggcaaggtgtcactcatactatatcaagaggatggaaagtgaaagaattaaaggatacttaaaagtctcttcacattttctacatagtacacaaaccttttctataatagccctgaggtcatcttgcatccacttacttaattcaatggacaaaacactcactatcccataaggcaatctgtcctctgtgttgctaggttgttagaaactttaacttatgtttctaggtgaaggtgaaggaaatctatttctctgtagacataacccatgagtgctacttatattttcacagggaacatgaaagacgctcactcttctacctcacatcacttcagtgcattaagtgtctccccatagtcctcacttctgactaagcattctcagttactcagagctgctcctgggtgtgaccaggcttctaaacctcccacaattctcaacacacacactccttgattactaaaattgaacaatgcactaattaatgttctgagaaaccaagaggttgagtctctaactgtagctttaccaaagccaagcagggatccagagaacagagactttctgtggcttataagcagcaatagtaaaacaatttccccttggtaagatagctttgttactagttcaaggaatccactagtgacaaatgagtttctgaatcaccctttacaccgtaaactaactctgctaacgacttagtgaatgtttgtcattgttgtcaataatggtattgtagctctaaagtgtcctgtacatgccaatgggtcatggtggtcctcttcacatggccatatattccaggaaccttcgggccaccagttccctatttctctacctgataccactgatattttgtcttctttagggaatgcctcttggtcgctatgattttggtccaaagcactatatgtatccttcttggtatggcttttttctcctccaatatgctggattccaactccaaaacactcggtggtaatatcaacaattctatgtttattcactgttttgcgtttagaggagcagtgatctggtttctagactaaataagtgactatcagctagtcttcacagaagtctagcaaatccgccagttcaccatgtcatccacactcagagaatcagggtcaaactggatgtcatgtggttctgcctccttcagctgtttgtctgagtgattcccaaattttgttatgaataagaatcattgaggattgtatcaaaaatagatttttattctggataatttatataaatactctgtcctcaagggggtgaagtgtaactccccattctttaagtgtgtgctgtacttagtaactactatccaaagagtatagtatggaagatactgacagaaaaataattttacagtagagaaacctggcaaacattagtcaagtgattaagatgaacatctatagtgataagtcatcctggtagcatcttgtcttgatatcaagggatgagaatagcaacttacctctagggtctttttctcaaaaacatgtgatttcagtctaatcatgagaaaaacatcagacaaatccaaactgagagacagtttacaaaacatctgatcaatactcctcaaaactgtcaaggtcattaaaaataagaaaagtctgagaaactgtcacagctaagaggacatggctaaagagacttgacttaaatgcagcatggtatccttgaacaaaaaaggaacattaagtaaaagctgaggaaatcagaatgaattctgaagattccttaaaaatgtataaatatcagttcattaattatggaaaatgtaccacagtaatgtgagatgttaatattaggggaaactaggtgtagggtacatgagaactctctgtattatcttcacaacttttctattctaatatgaaaagtttattttggaarattgactctaaggtcttctccagggattgtaatttaggaggtgtttttaagrggaaagagagtcagctttgcatattattaatacactcctctgttgattctgatgcagtcaattcgtaggccatattttgggatccctggtctattctgaaggttcttattcttggatacacattagacatctgtgtcccatctcagatgctctgatttaattgatctagagtgtagcctgtgcattgggattttttaagccccttaggcaatttcagttgcagccaaatttaaaacttattactcctgtgctgtccaatatggaagtcagtagccacatgtggctattcaaattaaaatgtaattaagattaaataaaatttaaaaagcctatagacatttcaatgatcaatagtcacatgtggctagtagttactgtattggacagcactgatgttgaatatttccgtcattgcaataagttctgttggacaacgctggtcaataccattggtataaatggcttgtttgtggtcttctccaaaggcttctgaaaggaagagtccctatgagtaatatacaggacaggctgctctaatcattggtgatgattcaaataaycaactcatcctagatttcctgggacttttaaggcactgaaagtctcatatcctcccttccccccgaggaccgaggaaacccgtcgggtacaccaggaaccttggtcatcctgtagatccaaagtcttttgtgaaggagagcttcaatcastaggaagctggggcagttgggtctagtcagcttgagagaaaagagctaatactgggttcacttgagctagctggtgccaatattgtcctgtgtgcccaggctttcatgaggcagggatgttgaatagtgaagtcatctgcttttgcttgatgatttaacctcacgctccctactacctgggtggagcctgacatacaggccactacccacacctctgtgcatgtgcttgaactcaatttctggtrtcagatgggtctgggtttgaatccctgctctaccacttaccagctctggggccatgcaagttatttggcttatctgatcctccatttcctcatctgtaaatgggaaaaatagtattccttatggctgctgtgaggattaaatgagtttatgtatgtagagcaaatagctcatagcattgtctgataactattagttgacttatttttatttgccctcacttcagaatatccttgaccatttgctaagcattttctgtgctttattcagttcagttcaatcaacatttactgaatgttccaggttctaggaatgcaaagacgaaatcaatttagtctgccttcaaacatattatagttggacatattattatagaacaatatagtgagtgctacgagagaggcaaacacaaagtagtatggataaacagaggaggcacccttaaccaaaattagttgggtagaagtgggtagggagtcacgtctgtaatcccagcactttgggaggctgaggcaggcagatcacgaggtcaggagttcgagatcagcctggccaagatggtaaagccccgtctctactaaaaatacaaaaattagccaggcacagtggcaggtgcctgtaattccagctacttgggaggctgaggcaggagaatcacttgaacccggtaggcggttgttgcagtgagccgaggtcgcaccactgcactccagcctgggtgacagagcaagactccagctcaaaaaaaaagaagtgggtagagagggcttcctaggggaaggggatacttaagctgagtttaggaggatatgtaaagtgtgctaaaagaagagatggcattaggaaaggagttagaggagtacaagggggaaatactgtttcaggcagaggagcagcatgagcaaaggtcctcagttaagagcttgtctgacttgttaatgggaaagtccattgttccatatcaccggggcaatgttggcacatattagttgtgagttggggtagataaggcaggagaggcaggaaaaaatgtaagtgcaattgacaaaggagtaataggtattttccttcttttccaggaatttaaaacatcttttaaagctctctgttcttcatagttaaacctaatttctcaagttatctttggtgacaaagagaatgctaaaagttgttctgtctcctaaatctaacaggtgctattctgcaatctgacatgtattttgttctttcataaacaaaaataaaatgcaataaagttcttgaaggtgcctcgtgaatcttataaatacattacattatctagacattctgaaaagcataaaggagtgatacaagtttattccactttcctagttggccattacaggatcatgggcatgtagctttacagttttctgatccctttcctaagataagacttgtgtaccgtgtcttaagtgtctgctaygatcttaatatgtctcccaaaattcatgtgttgggaacttaaaccctagggcaacagtgttgagagatgaggcctaatgggaggtgtttaattgataagggctccacctccatgaatggattaatgccactataaataggacttgtgggagcaggttcaccttttcttccaccatgggatggcacatcaagaaggccctcaccagatgctggcaccttgatcctggacttcctggcttccagaaatgtgagaaataaatctcgtttttaaataaactatccagtctcagctatttagttacagcagcacaaacagtctaaggtagtgtttatttaagtgtagtaagtacatctgatgccaacaccattggtagaaatactttttggaaactgagaaactggtataaaagccttgacatgtaatggcaaacacattgggtggtgagatgggggtatgtaataggcgggataatgaatcctccctgcaagatgttcacctactaatcccctaaacctgtggatatgttaccttacacacaaaatggtgactttgcagatatgattaaatcgataatcttaaaatgggaagattatgttgaactatcctcgattatccattagagcccaatatattcacgaaggtccttctaagagggagacaggaggattagtgtcagaaagagagtttgaagatgctctgctgcaggctttgaagaaagaggaagcagccatgagtcaagtggactctagagactagaaaatacaaagacatagacccccacaagagcttccagaaggaatgccttgattttagcccattgaaaacctgttttggacttctgacctcaagaattgtaacagaatacatttgtgttgtttgaggccagtaagtttttcataatttgttagagcagcaataggaaaccaacacagggtgtcagagtcttctgggtaagagtttacctctgcacttttgtctgaaaaagtgtctgtctcacctctagaactaacttcctcattatggagcatccgacaataataatagctaataattacatcgtgctcaccatgggccaggcagtgttctaggtgcttctaacctattaacgcctcatatctcattgccaccttgtgataaggcatgaatattaaccctatttttcttataagaaagctaaggcacagaggggatacagtggtagtaaatgatagctttggaatttcaactctgaatcataacccccgtgtattgatccaaaatgtttgcctttacacaaagtcaaggtctgagggccaattgtcactgcattccttcctcacatcctcatgttgcatggtttttctcacatttaatataccatgtatcttctctctgatcttctcacattttgaaataaatgaaaacattatgaaaataaatccctgaaataccagcctttagaccttcatagaaagtgtccagtcaaatttcccataaagaatattaattatgctcaaatgaggaacagagcagagcctggcaaatccctgcagatgtggcaggatggccattgtgccagcgtagactccatgcctttgtcttcatgggctatcttaggagaactgtttgtgactctcctggggaattccaaaggtgggaaatggaaaggtttccttgctctcactgtgtcttctcagaaaaatgaattttatgaactgaacaaaatagccaatgcatatgatcagtctagaaaaaaacaatttctacagcccaatttttcggcaccagcagaaaatcattttccttaccagacatcaatattatacggctatttgccagtagttacatggcctaatctaaatctacagagtgctgccccagcgctcaaggaatttacaataaatcataactaaataatcttactaagatggtgcatgatgtttgcagaacaacgtgtctggaaatgattgttggatatgttctttagcttggaatttattttatagtgtccctgaactgcaaccaagttatccgacactactgtttttctttctttccttcttcttttttttttttttttttttgtgtgacactactgtttttctaattgttccataaccccttggatacatggctgctggccccaggaagtatctggccgcttggctggagatatctttgcacacacactcatacccatgcagtgctggtttctctcactgaagagacttggatgggatgtgaaactataaatctcaaacccaggcaataagatcatttaatcacttgtttagaaatttattttcaattataagtctttcctggttagtgtcatagattatttgaaaaaaaatcttgcaagaaaaactaaaccttgagtcctcttccaatatgtctctttatttcatcatagtctgattattatcagagctttggatgtacactaatggtagaaatgatgtaagaatcataaaagtgaatgcaaaaactcttctctttggtgtttagatgaacagtcacttcataaagatcgcaaggactacacagacactgcgtgagtcaaaagcaggaggaaggggaatccttcctctactcaaattgccctcctactcaagaaaatatggaaattttgcttcacatgattcctgtgatgaaaattaatgaattaaccccaaatgcccaactttatgttgtactgtgtagattttatattktaacattctaatggccgtgttttctggttggtaaaagctagacaaatcccgagcagtatagagaaatcctgttatgatttagtcttaagctatttaaaattttctaatcaatagtgcaattcttcaaagatatatatgtatgtatatgtgtgggcaccattaatcaaacagatctgacatagtaacatgagtgaacagctggtcatggctgtaaaataaagccactcattttgggatttttctcacatgtccacagtccagaaatactcacagtacccacaaaaatatttctttatgagtttagtgagaacctagtagacaaatataaaatcactgaagctattcattgatgcttgagatgagggcttatatctttgagaaatgagagggtcacctggtatcttagtccattttcacattgctataaagacatacccaagactgggtaatttataaaraaaagaggtttaatttactcacagttctgcatggctggggaggcctcaagaaacttaaactcatggcaaaaggggaagaggcrtgtcttacatggcagcaggcgagagagagcaagcaagagcagggaaaactgccttataaaaccatcagatatcgtgagaactcactcactttcatgagaacagcatgggagaaaacgcccccatgatccagtcacctcccacctagcctttctctggacatgggattatggagattagaattcgagacgagatttgggtggggacgtagaaccaaaccatatcacctggtctctctacttcctgtcaaggaggttagtgggcagagaggagggctacagaggcttcctttgaacaatctcctttcttttccaaactacttctttgacaggctgctgggtagactctctggtcaaaggatggtccctacttatgctgctaaattgctcggtgacaaattagtagacaaagctaatgcaccaaaaaaatgaatgtagttatagtaatgctaacatccaaattcctctttgtaagacataggcctgtcaaccttgtctccatacttcaattcctatttccactcacctccctcaagaacttgatttataaacagtgtgcctaccataaaatcatcactccctctatgtatttatagacgactgaaggaatatctttcttctttgcatgctaccgtggtagaagggttttaaaagtccgtgctaggcagaggcagccctttctgcccctttctgttctcagttyattaggaaatggcctgaaattccagcatgatagcaagctggcatcctctgtggaatgtgcaaaccatgcctgcatctgcccattaccctagctcagtgtctctgggcatttctgcagttgttctgaaggcttggcstgtttatctcccacaggcggctgaaccgcctcccgyttcatgagcagaccagtggaatgcagtggaagagacccaggcctccggccacccagattagagagttttgtgctgaggtccctatatggttgtgttagactgaacgacaggctcaagtctgtctttgctccttgtttgggaagcaagtgggaggagagcaggccaaggggctatataacccttcagctttcagcttccctgaacaccacccagtgtggagcagcccagccaagcactgtcagggtaagtggcgccaggccaaggatgtgacttatagattccagtggctcttttaattacccggtataataagacatcatctgcagggatttggctgggttcatgcactgatatttctgaatgaagattgtactactaaaatgattgtagcttttggctttaatgatctaacgttaaagacagggctaatatgtagtttggtatgatggaaggggtagagaagaatatgaaaattttattaatgcatgtcttctgtaaaatgttcatcctaaacaaacagcccagatcttgcagcacaatacaggtatgcaggttagctgtgtgcagtaagttatacatttatttgtatttaggcactggaaactcagatttctttctggttctgatttgttgtaggggttttctttcactgggctgtatttttggtgcagcttaggtgtctggaagtggattttggaagtgaacagaagaatagttgcctagtctttgattgtgcctgaatttgtgtattcccttctgggtttccctggctctaactggtagtgtcttttgttggaaatgtatatctcttttttgttggaaatgtgtatgtgtgaccttacaagtttggatctacatcattggtcatttgcagcagagcgcagcaggtgacctgctgaatttttctctggaaagaaagagggagggagcagagcctgcatctgacagctgtgtgtgcctcccggccggatatctggtttgcatctcyctcagcttaaagctcccttcagcctggtgaggcaagtgtgactgtgcagccagccctgccaacccaggctgagtttcactgcaaatcaaggtttggcagcttcagcccagactggagttttcatgctgagattttcctagcattttgtgtttcatgactaaatatggtttgtgtttcaagaccaatgagctgggaactgtactgttctttcccctcccatcaactcatttttggcacaagacgcactctagtcagttggagcaaatcccctgacccgggtgcagttccaaaagcagacactcgagcgtgttttacctaattaggaaatgctttgctccaaaccgaactgctcattcaggttagagaggagctgtaaaccactgagctgactctttccggggacacagtgacttcttcaatgacagtgctccttttggacatyataacattcttcctagattttctttttctttttcttttttttttggccaagtaaaaaacatttttctgcattcttgctgatgctgagggccagtctcctttttctgagtatagtcaacccctcctcccaagccatcactgcccaacaaaacagttattaaaaatatcccagcattcatggtaaccataccttcccattttcagagaccatcctaatttgaaatgttttatcctcttttcagcccttacttttggtttggaaaatgcacttagcacatccatagagtgcctgcttatcccctggggctggctgcttctgacagataccccaggctcttaggcttcttcccttttttctcctttatagttctcgcctcttttctaaagcttcttaatctgctctgagggaagccaaatcacaggaatgccaaaataattcagcatctggaaagggaaaagaagggtgggaaaggaaagggcaagccattcatgagtcccatgtccattcttgcaagtggaatccacacgttgattatttttattctaagcctggagcagtgtggaaagaaagcaaaggttagaaacaaagagttctggataatgaaaataatcacacagtgatagtaataataatgatgatgaaattagtatttattgagaacttagagtatctctgccactataaattattttaaacactttaaaaaacccaatctctataagaactccatgaggtatgtcctgatatcattactgttttatagtaaggaaattgtggtttagagatgttaaataactgaaatcacacagcttttaactgttggagcctggactcaaatccaggcagtctgacttcagagtctaagctcataatcactgtgatctgaaatcttcgttgtcctaaatgtatcagttcaaggctcttggacaagtcacttcaactccttaagccttggtttccttgtcagttgaagataatattacatgccttgactttaaaatatgtcatctcaattgcagttttatgttctttgcaaagagttattttacatgaagcactgctaaggaagttttaggcctttggcaagatgcaggtttgattttgtgggaatgttttggcagaactccaactctgtaatagctattttatttccctacttctcagatgtttccttaaaagaactgccttttttatatggatttggaggtgcaatcagttaacccatttagaagaagaaattttctcaatttgaaatcctaattgagatctcaatgccaggcagataactctgggtgtccttctcttaacggaacatttcgacctaattgtgattagaaaagtggaagaggtcttgaactggaagccaaggggtggctaaagagtacctgatgtctggctggagctctgcctctaatgccctgtgtgcccttgagcaatcacttcctgattttcttatttgtgaaaatgagagcattggatgaaaatgtcctctaatatgccttcaatttctcaaatttgtaagttgataggctgctccagcctttctaattttatgaaaggatccaagtataagatccaagtataaaatgggttatttaaaattttgttttattaccaaagaaatacacattcaatatagaaaattaaaaaaatatgacagaaccatgggaaaataattaaaaacacctataaaacccaccacttcataataacctcagtcaacatcttggtaaatatgattaatctttttgcaatgcataaaaaatacatttttaatgagatttacaatgttactttttctaacctattactcttacataagaactaccttttgcttatcctcttactctacctttttaatggcagtaaagtattctaccatatgatatataatccatcaggctcaccctcacttgttggactgttagcttaacagtgacttttattaacggtggataattgcagcccctaaaatttaaagcaccttctcagaaaattttatttcaaagcttctctgagggtaaagtaaaagtcctcatgattcaaaaagatttttccattaaacacttgaccattttaacatttctaaatttttacatgctgcctgtccctcaaaaatctagctttttgaaaaaatttcaaaaaggtatagcatatctagaaaaatgtgcatttgggttgatacagacaggaaaatctagatgcttctttaacataaggtaggcaacttgtctctgcaaagatctggtctcagactctggatttcccatctgtgctctgcagtttgtttattcattcactggctctatccacctttaaagtgctcacgagaacacatgatatgccggtcactacactaaggttgtatcaacatagaagtcagagtttcagaagtcagagtttcagcttactgaaagcttatagtgtaactaaagtacttccagatacatgctatattagataagggtcagaggatagcactaggacacagaggagggcccccaaacccagccttggaggtgggagttgtcaggtaagtgccacaaatgcccaattacagctgaggctgcttcctccctgttttctatagaatcctgtgaagcagctccagctatgtgtgaagaagaggacagcactgccttggtgtgtgacaatggctctgggctctgtaaggccggctttgctggggacgatgctcccagggctgttttcccatccattgtgggacgtcccagacatcaggtgaggaaaattatgattggaacataacaggacacagattaggttcctctgtgttcmtgtttatccccagattgtctatctctttctgcccagaagttatgtaaccttgttacaaatagacctctaatgattaaggtccaggagtaaatgccaatttcacatataatgtagacagattatctgatgggcatctatcagatacaaagtctgcccctttttcatgtcctttttgtctaaatatagtcattatcatcatcatcatcatcatcaaatcatttcatcaccatcagaaatgcttatacattatcctgatgtataccaaagctactgtttggaaagaaactaaaataaaagtccaggtcacttaaccatacagggctgatgttagatgaaagcaagcatcgataccaaatgcaattttacataatattasctgtcaacaaaatatatttggacagccgcatggtaattttacacattatgtgtaaacaaagtattggtggcatcacatggtaaaaactcagtaatttcacctcagaaattcttcttcacatcagaaatgkagtttgtgcattgaggctatctgattgatgtttatgcctctctgcttgggatatattcakgagaataaataatagaaacctctcccaatgaatgcagtctgtctgaattcattgatctttatgcagtggagatattctgcacaagccgctattttatgggtccatagtagccatggctgttttgtagttctaaaatagtcactgcagtgcaatttaaaatctagtaacaataattttttaagaacttcaccttaatgattttttttaaatgcagctgactaatttaggcaaatgtcttaacagttgattggtatgaacttatccattagaaatcaagcctcaagtggttatttgtagatgcaatgcttttgcttataatagttagaaaataatgctcatattcttttgggtaggtgatgactttaaaagtacagtttaaaggatttataagacacaaaatgccatttaacaaatatgtaaaattgtatacattctttcaacaaataattattgagtgccacatatgtgccatgcaatttgctatagtgatggacaagacagacatgatctctgccctaaaaaagctcatcaaggaacataggagataaaaatacaaagtaaagttgactttcccccaacatctcctgttatttggaggcaattcaggtctttttccaatcaactgcagaattttgcttaagagcatagtggcaatgagactcaatatgtttattgttgctgataatcagaagaggaacttcccatctcaatgacttaaccttttgtggcttggctgtaattgattcacaagttttgggagatgctgactcataatgtgttgaacctttttagggggtgatggtgggaatgggacaaaaagacagctacgtgggtgacgaagcacagagcaaaagaggaatcctgaccctgaagtacccgatagaacatggcatcatcaccaactgggacgacatggaaaaggtatgggaggtttgctgcagcttgggccctcaggatgcataatccctgtgttctctgatacagaacaccacactactgctggggaaataactggctcacattgctcaactgtacttttacttgttaatgttcattctgggttattacccattgaaaaaaaaatccttgtagccataaaaaatgatgagttcatgtcctttgtagggacatggatgaagctggaaaccatcatcctcagcaaactgtcgcaaggacaaaaaaccaaacaccgcatgttctcactcataggtgggaattgaacaacgagaacacatggacacaggaaggggaacatcacacaccggggactgttgtggggtggggggagggggaggaatagcattaggagatatacctaatgtaaatgacgagttaatgggtgcagcacaccaacatggcacatgtatacatatgtaacaaacctgcacgttgtgcacatgtaccctaaaacttaaagtataataataataaaatttaaaaaaaaaagaaaaaaaaatcctaaaatgtttctttaaaaaaaaatcccttgccaggcatggttgctcacacgtgtaatcccaacactttgggaggccaaggtgggaggatcgcttggcccaggagtttgagaccaggctgggtaacatagtaagatcctgtctctacaaaaaataaatgaaattagccaggcatggtggcacacacctcagtcccagctacttgaaagattgaggtgggaggatcacttgagcctgggatatggaggctgcagtgggccaagatcctactccagcctaggtgacagagtgagatcctatctcaaaaaaaagaagaaaaaaatcctgcagggcacagtgactcacacctgtaatctcagcactggatcacttgaggccaggagtttgagaccagcctgagcaacatagcaaaaccctgtttctactgaaaaaaaaaaaaaaaaaaaggtttaattaacagtgtgtggtggcatgcaactgtagtcccagctactcaggaggctgaggtggtagcatcattcgagcccaggagttcgaagctgcagtgagctgatcataccatcagctgttgcactccagcctgggcaacagagcaagactctgtctctaaagaaaaggaaaaaaatgtccttgcctattaggttttattaactaattaaaggatgatagttctgtagatgagaagagtagccctttgccactgcagggaattaatcatctgttgctcacgtcaactctgttgccctcctaggacaagcagtgcatgagcagcagctcagagaatgaaaaccctcctttcattttcatcaggggctgcatggttatccctctcagtgcaatrtagctaaaggggcttgaaatgctgggagtagtcttaaacagcccattcttgaaaggttttcattaactcactctaaacatctaaattaaaaatgtttttgttttcactatagtaaacaggagtgtaacattgcaggtttggtacatttctgaatgcctctccacacactgaagcacaagagccactgaaaaaagctatatgataaatattttaaaaattatttatctgtgttgcattacatgaggccttatctcccagacacttaataaaagagctaatgagaagaagagctaaattctaagattttgatgtttggtcattaaacattacagacaccagtgatcagagaaaaaaacagaagaaataatgagaaagtgacataaaaaattttaaatgcagcaagatatatcagaatcacgatatctggccttttatttatctatcggctcactactactactacgcacacaatttatcacttaaaagaaaaatacataatgttgttagaatttatcagcagtaatgctccaagctctatctttctacaaaaatttcatatcagtaggtttgcttgaggattctagatttggtaagattgcagtttgcacagagaaaaagatatcaatatcaataggaaaatattcttttagaatttctccatggagctgacaacatcttagaatgtatcgtcctagacagagactattggaagaaaaaactttccttatttctaaaatttaaattcaaagtatcttctggtggggacgaagagagagagaggagaaaggttgcttgctgtgactggcaggattttttgagcagtctgctgctttcactccactaaagaaacaaaactttcagaagtttcatttcccttctataaaccacaaatccaaaacaaaagaaagtggaataagatagtctttaaagctaatcttggttttgctaatttgtaagctttcaccagcagttcttgttttgctctgttttgattttgagtgaatctcatattcctggctctggtggagaattttcgtgcttttaaagattaattaatttagtcctttttgcaatggtttgttcttttcggcatctaggaattaaagaaagtgctcaaccataaataaatgtagttatgtccaaagtaccttcacatagacacactatacacaggcgtgggccttttggaaacacctgaaggccaaatgtctgactgtgagtggaagatccagagtgtgctgatagaggaagcttttctcatccctcgagagcaaagagggtgatggaggcaagagtcagagagccctgttctcttcttcatgtacactgcaaagggcaacttctctagaagcattaaaagtgtcaattaggttttcaagtaagcgtcatttattcatatatacattcatttgtctttttatttacaaaattaaatcattttcccatgaacattaaaatgggaagagagaacaaagaaaatagagttgaataataataacattgattctggaccagacactgggctggacaataactcgagggttaccttatttatttacacaaagacccgatgaggtacacactaattattttcatctccctattaccaatcatgagactgaagctgagaagggttaaaaacttgcctaagctcacacaactaagaagtgtccgagctgggctttgaacccaaggtttgatcaagggttgtgcccttaactgccataccatcctgcctcacagatctgggttagggattctgctcagtcacttagtagatgtgaatcctttgggaaggtacttacacactttgagcttcagtctctgcatctataaaaccatggacacatgcatgagtacttgtagcatttcctttggtcttggtttcaagtagcttctggtccctttttgggaaatgcaggacctcatgacagcacatcattgtgtttctcctctgtcccccaactcactagatctggcaccactctttctacaatgagcttcgtgttgcccctgaagagcatcccaccctgctcacggaggcacccctgaaccccaaggccaaccgggagaaaatgactcaagtaagtatgctaccccagcacacaacactstggggtctggggaaacttctgttagaaggaggctrtgcagcacagcagagagaaggccrgagctaggagtccaccaacagactaacagccttcagtgaactcagggatcccaaaggacaggaacagcttgaaagtacttgcatccttcctgcagggaccagccctttgcctccaaaagcaataggaaatttaaaagatttcactgagaaggggccacgtttaagttataatgtctaaggagaagtcacttcaaaatgcagcatcacatacaataggaatttgggttccagagtcagacatatctaggtttgaaaactggatctgccacttatcagttatgtgaccttaaagaactccgttaatttctcagagcctcagtttccttgtctataagttgggagtaatattaatactatcatttttccaaggattgatgtgaacattaatgaggtgaaatgacagatgtgtatcatggttcctaataaacatccaaaatatagtacttactattgtcattattattacttgtttgaagctaaagacctcacaatagaatcccatccagcccaccagacagagctctgagttttctagtttggaagagctattaaataacaacgtctagtgtcaattctatacttgttatggtcaagtactgggctcagcattttacattcattgtctctttaagttctagcaatgtgaagcaggaactatgattatattgactacataaatgaagaaattgaggctcagatacattaagtaattctcccagggtcacacagctagaactggcaaagcctgggattgatccaygatctkccagcattgaagaatcataaatgtaaataactgcaaggccttttcctcagaagagctcctggtgcttgcaccaacccactagcacttgttctctacaggggaacatctgtgggcctgggaatcactgcacgtcgcaagagatgttgcttctgatgaattattgttcctgtcagtggtgtgaaggcaaaaaaaaaaaaatggttggaaattatggcttgctagcaaatgatgtcagacattctggttaatagagtaggaagggtcttacagatggagaaatgaagacccacggacatctcctgatgcacaaacttctcacaagtgacctggaggggcttggttctaatcttgtccctggactgcaccaactggggcactgacattctatgtggtcctctattaccattgggctggtcctgtcttccaggaaccagggcctctcccactgcaaccagaatggcctcagattctagggttagcattgacccagtaactacataaaaaagtggaatagattaaatagaacctcagacaaatcacagaaatggggctaaacctagccagcctgagcttcagatttaaaagttctctttctttataccagggaaatcaaaacctggatgttgtcttctctttttcttctggctttgacatagttaacaagccctaggatgtctgcactggaaaaatgggagatctcatttagtccaaactcctcctctgttaagagacctggaataaagccactattaatcaactattagtttggtgactattagtcaaagccaggaccagagccagaagctggactttcctttcccctggccaaaccttgtgtgcacactgtttcttcccctccccaccctgtcaggccattgatgtgatggctccccattcacaccttcatttctcctctttaacgtgaccagggctgttctgaacctccttactttggcctcctctgcccagaacaggtcaggcccctctgcatccatcaaccaggtgtgctctcctgaccattctttgtcagatgggcaccttcactaactcagcyctttggattgctttgcagattatgtttgagactttcaatgtcccagccatgtatgtggctatccaggcggtgctgtctctctatgcctctggacgcacaactggtaggtggctgggcgggacagcaagctggttggagcgcactgccagagatgggattgaatggtcgttaacacgtgggggtgacggactggagttgagttagaatggacacggctgaacccagccctaaaagatcttcttctagtgttcaaaataagcccttgatctcatatttctagcagaacttttttctactgttttcctcttcctgttctttactttttttcatcttcccygagccctgtcccacctcacctctcctatcacatgccctgttttctctttttaaataagaggctcggaaattccctctcccccaaggcttccctctacttgtccagcaagtaaccacatgccagctgccatggtgacttatcacrcccaattgtctcccaggcatcgtgctggactctggagatggtgtcacccacaatgtccccatctatgagggctatgccttgccccatgccatcatgcgtctggatctggctggccgagatctcactgactacctcatgaagatcctgastgagcgtggctattccttcgttactactggtgaggcctgtgggagataagggggagaggggagcagtgtgttgctcagtaacttccaggaccatcctcactatccaaggagatgatgggatgaagttttgcaaatggcaaggcctggctctaatgcacagagcaaagcacatctttctttgctgtgtgaagttgcaaaatgattacactatttccttgaggagaacagttatagacacccagtgttatgcattagtcagtgttgtataattgatctttttttaatcccctccattagcaaatagaagaagattgtgcagagactgaagatggcatggtgtggtgattggcaggagacattgtgataggactcgagtcccaactctgctactcagtagctctgtgagcttggacaagttaaccaaccatagtctctttatttgtaaaatggggataataatagaccctatatcacatgattgttatcagtattaaatggaagaacgcatgtggaatacttgacatagagtaagcattcaataattgttagctattaacagtgatacttattaatagctaacacagtgacatatgtgtattcagattctaagccggtgcacccagtcctcccttcacaagaggaaagtgtcagcattgccagaaacattgtatgtcctcagtgctggtggctccagctacctgtcctccccttagcaatttggtattgtccaaacatttaggtttctgaacatgcctgaggcttattttatgctccaaatttgaggcttgagacttgaaccctgccaatgttaaagtctccacttgcaatatgaagttgaataattgcattcctcctckgctccctacaaagaatcccaagatgcctctaaaaggttcctagagcctcagatataattaatagcctagaacttcagagagcagaagtctgaaaggtctctccctgcccacttcttccgtatctcgttcagtatgcaccgctgaaaccttctggactaggcctggtcctgagacagcaccacctctttcctggagggtgagaaatgtgccaaaggtttaacctgctatccactggcccaggcaacaggatctcagactttttgaaaattgtgaggcccctgaggagctgattcagcataagatatcctggttaactgaaaatacaatataacaaactttctgtcataaaataattataacacagagtagttatcctgcccacccaccccaaaaaatgttatggtacaaaaggatccgctactgtgtgcctttctctagctagctcattttattcttgttatgcatttcccagacaatgyatgctgagggcctactatgcatgagacactgtcctaggaacagaggtggttccctggtggycctactacgtcattatcattgtggattttggattgcagaatattgaactgacacattttttgatggcacatgtcttgagggagagactgcagtagggcaggtgaatctttgccacctgtgcagaccctaatgtttgccacaatgtttgtatctggttgacagctgagcgtgagattgtccgggacatcaaggagaaactgtgttatgtagctctggactttgaaaatgagatggccactgccgcatcctcatcctcccttgagaagagttacgagttgcctgatgggcaagtgatcaccatcggaaatgaacgtttccgctgcccagagaccctgttccagccatccttcatcggtaggcaacaaacgcccttttcctgggaaggggagtcattgtcttcttccatatcaagccagcctccagaacatggagacaagtgacggttgccccaagaccaaaagcatttctaaaccagaaaaagggaaagtgccacattttcaaggcgagaagacataatgaggccaggaaaaaggttttcttcctaagaaaacactatctatgttgcagttaagcccaaagcattcatggtgtatgatgaaagaattaaataatgcctgtgctttggagacagcggaaagggtagcaagggtgtgctgaaggctgagaatttgggaatgctgggggagagaaaaatagaagagcactcaaagtgagtctgttcctacattcacattgtcttggagagacaggtttgcatagttgtttacagaggcaggctctgagaggggtgagcctgggtttcagtcttagttctcttgatcttgggaaagtcacttaacctcccaactagtctcctcatgtataaagcggagactgtaatattacttatgtcctaggatggctgtgagaattacaggagatagataaagagcacttagcccactgcctggcaaaagcaagcattcaataattatcagatatcactagtaattaataatcaggtagtgctattgttaacgttatcattacatcacagcactgcagaagatgaaagggcacctagaggttttttgaaaacacctgcgtcagaaattaacaaaagtccagacccccacccccacccaaaaaaaatgttagcaagattggaaaaatgagccttttccaacaggataaaaaatagagtaagtttccctgataatccagccccattagctttgggggctggggcagatgcaacgtagctgttaaatggagacctgggagagctctgaagagttgttgcaacattggctcagcgtggaagctttgcagggaattggaaggcttcatcccttatttaaaccacatggagtgagtagtgagtctattaaaaaatcagtgatacctgttgtagcccacacctcaggatgctgcagcaggccttcctcattagaaggcaggcaggaagacatagagcataacaagacccttttgtctctcagacaggtggttcctagattattatgtcttcccagcctcagtccactgcaagatcatccagatgttcaagtctggtcttccatgtctagcctgggttttactctccacttaaggaccatggcctgtgtctcttttccagggatggagtctgctggcatccatgaaaccacctacaacagcatcatgaagtgtgatattgacatcaggaaggacctctatgctaacaatgtcctatcagggggcaccactatgtaccctggcattgccgaccgratgcagaaggagatcrcggccctagcacccagcaccatgaagatcaaggtactgttcagtgacagacccagtggcaatgccgccagcagtgtcagccctataaccacagataaraactcttcagagactgtattttggtgacatgcaattgtgggttttagsggtaggtartggacacaaatctcatattttacaggatgtaagtcaatctagttcataagaaaaattgagttactttatataaaatttgatctctatttatccttgtctgtcagctactttcagtagctgcagtcaaagtcaacagagctccccacatgctcatctctctttaaaatatgcattttgttgtttttctcgacacaaaaatagtgcatcatgcatgtaacacattttttaaaaatactgatgacctagacttatttctgaagaacttcaaacactgtagatttaggaggagcttatactcttcctccactactaacctcaatcctgtggccaagaattcaaattttatcctcattcctctgtctagcacatcttttggtacaggtgctcaaaagcacagaatgactctaggatgaccaagctcagtccctgagccacccaggacccctgtatgtggtgtgaatgttgagccctagtgaagggaactcggggattaaatggagataattctttggaggcaaacttaacctgtggctgggtcacttctcaaaggttattatcactctctgaagtcagaaggccacacttgggaccctctgacccatgtcacaggaagtagaggggcaattctagtgcagttcacacacgtgggtatttaaacaaattatctcctctttgcactcccttctgtttttagaaggagtatgcagctaacactagagagtgtgctagactgaaacatgcacactttctctctccatgataggctctggctagtcctgccctaaaagacttcagcatgagagaagagagactgttttccaacagsgtttgtgtttcttggatgccattctgatcagctcttaccccccttacttccacacaagagggaggtgaatgaagccagtagctgggctcactactgagttgatctcatgagggtcgataacagaaagaggctattgctagagttgggcagttcctagttctctaaacttggtttcttgaatagaaattaatgtgaaactctgggccccgatgtaatgagatagtatagagaaccaagaaaaacctaggacaataagatgataacatttggcaaaaatgaaactggatgagagacctatgggaactcccatagaatttgtcataggctgttcttgcgttgctataaagaaatacctaagacttgggtaatttgtaaagaaaagaggtttaactggctcacagttcagcaggctgtacaggaagcatagctctagcatcagcttctggggaggcctcagtctcagaaagcttcgaatcatggtggaaggcgaagcaggggcagacacctcacatggcaaaagcaggggcaacagagagggcaggggtggggggagggtgccacacactttgaaataaccagatttcatgtgaactcggaagaagagctcacttatcaccaaggagatgtcctaagccattcatgagagatccacccmcgtgatccaaacacctcctaccaggccccacctccaacacgggggattacatctcaacatgagatttggaggagatatccaaactatactaaattctttacaacttttctgaaaatctaaaattgttccaaaataaaaaggttatttttaaaaccaaaccaaaacataaaaccacctgggagaacccaggtttgaatatcagatctgacactgatataaccggtgttacctgggccagttacttaaactttctcagcctctgtttcctcatatgtaatatgggagtaatttaagacttattcttcaagatgtttatgagaatcaaatgagataatacatgtaaaatgcttagcatagtgcctggcatataattacatgctcagtaaatatcagtactttgtattaagaagtaaatgctcagaagataaagattaaactggttagccagttttcactgttctctgtgcctaaaccattcatttatttaagaaacatgagcatgccttgcaggttaggcctgtgcactgggaaaggccaaccagtgcagcttaagaggcacctattgcaagggaatgtccccagcaggggaccctgagttccccaatgttaaacagagcatctgggtgaaaagtggtagttcacttcaccacgtggaaacacatttgtatactaagtcctagcacaattaaaacttctcctttgaataggctagggtttgtttctacagaaagtgtatcgtgttgaattctgaggcagagttcatggaaatcagaggcattgccagggttcttaagtgggggccatggctggatttggagccaactttcagtttgctcaataatgtggtcgaagagttacaggtgagaaaaacgaatgtgcttactgaagaatttctaaatccatggctccctctggcggtcctgccaagaacatgacacaattaggacamaattggcatctaacagacaagyctgtgtccctgctgaacaagaaactaggccatggtagaacatccaggctctgtcctaccgcactaacgactgcactaatgatgacattaatgaccattctttttcatcttgactgacagatcattgcccctccggagcgcaaatactctgtctggatcggtggctccatcctggcctctctgtccmccttccagcagatgtggatcagcaaacaggaatacgatgaagccgggccttccattgtccmccgcaaatgcttytaaaacactttcctgctcctctctgtctctagcacacaactgtgaatgtcctgtggaattatgccttcagttcttttccaaatcattcctagccaaagctctgactcgttacctatgtgttttttaataaatctgaaataggctactggtaacttcttgcgttggcctccgatcaatactcgactgataccatttgttaggttgacctcacccgttacaggatggctccctctagtggtccagctgagcacatggcaattaggatggatatgtttctcaggcaaagggtagaatcacattacctgaagtggggagctgcacttcggttctgtaaagaggaataatttgagaatacattggagattttaaaaaataacatggattaaagtgtatcaatgggataatctacagtacctcacaacttgcaaagtgattatattactttacactcataaccccagtactggtaacctgatgggtgaaaagaaaataattacacacacacacacacgtatatatacacatatacacacatatatatgtatgtgtgtgtgtacatatatatatgtatgtgtgtatatatatatatgtgtgtgtgtgtgtgtgtgtgtgtattagagataaggtctcactctgtcacccaggctggagtgcaatgatgtaataatagctcattgcagccttgatgcagccttgaacttctaggctcaagcaattctctcctcttgactttccaaaatgctggaattataggcataagccgctgtgcctatatatcttaaaagtcatatcttgtatattaaaagtcacacacacacatatagatacatttcccatacatatatacatatatatgtgtgtgacttttaatatacaagatatgacttttaatgcatatactatgtattaaacttatatacatatatatacacatacatatatacatatagaaacaggtggtctgacttttatgtttattgagggaaacatggattttttaaaaaacattgagaaacactgccttaaaatctcactacacatctggaccatctgtttcccttctcttgatctatctgtctttgaaaaggatactatggatatattcacgccagaaggaatgagagagagaacaatactttccaaggaccattagcatcaatcatcaggtaagggttttacacatatcatctctcagctgttcttcacaactatctggggaagtattatcagcgcactttataattgaggagacagagattgctctagaaatgcaatgggataggagagctaccaacttccatttggcctgaaaggcacaaagatataaaaaaatactgaccctgctgttcagggtcttagcctcagagcactccttgcccaggctgttcaccatcctcagttgctcccaagctgggagctgcttgccctccagtgcatagtgtgtgtcggaagccactggttgtcctgaggagttaaggtggctctgtctgtggcagcacctcactgcagagacctccaggcccaggactgagtgtctgtttggtctagaaaacccgaactcccctagtcttctctggccctgtaacttgcagataattaggattaataccacaaataataagagctgggatgtactggtgcctgccatgaccagagcctgaatcaagctctttatattaggatcccattttctcctgcaacagccctgtgaattttgcctgactttaaaaaaaaatagagatgggatcttgccatgttgcccaggctggtcttgaactcctgggctcaaacgatcctcccactttttggcctcctaaagtgctgggattacatgcgtgaggcacagcacctggccattactgcctttttacagaagagtaactgaggctagcagcagcccaatgtcatgctgctggcagaagtatcagcttgctccttcttgtgcttggtttccaattcatgtttttagccattaggccagcatttcccaaagaataggctacacggaccaacctcatcggaagctcattttaaatgggtagagccctgggtcacatctaacacccgctgagctagaatctctggagctgaagctggaaacctgaacttcaatcagatttccctggtgattcttatgtacatcaaaatttaagaaccactggaatatgatcgagggaaatcttccagctgcaaattcatgcttgccatgcaggggcacctcatagccactagatttaaacttaaggattagtgtgcagatacttgccaccagatcactttcataattgaggcagaaatcaccaaccattgctgtcatctctacagggtttccttggagtaaaactggtctgttgcactgctgtacttcatatttaccaccaggcggcatgagctcctagtaaagcaacattcttggaacagcctctcaggctgaaacagccatgcccagaggcaaaaatcaggcaaaccagaaccacccactgaatacgcattagtgaaattttagctccttgtgagccactcaactgcagtgcctaagcaccctcctcccagtcatctatcagtaattcatcccctgactccatgagatgcccagtgacttaataaagggctgggctttgcacaggtggctgagtccccttcatgagcgtcacaccaatctccagaggagacaaaaccagcaacatacaggtttggcagccttctgaatcctcttctctcctctaacaatagcaaaccagactctcaaaggaggggaacatccttctatgactataaaattttcctatgacaggcttttgcaactctggaggacagcatgggtttctaatgacattaattcacatcatgctgccattactgtgagcagatgtgtgggaagaggcattatttacttaaaaataatcctctgttgtcttgggaggccgaggcagacagatcacctgaggtcaggagttcaagaccagcctggccaacatggtgaaaccccatctctactaaaaatacataattagccaagcgtggtggcacgcacctgtaatcccagctactcaggcatctgaggcaggagaattgcttgaaacccagggacaggggttgcagtgagccaagatcgcatcattgtactccaatctgggcaaaaaggagtggaactccgcctcaaaataataataataataataataataataatcctctgttgttaatgtggtatcatttgtgtagctaggaaattctctttagaagaatttctaacagaacagcttggagaagaacgtctgactgtagttagggaggaggctgtctggaccaacacacacttgcaggcaaccagaagccattgctgcagcgcagctcagtttattcagaaagagacagccaaaaaaaaaaaaaaaaaagagagagggagagaaaatggggcagcctgagatagggttcttccttttcagagtatgaagtaatgtttattcctgggagagcagagtcaacttaagtaatgtctgaagagcactatgagctaggacagagagcagtgtcaaggaaatagaactaggcaaggttctgcctggatggaacctgcagccaagtgaggaagatgggcactaaataagcagttgggtacattgtcaggggttcaaaagaagaattatatggggtactggcttttatagccatgggctctaacttgagccaggagctcaggagaggctgcctccctgagaagatagtgcttaagcagaagcttaaagggtaagaattgagtagacaaaaaaaagggctgggggctagaaggggttaaggtttgggaaggggaagtaggacctgcatgggatgtgttccaagcagaggcccagagatgtaaaagtgctgcatacctgggaaaaagagaaccccaaagaactggaccacacacacaagtgtgaccatgacttcactacaattttccaaagtaatattcataacattttttctatgaaaaaatcagacaccaatttcaagcaatggaagcaatgttgcatgagaagtatggcatctctggaccatctgcttttcctgagcatttcacctttcaggttaaattattgcttttcctgagcatttcacctttcaggttaaattattcatctcacatctgggaaatgaacatgcaaacattgccacctctcagtctaatttactcatggaggctgtagctctcccagaatgtcctccttagagcaatttctagccccttcttggctaaagggaataaaaatgattactatttgtctgggtttgaaacaatgctatcctcaaggaaaactgatgatggaacaggcttccgtatcgtgaggttaatgacagttttccagaggcctaaaattcaggggtccttaagcagatttccttatccttggagaaaagtatgtggtattgcagacacaccacatcaaaaggtgttctttttatactcttcttagttcttgccttctgtttctttccctgcacatttagttttgagccttagtcctctgtcccttcattgaatcaattatttttcttcctttaagacctctctgcatatgccataacctgaaattccctacaaaatgacctaaaatcatgtaacttcaggccttcctttaaaaaaaaaaatgacatcacctactcaggcaaaaatatattaaacaagtaaattctatttttcaaatttaacatgagctcttgctcttaagacttaaaaaagtccgtgatttcagagagatgcctcaacatagtattcttccttatgaatgcttaaaccactgactttgatggaaagcaagagtagtattctaaagtgccatgactagtgccttttgttggttgctctctctttgtatttctaatcctacccagctgaaacagctgacctgactatccttgataaaaataaattctccctctaaacatggtgctagtgaccttgataaagagtcaggactggtgtcccacaacactaagagagtgattggagtgagtgaattctggaggcctcagacatcttcatcatcaactttattttactactgaaatttgactttagaggaattaagctgatcacatattgctctgtcaaaaggagaatgagatgctactttacatttactaggatggctgtaataggatgtagagaaatcagatactttatatgttgctgttcggaatataacatggtacagctgttgtgaaaaacagtttggaggtctctcaaaaacctaagcctagagttaccgataaccctgcaattccacttctaggtgtagatccaaaagaattgaaacaggtactcaaacaaatgcatgtacatgcatgtttatagcactactactcacaataaccaaaaggaaatgtctttttggttattgtgcccattaatggatgaataaacaaaatgtcatcaatatccatcaatggatgtccatcaatgtccatcaacggatgaataaacaaaatgtggtatatacataaatttatatacataattcatccataaagatgaataaaggactgatacatactacaacatggataaaccttcaaaatgatacgttaagtgaaagaagccagacacaacagctcacatattgtacaattctacttgtatgaaatatccaaaatagatagatccatatagaatgcagattgacagttgctaggagctgggggggagagggagggaaggggagcaactgcttagtgggtgatatggtttggctgtgtccccacccaaatctcatcttgaattgtagctcccataattcccacatgttgtgggagggacccaatgggagataattgaatcatgggggtggttcccccatattgttctcgtggtagtaagtctcacgagacctgatgctttataaggggaaaccgctttcacttggctctcattctctcttttctgctgccctgtaaaacacgcctttcgtcttccatcatgattgtgagacctccccagccaagtggaactgtgagtccattaaacctctttttctttataaattacccagtctcaggtatgtctttatcagcagggtgaaaacagactagtacagtggacaagggattttactctggagtgacagaaatcttttggaactagatagggacggtggttgcacaacactga

SEQ ID NO: 7030 - DNA, 57095 bp, Homo sapiens
gaagtctcactatgttacctaggctggtcttgaactcctgggctctaagccccaatagtcttttcatggctcttaggataaaggccagaactttcaacttgtccttcacctggccattggttccttcactagcctcatcttaagtattttcttcttatctccctctgcaccaatcacactgcccttcccagttcatccaatctgtggccctgccttagtgtctttataaaaattatcctcagcccatcccacccccatccagcaatcactcctcatggtttgaccctcagtgaaagcggtgcatgcacacagagaccatccctaacactgcccattcagctcgtgttaaagaacgaattattcaacggtacttgctaaagcacggtaaggccacctttactcaggaccatcatgaaaggtataggaaccatgacaatggaagtttgagtacagagctcaactctaaatatagcatgggcaagtgggaatttatagccaaggagcagggtgggggtcagtggatggaaaattactataagaaaccatcagggctgatggaggattctggctaaattgacctaatgggcttcttgctgaagacaggtatgaaaggaaaataaatcttggggccctcaaatcactaagccaaagggaaagtcaagctgggaactgtgtcaggcaaatctgcctcccattttattcccacataagatagctacaaatataaaaaaagctacatacctccctcataattttcccacaaggaaattccttgtggacaaaggacagacaaaactcaaagttgtccctctggtcacaagagacaactgtatatctgatggctttctctgccctgttgtttcactaagccagacttaggcataagtgactattcctctaccctcctctcatatgtaaattgttgtattcagtgaaaagctaatcagagactcaaaggaatgcaatcttttatctcttatctccctatgacctgagtgaaccaatgtacatcttaaacatattgtgtaggatgtctcatgtctccctaaaatgtacacaaccaagctgtgccccgaccaccatgggcacatgtcaggacctcctgaggctgtgtcatgggcatgttcttaatcttagcaaaataaactttctaaattgattgagacctgtctcagatattttgggttcacataggccaaggtaatcagacatcacctgggggacggtagagaatgaggaacctgatcagatatggagggtgatcagacactgaggacactgactgactgacttagcagtgttgccaaactgacttagcagtgttctttgctaaaaccggatcttacaaggaagggcgcagacaagcctagggaaaggctcagtagcctgacgaaagtttgaccaggcagagaatctttgtcactaggcgaggatcctaacataagcattcatactatcatgtttcttttcttcttatttcaatctataattctatttgcataatgatgttgttataggaaaggggtcctgatccagaccccaagagagggttcttggatctcacgcaagaacgaattcagggtgactccgcagtgcaaagtgaaagcaagtttattaagaaagtaaaggaataaaagatgatatactaaacaaggagtggattactcatgcctcccctttttagaccatctagggtaacttcctgatgttgccatggcatttgtaaactgtcatgaagctggtgagagtgtagcagtgaggatgaccagaggtcactctcgtcgccattttggttttggtgggttttggccggctcctttactgcaaattattttatcagcaaggtctttatgacctgtattttgtgctgacctcctatttcatcctgtgacttagaatgcctaaccatctggaaatgcagcccagtaggtttcagcctcgttttgcccagctcctatttaagatggagttgctcttgttcacatgcctctgacatttcccccttgtcttttataagagaacccttaatcctaagggttgcagagggacgaagatccatcttttgtaactttttcaggctgaataggggcgatgatattcctgcctaactatgagggtctcttgcattcagggtagagaggagttcagtcagagaacatcagtatggtaaggtccattcataactgttgagttttgacaaaaggtgatatctggaagattaatacgtgtttaagaaaacatttagtaagcttgtcctgtattcctacacaaagagtataacagcaatatattccacaagggtagagcaaaataagtaaagttgttccaagtaagctaaattagaaggcttttcatgaactgggcagctgttggaactaagctgatatggggttattagctgaatgtgatgtgcccggaattagaatactgatccagatttttacattacccatcccttttgtttattctgagcagcagtcagagatcattggttggttcacaggaataagcagggttagcctaaattgcagaaacgaacttaaaaacaactaatgagactagaatttaataacaagtataccacagtacttgaaacataatatttctctctccagtttctcatttttactaaagacaaatcatggtaaggctgatttgctttgttatacttggcctgattatttgtataaagtgcaacaaaaataattatttttcacataggctctttttaaattagctttgatggaactctgctctatagaagtaatcttagacaagactttgtaaagccaagctcggccatgtgtttgtatcctcaaatatctatgagttgagtaaattcctgttctcttgaggtcccaagataacttaggactcctggacctgccagaaagtgacattctttacttaccacaggtcattctttacttacctttacagggacagttgcagacaagatctgaggccaattctccaagtggcttttattggctttacaagtcaagtttgattccttaaaggaaagcacaccattccagttaaagccgtggtgaaataaccaatttatccaattgtgttctgctacaaaagaaaacagatccttattgcatgtatgcaaataactatattgccataaattaagaatactcacaaatagtttccaaattttggaaaaatcaggtagagagaaacaaatatactccaaattttgttcacagaagtatactcaattgctaaaagctgtaaatagctcaaaagaaaagtttccttgactctgatattcatgaacattccagctctacatgagggttctgaaagttgtttcctctattctaatgttacaatttccaaagttattggaaacctgcatttgggaacacctgctggagttctacagttgattataaaccaccttctaaagaggattagaacaagaaaacaattgtggatgataaaaagttttaggatagccactattaaagccacaattgataaggaaacttggttacctatgtggcacacaaaattttacataacaattataattattaataatctacactaagtcatattagaattataagagtttctcataactttgtaacatataccaataacacatttatgcaaatatagtccaaaaaaagcaaaaaaccatttcatatttggcaatgcttcctatatgatttttatagcaaataagccaaattttacctttacattaatgtgctattaatgttaaacccaatttttaataaaaccttatagacatatttacccaattttaatgttaaccataaggtaagagtcttataaacctcgtataaccctttacaattgtgtgtgtgtgtgtgtgtgtgtgaaagagcagatcaactctaagaaaaacctgttgtgcttttattccaatgtttaatttatcgaaaaactgaataatacccctgtaactttagccagtatgttcacatacagaatctcttacaattaatttttataaaccttccacaacttatttaaacctttagttttttttttacttaaagcaatcctttaacacttaaatgtaggcagagaaaaatccacattcccattacttcttataatctttcaccaaaaacacattttactttctttacacaccttgcatgtaaaactgtttctttagtagttttaattacatgttataatgttaactttttgcaacttttatttttggtgaaaaccttggtaagtaagagattttaattgtgtactaggtgtggagcctagcctaggacacaacaggcagaagtgcagataacagctgactctctagcatagctagagggcatagctaactccacatgtccacagggctcacccttacttaagcaggcaagttgtacagtaagagtcatagggcattgtatgaagcatttaggaggcctaacaatccgtgaattgtacaacatttcttgcataaaatcactttcataaatcctttcacaacttacacagaccatctgagaccatgtggatatctagcccaactccctggatcccaccagtctctaagttccaagaaggaagaaactttatttgtttttctattttttccaagtgactagcacatgcatgaatgcatgcgggatgctctgtaaatatttgtgaaagaaatggagagaagaaagcaagacaggaaggaaagacctaaagaaaggaagggaagggtagagaagggaagacgactgaagggaaaggaagaagggtaagggagggagtctaagggaaggtatgggagagaagaaggaatgacaagctgccgaccattcaatcaggttacttccagagctgtctgcttccctgaggaagcaagagggtacatttcaaagtgttatatggtacttaagggcttggagctctaaattagctagacctgcgtttaagtcccactcagggctgggcaaggtggctcacgcctgtaatcgcagcactctgggaggccaaggcgggcgaatcacttgaggtcaagaatttgaaaccagcctggtcatcatggtgaaaacccgtctctactaaaaatacaaaaaattagctgggcatggtagcacgtgcctgtaatctcagctacttgggaggctgaggcaggagaatcgcttgaacccaggagatggaggttgcagtgagccaagatcaagccactgccctccagcctgggcaacggagtgagaccctatctcaaaaataaataaataaataatataaataaataaagtcccactcaactttgtagccatggacaaattatgtgcttctcttttcctcacgttacttatctgtaaaatggggctgatgggagatgtgaagacgttgcaacaatgtttggcacagtcagcactctaaatgaaagtctgtttagaaatttattaatttttaaaaataattatttatttagagacaggtctcgctctgtcgcccaggctggagtgctgtggcgtcatcccagctcaccgcagccttgaactcctgggctcaagcgatcctcccacttcagtctcccaagtagctgggactacaggcgtgcaccaccatgcccggctgctttttaaatttttttgtagagatgcggcacgggcgcggcaggtttcgctatgtcttccaggctggtcttcaactcctagcctcaagcgatcctcccgctctgaccttcgaaagcgcggagattgtaggcatgagtcttacttgcaattattggcccggacctggggaaatttgttaaaatgcagattctgattgagtagatctggtgtgggagccaagtttctgcatttataacaagcttcccaggtagcaccaatgttgctggtaaacagaccacactttgaacagcaaggggcccgcccctcgcttggcttgccgctcacccattggccgagagcggcagaccttccaccaatctgctcggctcagaagggagcgggccaaagcgcagagccaatgggcgcggggcttacggtctccgggatacgggtgtacacagcagcggcgtcgcggcccgcagccccgcggcggcggaaaggtaaccgacccgccctggggtgctgcgtgcgctgcctgctcccgcctgaggaaaacactgcccatggcgcaaggccgggagcgcgacgaaggcccccactccgccggcggcgcgtccttgtccgtgaggtgcggtgttcacggccccgcgaccgatctgggtctcgcggaacmtcctgccccamgtcccctcctccctcctctccctccggttccttagggcggctttccccgcagcttcgacctcttcccctctgcccccagtgccttccctcagcctccctccccgtgtgacctcccctgtccgctccccatccccttgttccttgaccccgtccccagttgtctttcccactccttattctgcgaccctgaccctccgtctcttacccagcaacgtcccctgcacccttcatctcttccttctagctcaggattcccgctagtgatccgggtcttctgatcacatccccctccccctccacctggcgacagcccggatcccgtccttgctacctttggtgattttccccaaagttaggtccctgaatcctttccttctaactcctatccactagctttggatttatttgcatttatagtagcctttgaaaagcatcaagcactgcgcagatataggtggcattttttcccctacattctagagtgttcctcccagcmcccacctccactctatacagcatcccctgctagtcctggacactctaatgtctcgaggtttctcaccaaaccagtgtccttcacttgccttttccaccatcttcaagcatacctttaatatttaaataaaaatagaatctccttcatctcctctcctttctagcatacacctagcacgcactccttacttgagagtatgttctttttgtgtgctagcctttcattcacgtcgacttcattccttttattttctacgtttatctgtatttttaaatctaaaatatrgccacatactcttcatctgtgtaaataagcaattttcctactctgctaacaaccacaaagcaggctgtcctatgcaaagttgttttttaaagtttatttwaaaaaatcaaactaattataaaagaatggcccaggatgccactgtgttgagatcaagctcttttctctgttattttcactttttgtcttccaagtatagaagaccccagaagtccttctgagactttctcaggtttggtcagagagtttcctttgctgaaaaagttatctgaagaaggcctgggagacctacggaactttaggtctacatttaaatttctataattcattgactcaaatggatctcacagccagcatgtgtgttcttttatcttagaaattgggggcagaaaggacatgaaaatagaaatgtttcaaagattttgatgaccctttgctttgttaaaaaaaaaaaaktatttgaaatgtattatattgatgttgacatatcttttcccaaagatgggtgcaaggattccctaagcagaatgttcattttgtcaacgacaacaccatttgctacccttgtgggaattatgtaatatttattaatattgaaaccaagaaaaagactgtactgcagtgtagtaatggaattgtgggcgtcatggcaactaacatcccctgtgaagttgtggctttttctgaccggaagctaaaacctctcatctacgtatacagctttccaggattgaccagaaggaccaaattgaaaggtattctagagaacccttcctctgcccataattgaaggattttgtttaaagagttgactaaatctattataagtgaagatttattttttgaaaggttttttttgtttgttttttgtgtttgttttgagatggagttttgccctgttgcctaggctggagtgcagtggtgcgatcttggctcactgcaatctctgcctcccaggttcaagtgattctcctgcctcagcctcctgagtagctgggattacaggtgcgcaccaccacgcccagctaatttttgtatttttagtagagatggggtttcaccatgttggtcaggctgttctccaactcctgacctagtgatccgcctgcctcaccctcccaaagtgctgagattacaggcatgagccaccacgcctggccccatttttttttttaatatacatttttaaagaaggaatcaagctgatcactgaggatttaaattatgttagctagagccttgctgttcaaagtgtggtctgtttaccagcaacattggtgctacctgggaagcttgttataaatgcagaaacttggctcccacatcagagctactcaatcagaatctgcattttaacaaaattcccaggtgattcatatgcacattaaactttgagaagcactgggctagaagactattgcctttttcagagcaatgayttttttttctttcctaatatttgttgaaaatccaggtgaattgatgtttgtatagcttctaaagtcaagtctctgagcctcaatttcctcattcatgaaatagggataaagatggtgtctaatgtgaaggctgcrgtgatgatgatagatgaaawtatataatatgctgtatgtgtatgtatgccaagtgctcaatgttgcctaccatttgaattattagtgtttattttatttattttattttaacagagtctggctctatcacccaggctggagtgcagtggcatgaycttggctcactgcagcctccacctcctgggttcaagtgattctcctgccttggcctcccaggtagctgggattacaggtgtgcgccaccatgctcggcttttttttttttttttttatgtttttggcagaggatggggttttaccatgttggccaggctggtctcgaactcctggcctcaagtgatccacccacctccgcctcccaaagtgctgggattacaggcgtgagccactgtgcccggcctaatgactctttcttagatacagctgacccacactgagctgctgcacgtctgctggagccaccagctaatgattccttcatttaacaccccatgggcagaaagctcatgcttgaggctggacttagctctgtagtcttaagggtcaaataagtgtttggatgaagtcagggaacttcactataatttataatactttgtttgtggtgaaatttgcattctcaacagtttaagacaattttcaaaacataacccattcacatgttggggactatctaggtggactataccctttatctttaaaatttccccaggttggttatttggctgtagttctgtttgaaccaattgaaagttagttcaaaccaatacccaggagtcttactgaataatgatgccctaaaggaattcccagtaatactaatcagtaatattaatcagagagacctgttatcactattatttaatatcaacctggaagttctagccaatgcaacaaaatataaaactgaaaaaaatatagctatgggaaaggggatgatggataatgcgatagtctgctaggactaacaaaagaatgctcagtaagatgctggttttgaaataagtacccatacaattagaacatatacatacttagaaataattcaaaaaaaagtgtgagtgacctaggggaagaaaactacaaaaatcattgatttaaaatatttaaatatatagaaatatattcctggatggaaagcctggttattataaatatatttctgagatttgtcatagaaagtaatttgtaggtttatcctatgttttagacagcaaggagtactcaaatgattccaaaattcatctgggaaaataaaacatagagaatgagaataatttgaaagagaatgatggcaaggcagagggtcattttaatattatggtgccatagtaattagaagtatggcactggtgcagggatcaccaaatcagtgggagagttgaagacttgggacagaatctaaagtatataaaagctgagtaaatgaagaaagaggctaccaccaaaaagaaggaggaagagaaggaggaggaggaagaaagaagaaaaaatatagattattcaacagtggttaagaaaactgcatattttaacaaaagtatcaagttagatactcatggtctatatcagatgaaaaaaagcattaaatataaataacaaatccacttgaaaatagtagaaaatatgggccgggcacagtggctcacgcctgtaatcccagcactttgggaggccaaggcaggtggatcacgaggtcaggagatcaagaccatcctggccaacatggggaaaccccatctttactaaaaatacaaaagttagttgggcatggtggcgcatgcctgtaatcccagctactcaggaggctgatgcagaatcgcttgaacccgggaggcggaggttgcagcgagccgagatcacgccactgcactccagcctggcaacatagcaagactctgtctcaaaaaaaaaaaaaaaaaaaaaaaaaaaagtagaaaacatggtagaatagaggagtgattccaggaaggggaagaacttttcacacaaaacaaaaacttagaaaagacagacatatttgattgtatatctgttttaaactgattaacatcaaaaacaccatgaaaaattaaaagggaaataataaaccaggtaaaatatttggaacaaatatgatcaaatattttcagagcattaatgaaacaagaacaaaacaaacagcctcttagaacaatggaaaagaaattaacccagacaaatcactaaactccaaataaccaaagacatcaaaaaatgtttcatctcaagatttgttttaaaaagtgtgatttaaaccaagatgctatttttctgcctatcaaggtcacaacttttttatgatcataattgctaggtagaatgcagtgaaattggtagcactcttatttgctgaaggtgggactataaattgatagagtctttctgtgaaataaatattgactctatttgacccagtatactcacttcaagacgaattcaatttttaggaaatggttagaaatatggtcaaagatttacatgcaaatgagcttaaaaagcactatgataatagcacaaggttggagcaacctacatctccagtattatggatatagttaaataaaatatactataaaggggtattatgcaaacattaaaaatcacacttttaaagaagtgttaagataatgataaaatggtcaatataacgtaaataaaaaaccaataggaggcaacactatgatccaattccatttaaaaatggattatcatatattatatatatatgaygagacagagtcttgctctgtcccccaggctggagtgcagtggcgcagtcttggctcactgcaacctccacctcccaggttcaagcgattcgcctgcctcagcctcccaagtagctgggattacaggtgcttgccaccacacccggctaatttttgatttttagtagagacgaggttttaccatgttggccaggctgctctcaaacttctgacctcagtgatccacctgccttcccctcccaaagtgctgggatttcaggtgtgagccatctcgcccggcctcatatataatatttaatctatggctagtatagctataaaaagcaaagttatatttaaagaaaatatatatgtatgtattttttcaagtaaacacagaagaaaagactagaaagaaatttaccaagtttggtagtaggattatagagggtatatttttctctctttttttttggcattttcttcaaataccatattttctaagatttaaagaatatctaaagttggtcatcttcaattgtggggggaaacgtctgtttagcaagcatttaaaaatcattaagatctctgcctacagaaaaactagtttttgtagygaatgctcaataaatacattttttctttgttgattagactatgctaaatatattcaataaatgacaaaagcaaaattttaggattatattatggtcaattaaaatgagaatgagaaaaaaagcagaaaacagctattaaaaatccacagaacaagcaatagagacacaaacatacaaagacagactgagatgagggcaaagcttgcacctgtggaaccccactgaagaacagcagatgaagaagagggaaaatcagaccactctgtactgggaagcagagacaggcgcttcttgttttggcctccccatgatacgcattttaaaacatgttgttgctaagactttggaattcatgttgctttttgtcaactataggtacaaaggagtatgtcactttttatagctgttccaaaagctggcagatattaagctaagggccagatatggcctaagataatagaaataaggaagtaagctagaattattacaacttcccaagatatttaaagatgtctgaataactattctaattacaatgkctcatatatttatgagattattcttgggtcatttcagaccatgctgggacatacatggtgcggtatgctcagttctgcattgaagtctagagacagtaacctaatggtcttaattcactttaatatattttacaaatggatcttagctttgctctaagctttctgttcatggtcttagaaattagccaggatctttcttattytaatagttaaatgcttttgaattacgtgraaatcattagcaaaggaaaataaactgtaagaccatagttaactgaacatggtcttaacataatcaaatcctgataatggattttatattttaggcaacattctcctggactacactttactttcattcagttactgtggcacctacctggctagttactcctctctcccagaatttgaactggccctttggtaagtttcagcatcctgtggaattccttttactgggttacattttcctcttactcttctggattttatcgaaggaaatagacatgaaaaatctgaaacaaggaaatatagaaggaaaaaatgccaatcacaagttttaatacagttgctatgtttaggcataaaatttggcagtcagagcaaaaactatataagaactaaattagttattgtcattctctttcattaacatgctttatgtattctcagatagagaatatatttataaatacataaagtttcacttaaaaaaaacaaatggcatcttggagttgttcgtatgtttcctgctaatattgaaattgagatggtctctatattagagttcagtttaaagtaattgttgttagagacattagaacaattatatgttcagagagtggaacattataccacttttgcccactgtatgggaaatcctgtggttaagacacatttctagtctttcctggatcatttcacgtggccaactttaaggctatactcccttttctatccatgatataagccccttcaagaggatatttttcttattaaggggaagtacaaaatattccagaaatgattaaaggataacatactaacatttcttatacaaaaatgtaagtacctagattcagggagccacatttagtttatgtaaatttttttttttttttttttttttgagatggagtctcactctgtcccccaggctggagtgcagtggcacgatctcagctcactgcaacctccatctcccaggttcaagcaattctcctgcctcagcctcccgagtagctggggttacatgtacccgccatcatgaccagctaattttttgtatttttgtagagacggggtttcaccattttggccaggctggtcttgaactcctgacctcaggtgatccacccaccttagcctcccaaagtgctgggattacaggcatgagccaccgcyctaaaatttttttaaaacagctttattgaggtataactaacagataatgaactgttcatatataaggtaaatactttgataagttttgatttatgtataaacccatcaccgtaatcaagataataaatacatccatcggccaggcgctgtggctcacacctgtaatcccagcattttgggaggctgaggtgggcaaatcacgaggtcaggagatcgagaccatcctggctaacacggtgaaatcccatctctactaaaaatacaaaaaattagctgggyatggtggcaggtacctgtagtctcagctactcgggaggctgaggcaggagaatggcgtgaacccgggaggcggagcttgcagtgagctgagattgcgccactgcactccagccttggcgacagagcaagactccatctgtaaataaataaataaattcatccatcaccccaaaagtttccttgtgttccttcagagcttcttcattagcctttgtcagtaatgtagtttctgtcactctagtttgcattttctggtagttcatatacagggagtgacacagtgtatattcttttgtcgggcttctttcatgcaacataattattttgaaattatcttatgttgctgcatrtatgtgtcagtagtcattcctttctattccatggtatggatataccatactttattcacctgttgatggatgtactgtattagcttgctagggcttctgtaacaaagtatcacaaactgagtgtctygaataacagaaatgtattatctcacagctctggatacacaggataggaagcagctggrrgagatgacaagtgcataaattctgatagttccaaaagcagaaggctccaattgtccttactaagarcaatctgtaaatattaaaaaagcagtgaagtggaatgagcacaaatgtgttagtgtaacagacttagacctgaatcctggctccacaaattactagctgtgtgatcttagaaaggctgagccttagtttcttcctctgtaaaatgggtacatcaatgtctcctaaatatggtttttctaataattcattgactaaaagtatgcatcatacctaatagtgtctattacattatgtttatttaagtcagagtttcaaaaatgatgattgttaggctaattctgggccaccagtgtatttttttttggccataaaatatttttaaaattggaaaaatttagagaaaaagttatctgtataacctttctcaaacacaggcaaccctggacctgtattcccacatggtcacagtctggttgggctagtaagtgggtgctcattctacatgcccaccaccttgagcaggggttggtaaacgatggcccataggccaaatctggcccaccacctgtttttgtaaagttttgttggaacatgtttatttgcttatatattatctatggctgsttttgctctatgatggcagacttgagttgtaatagagcccatatatggtctgcaaagctaaaaasattaactgtctggtcctttatagaaagagcttgccaacccctatcctagaggtgtttatactcagtacatttcattcatttacattaacttcctggcccctataagcatttgagtttgctcactggatttaattcattcaatacatttgtatctcctgcttcctgctggatataaaatgtatctcaggtacattttaggtatatctgagccttctgtagagggcatttttgataagctgaggtgagactgagactatgggtaggtagtatctcctcccggtcccaacccttcccctagatttgtttgcatgtcttaatattcatgcgcacttctatttaggaaatttgagtcagaggggagagacaagggggcaggagtgaggagggcaggggaggacagggtagatgctgtgcagaggaccagacactgctctctcatgaggagattctcagtgaggctctgcggcagcagaggtgccctggggcccaagaatgagtatgaacagagctgggagacagacactcttccagcctctgctgtggaaacccaagatgagaagctttgggagcaaccccgatggcaccctcgggtgctgcatagaaatgtgagtgggatttaatcctgtgatgaggcccaatagtcctcttcaccaagtagctttgccagcagtgggcctaaacacgagggagctagaagatgaacagggaggaggatgcaactcacttggtgacagcagttagtccgtggaccctggggactcccagaaataatttagtaaaagttcaaaagaggtgaaacttctggaagtcagaccaggaggagcccaagtaccatgatttgactcctggaagtaaattgatctaagaagactttacctttatgttctaatgttttaaaagagcagaatggattcatatattatttgtgtaattaaaaataacaattctgaaaaagaatctaaagtaggtggggaatggtctcatggttatagtcccaggctggtggggtctgggacatctggggttcataagcaaagacaatgtgctatacaccagcaataccaccaccagcagtttcatcagagaggcattcactgagatttccaatgggttagtgcatttaatccctgcctccccmctgcagcaacccccatgagacatctatgatggtcctcattttaaagaaagagactgaaacttcagagagatgggatgttaaaggagaattttcaaacagattataagatgtaagatggtttcatataactccttaataatggaaccagcaggaaaacaaaagaagctggtccctgtcttagtaagctgtcacaaaatcccatagactgggtggcttataaacaacagaaatatgtttctcacaattctgaaggctagaaattccaagatcaaggtgccagcagcttcagtttctggtgagggcctgcttcctgattcatggatgataatttccaccatgtcctcacatggtagaagggatgagctagctctcttttataaggacacttatctcaaccatgggggctctgcacccttgacctgatcactccccaaaagtcccaataccccaataccatcaccattggggttaggatttcaacatataaatttggtggggggaggcagcacacaaacagaccatagcaattcctgagtgcttaaaagaacacacacacagctgggcatggtggctcacgcctgtaatcccaacactttgggaggccaaggtgggcggatcacctgaggtcaggagttcgagaccagcctggccaacatrgtgaaaccccatctctactaaaaatacaaaaattagccagagtggtggtgggtgcctgtaatcccagctactcaggaggctgaggcaggagaatcacttgaacctgggaagcagaggttgcagtgagccaaggtcatgccactgcactccagcctgggtgacagagcgagactccgtctcaaacacacacacacacacacacacacacacacacacacacacacgctcactcatatagagttagaaaaagtagtggttacataaaatttctaggttagatatgtgaatgattatctttccagaggtctctaaaaccttaggaccttaaacttaactgttctaccagggcatacaatcatagcattgaacatgttctagagtttaacctgtaaaagcatgcctgcctttatcacatcgaggctgttagtatgtattatgacaacaaagttacattccccaggagtgtcagatatggggcaaagcaaggtacaaagtctggtttttgttcgaggaggcttgctggaaaatgcttcccagcatgatatgagaaatcaagccaacacaatttttcttttttccaagtttcattttttttttgttcttatagctacttgcctaaacttatatagttggtgagttgctgagtgggctttaaactcatttggtttctaagctcttttatagctttcattgatctaaggcacaatgggaacctgtagtaggggcatctcacatagtctgttggtggaggggaatggtcagggaaggcttcctggaaggagaggtaatgtttaaacagatacttctattaattagctaggcctgccatagcaaagtaccacagactgggtggcttaaacagcatgcgtatattgcctcccagttctggagactagaattctgagatcaaggtctcagcarggttggttcctactgagggctgtgagagagaatctgcccccgcgcctctcaccaacttctgctcacttgtttgctggcagtccttggcttacagacacatcacccagatctctgcttttattttcacatggcattctccctgtgtgtgtctgtctccaaatgttccctttatataagaacaccagacttattggattagggcccatcctaatgacttcattttaacttgattaccctctgtaaagatcatatttccaaataaggtcacattctgaggtgctgggggttaggatattaacacgggaatttgggggaggcacagttcaacccatagcaatacctaaaggatgaacaggaatcagccttgtgacgrgaagaaagaacatcctaggcagaggaatggcatgtgcaaaggccatgaagtagaaaaagcacagcaggtttcaatgaaaaggtcatgataacgggaacaagagatttgccatgagagaggcaagcttggagggacagtcagaggtgagcttatgagcagccctatatgtaggtgaccatgtggtttatcatccaaatcaggatgcttttgagagtgaaagagggtgttgctgatgaatgcagggcactttagcctaaactgggtttctcctaggcatactgggaaggatactcacactccatataagctaggctaatggacaaattctttatcctaaaggcagtggggagctactaaagggttttaagcagggaagtgacacaattatatctgcatttaagaagattcctttcagccaattatttccaatgaaagtatctccaatactttcgtactgtggaaggtatattggaaggaaacaaggcatgaacatcaattaggaggctgtggtggtccaggtgagagatgactgtgtcatggactagggtgggagtagggatggagggaagtgaaactatttgggaggtgtttaggaggtagcatcatgagacttgtaactgactaaatattgggtgtcgtgctgaggaagagggatgggtctagggttatatccagagttgcgtgtgacttgggcaacttagggacactctgatgctattcagagagatactgagggcttgggggcagggaatttaggggaggcaatgggggaagatgagctgggggacaaactgaactgagagtgcttgagatgaacaaacggagatgtctagttggcagctgatatatcagttaggacttaggttcatttgtggtcacagaaacccaaatcaccaacatgtgtttccttctgtcacatgcagttgtctgggcacgagcagctgtggwtggtgtggtggctcctcggggtcagcgtccagtctcccgctgtcatgctgctcggctgttcctagggtgtttctctcatctctggtctataatgggttaaatagtagagatgagggcaacaccctaggaacagcagaggaaccctaaaccaccggtgtattttgggagccaatggggagggaaaaggatgaggggaagggcacaaaccttctgttgaaatgcagggcttgcatgaaagagatcattgcctgacccagggactacctcaagggcttttggtgaggacaagtgacagtaggaagatgcaagagcctttagtaccaaggttctcaacactgactacatgctggaatgacttgtgaagcttttaaaaaatgttagtgcccactcttcccctctcccctcggccagttaaatcagaacctcagagagcaatgtgccttgagatgccttgaaccactgcttgagaaggaaggacaaacacattattaccttggaagaattgcataaggcttatgacttgaaaaaaaattctttttggaaacacaagcatttctttcctttttttttttttgagacasagtctcactctgtcacccaagctggagtgcagtggtgcgatctcggctcactgcaacctctgcctcccgggttcacgccattctcctgcctcagcctcccgagtagctgggactacaggcacccgccaccacgcccagctaattttttgtatttttagtagagacggggtttcaccgtgttagccaggatggtcycaatctcctgacctcatgagccgcccgcctcagcctcccaaagtgctgggattacaggcgtgagccactgygcccggccttggaaacacaagcatttctttaagaatgaccaggtgttgccatatgtatttacggcgsaagcaagtgttgtctaagcagtttctctgtttgcttgtcatagcracatttagaaactcgaacatgctttcatttatgtaaatagtttatgaagctttgacaacaaatgtaaacagacctgaaattataaatctgctaaatttgtattaagggtattaattattgagagaaagtccccttcctccacactcaactcctatggcaattatgaactccattttacccagaacacttaagtgcctcagcatctgtatgatacagtggagcaggtgctggcataggtaccagctgacctgatgtatcactagctctgcaggatgattgccacatacatggaacacctgggagtgctggaaatgtaccgggatcgaagctacaaagtgtgttttcattcgcagtggaggccatgtcaagcaacggaaggtccagccctcttgcgggtgtggtgagaggctctactagcaaagacatgggtgccggagtgggtcctatgtagcatgcgagtgctgtagagaaaattcagtgatgtacatggctctgatcctggacacaaaatctatactggagaggaaatgactgctgaaataaggaaattgtatgaatatttaaaatgcctggaacactaaagtaatgatatttcaaaaagaaagaaaaagaaagaaagaaagaaaagaaaagaaaaagaaagaaagaaaaaaatgcaaggcttggaaggtgcacacatgactgccactaacattcattgactggctcggccataagccacagccagcttcaagggtggctaggtaatattaggtcctcattgtgagtggccatatgtgcctggctaatattcagggggttctgttactcagagggagaaatggagaataaatgctgagggacacatgcccttgccacagatatccaggactggtgctcaggagagagggctggagataaacatttgggaataattaagtcaatggatagccaaagtgtgaaatgtaagtaagaacacctcaagaagagcctagggtggaaccttgaggaatatcaatggaagggacccacctaggagactcataggagtagctatgaaaggaggaaggacactaggcagggagggttccagaatgtgcctcagcctggttccttggaaagcagaggctgaggcaagagctcatgcatcccatctttagcagggtgtgtgatcccagggcaggagagccagtatgagggcgtattaccttgctggccaccacttggtaccgagtgcaactggttactctatctcgaaggtggtcttctgagaggttctatgaactgctrtgaatcaggacagtcctcaggcagtgacagactgtgggtggggaaggggagaggaggagatgagaatttatccaccaactcctgtatcccatcgattgaagcttcactgcacagggtggtaattccttcacactttcaggtttgtcgtgattgtccccaggagccccagtgaagccccagtgaagccactgggcgtgtgaagtgggtgtgaggcgaggcacaggtggggtgtgcctacatgaagttagtcaaagtgcacacacagttggacagccactgagtcagcgaggcagaagacggggtcaagggcccagacacaatagagaggatctgtggtgtcccataagaggtgtgtgacagagagtctaagagtgattccagaaggtggttgtggtgaacagtgcccagttctgcagaggtaaagttaggcaatgactgagaagtgccttttggatttaggatgaaggcaggtatctgtggatatagctatgtcaatggaatggtggtgacaggatgcaggtatcctgggatgaggaaagtgtagctgaggaagccatggcggtgactttagaacaacttgctcaaaaagtttgactctgaggagaggggagagacatagaaaggtaagactgagggaaggcttcttttgaggatggtatggatgagcacttgtgtgttggcaggaagaagtcaggctagagggagagttggaagatgcagttatcctgagtaaaccaatgtccctaagaaggcaagactgtgggacccagagcacaggtggtggaattggccttaggtaggaggaaggacacaccttccattgtaaggggagaggaggcggagagaaccatgcagacccaaatgggtagttatacttgagagcaagaattctcagctgatggcctctattttattcatgggaatcaaagccatttactgagattgagaagggagtagaggggctagaggtttcgggagaggggagaatattttaaatgcccattttagagaatgagagagagagaactggccagagaaacatagcaggattggagatcctattgagggtctggtggggggtggcaaccacaagtttatggtgtcactgccatgcacagtcctgtagtctttgttcccatgtctctagcagcccaggctttcagttgtctccatccagggatgacggtctttgccaggtacctgatgcaaaaagtcaaaggatcaagggaaccagagattccagcaagagtgtggttgatgtgttgggcagggcatttgtgatagggaatgaaggatgagggcaggagggagtgaaaggcaagctaagctcaatcaatattagctccagtttcctaatcacaactctgaatggagttctggcccctcatttgagggcatagctcacatttaatttttttcttttccttcatctagcaagggactttgttcatggtaggagttcaggatattctcttaaatgggtaaatgaataaatccattttaaaatacaccacwttatttatttatttatttatttatttatttatttatttatttttgagatggagtcttgctctgttgcccaggctggagtgcagtggcacaatcttggctcactgcaacctccgcctcccaggttcaagcgatgctcctgcctcagcctcccaagtagctgggattacaggcgtgtgccaccatacccagctaatttttgtatttttagtagagacaggtttcaccatattggccaggctggtcttgaactcctgacctcgtgatccacccgctttggcctcccaaagtgctgggattacaggcgtgagccaccgcgcctggcaccactttaattttaaaaactcaataaatgatcaattggcatcgatgagaacagtacccccagatccatatggagtactcacatgtagtacttacagattcaggcacttacacttgttttgtarcaaatgtgatgatatatttcattttctaggtttggctgagttaaattgcaaaattattaaagaagataaaatagccttggtatagcatatgacagtatagtgtttttaaaacatagtttttttgctttcttaggatacaatacaatgataagcataaktatttataaayttgacattaaggtcattgattatataaattgtatcataaattatatcccaatttatgtaaattaaaaaatagataaatgttctaaatacatgaaattcaaatgaactttttttcatcaaatgctatttttctctaaggaactgggaatcgagtatcattttgtgtaagaaatcacagcctggaatggatgtgaaccaaatgtcttttaaccccatgaactggcgccagctgtgcttatcaagtccaagtacagtgagcgtgtggaccattgaaagaagtaaccaggagcattgtttcagagcaaggtaggagcctttgttacaacagtagcaacatggtgstctttgtttgcattcgtgtaatgtgattgggtcaatttgatgaattaagtggctttatacatacatatatatgcatacacacacatacacacacatacgttcagcttatcttgttataacatctttctacatgcgtgattaccttggagtggttgtttgcatttcaaaagaattctctatgacttgtttcccaattaatttatttaaaatattaagttctctgagagctttttccaacatgatctaattttctaaaattttatttgtccttactattttaaaacatgcctgttgtataaaaaggagagttaagacttttgctattactcagatgccctactggaatttcaaaaataagaaatggttagatatagaaagtatgcagattggccgagtgcagtggctcacgcctgtagtcccagcaatctgggaggccgaggcaggcggatcacgaggtcaggagatcgagaccatcctggctaacacggcgaaaccccgtctctactaaaaatacaaaaaattagccgggcatggtggcgcatgcttgtagtcccagctactcgggaggctgagacaggagaatcacttgaacccaagaggtggaggttgcagtgagccgagatcgtgccactacactccagcctagggacagagcaagattccatctaaaaaaaaaaatatgcagattatacattcagacacattatccgcaagcaaaagggtagttgtgtatagtggagccatgggagttacctgtttaaatagaactgggtcaaagagaaattctgtgacaaatgccgtggtgataatgggtgcttttgttgagaaagagctcggagactcaaggtgctactgagctgaccattttcagtgtactccatgaagtcaaagttgaagagatgttggatctcttgatttttaagagatctcaaaagtattcccttgaaattgcaattttgataaatcgccttaagagaatctaaagctagtaaataaagcttttgaaatggagagccttaagagaagcctttctgctcagtgctctttatgtctcaacttctttttcacagtaacccattgaatagccaaatctgtctctagtgagagttgacaacactgcaccttttaataaaagtgggtgatatctctatcagatccttgtgagggcaggcaagtaatttatcacacccttttctccctttgcctccctcaaacgttctactcaagttctgaatactgagttgtgacttttctgtaagcaaataaaatgggagataaaacgagtggattgtcctagttcacaaagcaagcaggattcaaacacacttcagccttacatttgagtagtaggtgctgtttttatgtgattgtttttcaaaattgtttatcatttataaaatctaggcaaggaagttttgaatttaatgcatgaaaccacaaattctctaaattaacctttataaccatattataaattaaaagtagatatatgataaatttgaaaatgaactcaatatcagagattataaaagtagctgaatacagcctgaatatatgtttaaatatatatttattttagtctacagtgtttttcatttgaattagttgccaacatttaaagtttaagagatttctcataaatatccaggttatagtattctcttgaaattttggaatcaaaattctcacatgtcaacaaccctcttggcttgaactgagtggtccctgccaccttgaggagggacaaatattttcccattttccactgtcctcaccagtcacatatcacctgcccgaccctcatccagtattcaaatttacaactcctgctttagatattaactttcaaaaatttttataatccctcagtacttaatttaaaactgtgtaacttgtctttttacaacctgttatatatttttaaatctatcatttggcttttatcttcttatttgatttttgcaagttataatacctccccacctcacttaaactgatatgcagtggttgcatcaataagaagtttctgttcatctcattgttctgatgcctyttttgtctacaggtcggtgaaattacctctagaagatgggtcattttttaatgaaacggatgtcgttttcccccagtcgttgccgaaagatctcatctatggtcccgtgctgccactgtcagccattgccgggctggtaggcaaagaggcagagactttccgggtaattacctggcacctcttcctgtttgcctaatgggttgaggtctaggaagcctgatctcatttgattggcataaccatcccttgagaaatgcaggatacagaggatcatcttggtttttaatatagattagccacagagactgtgagagatgaagactctggagttttgagtttggatgactgggatgatgacggcattgctaacagagacagggggcccaggtgtgatttccattttgggcatactcaatttggggtgcagggaagacacctaggtggagatgctgggcagaagttgggaaagtggacctagtgttagggaggagaggtgggactgtcagtgtcattctcacagataggacggtgggagcactgaggggatgtgatgagcaaagagagaaagggtgcaagggaagaaaagagagccagagccagctgactgctgaactcaggggcgaaaggaattctgagaaggcgcagtcacagaagtaggagcaaacccgggagggaggaacaaggccgtaggaaacagcagaagaaagtttcaaaagggagtttgccaggtgttacacacccattcattcattcattcattcaacagagatttatcaagtttcttctatggagcagacactgttttaagcaatgggattcgcatggtggccaagcaggctccatgtaattctcatggagcttacattcttgtcagggagacagaactacaacaacaaaagtaaagagtattgttcttttgtaataattatcacattttgcaatgatatattgaatcattacaaaatgtggtaattattacaacagaataaatggagacagggcagcaaggatgggatgggctggttaaggaaggcctctggggagatgacrcttaagctaagatttgaaggacaaggaggcattactcatgttacaagcaggataaagagtgtttcctttgggaggccgagacgggtggatcacgaggtcaggagatcgagatcatcctggttaacacagtgaaaccccrtctctactaaaaatacaaaaaaattagccgggcatggtggcggacgcctgtaatcccagctacttgggaggctgaggcaggagaatggtgagaacccgggaggcagaacttgcagtgagtcragatcacgccactgcactccagcctgggcgacagagcgagactccgtctcaaaaaaaaaaaaaaaaaaaaaaaaagagtgtttcacgtggaaggacctgcatgtgcaaggccctaagggaaaaagagaacttggtatgtgtaaggaactgagaaaagatgcatatggctggagcatgataaatgaagtggaagtgaggtgtggggtgctattcaagagacaggcagggaacagagggcagcacctgcaagacctttgggatgaagggagaagctccacttttttggccctcttgaacctgctatgctttacccttgtgttaaaaattagctgggcatgatggcagatgcctgcaatcccagctactcgggaggctgaggtgggagaatcacttgaagccgggaggcggaggttgcagtgagccaagattgcaccattgcactccagcctgggtgacagcgagactccgtctcaaaaactaaactaagctaaactaaaataaaaataattcagtgtgaagattagttcattcaaaaatctctgtggcaagcaagagaaagggttacatgcccttaatatttcctctaatgaatgtcaatgattcacctttttaaattatggaaagagattatagtcaatctcctgcattcgtgggttccacttctgtgtattcaacccactgcagatcaaaaatattcagaaaaaagttgtatggttgcatctgtactgaatatatacacacttttatttcttctcgttatttcctaaacaatatagtataacaactatttataaaacatttacattgtattaggtattataagtaacctagagatgacttaaaagtatatgggagaaaaaataaaataaaataattaaaaataaagaaaaaatttacagggggatgtatgtaggttatatggaaatactatgccattttatgtaaggaactggagcatccacagattttggtatcagtggggggtcctggaacccatcccctgtggatactgtagttccttttatagcacaggtctcagccttggagatataactgcattcagccacagtggggcagcaaaggaagaacaaagagatcagccatcaaggtttgcaactcaaatttttctatgtttagtatttggtgccagagcccctaaatttctactctctcaaattgggtttttctgggcagaaaatatgtgtaggagcccttatatttcacattttgtacaaacataacgaactctgcataaaacatttaaaattcaggcaattgtccttgtcatttgagaaatgctatgaaatgccttctttaaatactcaaatgtggagttattattttaaaatgctcataatagacatctttattttaaaaccttttttatttgtataaatttaaggggtacgcctgcagttttgctatgtggatatattgtctgggcagacatctttatttcctaggacttgtgcactcagtgtattttaaatttttctgaaagcagaaatgtaatattatagtttgacaaccctaaatcattcatggattattaataaagccrtatattttgtatttaagttagacattttcccagtagtttactttttcattttgtagcaaaataaagtgaggaaaatgtttaaaacattaattaatgtctgtacaatgagtgaaagcataaccaaaaatagatctcaaatgtcttgattctattccctccttcaatgtcatttcttgtgacctgggtaccaatggcaagggaatcaataatgactcgatctgtataaggtcttaaaaatggataagttgtggacttttaaaaaattacaaacatcaaataatcccattatctattcatagctaatgccagaagggtacattacaggactttaaatagccctgagtcacattacacaacttatttagggcgttagaaatgtatccagttttaagtcgtagcatgggggaaatcaaaggcagatgttatctgggcagaaattggatccaagatcatgaacttaatctcaagtgtctaatttctattttccatctacctttttaattttttcaaacagatgttgctaaataggaatctcttttagagactcaaatattttgaaatatatatggatttttacattttctaaagcaggattaaattggactgcaatttttcatgttttgtcatcatgtgatcaaaatgatttctgattctagaggactgaaaaaggagatgatattatcaacaaacatttctaaacactactggtaccctttatttttaaatatctcagaattataaactattgtttctgcttacataatccatatactcacattcatttttaaatgtcatcaaatatatttattgatgaaaaagtaataggaagacaagcccaggtttgtcttaaagaaaaaaaagccacatacaatactagtttaacataccaaggccagaaaatttcaaattttaatcttcacattttgttttatacacacagattcactggtattgtgcaaatgagagacatggtgttttgttgttgttttgtttaagattttgatcctattgtcatttcagttaagtctgtctttgtgatttatagtttaaggttagatgtcataaaaaaaactcaggaaacttttcaataatggtgataacggtgaataactctcttccttatgagtcaaatctcaatcagacaccacagaagtgtcactattcagcagcagtttaattttttggagtgggaaaggtggtttgcctttttcttgatccactgggtgaccagattgttacccaactatttattttctaactatctaaggctatgagggcatgaaaggtacaaataataaattaaagtcagtctgtccttaaaaaaaattattatgatgaatgctcaatgttcctatgttttctgcgtctatrgggttaagtatggttcctttttgtcagttgttctggtgagtatttctcaggcttttagccrtgattgttttcttaacacaaggttttattctctccctgaagccgaaagatgatctatatcctttgcttcacccgactatgcattgctggactccaacaagtgacttgtacattggctgtgaagagggtcatcttttaatgattaatggagacaccttgcaagtgactgtacttaataagatagaagaggaatcgccattgggtaagaaackgtcctacttcatattcctgtatagccatgggtgttggtttttttggttttccctatttttctctttcttggagacatctttgaatcctccttcttcttaatcctctggctgttactgtgctgttggcattctaccatcactttatatgcatatttcatgtaatcctcagaacaacattatgaggagagacaccttaatctccacgatacagaagagatatgttaggaaacatggcccagtccacgtaaactgtggagctgacacctgaacccaggcaataatacctcagagtccaagttcttggctactgtgctgtatccttttctatacatatgcccattctgcttagtctgctaatcataccctttcctgcccccaccccaacccttttctccaggctgatcatctgttaagcccaaaagccatcttgaaaattacctttctattgctcggttagaggtgttgtttttttggtttttttttagacagagtctcattctgtcacccaggctaggatgcagtggtgcaatcttggctcactgcaacctccgcctcctgggttcaagcgatctcgtgtctcagcctcccaggtacctggaattataggcacacactaccacgcctggctaatttttgtatttttagtagagatggggtttcgtcatgttggcccggctgatcttgaactcctgacctcaagtgatctgcctgccttggcctcccaaagtgctgggattacaggcaggagccaccacaccctgccatattgctcagctagaatttgaaagataacctgatctattctgccctagatatagtgtctattcctgaccctatcagctgtggccatggttgggcctgggccacaggagccactgtccactcattgagcagtagatgtagaccctgggaggagggggccttgccaagacaagctcctcaaacctgtccaaagcactctctatttcaattgctcttactatttcacaccttgatttctgtaacaacyttaggatggacttcactgaccttaatctacatctgacccaatctatgcagtttatctctgtcaaattgcctctttgaaggccacttttaacacccagctcaagaactgctctgccttgatttcacgctctccctaatctgatcctacctactccattaatattatttccaactatgccctggtatgagttttctgagccagtcatttattttcaccatttcacagacatgcctctagcccattcccttggcacttactgtctctgaatctgccaatgcccagctcaaataccaccccctccagcaagttttccccattgcattgtccctcatctgccttttttsctattctctgactcactttccctgtaaaactgaggccatgaggtttcacttccctcccaactccctttctctcttccctttactcctactataccctccagccttgctcctctctctaatctagcatctatgttagttacatagatctgatgatagagaattcaaaaacaacttataagatttacatcagtaaaagtagcttttattattcattgttacattgtacttttaattacgtcacctgctttaccttgtttttcttttccagaagacagaagaaattttatcagtccagtaaccttggtatatcagaaggagggcgtgctggcttctggaattgtaatgtattctttttttcaaattaattggtttaaagaaaattcacaattcccatttgttgccatttactattatgagccatattttaggatgtcagatctgtcacattattaattaaaatggtttcctctttgggtactattaaaaaggatttattatgaatagcttcaaatctatacaaaatagaggggacgatataatgaactaccrtatattactgcaaacaaacacaaatagaatttaaaaatccattgcccttccgcaatgaaaaaatacctaatatctgtaacccaattccatgctcatttctacacttaatgtattagcttatcagacacgaatttggaatcctttgtctaagctgcagcttagactcttgtgaatgcccatttaacttacatgtatcataatgttattgttgatattcgaatcagtattaatagcctccatttacttggtgcttgctttgtgccaggcaccaagctaagtactttacttgtattatcttataggtccttacaacaaccttatcaaatagaaactattgacatcctccttttacagacaaggaatctaatctcacagagttcaccagcaagtaattggaagagttagggcttgaacataggtgtatcaaactccaaagtctttgctgtcatttattagaactcagcctcagtaagtaataaaaggggtcagaccatatttttctttttcttttcttttcttttttttttttttttttttttttgagacggagtctcgctctgtctcccaggctggagtacagtggcgcgatctcggctcactgcaagctccaactccygggttcacgccattctcctgcctcagcctcccgagtagctgggactacaggtgcacaccaccacgccctgctaattattgtatttttagtagagacggggtttcaccgtgttatgcaggatggtcttgatctcctgacctcatgatccgcccgcctgggcctcccaaaatgctgggattacaggcgtgagccactgcgcccggcccagaccatgtttttccatgccattgtaatcaatgtaaacaatgctaaggtgtggaactgacctacactaaaacataggtctagttgtaactatcccagatgttagcatagtccatttcactgccacagatgacatctccaggaccttgagggtagctaggcagtgacatcagggtgagagacattttaccctcaggaagccatctggagcacatacacctacacttagctcccccaaccttgcagtggactatcccctcctcctcctccatttagtcagcatttgtgccttttatgactcttgtcctcttcaagaccacccttgatgtttgtttaaccccctttaaagtaactattatarcatttgctctggtgagtgatggagaatggagatgagctcaaaaaaagcaccttgcctgctttcccttccagggcccaagcatttgaaaccagccatctaaagtccccatgcttagttataacagatctaatctagaaaatgataaataaatttcctcagagtgttttcactattgtaaaaataactcaaattcctcttgagaataataaaattaacctaaatctattcacaaccagmcaaccaamcaacccgtttctattggatacttgccatgttctactactgtgtgaggaacagaaaaagaggatccgaagggaataaaaggcacactgcctacccttgggtcatttagggagataagaaatgcacataataatgattaaagagcatacaggagggctagtgtcctttgaaggaaagaaactgctatacacaagccacacaaactctacttcatttttcctacctcctgtgcagtgaagaatgtagtaagaagagggatactagagaaactcaaaaaaaggggaggtcagtaaaattttaggtaattgaaaaatgcatcacaaaagagatcagactgaagcttgaccrgggaacatagttaaaagttgtctaaataaagatgagaggacagtgcatctatgcaaacatagatgatgattccaaataagcagtagaagtaatcaataagccttagcttgtctgatgaggcaagtatactatgcattgactaagactgattttctatgtttatctcactcatctctaggatggcttygtgtattcttttattattaaagatagaagttacatgatcgaggattttcttgagattgaaagacctgtagaacatatgacattttctcccaattatacagtgttgctgattcaaacagacaaggtatgttggatggtaatttcttgatatgtgattttcagatagtattattatcatcattacatgacaggaatgaggagcagagtatgctgcacagtggtactctacttgtcaagactctaggttgtaaatgaaaaaatacccaatttaaaaggcctaaattacaaagagctattggtttatttttgtgcatgtaactgaaagggcaaggagtgaatctgaataaaagagctaccatgatgccaccaagccttgtttttttccatctcttggctctgtttcctctctgctgcctccatttccatgcagactctccgcttatggtgttaacagttatatgtagctctagattatatttctgcctgcttgatgtccctggtggaaagataccagctagaaaaaaaatcttggaatctagactcattggactgactgaatcacgtgtctaccccrggtcaatcacttgcaccataggaatcctaaactctgattggccaggcctaagtcaaatgcatagccttggatgctgggtagagtcaacccacttaaatgagaactgagattggggcataggttgttctccaaagaaaatgtgtgttctataagagaagaagaaaaatgaattattgcaagattaaaacaaacatttacttcaattatactgctaggaagattcctaattaatggaatgatcttcagacatcaagattagcagatatttatattgttagacaatcattttagatgaattgcaaacaaaattcaatgactttctgcctgaaagaaacttaaatttaagtatggaaagacttttgtttctgataattaccagaagtttttttwaaaaaaaaaaaaactatgctaacttatgttttaataaataaatgactaacttaaaatatctatggagaataggaaactaggaaaaagatatcataaaagaaggaggaaagacccaaatagaacttctaaagaagaaaaatacactagcaaagtaaaaattaaatgaacatgtctgacaaaaggttggacatagccaaagagagaataaatgaattcgaagatagatcagaagttattcagaatgatactagaaaagcaaaagggtaggaaatacagaagggaacataagagataagaayaatacagtgaaaagatctaacatatgtttgattagagtccagagaggagaaagtgggacagaggcaataattaaagagatattgactggggatttcccagaattgcttaaagacatgaatttacagatttaagaggtccagtgaatcccamacagaatacataaaatgatatccacacttagacttaccagagtgaaactgytgaaaaccaaagacagagaaaattttaaaagcagtcggagaaaagacagattacttctaaggaatttcagttagactaatagctgacttctctgtggcaataatgtaagaaatagtggaataatatcttcartgtagtgcagggttcagcaaattgtggctccatggggcaaaactagcctgctgcatgtttttcaaataagattttattggaacatagccacacccactaacgtattgtttatggcttctttcacaccactatggcagcattaaatagttgtggcagagactacatggtttgcaaagcctaacatatttactgtcagcctatttatagaaaaagtttgatgacccctgatgtaatgaaagaaaataattaccacctagaattctatacccaatgaaaacatcttttcagtatgcgggtgaaaaaagacattttagacactccaaagctaagagtgtgtcagcagctgactatcactagagaaaattctaaagaatttacttcaggcagaggaaaatgatcccaggtgggaaggtctatgatgcaacaaaaataaagagcagtagtaataggtggagaatgacacattgtagaagatgtacagtaaatgaacactgcatacaacagcaaaaaaaaaaaatgtgaaagtagktttaaaaataatattgaactaaaatcccaaataacaataatataagttggggggggcagagcagggtatatagaataaagtgttccaaggatctcatataacccaggaggagaataaagcttaaagtaacttttgatgttgataaattaggtacacatgttacaacttctaaggtaaccactaaaagaataggaacagtagatgaaatttccaaactagagaaagtgaaatgtaaaaaaaaagtttaacccaaaacaaggtaaaaaagagaaagaaaatgaaatgcaaaacaattgagataaacaaaaagcataaattaaaatctatgtttaaacccaaatataaaaagatggaaaaagatatgtaaacattaaccaaaagaaaaccagtggaaatatattaacattagacaaattaggcttyaaggtaaaaatcattactaaagataaatgggcttatttcagaataataaaatattaaatttaccaggaatatatgaatacttaaaatatgtatgtacctaatagcatagccttagagatttaaaacaaagcatgacagagtgacaaggagaaacaaagcattgatattaatggaacattttaatacacttctttcattacatgatagaataaacaatgtattctcaacatagcagccaaggtgagcaaagcatttttctctactaggcaaagccctccagtgatttcctgtcattctgagaaaaagccaaaatccttactatgtttttaaaggcccttcatgacgtggactccaatccccacctctggccttatctgctactactgtgaactcttgtccatcctgctccagccacactggccatcatgctgtttccttgaatctgccagacatgcttctccctcagagtctttgtactggcttttccctctgtctggaatgctcttcccacagaatctacatgggtagtttcctcatttcctttgggtcttttttttttttttttttttttttttgagacagagtcttgctctgtcacccaggctggagtacagtggtgcgatctgggctcactgcaacctccacctcccaggttcaagtgattcttatgcctcagccttctgagtagctgggactacaggtgtgcgccaccatgcccagctgaatttttgtattcttagtaaagatggggtttcaccacattggccaggctggtctcaaactcctggcctcaagtgatctgcccacctcagcctcccaaagtgccgggattacaagcatgaaccttcaagtcttttctctaaagttacctttgttcccggaccgaactgagggttgggctgtttgttctcctggcccaataacgagatgcagatgaactgggaaagaagggagtttatttctgtaaccgggtgcagggagaaggctgggaaaatatcactggaccaactcaatattacaaagctttccagagcttatataccttctaagctatatgtctatgtgcaagtgtgcattcatctaaagacgtaagtgattaacttctaatatataactaaggcctgagtcctgaagaccttcctctggagcctcagtaaatttacttaatctagatgggttcaagtgccaggtatgattacccttattttgtctcctgctaaatcatggaggtttggggagttccttagacccccaataaagcttgtttgtggaggtctggggattttcttcagaccccccaataaaacttatttaattctaagtgggtcctgttgagaattccttcgttatcttgtcatgcttcaaggcccaggaaaggcctaggcaaaactcttggtggggttttgttacattcaagcgtttgtgtaagggcactggctctattagcttttaatatttaacttaaccactcagtcattgctgaaacagttgtcatggaggcctgcctgttcagctgttagtgagacctggcctgccacaccttctcactgaagtctttcttaaacatgcactttaaaatttcaccctcttattttgctatataatgttctccttctctgttatattttctttttcttcttacaattatcactgtttaacttacagtatattttatttggttatattatttattgtctgaatctcccagcagaaggtaagttccgtgagggcaggggattttgtctgttttatcctctgctgtaaccccagcatctaaagcagtgactggcgctgtgtatccacttaatatttattgaagaaatgaaagaaagataacattagtaaatatctaccaaattttgaactcctataaagtcattttttttagataaataacaccagaaatatttatgtttaactcaagtaagcgtgaagaacttgtgattagctgaaagcagacttcttattgctggttaagtgaccatattatattaccagctacttggtagagatgcattcattacagaacagatttttttttagaggtgagtttgggagctgaaaataataagcataaagtgacagcttcagccatacctcaactatttctacaaaggcttgtttaaatgtttagtgttccttccattatatttagcatgtggtaggatttagtacatcttaacaactttttgggttttacacattttccaaattttctacataaatagatattatttttgaaacaggaaaaaatgttttgttatgttttgtaaattaaaaaataaatgtctgggagaccaggcgtggtggctcatgcctataatcccagcactttgggaggtcgaggaggggggattacttgaggtcaggagtttgagaccggcctggccaacatggtgaaaccccatctctagtaaaaatacaaaaattagccgagcacagtggcgggcacctgtaatcccagctactcaggaggctgaggcaggagaatctcttgaacccaggaggcagacgttgcagtgagccaagattccgccatygcactccagcctgggcgacagagrgagactcagtcacacacacacaaaataatgaaattttaaaaaattaaaaataaaaaacgaatgtctggaattgaagaagaaagtcttatggttatttatgaggccaggcgcagtggcttacacctgtcataccagcactttgggaggccgaggtgggcggatcacctgaggtcaggagtttgaaaccagcctgaccaacatgttgaaaccctgtctctagtaagaatacaaaattagccgggcgtggtggcgcatgcctgtaatcccagctactcaggaggctgaggcaggagaatgcttgaacctgggaggtggaagttgcagtgagctgagattgtgccattgcactccaacctgggcaacaatagcaagactttgtctcaaaaattaattaattaaaataaaataaaatgatgaataagtgaatgaatgaatgaatcaaccgatcaatcaataaacaaacaaacaaatcaagtgtctggattttaagcccttcagggtcaaggtcttactgagttgatctgtgatttcccatattctgtttccacatagagccttggttacagtaggcatttaataaatattygttgaactatatacacaacaattacaatgtgtttcttttcttttgtatgtttatcagggatctgtttatatctacacttttggtaaggagccaaccttaaataaagtcctagatgcttgtgatgggaaatttcaggcaaytgactttatcacacctggaacccaatacttcatggtaaagaatattttactgtgtcacagtaggactaaagatacgatgatgttgcaagatttaaatcccyatttatatgttattgggtaactttgaaagttcatgggcaaagcaatgcgaayaggaggcagaggctgtccttgaagactgtggtggagatgccagacacttccatcttcaaatctaccccccggttagaatgataccctcatattgtgacttcataatatcatcttctgaaaacagccaacacaattgagatcttaggagccatcttttggttttcaccacccaagctctgcaagccaggctttaacacgtttttaaaacacattcattgctaatgagtcatcagcactaagtaaactgttagtatttatttagtatctttttttccaggtaatgcagcagcaccacctgaggttgaaaatgaaatagttgccatgtataatacattaattcagtctaaggagtcaataataatatgtcaatattggctcttcagttgtaacaaatgtaccacactaatgcaagatgttaatagtagggtagtaggtgtgtggaggggaaggtgaaggagaactctactttctgctcaatttttctgtaatcctaaaactgctctaaaaaaataagttctagtaatttaaaaaagaacaatgtatagtttcctatttctacatttgttcattaggcaatagttttactgatttttataagcaacttttatctttaatatgttacatgaaaaatctttattttacttttctaatactaattagttatgtattaaattgcattaaagataatagttaatatttgctcagaaacaaagcattggcgttgaaatgataaaataagtatttataatccacgtaagtaaaatgaaattttatactaaatcatyggcacactggaaagggaggtagaacatgcttccataggaaagtcttattttccatgtagagtttttgtttttctttttttacagacacttacatattcaggggaaatttgtgtttggtggctggaggattgtgcttgtgtaagcaagatttatctgaataccctagtaagtatacttgataaatggattttaaaaaaatactgaattctaatccaatctactttttcatattcacatgtcaatagtctgtagaaatacttgttaccgaagcctcactgcatttttgccttctagatttacagtaatccttgtgtgtaaagtatatgccacagccccaagagtggaaccatagcatacaatattggttatagaaaacaataagtttttctgtggtggcagttgtttttgaaaccccagtagtttatatcttactcatgccataagttcattgtggattggcaggggtccctcttgcacagtctctcagggagccaggctgatgggggttccaccaaagaatacttcctctgtgctgtgtggcaggagaggaagagagtgctgaaaggtcttttggagggagagggggtgctgttgaatcagcaagtaagtgctttttctcagaaatgaaatatccctttggccataattggttaaatggtcccatttaatggaaatcaattagaaatgaaagaaagttgccactctaaccagcttaagccaaaaattaaaaagtaagtgttattggcacaatcaactataaagtacagaacttgtctggcctcatgtgtgcctcaatccagcagtttaaatgatataccaaggaccttgtctttctgtctccacactatgcctttagtttcatcttaggcttcattgaggtacacccagataccacaggtgccaacctcacatcatactgtcagagagggaagaaaaattcctgctgtaggaggaggaagaacaaagatgcttcttctttccagaaggttcagtaaatgtcttgcaatgtcttaataacatctgtgaactaatcatatgcacaggggatgagaaatgcawttaagtgcataattaatgcacaaactcagccctggaaatgggagttagattcattccactcatccctgaagataggggagggatagtttctcagtgaatattcaagagattttccaggagggcgtatggatgctgagttgcaaaccacactgcccaaaacacctaccacaatgtgataccattatttctgccatgttcacagtgcattttgcataaaataacattttaaaaggaccaagaaacaacggtaatgctttctttttttaaaaataatattatttgctgcattacacagttctagttgagaaatggatcttggtattaggtagggaagtttcagtccttcccttttataaaactaaaatcttaattataaaagactaagcatcatattttacataagatgccaaagatacataattcaatgtgataaataaaactttcccacaaaagtaaagataaaaattcttactgagaaaacttgaaatatgaaaagactccatagtctatgtgaccaagggttatatgtattcatttctattagaaatagtaaactaggagagatcttacaagtgcatttaatcacatgtcctttcacacattagagacacagaaacgtttaacaacccacccaggggcccatataatcaggatataccttgttcctcttgggcaaggagggatacaggtaccattaccctatagagaattgatccagacacagtaatgctgatgccaggtctctctgcctgcgtccgggactgtgttgccttccttcaggcagtggtcctgggggatcccagtccagcagcacagtgtcaagatacctggacactagcagcatccgctgatggtacctgcaagggtacataagactcctctggcccttgctgtacattttcagactagcacaccatcgccctggaatgaaggagaatttcagctgattatttttattttgggaacacatacacatatacacacacttcccacagaggttttcaattttacaaaaagcccactcaattgggagactgtgtgcattctaataaggcaggacacctggstgcttcatctgaagtttgtcaccacatatgggatccttgggcaagctgctggacttccttggcctgtgttttctattttgcaaaatgatctcttatgttctttttcagtcctgagttccatgattttattcaaaacaatctacaaagtgttgatagagaaagaatactgatttctctagtattatgaaagtcaatttattctcttagacatcatattctgtataaatcattgtgagataaatgggaatctgttacgcatttctttggtgactgaatacatcttccggtgatacagttattttcttaagtcttccttagtcataccagcatctcaggatctataaaaatgttttaaaaagccaggtgtggtggtttgaacctgtaatcccagcgactcggcaggctgacacagtaggatcacttgagcccagtagttcaagacagaggaagaccccatcgctaataaataaataaaaatttaaaaatgtttaaaagatgctaagaatttcttttaaattccttatttttcactattattggtctaattgtttcacaatcacttaaatagattattggcataatcatttcatcatcatttagggataaaaatgaagccatgatttcaatttcaagaaatctctctctaatttttattactctaattttaggataaaagaataagatgtacagattcctgtgccatcttatgcagttgatcagctcaggaacgttgagggtataatttgaaagaccccaccacacaacacttgccacttttctcatcctgcaggcttttcaagtacactgtataatagcattcttacgtgtaggagagcaggcacaatagagatacgcatctggggtttattttaaacaggcaacggttctggcttgctgtccatcctccctctctgcagccgtgggcacggaggatggctcggtctacttcatcagcgtatatgataaggaatcccctcaggtcgtgcacaaggcctttctctcggaatcgtccgtgcagcacgtcgtgtaagtcctttctgcctccaggagcggctccgtgtcacacccgtctgttgaaaattctagtgaagccatcctttcttttaattttaagttttacgtgtttcatttgttttgaatgttaatatattcacacagttcaacactcaaaaggtacagagggctgtgtagtaaagtaccccccatacccaggtctgtccttgcaggcagcctggtaccaatttctcatgtctctcctgagatgttttatccatgaacaagcaaaacataataagcacttctttttacttgtatcaatggccatcatgtgtgtatagtgtgccaggcacttctgctgtattaactccatgaggtaaacactcttgttgtctctatttgacaggtgaggaagataaggcacaaggattttaaataacttgctcaatagtacacagatagtgaatggcaaatgttgggatttgaacccaggtagttgggctgcagagtcactgcctttgctcttaaaaggagaaaactatgtacaatgcctcatttcttttttcacttaatcgtatatcttggagaatgttttatatccacacataaagaccagcctgattatttgtatagccacatagtattccattatatgaatatactatcattttttaaaaacggtatattaatgaacatttagagtatttcaaaacttttgaagcaatacttttaagatgataatatagagacattagatttggacttgtaggtgctatcattattactgtttctttttaatttattatattattaggtattaataagaacagacatttgtattctgctttacagcttgagatcactgtagcttgtggcatgtgatcctcaaaacaccagtcagaaaggtgttattcttatccctattagacaaattagggaattcagggttagagaggtgaggaaaagcattgtccaagattacacattacacagctagcacactgaggagctggccctgccactgtggactgcccagctccaccaccctagctcagtggggaaggatggataacctccttccatttaccccctgcctttctgcactgtcatttttttgtgcctttcctttctcagatcctcttattctaatttacatcttcccactttttctaatttgataaagttgtagacatgtttcactacattcttcctcccactgccaggtaccagacacagggtaatgaaatgtcacacccaccactaatttgagaattgcttatttgcgcttgaaacatcaagaaagctctaccgacagacatgtttcattcacttatgatgaaccaactgcccatctttactgaatcttcttgactgtatttattaaagttgcaatttggaaatatcattggcctaaagtacaatgattatatccacatgtaatcactccactttaataaggtcagagaatattaaaaattgcaaaccgtaaaaatgactggctttgaacatatctctgtggccattcaataaacttgttcaccatctagctggtgaaacaattgggatttgatcatcagatttcttcttttctagttatgatcagcaaggaatatttctgttagttggaacagcagaaggaaaagtctttattatcaatgccaactcctcaagctcatttcagattattggattcacaggtacaacatagaatgctgattaatttaaaatattgattatttcaaagaatttaaggttatgaaaatggacttttcatattgaatattgaaacaattatttgtggcatattttctgaaagagaaacctttaaataactaaagttacttaggagaattctcacattatattttgatgtatttggaatattagagttatctgcttggtacatagttggtgctaaataaaytttcttgaatcaattattaaatacattaatgaaatggctgaacatttctaatattaacatacagagaagttgggttgatttctcttgaaaatattttttaatattttatctctaatgaagaattttctctttattttctctctggctttacatgccaactgtatatgtgtttcccccccmcacacacaattttttttaaaattctccttaaaaaaaattttttttttgctcctcacactttgccaagtcccactcctaagtttttaaatttgtttatcattgacttataaaaattagtgagtgcctacaaggtgcaaaatgccaaacctaggccttgtagggggatgaaaatattaaggagacaatttagtagaggaggaaaatgcagaatggtgtgtaggctcagatactgtgtaggctcagatacagcagcaattcattctgccaagtgtgaggagaggagtggaggtgaaggtgggcactggtcagggggtgcggaggattggaggagttttccaagggcttaaagtagtgggtttgaaggattttcataggtgtgggataggacatattagtattcctgctcaaaataataacccaaacaaaggtacttggaatggtaaaaaagtctggtataacaggtaaatggaagagtttactagaagatgactatggcaatgaagtctgaaagaggaaggaccttgaatatcattccaaagagtctggaattgttctgtggttaatgagccatcatcagtggtttcaagatggagctggcatgatttgacttcgtttttagagactgactctgataccagtgtgaaggatggagtagaaaggcaaaagaatgaaattaaaaagatgagattggaagctataatactagccaaggcaagagatgatcatagtcataatcatagcaacagccaacacttattgaggaatgcctgactatgtggtagccagtattctaagccctcagcatgtctccacccattgaattcttagacaactttcatgaaattgatactactattatctctccacatgaggcaattgaggcgaagcgaggctaagtacttgttcaaggccatgcatctagttagtggcagagcccrgttaaggaagtccagtttcagggcgtgtgctcttatccacaatgcacaaactcatgctgcagttacagaaagagaaaagagggcacaaccacragtgatggaattggtaggacttggtatttgatgcgaaaggaagggataagtgatgactccaaaatttctagcctgaatggtggaagtttgcaatgccattagttgaaagttctagaggttgaggaataggttgagctgatgagttccataggtttaaagccaataaactcttcatttgggcatatttagcttaagtttggaaatcgggatatgtagttcaaggcttaatgatagaattctgatcttgaaatcatggtagctgatgagatggctcaacagagtrgaagtaaacctggatgcttaataaggcaaaagaggtaactaaatatgcaaattagatggcactgagtgtggtacagcctgtggctgacctcagagtggatgtatatcctgcctaaatattccatttcatttattttattttattttccagagtcttgctctgtcacccaggctggagtgcagtggtgcaatcatagctcactatagccttgaattcctaggctcaggcaatactgctgcttcagcctcctgagtagctgggactacaggtttatgccccaaagcctggcttgttctctgttttgtttttgtttcctttttttttttttttttttttttgagatggagtctcgctctgtcgcccaggctggagtgcagtggcgtgatcttggctcactgcaagctctgcctcctgagtagctgggcctacaggcgcccgccaccgcgccaggctaattttttgtatttgttagtagaaacggggtttcaccatgttagccaggatggtctcgatctcctgacctcatgatccgcccgccttggmctcccaaagtgctgggattacaggcgtgagccaccacgcctggcctttttttgtttgtttgtttgtttgttttgttttgttttgttttttagtagagaaaatgtctctctatgttgctcaggctggtcttgatctcctggagtcaagcaatcctcccacctcagcctcccaaagtattgggattacagacatgagccactgttccctgccccatttttaatgtrtctgtttggccagagggtgggatggaagaagctgggaatagaaccctggtccacattttatattgaagctgtggacagaggaagatgaggcagtgaagaaaactgaggctgggccagagtaataagagaactgggagtcattctctccagaaacagcctaaagaaggaaggcagatgaaagtacaggctgacacagaagtgtgggtagggagagggctgagataggctctcatatatttgccagtcagcaggtgatccctgagagagctacttctttggaatgaagaaggttagggagggaatagaggtaagaaaattaagtcagaaagtgccaaaactattttaggaagtttgcagtggagaaaagagagtcagatgttaactgttgtgggacagcagagttggaggaaggttcttatttgaagacaggggagtcatgagggctgaataaaaggaaccataagggacacaagaagctaaaaagaggtgattgataatgtatggtctaataggagattggaggaatgggctcaaaaatcacagacagggaggggttacattttgttcctacatcaatgtcaggaaatgaatggagaaaatggaaacagacaaggggaaagtgtgagtctcaggataagaaagttgagattgagtttatgtagatgtccttggtcttccttgttaaggaagagggaaggtcatctgctgaccgcctggggaagggcctgagaaagtgggcacctgcagcacagtcccatgaagaatgggagagtgaatctggaacaaatccaaggtgggctccaggcctggcacaccttgyagaggttagatcagctggctttctagtggagcaagctcataaagtcacgtttccaccacacccacagtccttgaccacagatgcaaagaaggccgatgcctaagtttacccaatcttaggattaggtaacctggctggagtggacttgtggggaccagctcatgcagatgctggtttggagggatagggggtggagatggtgcactctggggccaccctggctgggaaggaaacccagacagactgggctggtttraatctgccagtctagacatctaatcaggagaatccctcatccattcatcaaaaatgtccctgtaacttatgtttaaaggtcactttaaatgtccagcaaataatttgattctaaagatatagtgaaggcaagtccatggatgatatcttaattggaaaggtaaaagatcatttaaacttatcaatgaccacttgtggtgttgatctctgtttgctttcagaggtggccaaagacattttacagatatccacagtgtctcttttagaaacagacatagtggaagtgatggtgctttcctcgcttccagaagcagggagaagcaggttggagatgttcrcactgcctacattactgccacaaggtaaggaaaacataagcagccagttctgctcctgagcccagatacattgttgttattgttttttgggtttgttttgtttttatcttggcatgtgaagaggtaaaatggccaccttttgtctatctttacaaagtaaaaccaacatgctaaacagtttgaagtgtggacttttcctctgggcttcctgactcatgagtctgctttattaccataggaaaagagataggatcaacggacacatcaaattgatttgttatttttgtgatgtctcttgttttgtagctttgaatagacaaggttaaattcagatagattacagtgtagttcccttcactgacaaaattataaagacagttttctggataaaaaggtatgagaaaatagatactctttccttgttttaatgacaaatatatcaggttagcagttttgcaaatatataattatagagcagaagagagccgacaacctccaagtacttttatgtttttataagaatctctatactaccatgggtttcttttaatatgtctctaagttaattgattaaaaattaatcaaggcattacagaaatattttacccactatcagtcatttaatactcaagtatttctagggagacaagtgtttttaaatcatttttatcacctactagcttccgcaatattagttgagcatttaaattttattttgcttttcataattgttcataattttaaaaaaacaaaattaatttatggtayaagtgatttctcttctttttccaaatctaatagtttycacaacctttgctgatgaaagaggaaggctgaaagatgaaatcattcataagtacctgtatgagttggagcacgctctgtcctctgcagtcttgggctttcaaagtaaccaaatatatggcttctgtagtcaagtgccatacatctgtagctacyttcttcctgaagaagtatgtcaacacttaagtgtgctctcatttatcttagcaatcaagattgatacattatactgattagatgtgatcctcttgaccactttaacagaatagttcagttaacaaatgccttcattttattaatataattcccttgagctagatatatagtgttatttgttaatccatcatacaatatatttgagcaacctgatacttgtgccacatacatcatctttgtcagataaacatgcagatgacacaatattagtttagtgccttaaaaaacaacctagcattaggaaatctattctacatatgccaagggctacaaggtagatgatttgatttgcagtggaactttgcatctaagccataaccaaaattacaaaaaataattaaactgtgtttctgacattttttcattacactctcttcagacttctcatgcattgtgtcacctcctgctgcacataatggcccagtaccctcctgcttgctgccccttgacctgtcactttcccttgatgtctgtctacccactttgataaggtctgccttccttcctctaaattcttcagtcaaagctcttctttgacagagtagccaggactagacacagagaaggaataaatgattagtggcaagagagattcaagaaaagtttcatgaaggaagcaatatttgatctggactttgaaaagtaagtcagatttagacatggagagatattgcatacaattttggtgggcagcgctcatatagggaggtagggcaggactggtggggatggagtagagtagggcattccagacaaaaggaaggacacgtgcagaggcttggaggtaggaatgcatgaaacatacggggaatattgactacattattttgacttaagcatgaagatatgtgaaaatgattagtaaaagcaaagattatcagtgtaggctaggatttttaatggcaagtaaataaagaagactttacttagttggcagaaacaaacttttatttgcaaaagtgggaaacatgatgcaaacgcaggtgtccactttatcctatatccatttatttacaatgacaatgtttgcactttatgccatatcagtttatttacaatgacaatatacaacaggcatgtatatctgcaaacccaaaggtgctgtttacctgatcttttctataatgtggttattttctttgattggcaggaacataccggtatctacattcttaaaccatacaaaaaagtacaaagcagacagtatggacctggactgctctatctgtcttcacatggattgtggctcataacaatagctaaatgtggaattctgtgtatccgagacgtttatactttggtaagctgctttcttaaaaaaaaatattgtgggtgtatatattgatctcatataggaaacattttatatgtatataaaaatttgcttatatatgcataaaaactctgaaaagatattgaaggtactaattaccttgcttgccattggaagtattaggtcatgggaacaggaaggagatttcacagaatactcttttataatttttgaattttgaaccatttgaatgtattgcctatttaaaaacctaaatgagaaaaggcatcatggttgagaaccagtatgactcagaaatctcagtttttaaattgttgccctatataccaaattgatgatgcattttgtttaagttctaatcaaactggcttagttagcatccttcagagcatgttatcttccattcttcacagtgcccgtcaccctctctcattatactcagctacttcacacataaatagaacctccctgactcttgaagccatcggaactcaccatctctgcttgctgaaggccccttccctagctttatagacttctgcaatccattcacttctctgtgtctgatttcctattataaattggtgataataatccctgtccttccatactacacaaaggtagtggaagaacaaattagtattggtgaatgtggtttgaactggggattttaaatactatgtattgccaattgcctacttccataccaattaaaatgctgttagcaaatagaaaatgatttatccacaaaaaaggggcatataaccccattagaaaagccgtgtggtagaattgcatttgtaatttttctggtttatttcttaactattgaggaaacatttgcttggtgtcggagtcattctcaccagggtcatgggattcagtcaatgagaatttcaatggatggacaaaacattctggtgaatgggagagatgatggcacccttgtctacctaaagtggaagtacgtacagtattcagtaagtaaccccatgtagtatagtgtgttaaaatagagattttattattatttaagtacagcaaggccaacgtgctgggagaccactgccagtgcaaagaaagtttgttatactcacagatcccaagagaagcgtacactgcattctcgggtaccacatggggcagacctggggtgggtcaggaggctgagagagggaggaaaacgtggatgagatcctctagtatggttttcacagggaggattgggcaggtttaggattggctagtttgaatattatcagtgggttctgaggcataggagctggctgtagttgtctcatacttggccctggggtgattagggtggggaaatggtggccccgattgtgaaagcccactagaggaggtggttgggggtatggtctctggattgatcggtttgcttttgaaaagcgtgttccagagcaaattgtttactatcttcagagactggctagcctccagaagtcagcaaggccccagatatcagagcatcaaaatacaaaaaaaaaaaaaagacatagttaatatttatctgagagtgatcagtcctatctctcataacataagaaatgtggacaattctgaccctcagataactttaaaaactcctgtttatccctgacatatacatgtatgtatatatacacacactttcctaattagattttgcttagattatatcaaagacagtttcagtccccaaacaaggaggggatccgttttagggaggtactattatcatccttgcttccaagttaaactataaacgaaattcctcccatggttaggaggaatgaacaagaacatccagcctgtgagactagaaacaagatggagtcagccatgctagacttctttcactgccgtaatctttgcaaaggtggtttcaatcatgcaattcattttagaaaaaataatatttcgtgatacctcctgtgatcaaagcagtaataaaatacggcccttctctgcaacattgtgaaaatgttaaatgttgtggagattttgtatcataacaattttgctagccacttacctcaaaaactcatttcaggattgcatcatcatgcccattttatacatgggattctgaatagaatattagcttttatctcactatgtaagtcctaacatattgtttataaccagcgaacaaatactatctcaggcaacaacaaacaagtgctggagccttatttatgcagctcaaaaagaaggacattttgatccattggtaatcacccaaacttctgactcaaaacaaagctgggtttaaaacgatggtctaggccaggcgcagtggctcacgcctgtaatcccagcactttgggaggctgaggcgggtggatcatgaggtcaggagatcgagaccatcctggctaacaaggtgaaaccccgtctctactaaaaatacaaaaaattagccgggcgcggtggcgggcgcctgtagtcccagctactcgggaggctgaggcaggagaatggcgtgaacccgggaagcggagcttgcagtgagccgagattgcaccactgcagtccgcagtccggcctgggcgacagagcgagactccgtctcaaaaaaaaaaaaaaaacgatggtctaggacttttgactttgtgaccttggcaaatgacaacccctctaaatcatctgttacaatgttacttaaggtagggggtctgtagcatctgtgagcttgttagaaatgcatattcttggatcccatctggactttctgagtcagaatgtctgcaagtggggcccaggaatctgtttttaaaccctcccagtgatgctgatgcgtccaaagtttgcaatgccctggtgaattaagtggaagtaataataccactctcaatgcagggtggggtgatgagggggccacatgtgattatgtgtgtgaagtagcacactgcctggtgcattccgagagctcagccagtgcactggctcttctgtgcaatgaccagggcaggtacagagggcatgttgagtaagggtatgaggacagtgtgaggagagggtaccctagaaaggtcaagaagcttgtcatggcctggaacccatgaaagggtctcctgtaagaagcagagtcctttagccatgcatggtggtgtacccctgtagtcccagctactctagaggctgaggtgaaaggatcatttgagcccaggagttcgaggctgcagtaagctgtgattacatcactgtactccagcctaggtgacagagcaagaccctttctctttaaaaaataaaaattaaaaaaaaaagaagaaattctgcaaaagaagtaggcactgaagaagtttccacaaggcactgtgaagaattgtccacatatttccttggttagttacctataaactgaaatggttagttacctgaaaataatagagctaaatgtgattttttaaattatgatttttgtagcctctgtgttttcttttttattaatataggcgatttggaggacacctagccagtgaaattctggactattaccagaaactattaatttccctgagcagcgccatggacaaggagaatcattatttaagcacaacaccaaaagtttccgtagatttgggatccgattctgaacacacagttgagttcctatatgactagcttgcttgcttacatttctttctttgtaaatcagaagttttcggtttgtggttttctttaagcagatatttagtaatatttctctttatccaggtatcccatgattttcaaaaagggaataagctacgtctgagagaaaatattcagcctttctcaaagcaattgcaaatagtacatttcagatctcatttaaaccatagtacaagatccaggcttgcctggaaaaaaaaatcttctacccacacttgtgcttggtcaaaatggtctctctatactttcatattacagatattatttaggaagtgtctagctaaagaacagtattcactcattcaattaacaaatatttatagagtgcctacagagtgctaggctgtgggggatatagccatgaacaagaaagaaaaatttctgcttccatggagtttacatcctaattgggggttggagatgggcagggagaaacagataaacaagcaaatgcagaagaaacaatgagatagtaacaagttctattcagtgaataaaaataggttgatgtgatagtattgggctggatagcctctccaagcagacatttaagctgagatctgaattaaaagagaacaccaccatgcaaagacaatgggagggtagcaagagtattcagggcaaagggggaaagagcttggcgtgtggtatgttaggacctaaaaaagacctgtgcagttgaagcgagctagggagaaagtggtgggaggtgaggtcttcaaagtgggaggagaccaggtaacgaagggctttgtaaactaggtaaagagtttgaattttattttacatgtaatgagaactgagtcaggtgttctgaacacaggattaacaaggtatagttgacattattgaaatgactatttgatgctatgaggagaatgtttcctgtaggtgataagaaggataagaagcagggacattgctcaggaggctaaggcagaggttcaggtagcaatgatggaggtggaggagtcttgtgccaaggagagaagtggtggattccaggtgggtttcagaggtagggttgatagaactcactgatgaattggacatagagagag

SEQ ID NO: 7031 - DNA, 14733 bp, Homo sapiens
gctcttggtccgcatcagctggggggcctcctctgcctcctccaggggccctgcatgagaaatgggtgagagaatggcagggtgggtgatgctgacagagcaactgcctgctgtcgggagatctggcaccctagagccctgtggtcacgtgcactggggcagatggggacgtgagggccattcctggactggaggctggatattcccagcttgcagataggaaggtgagacccagacagggtaacctgggtcacaatgtcacatggccatacccctcttggtctctgtcttagggtgcccatggaggtctttggtggccccagccctgtcttctgagcccctgctctgaaacaggcccttcactgagggctaaaggaaggggaataaaaaggatgagtgagcaggtacagagggtgaggacgaggtcgcagagggaggtgaggggccaggagagcgcagtgccttctgtggatgctcctgtttcccatagcacacacagggcgggggactcaggccacccccacactgtcactgtcacctcccaagcctctgctcacttttccataaaaaggagcgagaatgagggcagagcacctcacaggcaggcacctgggtaggggtccagcaggtgaagcccctcgttggctggggcacaaagctgtccttcggagattgtggttgtgagccaagcccctctgctcctaccccggatgaggcaggggtctgggcagcttgcgggctccgcttacccgagctgtctgtggaactctcagccttgtgcactggctgaatgcttggcccctgggctgtgatgttcccgttctggggcgatggctcctttctgaaaacagacaactgcagggctgagatggctgccggcagagaaagggagctcaggccaaggagaagagaccagcagcccctggggtaggacacaggcgggaagcaaggcaggctgaggtgaggcctggatttcaaaccaagagagtcagtctgaaacaataaaagaaaagtagaggcctccccccagcatctgctggacggagagtgagcctggccctgcagacctgagggcttgtgctgggctgcatcgcacagacacacggacacatgaacatagtcagggcctgcgcattcctagacaccaggcttagccaggccagcagctgtgtgccaaacaggctcgctgggcttcccgaaggcctagtggggtgtcaggcaggggccacctagaagggcccaacctccaggcctcttggcaggatgagccccaggccagggtagctagtgctgggctggagaaggagtgggtatgatggggcacagccctgtagcccaggggacctggggaagagaagacagatgggatcctggagaatacacgggcacagccgcgactgctgtctgtgagtgctttacctcgaagaggggcacatgtgagtcacacttgcagccttcctaaggagtctgactttatgctctaattctgtgtgcctcagaattcgctgagtgactggggacacctaggtatgtgctggggctgtcagggtggtgggtgctgtcacagcatgggtttcatatgaaatctgaagggggcaaagctctgaatgtgtgccctctacaggagttactactgcagaagcaggcaaggcccagctactaactgcgtcttttgggagtgggccgaggaggagataaatgtgcattgaatggtaaggcaggcaggagaccatttcctcctgacagaaacattattctgatattaaacaaatgtaatgtgaaattctgataaatttatttttaaaattttgacattaaaatgaaaacagagtagtaagaggctaaattcgtgtgaattttaaagatagaacaagagatggcgagacatgttcggcttgcataggtgttgggagcccccctggctgtagtcgtcccttcttgccagcaaggtggcttgcaggaaggtttgagaaacagaaatagaggtcatgggagcctggaatgttctccaggaaggagggagaggccaccctgggcgaggctgtggactgaggcagtcacagggcatggggatgaggctgggtcaccctcctgtgccagtgtcccataagggaacagggctcccaccctgaggctcgggatatccccaacccgggagctcaggctgagcaggtgtcacagaagccaccgggtactcacagagggcagctaggccgtctgggcatccatgaggtggaggggaggtgcacctgctcccggtcatcctgcatctgcagccggatgggccgcctcagcccccaggcaatgttgaggagcccctcgatgatcagagtcccttcttcctgtgggggtccacacatcagcccttcccccagagcagctgcctaccttccctgtgccccctagggatgggatgctctgaacactcaggccttgcacatccctcctcctgagtggccccatcccctcaggaaggaccatcagccactacgtgccctggggcgtgtgaccaggccctgtgggagggagcctgagatgtgctcagctcatgcctggccaggggcacagcgcagaacacagtggctgagtcaggtgtcccacaggaagccagctgctggccggcaggcacgtccacaccgcggtgaagaagtggttccagggacgcacagcctgtctgctcatgccaagcaggggacctctctgcccacactgcacctgggagggggtcctgcgccaccaggtcctatggccaccaggcccggcagggtcccacacccaccagagcagaagtgggcactctctgtcctagctgtgtctcagcctcacccttctcccggtgccttccaacagcagcagcgtccacttgccagggctgacaaagggtcttgcttttctcaccactgcttagacatcactagccctatatcccataccagaatttctacaacagccttcatcccatgtccccaacctccctcggtttccctaggtctgcaggtgacatggcttctctcctgctgccaacctggggccctaatcaacagagtcctctgcacgcaccttgctagtagtgctggttggcaccccttgggcccttgattcagtgcctctgacctattccaggcctctgtctctgcgagaccaccccaggcctctgtgccaatcccggtcactctgtgtgtaagcctggccaagctgagtcatttgccagaatacttgccagcaacctcggctgccctctacccagagccgcagtctcgaaactacacactcctaatgtgctctgacactagtcttcccacaattaactttgaatatcattctctcattgccatctcaaccaacatttaattttattatttatgttttattgtgataaggacatttaacataagaactaccctctaaacaaactgttcagtgcacaatactgtattgttcactgtaggcacaacgttgtccagcccatatccaggacttactcatcttgcatagctgaaacattatatcagctgcacagcaactctccacttcctcctcccctgccccagtccctgcaaccaccattttcactctctgcctctatgagcctattttagattccttatataagggaatcatgcagtatttctgacccatattttagattcacaaatcccatttctctctcctcgttggcactaaaagccctgtgagaacagggacgccatggaaacttctttgtatccctggcagcactcaggaagaccctgcacaatgtggatttcatggtaacttagaaatggggtttctaggttcaaacatcctgccatccacagagaaaatagtgtatccaaaggttatcaaatatacacacagcttccagatatgaccttgcactatctgctaaaaaggaaaacaaacaagcagaaaccagagctgtttttgatactcactggtgctctacaagcacagatgtgtcactgagcttcctatgaaggagaggccagcatggatctatggagttcaaaggtctatggggggttctgttcttgcctcttggtctcgggtgcctctcagtggagagagcttgtggggatggctcactcatggagacccactgccctccagccccaccctggacgccaggcagaggaagatggagcagacacagccctggccacgaggggctcgggcttggacacagaaggagatgcaatggagcttcttggaggaggtgcttgtgcactgcaccctggaagacgagtgaagggggacagggaggaaagctgagcaggtggccctgacctcaggacctgcctggacaaggtcgggggcttggctgtactggggacaggctggctctccatgactcaggccagacatgcctacacaggtgatgtgtgtgcccccaacatagccgcccactgttcaccctcccccagcttggccgcatctgaatggagggaaagccccgtcagccagcagcgaattctccgcctccctccctcttttggtctcttgactaatctgctcattgctaataaattcaaagaagagccagcgaactagacaaagggtctacaaaagatataagagcttgggcaaggtgagaagtgccatgtgccactgaaatcctggtcactgtctcaggcactccctgccccgatgcctttgtgcacatggagttcccacctagaattcaagaacttgggactgccggtccctcttgcttgcctagggagtctggggtctgcccagtactcagagctcaggcttgggctaactctcaagactcctctttctcccccacctgcagcacaggcaggcgtgttccaggtggggctgtggctggggcagaggatctgtggcctgtctggggagtgcaggagcttcccaggggctgcctctctcatccttggcagcctcctttgctggcatggtcactcctggacagatgcagtggctttctaatgttgcccaggtgctccttggcagccccccagccccagccccagcccagtcccagcagctgcagcgatcctttgaagcagaagccagactgcagtgcccttgttcaaaccctgcagtctttccctccctcctagagggaaacacagcatccaccccaaggtccactgaccccctcctacatgggccagtctgcaggccccttgctgtgccctgagcatgtctgtccggcgcgccctcaccacaggggctttgcacgtgctgcccctgccacctggaatgtgcattttcccatttttttcaggtttctgctccaatatctgctcttagggaagacacccctgaccactgtacctgtggcggcagcccaccacagcatgccactgcgctgctttccttcaggcagttcttgctgttgcctgaatcacagcacccattcatctctggcttgatctcctcccttactagaatatgagctccagggggccacacctttgtccgctgctacgtttgctgtgcttagtgcattcacagcacacactagcacctcatatctggtgaacaagtaaacaaacaaatcctccgaaagcaccccatctggggtgtaagaagaccagggtcagaccccgcagaccgcccttggtcccttgcgagcagggtgtgtctctcctaggagcaggcctagggacccagcctcagctgcctccagactggggtcctgtgctgctgatttttcatcaaagttgccaaggacctggcccaacttcacaggagtcatgatggggtggtgtaacacagagtgggaaacaagctttggggcaggggtggccctggggctacctgtgagggcccagtggaacccctccctctcccagtgcccctacttgaccagcagtgaacccacccctttcctgccctgcagcgtaaacattccccagcctcctacaggcagaaaaacacctccaagctggcagctgggccaggccccgcccaccaagctgttttcctaagacagccttccgagcaggctatttttggccctcgtgacagtgattgatagctgctgggaaggtataaaarcagcttgcctgcgaaggttcttcacactgctcagggaagagcctgctacggtggactgtgagactcagtgcactgtcctcctcccagcgaccccacgctggaccccctgccggaccctccacccttcggcccccaagcttcccaggggcttcctttggactggactgtccctgctcatccattctcctgccacccccagacctcctcagctccaggtaagagagagcagctgcccttgggtttgagacaaaacacaagggctttgtttatttttgagggcaattcccagcctgaacttgcacagcctccctatgggttagagaccagggctgtctgtagagggctttgcatttataaagggattcaggggttatttcatgcatttcctacaacatcccggccaggggtatttataaccctgttttatggatgggtaagtggaggcctggagaggtggccttgccaaaggtcccatggtcagtgcgtggccgatcctggttttaaacccagccttcctctgaccagtgtttgttaggttaggttctcttatctgtgcacattctgaaacgataatgataaaatcttaagcctttggggtttttaacctgaacaggaagaaaagatcccagcagtctgagctctggtctgggctctgtagacttcaaattgctctcagggcaccggattcctacaggcagccccagaggagtgtggtgacgctgaggggcagtgggacgcatggcaggccctcaccaccaggcttctgtttcccaacaggttgccacctcctctcgccagagtgatgaggtcccggcttctgctctccgtggcccatctgcccacaattcgggagaccacggaggagatgctgcttgggggtcctggacaggagcccccaccctctcctagcctggatgactacgtgaggtctatatctcgactggcacagcccacctctgtgctrgacaaggccacggcccagggccaacccaggccaccccacaggccagcccaggcctgccggaagggccgccctgctgtgtccctgcgagacatcaccgcacgtttcagtggccagcagcccacactgcccatggctgatactgtggaccccctggactggctttttggggagtcccaggaaaagcagccaagccagagggacctgccaaggaggactggcccctctgctggcctctggggtccacatagacagatggacagcagcaagcccatgggggcccccagagggaggctctgtgaagccaggatgcctgggcattccctggcaagaccaccgcaggatgggcagcagagctctgacctaagaagctggacttttgggcagtctgcccaagccatggcctcccgccaccgcccccgccccagcagtgtcctcagaacactctactcgcacctcccggtgatccatgaactctgacccctccccagtaaaggcttctgtagagagcatgctgggtctgcatctcctctcrtctcctccatggtggtcactgcccctggcaggtctctgaaagggaaatgcttttctgcagaggcccctgcttgggcagttcacagtgagaccgaccccctctgaatatgataacagcctgtttcacatgaggagatgttaccaatcccgttcgctctgacccttgctggctgatcaccttgagcaacttacttaacatctgtgttcctcagtttctcatgggtaatatagggataattactggcacctgcctcccaggccattctgacgtgtaaccgcatataggagcccactggctgagtagctaccatcatcgctggtggggaaactggtggtaggggtgtgagggtagtgggggtgtcagccccccaggtgtttcagaacaaggcctcgggcactcccaagtctgcctcttggctcccaccctcaaagcccatgttctgtgaggcccaagagaacacatggagtcttagcaaatgcactaatgtattccgggggactgtcacctggcaccactggggcactctgctggctacaactcatacgtcctgtggtggcattgggagagttcccccatgatgagggccaagatagaatctgtaccactcagtgctaccatccccacccctacaccacttccacacaggggcctcatggcatggtcagggtcccagctgtgggtgagagcagggcactgtccagctgtccactggggaagtcaagatgtcctaaggcccagghcagggcatctggagtctgaaggaccctagttcctagaggcatctggcagcaagaaggtgaggcatcagggaacgggaatcaggctgggactgatcagaggtgaagggacagagagaggagaggaggaagattgagctgggggcaacagccaagctcacctgggcaggtctctgccacctccttgctctgtgagctgtcagtctaggttattctctttttttgtggctatktttrattgctttggatttgttaaatgttttctgtcttctgttaagtgtgttttctctggagatagaatgtaaaccatattaaaaggaaaaagtttcagacaagcaattacccagtttccttatctataaaatggggacatcagcaatgttcttcacaccctgcaagggctgggaatctgcgcatgtgaacttggagctgcatttatgagcactgtagacaaatgtttgtatctgtcacagcccactgtgtctctgtggtggtctcaaacctgcaggtccctgactttgggcaaacgtgtggggcagcctttagccggggcagcctttagccaatcatcatcctcgggagagatccagagggcccacccaccaaggcagaggggttgaggtccaggcttgctgggcccagcctcactacagccccttctgcaaagcatcatgaaacggggtcagagggagagtccggcaactaggatgaggtcagcagactcccctatgctcagaagccacctcgctgcatctggggaggtctggcactttgaggagaccatccccgggcttcctcactaatacccagctgtgtgaaagaggttaatggcacctttggaaggcgctccctcccagtagaatacaggtttgtggttggggcttctggcagtgtcccaagctcctgcagagaggcccaggggaattcctttcccttcaagctaagcctcctggtggggcccttgtagagcagttacattctccttcctacttgccactggggtggggatggggagagtggaaagggaggtagagaggggagtggaggtgggggtgggaatggagaggggagtggggctgggggtggagaggggactggagaagggaatggagagggaagtgggggtgggggtgggaggtggagaggggagtgggggtgggggtggaaggtggggatgggaggcgaagaagggagtgagtgggacacaaggcactgcccagagcgggcaggctgggaagcgctttgcggctcccagaaaacagatgttcgtggggctggccagtcactccaggggccagtggtctgccaggccttcggagaggggacggggcaactctctcaaggcgggatgctggttttccgcacccctgggagagacggagcccccggaccaggggaagccccttccgtttctctcattgctgaggggtccctgggccgaggagcgggactggatgtggagcgcgcccgcggtcaccagggggcgccccggagcctcggcgccgcgccccaggcgggcggggccggcacacagtccccagaaaaggtcctgccgcctggggctcacttgcttgtccagagccatgggtttacacaaggacatttccgggcggtccttttttcttttgagataccagccagcctggctaaagccctttgccatcttcaaaaggcacagattgttccccgttgctcaggctttttgttgtaatacaagcaaaattatcccaaaggcgaggttcatgatacaggaagtcggcgcctcagcctccagagatggcgtccctcctctagcccctcggaagcggggagaaggctcacaaggagccgctggtcccagggcgtgacgctggccccagggcgtggccctgcccaccttcggagaagtgggatgagacagtggaggagaaggcaccccaaaccgtactgctaaggctgccggtgctgcgggtgaggggcagtgacaacacgggggggggtctctttcaggcggctctgggagcgcgccccgggtggtgagcccttcgccagcctgagagccccttagcttggggctcaagggcaacaaacagcaccctgtgtccctgagacctgttcactgatactgggtggagacctccaaagcctaatggaaacggtattgctgttttgtaagtggctgtgagcttggggccgtggccagcacctttcatttactgcaatgtgaccttggactagagacttaaactctgggagcctccatctctttgcctggaaaataatcattcctatatcaccttatattaaacaaaggagaggcaaagtgcctggtgcattggaggttctctggggaagtgtctgttcctcttgtctgcccagcccttggggcctgtggtgcctgaggagagactggcctgggatggccctgcccctgcagcaagtgcccagtggcccaggaggtcgtggtgggtgcatcacagggtggcagtgagacctggaggggcttggtgccccagggaccagttgtgcctatcagtgtcacagcctaaagcctcgtcttatgtggtaattgcgacccagcaaaaacacacacttcttcaggccggtaccccctgggctgttaaggctacagaattttcctgaaaggtactttctgactccatggagaccgggtcaaacccttacactttcttcagcgttagggacaggaaaatccccctagtgggttaactttctatcattaagggctgtcaagaacacctcttcccagcccgagagtcccctacttctctatgtgggctgtcccgcagcatacaccaacacacacaaaccacaaacgcagggtggaggctcttggggcttcccgctcccgcgcccctgcccccgacaactgttcctacagaggggattatcttggggaatcccgagtgccaaaactaagctcttactagtggttttcaaacttgaccttccaccagaatgccctggagggctccttaaaacttggacgggaagactaagtgttttcggttcagcaggctgggagaggggcgtggtaggaatttgcatatctaaccagttcccagggcagctggtgcttggaccacctgtggaaagccacctgggatttagatcaatccctgaacagccagagctgaagaacagcagtgaccacaccccaggcctccaccagaagatatgaagtggcgtgtgttaacagcacaggtggaaatccctgtggtgccatcaccctctccccaatgcctccctctacccagcacactggagctcaggaccgaggactcaccccaactctctccaggcctacacctgctgcttaagtcacccaccaactctgcacagggacccacagggtgcccggcctggggagtgcaggatgggggcaggcagggtgagacaggtgtcacagaagtgagcatgaggaggtgggatggcaggagagggaggggagcaagctgtggggcctcgcagcctgggcaggtcaaggaggcagagtgtgaggtttgtaccatgcctggtggtcacaggcagcccagcacagcttggaccaggagccagaagctcctgaagggtgtgatgtctggcctggccagccgaggggacgcctcaggggctggctgaggccgtctggcagcaggttccagccggccctctgatctgccactgtctggcaatccccagctgcccagagttgcctggatgcctgggctagctctggcctgggagctatagaagggtgtctgagttactgaagagggaggactaggactagtgagccaagactagtgaggagagaaagtccgggagccaacccaatctcaactgcagaaccccccaaaaaacagccttaccacgataagacttgccattaggcggtacaaatatgttgaattagaccaagatagggccacaaagcccaaccaagattcccgcatgaaacatcagaggatgtgaatgaccgcaagactagggctccacttgccctgcccagtgggtggtcccccaagcctaggccctgcagagtccagccagtgcccaagggctgtgtttggcatcagacatgtatttagcccacatgatgtttcaagatttgggaacttcctcatgaaattccagataatctatcctcttctgaaaaatcagaaagggtctggctgcaccaggcccacggtcctgcacagtagggatggtttgatctgatgggcggctgactccttgagtggagacccactccccacacctgcgctgcctgctgtgagcatctgagcctataagcccctgtgtagccccacaccccactttacaaatgagagtactggggaccaggggccacaggtgagactctgcagatatgtggcgggaccagcagggaacagagagggactgactcctcttgtccgctgaatggtgtgatgggctgaggacggacctgttctcggcagcagttcacatggacaaaggtctcgggggaaggggaaagggggaagacccccaaggtgatttctgccactgggaactctggaagggatgcactgaccctctgcaagggagatgacctggctgctggtaacctggtccctggctcagggtcagaggtgagtgatgagagtgaccatataacttattgtccaaactaggtcactgctgagagtgaaggggatggtcttcatcattaccctgaaacaacaggtatcaggcagggcctcccagggtacatggtgaccccatgaacaagagcaacaggctcacctcacggtgtctcagctggaagctcttgccctcatggtagcagttgtaggttttcagcaggcctaagagctccgacctaaaaagggaaagacacacatgtactcctagggtgtggcagggcctcagcttctggcctttggcttccctggcctctgtttcctcatttgtaacaggagtgtgacagcacccttctcgccggccaggcataaccagaggagaccagactgccatcgcaatgcacccggatggttctgcacatggccctggtggggggcatgggggtcgggctgaggaggaggcgagactcacgggacaggcctgcgtctggtccaggatgtccagggtgccgacactttcactatcacaggtaaggccctggcagcctccctgccctccacctgcgttgcttcctcacagtaaatgccctggacttgcttttggcattgtacagcctcttgcttttccccatatcacttcctacaaggcctgctgtggctgctgcgggccaccctgaggggtgcctgcttcttccccaccctgactttccaaaggcgcagtggaaggtgatggtcctgtgagtaaggccctgaagtctgcagtaagccactttccctcaacgctgtctcccttcccgaagggaaagccacagccctggctaatgttggaggaaggggaggcctggacagctgcctgaacccaagctgggctctgtggggctgtggggccagcagacgtgggatgtgagccacactggtaatttcaatcttctagtacatgttaggaggtgatatggtttggatgtgtgtccccacccaaatctcatgtggaattgtaattcccagtgttggaggtggggccaggtgggaggtgtttggatcatgggagcagatccctcatgagtggcttgggccatccccgtggtgataagtgagcttttgctctgagttcacacgaggtctggtcatttaaaagtgtgtggcaccaccctccactccctctctcttgctcctgctttcgccatgtgaagtgcctgctccccgttcgccttccaacatgactggaggctccttgaggcctccctggaagccgagcagatgccagcaccacacttcttgtaaagcctccagaaccgtgagccaactaaatctcttttctttgtaaattacccagcttcaggtatttctttatagcaacacaagaatggcctaatacagaggggaaaatgaaacaggtgaaattagcattaataacacattttattgaactcaatatatctaaattactatttgtcaacatgcaatcaatgtaaaagttataatgaggccctgtacacacctatttcgtataaagtgcctgccatctggagcctcttttctattgcccatgcctcccagccatggtcatgtgtagcttggggatcccctattggacaggctcaaaaagaagcaccccatcactgtcccccagggcaccccatcagatctctgaacaagtgctcagaacccctccacctaaaggctgcccaggatgagggggatggcaaatgtgaagactcccccgcccaacctgcacaccaaggcttacttctgaatggacttgctgtcactgatgggcacgtgagaactcggcagacagtcttccttcatcttctcttcctcttgtctgcagacctagaagttacttgctgggaagacaaggaagggtggacagacaggtgagcc

SEQ ID NO: 7032 - DNA, 13927 bp, Homo sapiens
cctgtctgggcccaggcagggtctgcagcctccccagcgcccctccccacagatctaatctcagcccttctccttgtacttactgggggtagggtgagtgataaaggggcagggatgggtgcaggaagtttgtgggcagggggcagagactggagagtcagtgaaaattgaagaaagctgcttaacccaagtttgaaatcatgacactagaaacaactccagcaccatagttatcacgcagacttcaacgtggccaccaccattaccgccacttggagtcatccctcttccccacctagctgccccctccgtccacggtcccgactcaggtcttgccttctctggtcacttgtgcaatgcagttccccgcccctccagccccctctccatccccgcactgttgggctgcacaagccaggctgtgtgcctgcactctgccctgcacctccgctagctagctgggtgaccttgggcaaggaaccaaacttgcctgagcctcagttccccgctgtatctgatggggatgatgagcaaacccaccacagcggtagctgggagcacgaatggagtgaacatgtgtttgtggacacttaaacgggcacttcccacaaggccatggccttgcacggagggctctgtcaactggtaccaccactgttgctctggcattagcaggtacaggccctgatagccattcagaacttcctttgaatgaatgaatggaatcctcaaaacagcctggtgggcaggaggctggggcccatgacagccttggggagggcctggggtcttctgggggcacagtctttgcctcaggccaactcagcaattgttgcagaggaatcgcaagtgtccctaatttggaaggcaggaaatggggggtatctgagaagagctcgttgggccagatgatggaaagtggactgacagagcaggagacaggaagaggataaccatgcatgtgtgatggctttgcagggcagcccattcattcattcattcaggcagtggaaacaggagtgcagacccgaggtgggaccagccacctgcactccagcaggctctccctctcactcccctcccctctgccctgacagcagtaaaaaaatgcaaaaaatgacagcggtagcacttcctcatcgggttgtgaaggttacatgagtttaatgcaggtaaggcacttagaatatgggcacaggacaggtgttcagtaaacacgtataaaatggctaactaaaaaaaaaacacgaggccaggtgcagaggctcatgcctgtcatcccagcactttgggaggctgaagtggggatcacctgaggtcaggagtttgagaccagcctggccaacagagcaaaccccgtcaccactaaaaatacaaaaaacaacaacaataaaaaactagccaggtgtggtagcgcatgcctgtaaccccaactactcgggaggcggaggcaggagaatcgcttgaacccggaaggtggaggttgcagtgagccaaaatcgtgccactgcactccagcctgagtgacagagtgagactctgtctcaaaaacaaaacaaaacaaaacaaagaaaacccatgaggccaggcacggtggctcacacctgtaatcccagcactgtgggaggtcaaggatcacttgagcccaggggttctaaagcaccctgggcaacaaaagtgagaccccatctctacaaaaaaatttaaaaattagcttggcatggtggtgtgcgcctgtagtcccagctactcgggaggccaaggcaggaggatggccggagccaggaagatcaaggctgcagtgagctctgattgcaccactgcactccagcctgggcgacagaggaagaccctgtctcaaaacaaacaaaccccacaaacattgattgaaccccccattgaggggagcaggctcaatggcaaaggaaacagaccgacactggccaagaatcacagaagcaaagcacccggttactcatgataaacctgggaaggaagaaagtggaacagtttattcacttaatgcttgtttgctaaagccaagtagaaaacggcaatactagatgtttagtgtgcttcaaatacaaatgtttgtcaaaataccaagtaaaaacataaatttataaaacaggaaaccagaaacctcccttacctttccaatgtaaaccatgagccactgctgccccaaggctgcctcaggcttcaggagtcctccaggagctttttctttaatgcagtgtctgttttcagggaccctcctggcctttggcagccagcttcctattgcaggagctgagggtctaggagggttcatggcgaggttgtcagagctgggaagcagaaagcagccgggcaggcctcacagtcacagagtccacgtcccgggcagcatatggagaaagggtctgggctggctgacagcagtcagcattggcgcctctgaggaggttgagggctgagttggggaggtcaccacctgtacccaggcataacaggggtggtgcaatcagcaaagggaaagtggtctgaagtggggcagtggtgaaaagctaggccagcggggtggagcccatctggaacaagtaggtgtgtggggtaggggacgcaggtggttgcaggtgggccggtacctgctcagcctgtcaaatggtgaaagccatggactatgaaggtggggctcaagcaggggagactgactcagccctgccacttccccacagcaaagagcccaaacagatcccctggagggctgtcgggagcccctacgtggtggagtccacaggcgtgtacctctccatacaggcagcttcggtaagctggggagaggtgcccagggctagctggggggatgatggtgccagaagcccctgacacctgcgcttcctccccaggaccacatctctgcaggtgctcaacgtgtggtcatctccgcgccctcaccggatgcaccaatgttcgtcatgggtgtcaatgaaaatgactataaccctggctccatgaacattgtgaggtaatgtgggcagtgacatcctgcaatgtgtggaagggagggtagactcgtcctccccaccctcagccccactggattcctggtcgcttggcttctgcttctccttcccgaaactatctgctaaaaacgcatgacttccagaggacaagcttggggagcctccccagctgcacctcagtgcctccttcagtctgacagtgtccccacagatccctctcaccctcatcctgacgtttcataaaaccaagtctgcgtgcataccccaagaggggtaagggtggaggggtggctctgcgactcacctcacagtgtccgtgcacaccttggctgtttcagcaacgcgtcctgcaccaccaactgtttggctcccctcgccaaagtcatccacgagcgatttgggatcgtggaagggttgatggtgagttgaggatgaggggctggggcaggaaggatggcagggaaacccaacttcttcccgggccttgcttactgtatggagttaagagggagagactggtttcgggaggagaggcccaccagtgcagaagtcacttaaaacactgtgcaaccctcaggcaaggctggaccctggcctgcacacatcccctcctgtggtctgtggtggtggccccaccagcctccacacctaggccaccaacttagtcctggaaaaaagaggcatgggagcttaggagcatgaaggcctcatcttggtccttctcttccccaagaccacagtccattcctacacggccacccagaagacagtggacgggccatcaaggaaggcctggcgagatgggcggggtgcccaccagaacatcatcccagcctccactggggctgcgaaagctgtgaccaaagtcatcccagagctcaaagggtatgaggacaagaagctgcaaccagggtgggggcatacgccaggaggactggactggcccggccctcagtccttaagaggaaagcaggggcctggcccagccacagggaaagggggaatggagggcaacgtccctaagttctgactcctgttcctcatgggggattctccaggaagctgacagggatggcgttccgggtaccaaccccggatgtgtctgtcgtggacctgacctgccgcctcgcccagcctgccccctactcagccatcaaggaggctgtaaaagcagcagccaaggggcccatggctggcatccttgcctacaccgaggatgaggtaggggctgaggagaggagaccctgggaggagccctctgggaagggacatgatttccacttgccagggagctgctctcaatgtgccaagtcagaaactgcagggcaggaagggagatctccctgcctcagggcctttgcacttgctgttcctttagtctggaatgcttcccttgccaggtgaccatacagtctgtccttacttcctccaagtctctggaggaacctccctcttcagcaaggcaccccctcaaaatatgttctttttgtggccatattcctcacctgaaatttcatttcatagtcactgttggccccagtggtgtgtgcactccaagaaaacagggatttaggggctgccttttcacttttgtggctccaacctggcatacagcaggtgactaatacatgcttagtgaacaaaagacaacagctcccatttttttcaatacttgctcagggccaggccatggccagatgccttctctgtgaggagtggatgccatggtcatggtggacccctgtacatccaccttggtgctgtctccctgcattaactcctgcaggtccactttcccacagtcactgggatcttttgttttaatggaatcacattgcatcacccgttttcaggattgaaaacactcctgtggcctttcatgacactagggctaaaaccctcaggtcctcccttcctgcagctccttctacctcagacactgtgctgagggccccagccggtcagatctttctagtcatctagacccaggctcatggccacccctcagagaggccctccatgctggcccattccaaacgcttgcattattcctaggaaagggatgtactggtacagcatgagggtgtttgtgacctgtgccctttggccagaccctgacacagtgccttggtcataccctgcacttggtcataccctccagtccagagactggacacagtagggctacatcaaatattatagatgaatgcatggatgggcgatagagttaagagtcggggcctcagctcctggaggtccttgctctgccggacacacttatctttgaaattctgacttccaggtcgtctctacggacttcctcggtgatacccactcgtccatcttcgatgctaaggccggcattgcgctcaatgacaatttcgtgaagctcatttcatggtaagggggaaggagctggagacttagagggaggggaactaaggggtggtcggaaggaacccccttgaacctcccgacccctcctccacaggtacgacaacgaatatggctacagtcaccgggtggtcgacctcctccgctacatgttcagccgagacaagtgaaacgggaaggtcctttctttccttcccaggggccggggccggaacatgtgcctcccgttccagcatctggctgcccgggggaggaaggacacccggggcgggcgccccacgccgatgggtccatggtgaaataaaaaacagtgctcacggctgcgtcccgtatctctgcgccggtcagggcgggttctgatccgggtttgaggcccgccccacccttactcgatcgcctgcgcccacgggcgaggggtcgcgctcgactccaagccgggttccacttcaggagaccgggaccgcgatggcagcggtagaggccccgcatggccggaagtcactccccaaagcgctgggccggcagcggtgggacccagggccggccacgggctctctgacgtcactgggcgcgacgccccgcgccgggactactgctcccagaaggtcgcgcgcgggcccccgccagtcaggtgggtgccaggccctggccgtggcgaaagagccggcggagccggagacccgctcccggagacgccgcctcgcgatccccgcgcgggcgggaccgggcggccggcatcatgaccctgtttcacttcgggaactgcttcgctcttgcctacttcccctacttcatcacctacaagtgcagcggcctgtgagtgcgggaagggcgcggggcggagagggcgcggggcccgggccgaccctcacctcccgcttctccaggtccgagtacaacgccttctggaaatgcgtccaggctggagtcacctacctctttgtccaactctgcaaggtgagggccaccgggaagccacgtgttctggcccccaggctctgcagacccagggacccgcccccgttgcctatccgcgcccccgccgccccacggtgggaccgccctcgggactccgcactgggaggcgtcaggatacctagagaggatggactttaaagagggcacgacctgagaagagacctagaagcaacttttgcgtagcacttagtaaaactgagaaaacctcagtagtgtggttggctaacaggttttttttggtgcggttaagagtgatcactgattccgtacgtgctgctaacactgcccaaggagcagcaccttcagacctgactcagatgccctgtgatcacccagaactcaaacttccagccccctcggggacccggggacctatcctctatctccccgattcctgtaattttgccaccatctggtggttcctcttccagatgggcccccagaacctgtcctgccctcttcctacccacgaacttcccacaaatcccacgtggtttatcttgatcccctcaccttgaagtgacctctttctgctttctgttctcagatgctgttcttggccactttctttcccacctgggaaggcggcatctatgacttcattggggtgagaggggccagggaagggaagggagytcaggaatggggctccctgtccccctgtgcttacttaagcctcaacctgacccgcaggagttcatgaaggccagcgtggatgtggcagacctgataggtctaaaccttgtcatgtcccggaatgccggcaagggagagtacaagatcatggttgctgccctgggctgggccactgctgagcttattatgtcccggtgcgtacagcagcctggagcccagacccctgagaagggacacctgggttccacgggggtgctggagggcaggggctcaaagcctggtgctgaaggtgtctgagtactggagaatcccatcctttgccttcctcagctgcattcccctrtgggtcggagcccggggcattgagtttgactggaagyacatccagatgagcatagactccaacatcagtctggtaggcagtcgtgctctcccacatacacatttctgctggcggccatactcctccccaaggcctggccccgactttctgcctccctctaggtccattacatcgtcgcgtctgctcaggtctggatgataacacgctatgatctgtaccacaccttccggccagctgtcctcctgctgatgttcctcagtgtctacaaggcctttgttatggagtgagttgggtggggtttagggctgggtccaaagtggggtgggttatctagtctcccttccttaytgtgacattttccygcaggaccttcgtccacctctgctcgctgggcagttggrcagctytactggcccgagcagtggtaacggggctgctggccctcagcactttggccctgtatgtcgccgttgtcaatgtgcactcctaggcttggtgtctcagacattgatgtaccttttccctgcctcrctccaggttttagtgaagtaaacagtatttggaaagttgttgctgcctccatttctctctcttgggaactgtctcccaataccgtgtccacctgggtctcagaggccctggttctgtctcaggagccaggtagacaagctggaagctagccagtcactgacttgtcccatgtcttgttcctcaggctcctggtttgccaggagtagacagaaggtttggatgatctttgagcagtggcagaggccagggccctcagggaacagatgatagaggggagctagaatccaagagaaggcccttggggggctcttcctcctcacagccccaacctgggcctcctcacatgggcccttcccgggctggttgcctctgaggctcctggccccagtgtccccctccaatccatcctctgtatggcagccaggggatctatctgaaacccgtctaaccaggtcatcctcccacttgcagccacttgcggccccttgttacacagtggacagtccaattgcttggcctttggttttacccaaccagcaaaaccagcttttctgaaactgctccctagaataatttgtccagccagattcttaacatcgttcaagccatggggtcagcatggggctggggggagagttgtgactgtgagctcctcagttctatggccctcagatcagatcccagcctgagccttctcagggtggagtggagagacagctgcagccaagaagcagagcagtggggcccccagcttggacattgtcctggatgcccccctccaccctcagccttccttggtccactgaagccggctccccgcctttctctgagggggatgtgtcagaagttttgaatgtcatgtttaagctccactttgatgtacaccctccccactcaggaagatgctccccatccttggtgttcccagtggggtaccccagggagtaggatagcaccattgcccctcctcctccaccaggccgttgaagttccacctgattttttttaagcttaggcctaggaaagctcactatgaccatctcgatgtttccagagggagcatttgccttcagacggcagctgccatctaggccactcttcctcattgtttggagtaaagacagggtccatgggtctcttgggagctggaagtgattgatcaccttgactttgatgtagaaaggaagtagatggggcagtctatctgggtggacttgtgacaaggtcactttctcccacacttccatgccccacatagctcttcacacatattgagacaagtgtaggatgcaaaattaccaactggaataatcccagcttacatggggttcagggagagagactggagtggctgggcctgagttggcagaggacggtgaagcctgggcggttggactgtggggagccaggcttcaggtgatcggggttatgatgggaaaaccccgggttatggggacccagaggagccgcctggcctgccgtggaagcagtgcgggctcccctgagcagaggacatgtgagctgagacctaaagaatgagtgattggggcaaggcagaggtaatggtcttgaggtcagagagggggcctgtttttcccaagggaacataactggttggaatgagttcaaggggacttgtaagactacagaagctggcaggggtcagatcacaggaggctttgggaaccaaggagagctctaggcagaggaaggacagggtcagatttggctttaggaagctctgcatggctgttgtctgaaatgggaaagctgaggccacgaggccagggctggaccagggcagggctttgtggggttaggagagtgactagaagccaagcccaggtgttggtgatcagtggctgtgtgtatttatttaccggcagggggcgctaacaggtaagggaggagcaaagagttccaggataactggagtttggggcttgtaagcccgagggctcaccacgtttccaagggagaagggaccacactgatgggacagtgggactatcagattgggtcagtgcatgggtacaggcatggggggtgatgaagaggccagtgtaggtcaccaacactgggggaagctggggacagaggtgggtctcactgcagaaacaactgaagccatgggggactggggggctgtggtcacaaggaaggagaagcccaggccctagccagagaaagccacataagaaagaggaagagaggtgaacagaggggctgggaaaggagcggcagagatgggaggtagggggatggggttaacctttcaggtgaggggtgtgaggaggggacctccaggagttgttcaggaactggccattgccgggacagaggagtaagcaggtaggctcagaaaggagacaccgctggggggtgggggatgcttgatgtggaaatgacttgggcccccttgtgtctgggagcctccaggagggagaagggtgctgagaacagagaaagcccagaggtggtagggggtgcctatcgccacggcccagcttgcgtttagatgccatgaccctgggcaaaggaataggaatcatttccccaaggcaggtttattgaggacctactatgtgccaggctgtgtactaggcactggaggtgcagccctggataaacagcccccatgtacaggactgtgggagatcacaagcactaatgagagacgctgaggacagtgcctggcaccagatacagcacagtcagcatgagctggttttattaccatcgcccaggacacaagcgtgtctttaacgaagggccctcaggcagccgtccagcctggactggagtcctaagaacagaaacaccctccagaagcggtcagctgtactccctgtcagagccccaccgccaccacaggtggcggctttcccgaggccagcccagaggactgcccaggcgctgctgctccaggaggtgcgaaccttgggaatgggggaggggagtgggcaggtccctccaagtttggggtgccgtgggctacagaagcagatactggtggggctgggactcttggttgctcagatatcttggtggctgtccagagggtcccacgagccctgcccccacctgctgtggcagttgcagggatgcttgaaggcagtcgtccctctaatagtagagttcctggtcccaccagcctgggagagagagggagaaaggagactcagtgctgggggtgccacttaggcagggccaggggctcagaggtcagtgctggttgctatggagggtcaagggcttagaggccaagtgttgaggatcaaaggtgggtgcagctgctcaaacgtttcagtcccctgcccccaggctcccagtctccacactcactccctgggcaacagcgaactccaagcttccggatctcatcatagacgaagatgaggatgccgtagggcagggggaccagccaccactggaacctgaaggcacatggcaaggtgaaggccatcccaggcctgtgccctacagccccctccctgtccttgcccctcacagcctctcaccgaatgggcatgaagttgaagatgttgggcatgccggggcagtagcacaggaagcagccgatgcagacctggaacacgatggcgatcaccaggatcttattcctgggggtgggcagaatgggacaggccattaggaattggggacgtgatggaaatcaggatactgtgggtcaaagtaggtcagatgtcagcagcagcagggaggtgttctacacactgaacactggagtggcccgggcctctcagcaccacccctttagtgaaatgtggagggggccgtggggggagttattggccagttagaaaggtttttttggcatgtcaccatctggcactggcacccgctggcatttgccggctgttctaaaccacagtcaggatctgatgggagttgggaccaggggttggagggcaggaagagggccagccagggacacctgaagaagccttgctggaaggcagagagacggcgcgtcttgcggatgaggacatcggcgatctggcacacctcaatgctgatgaagaacacggtgtagcaggtgtactgctggtacaggcgctgcccgaatgtctgcaggccaggggcaaacggaaacagcctgagtccagcctgagtcccggcggagagcctctgcagcccaccgggcatagggtcccagggccgtgaacccctaaatgctctctctgccttgcatcagagtgtgggggtggggggaaggagagaggcagggtctgccaggtgtgcaggaccccagaacgtggggcccagaaacctcagcctagcagagcttggatgacagtggccgggaaaactgtaggctgggccgactgctttcatagtgaaaggggggaggcacccaaaagaaagggcctgggaaaggggaattgaaatcctcagatgggatttgcaaagtccagtgactccaggggccaggcagatggcaaaaataggtgaggcagtcaccgcgggcctttgggaaaagagggcagatgccccatttaaagggggcagccactatgcagcccatttcttcaacacagctacttttttttttgagatggaatctcgctctgtcacccaggctggagtgcagtggtgcaatctcagctcactgcaacttccgaatcccaggttcaggagattctcctgccttagcctcccaagtagctggaattacaagcatgcgccaccatgcctggcaacacaactcctaataccagctaactgtggggatcactgactgctccaggtgccgagtgttgcacgtgcattagctcatttaatccgctgggtaaccctaggaggtaaatcagtggtgctggaacttgaacatgcatgagaatcccagcaagggctcccagagggctgggatagagcctgagaatttgcactgcaaacatgttcccaggagatggtgatgctgctggtctgggagcaaactgaaaaccactgaggtagactttgatattctctccactttgcaggtgagaaaacaggcacagagaggcaaagcaacctgcccagggttacacagcttgtgagaagcagtaccagaccataagtccaggcagtctggcttcagtgtctaccttaaccatgatagtaaatgtttaagggaagtatcctcgtctgtatgtaactctacaggtgaactaaacacatctgctggccagatctagcctcactgtgctccaaaccttcattaaaatagaccacatgtgcaaataccctgtgggagtgatgctgtagggaaaatagcagaataggggcctggttccacatctgagatgatgcattagtgtcagggcagagacacccatctgcagttgcgatcatcagaagcaggagtttggagctggagatggtgggaaaggcccttgcccccccgaactggcagggagtctgggggtccgggatgctctggctgaactcagtcacacgtggaggaacaagtgggccgcacacaaggcaagttgccctgggaaggagggagcccagggatgggatggggcggggcagggctcacccactcctggccgtagctgtcctgcagatcttgtaggtggtggtcctcccactgcgcccgcagccccacgcacagcagtgggaaccagccctcctgggccattgccgtgaagtagtcagtgaagccagcaaaggactgaatggcacctggagagagacaaggggacacagggagacagagatggacacagagacagggacacaggaagagagggacatggagagacagggacacagatacacaaaggtcaaggacacacagacagggacacgggaagagagacagggacacagatacacaaggtcaaggacacacagagccagggacacagaaacagtgacagagacacagaggcagagagagaagcagggacagagagacagaggcagggacagagagaaaaagacacatccaggacccaaaaagacagaaataggcaacaactcagagacagggtcatggagagcaaggtcagagagagagcaggga

SEQ ID NO: 7033 - DNA, 16860 bp, Homo sapiens
gggaacagtgtgggaatggaggcagcccaccggaagacctggttcctccggctagagtgagtgagtgagtgtgtgtgtgtgtgtgtgcgcgcgcgcgggcgcgccgcccttgttgagagactaaggaagtagtttgccctctcttaacctctgttggccgctctgtaaactgcgggcacactctggccttctcaggtggtggtgaggcttccctgagctctcgcctgcgaagtggtcagcacgtccccggcaaggttccaagtgtccttgttttgtgcatcacagggagggcaaagctcacctcacgcgaagcgccatgaacatcacttttacatggaagcccagcacccctgggttctccctaagcccctcctaagcccgcccacttcccgccactttcaggctgcagcctccgatggccctcgtttctgctctttctaccgcgtgatagcggcgcgaagcccacccagccctgggggcggaggcccggtctccccgccatggcagtaaaccccactctgccagcacactggcgggtgtggagggagggagagcggctgatcccctggtccctagatggtgcacacgccaggaagggcggtagggatacggcacaggtgtgagggtgcagacgctccccactaccctttccacccctcccccgcgccctccgctgcctccctcacccgggcacggctgtcgcagcaactggacaacggtgacattggtgaggacgatgtcgcgcttcgacatggcctcttataaggttatcattggcctggacctgctgtgatgttaccgaggtgcgtgcggagcgccagggctgtgggtcctgggctaattgccctgatgtcacagcacccagtgacgtcacagtacccagtgacgtcgccgaggggcggcgcccaagccagaggcctgacaccatcgcatcccatccccgtagaggcatgggacgtcagcacgctatgcatcaccgttccacggccacgcactgccgtctggaatggaatcccactttttaaaattatcatttgtttatttattttgagacggggtgtcactctttctcctaggctggagtgcagtggtgcaatcatggctcactgcagccttgaactcctgggctcaagcgatcctcccgcctcggcctcctgagtagctgggactacatgtgcagccaccactgcaggctatttttactttttatttttttgtagagagagggtctcactcttttgctcaggctggtctagaacccttgggctcaagcgatcctcccacctcggccttccaaaatgctgggattacaggagcgagccaccacacccagcctggaatcccaccttttacactgttcctgaaagccctttcctcttctctgtctcttgaagcacacaggttccatgctgtcccttggattctccagtggagtgactcttgctgcctccgtatgcctggaaggcccacccagggcttcccttggctgcctcttggtttcccaccctttaagagaggctttctacactctgcatctaagttccctcctttctctgtcactgtcagccgtcacccccttcccaatttctgcccatcttccaggaagccttgtctgacttctccattctgagttatgcttcagtgtgcaaaatttctctagggctacactgtctatgtttttattttccttagagcacatgtctctctaaaaattgtttgttttcttgccaactgtctctgtccaccagactgtaagctctgagaggacagggacgtcatctatgtcacttctgtatcccattgacaagaaaagtgtttggcacctgaaaggtgtttgtgggctggacgcagtggctcatgcctgtaatcccaacactttgggaggctgaggtgggaggatcatttgagtccaggagtttgagaccaacatgggcaatgtggcaaaaccctgtatctacaaaaaataaaaaaagtagccaggtgtggtggtgcatgcctgttgtcccaattattagggaggctgaggtgggaggatcacttgagcctaggaggtcaaggctgcagtgagctgtgattgtgtcactgcactccagctgggagacagagcaagaccctgtctgaaaaaggcgttagcccaataaactatacctgaatgaataaatgtcaattcctcaggtttcatctgatcgctaatcttttcttttcttttcttttttttgagacagagtttcgctcttgttgcctaggctggagtgcaatggtgcgatctcagctcaccgcaacctccgcctcctgggttcaagtgattctcccgcctcagcctcctgagtagctgggactacaggcgtgcgccactacacctagctaattttttttttgtttttgtatttttagtagagacggggtttcaccatgttggccaggctgatctcaaactcctgacctcaggtgatccatctgcctcggcctcccaaagtggtgggattacaggcgtgaaccacctcgcccggccctgatcgccaatcttatcaaactcttcacgttatatcttctcgcagcacccattcttttccttgtagcttttcatgtagtttgtcatgatctactgattggtttatttgttcgatgtctcccccttgggctctaagcccctcacagggctcctgttcttgtttgtttgttcacgactgtgcctccagcacttagaacaatacaaagcaggttttcaatgaacgtctgacaaagaacaagtggacaaacagctccctcccctgcagccccggggtaggggtttgcttgcacctcagtgactcacaggcaggcaccatcacctgcacagcaggttgacacgcagctgtgaccaaggttcagggggagtgggggtttgtgccaggaaggagtcaccatcccagagagggatggatgcaagaaggggcagaatgacataacctcttccttccgccaacatccatgagaaattcatttgccaagcacctgccatgggaccagggcagggtgaggctctcctgctttgatggcctgggagaagaaagtaaactaagtgtacaggtgaggaggttttaacgaaccgagaccaaaacacagatgattaattaaacaaagggagctacattttggtgtacaatcaaggaggtgaaaaatataacctcaacaaaaccaggattcaaaaggggctgattttggctgggtgcagtggctcacacatgtaatcccagcactttgggaggccgaggcaggtagaccacctgaggtcaggagtttgagaccagcctggccaacatggtgaaactccatctctactaaaaatacaaaaattagccaggtgtagtggcatgcatctgtaatcctagctactcgggaggctgaggcaggcgaatcacttgaacctgggaggcggaggttgcagtgagccgagattgccactgcactccaacctgggcaacagagtgatacttcataaaaaaaataaataaaataaagaaaggacaactccaggccattctcagttatggagccagatgctgaagtcctgaatcgaatcgtgccacatgggaatagagagacagaggagagggactgaggctggcagaagatgaaaggatggggtggagagggatagagaagatggaacacagttcaggccaggcacagtggctcacgcctgtaatccctgcccttggggaggccgaggtgggcggatcacctgaggtcaggggttcgagaccagcctggccaacatggtgaaaccccgtctctactgaaagtacaaaaattagctgggcatcatggcaggtgcccggctaatcccagctactcgggaggctgaggcagaagaatcacttgaacccgggaggcggaggttgcagtgagccgagatcatgccactgcatgccagcctgggggatagagtgagactctccctccaaaaacacaaaaagaagatggaacacagttcaaagtgggagaaatcccacctcttgatctctgggtgggttaggattctgacactcatcacccactcttctctgcccagccacctcctggtatgggaaactccatcatttcggccctggaccagggcagaaaaaccacacctgagtttgcccaggaatttggctttgtccctggagtgtgaaaccgggaaacagatttgatgagctcaagcttggagaggtggcacacttagtcaccctctataggcagagcccagagaaggcagaagcttctggatatctgtcctgggatgcctgtctttgggtggagtcaagtgtccaggagctggagaggaaccccgggtcctctgaggggagtgggccttggcgcctttgtttgagcaaagcctgaaaacacgtgcagattctcgccacacctgggcacccacacacatagctctgccacctccagctgctcacaccctgcacattgttcctgcctggccttcccaccagcaatcccacctccacccctctctcagtctctccccttggcaccaaaacccaaatatctttcacccctgcacctactgtacccacccactggctctcgttctggtcttagcctccctcccaactggcttctagatgcatctgctgccccaagcctgcccaccaccacctgcccttccttccgatgcccttttcatgcctgaggccagactctcagctgtttcccctccaacccgagccaatatgtcaacacttggggcttcaggttggggcttaggaggccccatgtcgggagggcaggaaggatgagggcctggccccagcccaggttctggctcacaggctcctgctgccctgggtcttcggcccctccccgtggctgcctcaaccggcttttcaggagacactgcgtcctgttccagctcgtggcaatcagccccctgcccttgcccaagggctgggaggcaggaggtctgggttctgcgacaggaatgggatcctgcctccaaaatctgcggcactccacaagggactctatgctgccctggcgacccaggcgcccttccctccagcaccctgtgagacccagactcgggctcggagtctctttccttggcctgttcgaatccatccatttgtccagtcaataaatatttactgaaccccaggcagtgttcaagaagctaggaatacagcagtgatcaacacgaccaatttacattgctagtaggtgagacaggcaataaaaaataaaggtaatttcagattttttttttctgtgaaaacaaaagggtgatactacagagtataattaatgccatgttatggtcaggagaggttttcttgcgaagttggcatttaagtcaagtacggatgaggaggagccagccacgtgaagatctgggttctgcattccaggcagagagaggagcatgtgcaaaggccctgcagcaggaatgagcttggtgtgtttgtggaacagggagaaggcctgtgtggctggaatggaatgagtgagggcaggggctggcccacaagaacgaggtctgatgactccttcatcccacctagtgttctcccctctccagacggtgcctcccatcattctagcccctcactgcctggggagctggaggcttagatgcctgagaggagtgaggtgttgaagaattgcctgcatcccagggatggagcgtggtggaaggtgggtttgcgagagaggaggcctggacagtgggtgaggaatgaaagaggaggtggttggaagggcagacacccatctctggggtggagggcaaggagcaaagatgccagagttcttctccatccatgactcaccctctcttcctcctcctctccattgctcaactccaaatctccctgggaaacacctccttgactgaagaccaactcagtgcctcacaggggtaattgagtcatgaggggtggagaagagggcgagagggagagaggataaatagcagcgtggcttccctggctcctctctgcatccttcccgaccttcccagcaatatgcatcttgcacgtctggtcrgctcctgctccctccttctgctactgggggccctgtctggatgggcrgccagcgatgaccccattgagaaggtcattgaagggatcaaccgagggctgagcaatgcagagagagaggtgggcaaggccctggatggcatcaacagtggaatcacgcatgccggaagggaagtggagaaggttttcaacggacttagcaacatggggagccacaccggcaaggagttggacaaaggcgtccaggggctcaaccacggcatggacaaggttgcccatgagatcaaccatggtattggacaagcaggaaaggaagcagagaagcttggccatggggtcaacaacgctgctggacaggttgggaaggaggcagacaaactgatccatcatggggtccatcacggggccaaccaggcgggaagtgaggcagggaagtttggccagggagtcgacaatgctgcagggcaggcyggaaatgaggctgggaggtttggcmagggagtccaccatgctgcagggcaggccggaaatgaggctgggagrtttggccagggrgyccaccatggtctcagtgagggctggaaggagacagagaagtttggccaggggatccaccatgctgccggtcaggttgggaaggaggcagagaagtttggccagggggcccaccatgctgcggggcaggccggaaatgaggcagggagatttggccagggggtccaccatggtctcagtgagggctggaaggagacagagaagtttggccagggggtccaccatactgctggtcaggttgggaaggaggcagagaagtttggccagggggcccaccatgctgcrgggcaggccggaaatgaggcagggagatttggccagggggcccaccatgctgcggggcaggccggaaatgaggctgggaggtttggccagggggtccaccatggtctcagtgagggctggaaggagacagagaagtttggccagggggtccaccatgctgccagtcagtttgggaaggaaacagagaagctcggccatggggtccaccatggggttaatgaggcctggaaggaagcagagaagtttggccagggtgtccaccatgctgcctcgcaggtggggaaggaggaagacagagtggtccaaggcctccatcatggcgttagtcaggctggaagggaggsggggcagtttggccacgacattcaccacacagcagggcaggctgggaaagagggagacatagcagttcatggtgtccaacctggggtccacgaggccgggaaggaggcagggcagtttggccagggagttcaccrtacccttgaacaggccgggaaggaagcagacaaagcggtccaagggttccacactggggtccaccaggctgggaaggaagcagagaaacttggccaaggggtcaaccatgctgctgaccaggctggaaaggaagtggagaagcttggccaaggtgcccaccatgctgctggccaggccgggaaggagctgcagaatgctcataatggggtcaaccaagccagcaaggaggccaaccagctgctgaatgtaggtgaacagggatggggagatgggggacaggggggttgggggagggaaaggttaaacccctgggacatttggcggggcgggggggtccgcgtagcctttgtttggtgaaagaagcttgggcagctatatcactgggttcctcccccttccccatctcccttacaaaggagctggtggcagctggtcagatggggtgagccaccttatctgcaaagcacgtatcagacagggtggcgggcaccctgtcccaccttcagggagctgccctcctggttaagggggcctcaagtggggcccatgaagcccttcctggggaatgggaaacagttcctgagatcaagatctagtatagtgcaaagggactgagtgttgacaaaacctggttaggagagtgagcatgaggaatagctttcggagatgagccttggcctgtgtaatctttgtaactaccctctgatgtggtcaagatgaggctgctgacgccctgattctcagataaggaaacaaaggctcagagaggttaggggacgtgccaaagtcctgtggctagtgcccagctttggcagagggcaggccagggttctcttcccctgcactgcccagccaggagaggttttctggaaggtttctcttacccatttatgtagggggaacagaggccaggttcagtggctcatgcctgttaaccccagcactttgggaggccgaggcaggtggatcacttgagctcaggagttcaagagcagcctggccaacatggtgaaaccctatctctactaaaaatacaaaaattagccaggtgtggtggctggcgcctctaatcccaactactcagaaggctgaggcaggagaatcccttgaacccgagaagcggagtttgcagtgagctgagattgcaccattgcactccagcctgggcaacagagtgagactctgtctcaaaaaaaataataataaaataaaatatgtagagggaacagagactggaggcaggcaaatagcaccactcacaacagaacaggcaccaagaagggagcgtggggagcaggagagggtggactcctgtgcgccctcactctccaggctccatgaggggtcctggatctgcaagatgtgactggctcagacgtcgaagtccagagccacatctgccgccagacagagccagggatgggtgggtggggaggaacggygcagcagaggagcgggcacggcaggctgcagggtgccgcgagcagaggacrgtgcactgtaggatttggggctggcaacagcagccggggttgggggcactgctggggtgcatggctgagtgtctggggctgggttaaggacaaggatcagyggagttagggatgcagctagacagggcatagaagggtagatttgaggtcagggctgaggttaaactaggtcctgatattgtttgtcacgggtcctctaccttccctttccaccagcccctcctccatgactgagagcacttcattaaggaaattaaaaggggctttggggaggaaaaggcagcaggaggcagaatgcccacgcgagcacgggctttgggttttcttctggacagtgaggaggcagtgggttaagctgtgcctcccaccgcagccccagtcaccctggaggggaccaggtccctggggaaaaggaactgggagacyctccgcgkttgtggggttgtaacaagagtctgggctttgtccacagggcaaccatcaaagcggatcttccagccatcaaggaggggccacaaccacgccgttagcctctggggtaagcgcggactctggggtaggggagaggaggmccctgggagttccctagcatggctgtgggtcagacgctggagactgaccttcttgtccttgaattgcaggcctcrgtcaacacgcctttcatcaaccttcccgccctgtggagggtgagtgccccatggtgtctcttttctgctctgcgtcctgatagatacgctcaccccgaccccttcccggtgtctgtttggacagctccccrggcgggcagacctgcagcctctgcaaagamcctccaacctgatacccagtcytgggcttccctctctccacctgctccctcccctttgcaccctgccctcatcttttgggtgcctttcatttccaccaaggcaaacacaagctggcagaaaagacctcccaggccctggtgcccctgggagccagggagggaggaggggctgctgactgttctcattccctctctctccttgtcattcctcgattcccatttgctgactggcttccctcctgtcccaaccctcctgcaaatgcctttgcttcatgctgggagggggagcctgtgtctttgtcctctccctggtgcaaggtcaccccagtgcagaggctcctatggaatcctggttcccagttggggctcaaagtaaactcctgactctctttctttattttaatttattgagacggagtctcactctatctcccaggctggagtgcagtggtgcaatctcagctcgctgcaacctccgtcttctgggttcaagtgattctcctatctcagtctcctgagtggctgggattacaggtgtgcgccaacatgcccagctaatttttgtatttttagtagagacaggggtttcaccatattggccaggctggtctcgaactcctgatctcaagtgatcccctccttcctcagcctcccaaagtgctgggattacaggcgtaagccactgcacccagcctctttttgcacttattgtatctgctgcccgagacctggtgcaggccagggtgagggtgtatcacggaggaggaaggcccacccttgtgtatcccaggctatgggggcggcagagcatcctctcaggctaaacacacgaggcttgttggttcctgcagaggccccagcccctctgcctgyggggactggcttccttgtgttcttaagtttagatgctaccttcctgaaacttccccagaacataactccggggccagagcagccagtccccttgtgcttctcccgaggggcggggctgaggtctcgggtcccgtcatgactgtggaccctacattcacccctgctctccttctctcttccagagcgtcgccaacatcatgccctaaactggcatccggccttgctgggagaataatgtcgccgttgtcacatcagctgacatgacctggaggggttgggggtgggggacaggtttctgaaatccctgaagggggttgtactgggatttgtgaataaacttgatacactatgctgtctcattgtggtcccctgggctccctaaggagggatggacagggaggcaggagggccttgtcttttcttgttactttgctgaaggagtcggagtgtctgaggcatagggtgggttgagctggagatttcaggctgattagctgtaagagggcgggtaatggggacaaaccacgctttgctggggtgcaaagttcgtgctggctactggcaggaggactcgtgcagggaaaaccactgcaggccactcgtggggacagacacaccgggagagaatggtctgggcccaggaggtagcatcctcagtcaagggggtggggggcgccaaaataataacaacaataacttgtatttattgtgcagttaagacctgccaggctgcctgccaggtgcgttacctgcatgacatcattgactcctcccaaccccccagttaggtgaaagggactgttattgccccattttatagagaagcacgtgggcgcttgcacacattaagaaacatgaccaagtttacacagtcagtaagtggaaggagagaaacagtgaagagctacaaaggatattctggaaaaacagaggtctttgccctttggcgtcagcagagaaggagaattggtgaataagaaaagtgagacacgggatggggctggggatcctctcaggggaaagagggagaaggatggaaggctcaggtggaagacatgctggtgacaggagccacctgagtaggggcacagaaggccccattttcagatctgtggaccattcaaagcccagaggaacaatgattacaattactgagcatagagcacttgctagactcaaggtaccgtgtccagagttgttcatattcttttttttttttttttttttttttttttttttttttttttgagacagaatcttgctctttcgcccaggccagagtgcagagatgcgatcatggctcactgctgcctcgacctcctgggctcaagaaatcctcccacctcagcctcttgagtagctggaattactacaggtacgcgccaccacacttggctcatcaaattttctttttctttcttttttttttttaagagatggggtctcactatattgcccaggctgttctcaaactcctgggctcaagggattctcccacctcagcctcttgagtagctggaactacaggcacacaccaccacacttggctaattaaaaattatttttttggccgggcacagtggctcatgcctgtaatcccagtactttgggaggccgaggctggcagatcatgaggtcaggagttcgagactagcctgaccaacatggtgaaaccctgtctctactaaaaataccaaaaaagaaattagctgggtgtggtggcgcgtgcctgtaatcccagctgctcaggaggttgaggcaggagaatcacttgaacctgggaagtggaggttacagtgagccgagattgcacctctgcactccagcctgggtgacagggtgagaccctgtctcaaaaaaaaattttttttttctttttttggtagagacagggcctcactatattgcccacgctgttctcaaactcctgggctcaagggattctcctgcctcggcctcccaaagtggtgggattacaggcatgagccacttcatctggcctgttcatgttctttaactctttaagtctcccacaacccaaaggcagaagccctgttatcgtcaccgttgtatggatgaggatgctgcggctcagtgggacaagggcgcccacagagaaagcagcaggcctgggtctggctccgtctgtcgccagcacctgacttctcgtggttcccggtgaagtctctgtaacactcccaggcactagcctgggtgctgggagacttgcgttccaatcgggagcaagatgcctgaaggccgcctacttcccctctaggggccacgatttcctcctgtataaagggaggcagggattcgacaactgttgcttccagctacaaaattccatcaatgggggactgaaaataatagacagtgttcttgcccttggggaattcacagccttcctgggaggcaaggcctataaacagaatgtgaatgcaaacacacaaagccacgcatcaataagagctcaatgaccggcaaggggaggggcctgcatttgtgcaaaaaatgggacgttcctcactttatagtcactgcattttcccttattttgtggaataccatcatttcattacatatgctccttccctccccctgcgatattttattttgaaaacatttcaagcatcatgaaaagatgaaagaattttatagtgaacaccagaattctcaccacttagattttaccatacttgcttggtcacacatctgtccatttagccccatatcaaacatttttgatgtatttcaaagtaaactgtaaacattatatttgctgcattttgtcttatttattttttgagacagagtcttggtctatcgttcaggctggagtgcagtggcacagtcatggctaactgcagcctcaatctcctgggctcaagcaatcctcccacctcagcctcccaagtagctgggactacaagcacacaccaccatgcctggctaattttgtaatttttttttgtagagacgagggtctcataatgttgcccaggctggtcttgaaatcctgagctcaagcaatcctcctgcctcaggctcccaaagtgctaggaatacaggtgtgagccacagcacccagctgcttgctgcactgatataaatagaaccttccattcatgtcagatactgattgagggtctgctccgtgctggacatcatctcacaggtattgggggaggccctacttaaaagaatcctatagtggcggctttcgaaaaggcaacattcaagggactctttctttcttgaagtaaaagctttcattgactttatttttatttaaaaaaatatacatatatgtgtgtgtatatatatacgtgtacatatatattgagacagagtcttgctttttcatccaggctggattgcagtggggtgatatcggctcactgcaacctctgcttcccaggctcaagcaattctcctgcctcagcctcccttacaggtgcgcgccaccacacccagctaatttttgtattttcagtagagacggggtttcaccatgttggccaggctggtctcgaactcctgacttcagttgattcgcccgccttggcctcccaaagtattgggattacaggcgtgagccactgcgcctggccatcacccggctgactgactattttttaggcacattttcttgctgggtttgcttggatgggggtcctgaaaataccaaagagatacaagataattgataggcactgagtcagtcctgggaagcttctgaaaaaggagagctttgagtcggttttgagggtaaaagaggcctggctctctcctgcctggaggtcttctgtgctgttccctctactaggaacactctccatgcccctcggcccctcatactggctcttccctaccctttgcatctcagctaccttgaccgctcaacctgagctacggccaccctgtcactctctctcatagccctgatcttgtttttcttgttggttatgacaatctgtaatcatattacaaatatcgtatccatttccccccagacaaagaggttcaagcagtgatgtcaaggccaggcatgaatgtctggcaaggagcagaagggaagccactgacttgagcaggttgggaagggccatggaacgagtgtgagcaagacacaggctgctttgcctgagatgggtggagccaggctagggagaaacacagagaggaagggccggtttctgaggatgttgaagaacagggagaggagtttgggtgtggctctcaccgggcatcttttacagggtctgtgctaagcacttacaggcatgattcatttcatccccacaaccatccgggaggcaagtaccatgatcattgccctcacagatgttgaagaagaggtgcacggaacggagcgtgttgcctgaggccaccctgctagtcagtggtgatggccaggctccagttcaagggcacttccctgctgaacatctctagcagtgaggtggcatgctgcccttgcgacccccaggaagcgggagggggctacatccaaatgagtgggtttttttttttttttttgacagagtcttgttctgttgcccaggctggagtgcagtggtgcgatcttggctcactgcaacctccgaaccccgggttcaggagattctcctgcctcagcctcctaagtagctgggattacaggcgcacaccacgcctggctaatttttgtatttttagtagccatgaggtttcaccatgttggccaggctggtctcgaactcctgactttaggtgatctgcctgccttggcctcccaaagtgctgggattacaggtgagagctaccctctcctggctccaaatgagtgttctttaaaagtaagtttctgcatctggcattttttttttaattgaggcagggtctcaccctgttgtccaggctggagtgcagtggcgtaatcatggctcactgcaaactcagcctcctggattcaagtgatccgtgtgcctcagcttcccaagtggctgggactatgggcacacgtcactacaccctggcaatttttgtattttttgtagagacagggtctcacgatgttgcccagcttggtcgggaactcttgggctcaagcaatcttccctccttggcctcccacggttttgggattacaggcatgagccatgcatctggcattttcaggatgtgtgcatgtgtgtgtcacaagattaaacaactgccaagaaagcattccagccacagcaatgtgaccagcactgccgagaacatatattgagtgcttctgagtggcagacacttctctaagcaatttacatgtattacttcacttaatcctcacattcacccctctttacagatgagaaaactgttgcacagatgggttaagatcatggttagtaagcggtggagctagggtttgaatgtaggctctgggataggcaccgtggaagaggtaagactgtaggtgccagtttgagatctgggaccccccagaagggagcagagacatcacccacccccaaagcctcatcttcccactagactgagtccagcctccaatctccctcctccctggtctctctactccacaacccccaacaatcagttccctaggggaactctgttagcacccgtggcagcccagaacccttggctggttctacctcattcagagtaaaaataaaagtcaaagttggccaggtgtggtggctgacgcctgtaatcccagcactttgggaggcctaggcgggtggatcacttgaggtcaggagttccagaccagcctagacaacatggtgaaaccccgtttctactaaaaatacaaaaattagccaggcgtggtggcaggcgcctataatcccagctactcgggaggctaaggcaggagaatcacttgtacgctggaggcggaggttgtggtgagccgagattgcgccattgaccttcagcctgagcgacagagcaagacccagtctcaaaaaaaaaaaaaaaaaaaaaaaaagccagtcttcataatagtccgcaagaccccaggatctttccctctttgactttagcttctcccatcccaacactgctccagccacaatggttctcaaatacagtaggcaggctcctgcctccaggcctttgcatggctgttccccctgcttggaatccactagccccagctaatccccatggctcactcttccactccctgcaggggtcagctcacaggccacatctcaaagagcctttcccgagtaccctatttaaaacacctctctgtcacctattgcctaacttcccccaccatgaatgtaagttctgcaaggagaatgctttttttgagacaaggtctcactctgtcacccagactggagtg

SEQ ID NO: 7034 - DNA, 25473 bp, Homo sapiens
aattctgaccacctgcccctgcacctggcctggagaggcgggagaagcaaggtccctgtatgcccagccccttgctttcatcctcccagggtcgagggggcggggtgacctgctcaggaggtgaagggcattgctgggcccattatcttatcagggagatgcaaacactgtacccaaagtcacagtcacaatgactcctgtcacttggcaaacactccccaaggccagcctgggccaggcaatgcagggcacacagtggtgactgagacatcctgggtcctgccctcatggatctggagggggagatgaaatgtcaccaaagcatgacagcccagagtggtcagggctgtgatggaggaattatagggtcagagtcgtcaggactgggatgggggaagcacaggcagggaggtgggggctgtgatggggaccccaggggtctgtggaagcccagggaggtgcctgactcagcctggtgggtagtccaaggcttcccggaggaaggatcatctgtgcttaacaggaaaggtgaggagtggttaaacatggggaggaggtagggtgcacacttcaggtagaggaaattgcatgtgctgaggttttgaaatgatcctttggaaaagcagaaggcctgggcgggcaggatcccaaagcatgaaagggaaaagtagaacatgggaaggaggaggaatagccaggggtctgatcccatcaaggtttacagggcgctgggttcctaagagtgtgtatggctacaattctaggacattattgttcaaattccccttcaaacccaagtaatgttcaccatccacatttttttttttttttgagacggagttttgttctgtcgcccaggctggagtgcagtggtgcaatcttggctcactgcaacctgcgcctcccagattcaagaggttctcctgcctcagcctcccgagttgctgggactacaggcacccgccactgcacttggcaaatttttttattttttattttttattttttttgagatgcagtctcactctgtcacccaggctggagtgcaatggcgcaatcttggctcactgcaacctccacctcccaggttcaagcgattcttctgcctcagcctcctgagtagctgggattacaggcatgcgccaccatgcccagctgatttttgtatttttagtagagacggggttttaccctgttggtcaggctggtcttgaactcctgacctcgtgatccacccaccttggcctcccaaagtgctgggattacaggcgtgagccactgcgcccggccagatttttgtatttttagtagaggcagggtttcaccatgctggccaggctggtctcgaactcctgacctccagtgatatgcccgcctcagcctcctagtgctgggattacaggtatgagccactgctcctggaccaccgtccatttaatagtctgtcctctgcccctctttctcaagaaaagaaaatttttttcaattctgaccactaattgttctcaaaaaagtttccaacgttctgtgtgccccaggctcagagaaacttgcactactgtggaccatgtcacacttgcaacattcttgtgagaagtttctttgcccctgagttgtgctaggggttgtccatccgcctgaaatggcatcgtgcggtccacccaggctgcattccagggtgccaaagacttggaacacttcccaacttatccagatcctgcctgtggactaaggcctcagtgttcacctcccagagacaggggttagtattgcttagacacacggtgaaataataaatgacccaagcaaagaccttccccacaaaaacacacaacttgcataccatctgaagactgcaaaattaggggagtaggtaaaagtatttacccatgaacctagctgagcaggggatggtcagaatggacaagggtggctgggcgtggtggctcacacctgttatcccagcattttgggaggctgaagtgggcagattacttgaggtaagaagttggagaccagcctggccaacatggcaaaaccccatctctactaaaaatacaaaaattagctgggcatggtggtacgtgcctgtagtcccagctacttgggaggctgaggcaggagaatcgcttgaacctaggaggtggaggttgcagtaagccaagatcgtgccactgcacttcagcctaggtgacagagccagactccgtctcaaaaaaaaaaaaaaaaaaaaaggacaaggccttgggactggcacaggcatccactttaaggggttgggtgtgggaggtctggagtcttaggggaagtgctgggggctcaggcagtggctgtatttctttcaattactttaactaccagggcagctgggtgccagccctggctgtggcactgtcttgagtaaaaattaaagagggcatagaatggtttcctgatcactccctaaggctcttgagacccctccccaccatgtccaccctgctctagacaagttacagactccaaaatggggcatggcctgacacgatgatgctctggggcaggggatgggggggacacacatcccttctgtgttcctgccagcacacaacccgaacttaatcacgaagaaccagcagcaaagccacactgagcgaagtctacaaaatcactgaatcatactcttccaaaacgcccaggtcatgaaagacaaggaaagatggaggaattgttacgcaatggaggaagccaaaatgtgaggtgtggtcccggactggatcctggactaggaaaaggacattagtgggaaaactggggaaattcaaataaatcctccaaatcatgggtgtccaatcttttggcttccctgggccacattggaagaagaattgtcctgggtcacacataaaatacattaacactatcaatagctgatgagctaaaaaaaaaaaaaatcgcaaacaaatctcataatgttttaagaaagtctacgaatttgtattgggcagcattcaaagcagtcctgggccacatatggcctgcaggccatgggttggacaagcttgctctagattatttactagtgttttattaatgttaatttcctgaatttgattattagactgtgcttatgtaagaaaatgtccttattcatagaagacacatgcctaagtatggataaaggggatcctgtctccaacttgcttccaaatgattcagccaaaaatttaaaaaattctggccaggcatggtggctcacacctgtaatcccagcactttgggaggccaaggcgggtggatcacttgagaccaggagttctagaccatcctggccaacatggtgaaaccccgtctctactaaaaatacagaaattagctgggcatggtggcgggtgcctgtaatcccagctgcttgggaggctgaggcacaagaattgcttgaatccaggagacagaggttgcagtgagccgagatcatgacactgcactacagcctgggcgacagagaaagactctgtctcaaaaagaaaaaaaaaaaaaatctatcaatcatctatcatttatgtatccatctatctgtctaacatctcttatctatctatttttctatttttttttttttttttttttgagacagagtctcactctgtcacccaggctggagtgcagtggcatgatctcggctcactgcaactttcacctcccaggttcaagtgattctcctgcctcggcctccctggtagctgggattacaggcacacaccaccacatccagctaatttttgtatttttagtagagacagggtttcaccatgttgaccaggctggtctcgaactcctgacctcatgatccgtccacctcagccttccagagtgctgggattacagatgtgagtcacagtgtccggcccagtcctccttctaatgaacaccaaacaaataaaaagaaaacacagtgtcaggttggagtaggaggtgtaaatacagtggggtaaaggaacagaacacagtgtgcagtattacagaatggactctctgaagaggtgacatttgagctgagacctgaaagaggtgagaaagccagtgcagacatctaaggaagggggcccaggcagaaggaactgtaagtaccaaggtcctgaagcaggaacgaccttggtctgtgcaaagtgcagcagagaggtcagtgcccctggaaacctagcagcaacagaggcaggacaggtgaccagggccagatgttgcaggaaggagtgcagagtttattctgagtgggaagggaaggctttggagggttgtaagcagggggtgacacaagctgtttgacatacatggctcagagctgatgggagcccagtgagcgagtagattcactacaaggacagcatgtggccccacgccacctcttctttggaggtttcttctagcaggctggggatgaccagccgtgtgggtgcggggaggagctctggctgcccaacagctttgagtttcccaggtgacctgccccagtagagaaggacattgccagggcagttatcttatcaggcgcacgctcacctgctcctggagacacgctcaccccataacataccaaggtccccaccattccactggcccagcccctcgctgctgctgcccatggaggtccctacctgagggatgaggagggagtccccaggcctcctggcatctgtcacccaacaccaagatcaagccaagacccttggacacatcctttccccatgttgcaccttggtttccccatctagggtagggacggggaatggttgagagctgtaaagtctgtagctggatatgtgagtccctgtgagcctcagtttccccctctgcacaacaggaatgatagttctgcctgcacagggttttttgcaaagacccgtgaggtcacacgtgcagagcctggcatgtgtgtggtgctgctgcagtgaagtttgggtttttccattggtggtgccatagaagagctaggctctggggtcaagccctggggtcaagcccgggctggaaccctgtccctaattcttagacgttgaaatcttctgcaaagtccctgatgggggctaagaagagaatattgctttacagggctgctgttagatgctaaggaaaccatttgagtgacacacagagcacacccagcccatagtgaatagtcagagttcagtaaacattcagccaccatagagagtgttgtaagcatggcagggcatggtggctcacgcctgtaatcccagcactttgggaggccaaggcgggtggatcacctgaggtcaggagttcgagaccagcctggccaacctggtgaaaccccgtctctactaaaagtacaaaaattagctgggtgtggtggcatgtgcctgtagtcccagctactcaagaggctgaggcaggagaatcacttgaacccgggaggcggaggttgcagcgagctgagattgcaccactgcactccaacctgggtgtcagagtgacactccatctcaaaaaaaaaaagaaaaaaaaaaagagtgtgggagcaccctcctcttccagttgatcaggcacgtgctatttagactgaaagaggacactctgcagccagctgatctggttctcactccattatgtcctagcctgtgatggagccataggagaatgactcaacccctccatgcctcagtttccccatctgtaaagggtcttgtcccctcaaagggttattggaaggttaaataagttagcacatggaagccgtcagcacaatgcccagcgcataatgagcaccttatgtttgctcttcttgttgctgcagcggttcccaggggctccctgatctcagggcaggttgacatggggggatctgggcaggggaggggggggccagcccaggagggaatgcctgaggtgcccaggcctagaggtcaccccaaggagcctgtaatcagctgtggtcgggcggttctgctccaccccaccgccctccctgggtatatcaggactggtccgggcccaggctctgttgggtgggagcacaggcaccgggcaccatggggaaggccgtgagtggggcccaggggtccggggtgcagtggggacaggggttgcagtggaatctgagttctccctccctccatcctgtccattcccaggagaactatgagctctactcggtggagctgggtcctggccctggcggggacatggctgccaagatgagcaagaagaagaaggcgggtggcgggggtggcaagaggaaggagaagctggagaacatgaagaaggagatggagattgtgagctctgactggggaggggcgggagctggagggtaggctgggaaccaggcagtgggcggggagggggccaggagagcccagagcaagcaccctgccccaccccaccacacagaacgaccaccagctgtcagtggcggagctggaacagaaataccagaccagtgccaccaaggtgagctggagactgggagcgtacagaaaggggaggaggagagagggagggagagggagatggaaggagggagatggagagagggagagagagggagagatgaagagaggaagatatggagaaatagagagagggagggaggcagaaaaggaaagagggagggagggagagaggaaaggatggagggaggggaggagagagggagggagatggagagagggagagagagggagagggagagaagggagaaagcattagagagaaagggtgacacacagagacggagagaggagtagctgaaaagagacagcaagacagagaaggcagagacaaataaggagagagcagcaggagagagacacatagaaaggggagcgaggagagagagacaaagggagagatgaaggagggagggagagatggggtgggggcaggaaccaagagacaaagagatgagaaggagcaggacagaccaagctggagaagggaaactgaagcagggggctttccacggggtgtgcatgtggaggaaagcccccaggaccgcctcgccctgcccctctgtcccagggcctctctgcgagcctggctgctgagctgctgctgcgggatgggcccaacgcactgcggccaccacggggcaccccagagtaygtcaagttygcgaggcagctggccgggggcctgcagtgcctcatgtgggttgccgccgccatctgcctcatcgcctttgccatccaggctagtgagggggacctcaccaccgacgacaatgtgagccatgttgtggggacaggctcaggacatggggacctggggatggaagacactgagcctgggacttgggacaagaggggcagagaaggatggggatagacgaacacgaaaggcagtctcaagacaggggtcatggagggtgaaggacattgggatatggatggggcagacccaaggacacaggacacagggacactggggtgaatcttgggtatggggacataggtgggggcataaagagtatggcaatgtgatacgtaagagatgggatttggaggccgggcgtgtaatcccatgcctgtaatcccagcactttgggaggccgaggcgggcagatcacctgaggtcaggagttcgagaccagcctggccaacatggcaaaaccccatctctactaaaattacaaaaattagccagacatggtggcgggcacctgtaatcccagttacttgggaggctgaggcaggagaatcatttgaacccaggaggtggatgttgcagtgagccaagaccatgccactgcactccagcctgggcgacagagcgagactgcatcttaaaaaaaaaaaaaaaaaaaaaaaaaagagatgggacttggaagcagaggacatgcagtgcagacacaggacagactgaggcacggggaataggagaccctgggactcagacataggacaccagggcagggacccaagcctcaggacacagcacatagagagacacaaaacatgagacatagaagcacagagacagagaggaaatggaggtgcagggcaagggacattggacatatggcagagatgagggcaagggacatggggactcagggacatgtgacatgggacagaggctcgaaaagtcatggccatgggacacaggatgggaactcggagatacacagacatgggagacacgggacacagtgactggggagctagaacatgggggccgtggccacagaggacacagaccatgacgtacaaggtctgcagcacacgcagggacggggatgtgaggatgcagggacaagggggcccaggggacacacagagggtggcagcagattatggaaaacccaggatgtgaaactggagacacggggaatacaggccatggggacaggaggagacatgggacagtggacatggggaatgcaaggcttggggacacaggagaagggaacacgtcagaccaaggcacacagtgatttggggcacaagtcacagatatggggacatggaagattgaggattcagggccagaggatatgaaatatacacagaaacacaagacactgagaagacagagcaggcgagtgtgggacatgagggacatgggagggggctaaaggctacagggaatggtgcatggagcttcctagtaggtggggaaaagcatggggaaaaccaagaaaaccagggcaccagggagcaggtcggtggcctcaggcaggcagcttccrgcccctctgaataaccccaccccttccctgtccccagctgtacctggcaatcgctctcattgctgtggttgtcgtcaccggctgctttggctactaccaggaattcaagagcaccaacatcatcgccagctttaagaaccttgtgccacaggtgggttccccagcacccagccactccagatcccagagactccaaactgctcctgtagcctccttccatcaggcccctgtccctcatctgtggcctccatctctccccatgggtcccagctctcctcatcctttacctccccacatgcagcagctcccacccccacccccgtccacctcaactttggtgcccctgccccgcagcaagccactgtcatccgcgatggagacaaattccagatcaacgctgaccaactggtggtgggcgacctggtggagatgaaaggtggggacagagtgcccgccgacatccgcatcctggcggcccagggctgcaaggtggacaactcctcgctgacaggggagtctgagccacaracccgctcacccgagtgcacgcacgagagccctctggagacccgcaacatcgccttcttctccaccatgtgccttgagggtctgtgaagcccccgcctgcctgcccagtaactgctgcctccactggcctctctcctgctatcttctaggacagggggcttcagcctccctgtctctctcctgcatgactgccacctccccrtgactgccacctccccagggcacactgcttctctgtctcccactgtcactaccctctcccaggtcacatcctccactggcagtgactggctgtccttcagctcacacggcagtgcacaccccactgccgccccctatccctgagtcgcgccttggcccccctgcaggcaccgygcagggcctggtggtgaacacgggcgaccgcaccatcattgggcgcatcgcatcgctggcgtcgggggtggaaaacgagaagacacccatcgctatcgagatcgagcattttgtggacatcatcgcgggcctggccattctcttcggtgccacattttttattgtggccatgkgcattggctacaccttcctgcgggccatggtcttcttcatggccatcgtggtggcctatgtgcctgaggggctgctggccactgtcacagtgagtgggggcaggcggggatgcagggagctgaggggcctgctcaaccatctgttctttcctccacatttcccccatcacctccctgcctgtctatctgtccacttagctcccatccattctcctgccttcccatcatccactcattcagcaagtccttcccgaggcaaccctggggcaagtcctgtgccacacattgagggcgcagagatgacgaggccgggtccttaactggaagaggctgatgtcctgtgcaggcagccagcatgtcaccagaccttccacagtcagcacccagctccagaccagtccccagggaggtgcggggaaggttcctcttctcattttgattgtgtgaagagaattttcagaacctcggctgggacagctcagagaggggcctcgctactgtatctgggcagactggggaaggagtcccaaacaaagcactggctgaacaaaagctggggccaagaaaacacctggtgtttgcagaagcacgttgcacacgcagccccgcggctggggtaaagccttccccgttctttgacgcggggaagaggactggaagccagggtgggtccccagcctgcggtgctcaccccttccccaggtctgcctgtccctgacagccaagcgcctggccagtaagaactgcgtggtcaagaacctggaggcggtggagacattgggctccacttcggtgatctgctcggacaagacagggactctcactcagaaccgcatgactgtgtcccatctktggtttgacaaccacatccacacagctgacaccacggaagaccagtcaggtgtgggggagggagggcacaggcgccagggcaggatctggtggatggtggagacctgaagagggatagggaggtagggagggctttgtacgaaggcggggcggctcggctccaggtctcaaaggagactcgctaccgggtctagagggaagggtcatccgggggctgggtccctcagggttgggtggaacccaattccacccaggtctggggagggggcccgcgatatgagcctaggaggaggsggctcggttctggtccgggagagccgccgtgcgggacccagcctggacgcctggtctgcagggcagacgtttgaccagtcctcggagacgtggcgggcgctgtgccgggtgctcaccctgtgcaaccgcgccgccttcaagtccggccaggatgcagtgcctgtgcccaaggtgagagccagggggcctccagggaatcccgggaggctggtgtagccggcttcgcccctgacaccggtccccgctcccagcgcatcgtgattggagacgcatcggagacggcgctgctcaagttctcggagctgacgctgggcaacgccatgggctaccgggaccgcttcccaaaagtctgcgagatacccttcaactccaccaacaagttccaggtgcgcagccggccccgcccacggcctgggcccgcccacctcgggccccgcccmaggccacacccacatcagcgggccacgaggggcttcgctccttgccccttctctccgcagccaaaccccaccccatctcccgctccgcctatggccccgtccaccagaggcaaggccccgcccaccacccagccccgcccacagcttctcctcggcgggactgtccatggggagcacctcgctctccaaatccgcccccagcccaactccgcaccctaattctgttcattccctgcgtccaggactccaaatctgcacctagccccrmcttaacgcttaccttctaccaaggacccctccacacaaggcctccatcttccaccttcacccttccccgcagctctcagagcccgcaccgagctctcggccccgcccctctcctcagccccgccccgttcccycgtccacagccccgcccygttcccycgtccacagccycgcctctyccccccgyccacagctgtccatmcatacgctggaggacccgcgggacccgcgacacttgctggtgatgaagggcgcccccgagcgcgtgctggagcgctgcagctccatccttatcaagggccaggagctgccgctggacgagcagtggcgcgaggccttccagaccgcctacctcagcctgggaggcctgggcgaacgcgtgctcggtgagacccctgggcaggggaggagactccaggtgcgaggaggagctagcacagaccctgcccaccactcccggcccagccctgaccgtcctcatccctggctgctggctgatttgtcgcagtccacagcctcacccttgactttccctgtaccagtcctgacccctgtctgtcctcactttctaccttgaccccagtcctcacctggacttttatccgtatcctgacctctaacctctcccaatttttgtcctgacgccttaaacttcgctgcctctaccctagaaagcagatctgtggtccaattctgggccttttacttgctgtgtgacctctggcaagaaatgtcccctctctgagcctcagtttcctcatctgtaagatgagaatgggcctcacagggtggttgtgagggtagattcagataatgtgagtgaaggggtcagcacaaggtcaggcatccataggtgtttggtgcaaggggcctggttattttacccatttcctggccctgctaaraaagggtgtgcccagggctcttccctgacttccccgtttccggtcaggcttctgccagctctacctgaatgagaaggactacccgcctggctatgccttcgacgtrgaggscatgaactttccatctagcggcctctgctttgcgggacttgtatccatgattgacccaccccgggccaccgtccctgatgctgtgctcaagtgtcgcacygcaggcatccgggtatgccactgtggggaggaacaagtggagtgaggacagaggatggcagcaggatttgggttgaagaaccccatgacaaacccacctgaaactggcttgaaccaaaatgcattggtttatgatactgaaaaattctggggaattaagcttcaggtctagccagatccaggagctcagtgtcattaggaattttcctttctccakgtctcagctctgctgttctctttgctggctttatttgcaggcactcccttcacttggggacacacacacccctgctccagcagctcaaacttaactcccacctgcttagccaccccacaaaaagagagtgcctcttttgcagtagcactggattgggtcactcatttatccctgagccagtcactggggctgggggatggaagaccttgattggccaggtctgggcttacttacccratcttagccagggacctcactgcaactgatggtgtaggggagaggagtggttccccaaacacaaaacaagggtgggaaagccaaggccaggcaggcaatgcccaagcccttcccgtgtctctacggccctgttacatcgggccttgttacctttctaagcttgttcgttagccctctttccttgttcactcctctgcagttatggtgtcctccctgctgttcctccgacagttcgggcctgtcctcacctcagggcctttgcacctgctgttctcyctgccaggagcactcttctcccagctttccacgtggctgactctctcacctcttacaggtctctgctcagatatcaccttctcaataagcccttccctgggtacacttaaaatcgagtcaccgtttccttcaccaagcttratatgtttttttccactttctaacacactatataattcgtttctttattttctgtcaccctcactagaatgtcagctcctcaaggacagggatttttgtctcttttgtctctgctatatcccaggcacgtaggaggtggtcacgcttggtcaagtaaatgaacacgtgtatcagcagatgtctcccagggaggacagggagattgggctgatctgaaggggtcagtgatccactggttccccctacaggtgatcatggtaacgggtgaccaccccatcaccgccaaggccattgcagccagtgtgggcatcatctcggaaggcagcgagacagtggaggacatcgctgcccgcctccgtgtgccygtagaccaggttaatcgcaagtaagcccccmcagacctccccggggttctccccacatctggcacagaccgaggtcccagcgaggtcctcycatctcctccccagggatgcccgtgcctgtgtgatcaatggcatgcwgctgaaggacatggacccatcggaactggtcgaggccctgcgcacccaccccgagatggtgtttgcgcgcaccagcccccagcagaagctggtgatcgtggagagctgccagcggctggtgagccctgctgatgagggtgggcaggcgggcagacaggcggggctggtcttggaccggcctctcactgaccacccacccaccacctgcacccactgcctgcagggtgcgattgtggccgtcacgggggatggtgtgaatgactccccagctctgaagaaggcagacatcggagtagccatgggcatcgctggctcagatgctgccaaaaatgcagctgacatgatcctgctggatgacaactttgcctccattgtgacaggcgtggagcagggtccgagccacgccagggggagggcaggcagtgtgggcacaggagggagagggctgtgaggaggctgaggtgcccaccctaccccacaggtcgactgatcttcgacaacctgaagaagtctattgcctacacattgaccaagaacatcccagagctgacaccctacctcatctacatcaccgtcagcgtgccyctgcccctcgggtgcatcaccatcctcttcatcgaactctgcactgacattgtaagtccacagcccagggtacccatccacagggtgcccagagacacttgcytgcagatggacaggagggacagagaccaccacagacactcttgggcacagagtgacagacaagacctgtgtgtgcaatgacagccagtgcaggacacatgggtggcaggcaggtgaacagacctaaatggacatacctacagccaygcacacacaggcggacactcaggtaggcccgggccgacccatgcacacacatgactcagatacagatactcagacagagatggaaacagaacaggtatctggccaaacttgaatcacagacacgtgyccctaaacagacacggacaaataaaccccctcagatagaccccatggcagacagacagaaaagaaccacagatacagtcacgaatgcagccagaggcgcrgctgtgttgacaggtatttattcggtaacatttacacagtgctttctctgggccagacacaccatcatttccttaattttgtactcataaccacactatgagatgagttttgttactatcacccgtactttactgatgagctcatcaaggcatagacaggtagagtggattgtcccaggtcactgggcaaataagtggcccggctgtgacttgagcttgagcagtcacaggtcccacagcctgtggtcgtggtcagtatgctctgctgccactctaggcacaagcagatgaaggggcacggcgacactgagagactgaagatacacagagatagggagtgacacagaaatacacaagagcagatacagtcacagagaattacactggagacagggacagagaaacagagtgaggaacagagaaagagagggagggagacagagggagaagataaaagcagatgttcttacgaagatgggcaccaggatgccaacacccaggggccagtggggcccaggctgtccaggctggtgtggctgtgccgtccctgcaggtcctgcctgctaacctcagtcctgttcctgctcacaagtgggggaagggggacccraagtggaggggacaagggcccagccaaaccctcagtcccagttccttccactcctggccagttcccatctgtgtccctggcatatgaaaaggccgagagtgacatcatgcacctgcgtccacgcaacccaaagcgtgacagattggtcaacgagcccctggctgcctactcctacttccagattggtgggtgcccgtgggccggggagcctggaggtggggggctctgcgctgggctgctcgcctgccccaggccctgccttgggctcyggctggttctggacctcagtgyctgcatttggtcctgggtctccgttgtcctccgtgtccctctctgtttgtgacagtctctctggttctgctgtgtccctgctctctctctgaccttgctctccatgaccctgtctctgagttgttgcctatttctgtctttttgggtcctggatgtgtctttttctctctgtccctgcctctgtctctctgtccctgcttctctctctgcctctgtgtctctgtcactgtttctgtgtccctggctctgtgtgtccttgaccttgtgtatctgtgtccctgtctctcttcccgtgtccctgtctgtgtgtccttgacctttgtgtatctgtgtccctgtctctccatgtccctctcttcctgtgtccctgtctctgtgtccatctctgtctccctgtgtccccttgtctctctccaggtgccattcagtcctttgctggcttcactgactacttcacggcaatggcccaggagggctggttcccactgctgtgcgtggggctgcgggcgcagtgggaggaccaccacctacaagatctgcaggacagctacggccaggagtgggtgagccctgccccgccccatcccatccctgggctccctccttcccagggcaacttgccttgtgtgcggcccacttgttcctccacgtgtgactgagttcagccagagcatcccggacccccagactccctgccagttcgggggggcaagggcctttcccaccatctccagctccaaactcctgcttctgatgatcgcaactgcagatgggtgtctctgccctgacactaatgcatcatctcagatgtggaaccaggcccctattctgctattttccctacagcatcactcccacagggtatttgcacatgtggtctattttaatgaaggtttggagcacagtgaggctagatctggccagcagatgtgtttagttcacctgtagagttacatacagacgaggatacttcccttaaacatttactatcatggttaaggtagacactgaagccagactgcctggacttatggtctggtactgcttctcacaagctgtgtaaccctgggcaggttgctttgcctctctgtgcctgttttctcacctgcaaagtggagagaatatcaaagtctacctcagtggttttcagtttgctcccagaccagcagcatcaccatctcctgggaacatgtttgcagtgcaaattctcaggctctatcccagccctctgggagcccttgctgggattctcatgcatgttcaagttccagcaccactgatttacctcctagggttacccagcggattaaatgagctaatgcacgtgcaacactcggcacctggagcagtcagtgatccccacagttagctggtattaggagttgtgttgccaggcatggtggcrcatgcttgtaattccagctacttgggaggctaaggcaggagaatctcctgaacctgggattcggaagttgcagtgagctgagattgcaccactgcactccagcctgggtgacagagcgagattccatctcaaaaaaaaaagtagctgtgttgaagaaatgggctgcatagtggctgccccctttaaatggggcatctgccctcttttcccaaaggcccgcggtgactgcctcacctatttttgccatctgcctggcccctggagtcactggactttgcaaatcccatctgaggatttcaattcccctttcccaggccctttcttttgggtgcctcccccctttcactatgaaagcagtcggcccagcctacagttttcccggccactgtcatccaagctctgctaggctgaggtttctgggccccacgttctggggtcctgcacacctggcagaccctgcctctctccttccccccacccccacactctgatgcaaggcagagagagcatttaggggttcacggccctgggaccctatgcccggtgggctgcagaggctctccgcygggactcaggctggactcaggctgtttccgtttgcccctggcctgcagacattcgggcagcgcctgtaccagcagtacacctgctacaccgtgttcttcatcagcattgaggtgtgccagatcgccgatgtcctcatccgcaagacgcgccgtctctctgccttccagcaaggcttcttcaggtgtccctggctggccctcttcctgccctccaacccctggtcccaactcccatcagatcctgactgtggtttagaacagccggcaaatgccagcgggtgccagtgccagatggtgacatgccaaaaaaacctttctaactgrccaataactccccccacggccccctccacatttcactaaaggggtggtgctgagaggcccgggccactccagtgttcagtgtgtagaacacctccctgctgctgctgacatctgacctactttgacccacagtatcctgatttccatcacgtccccaattcctaatggcctgtcccattctgcccacccccaggaataagatcctggtgatcgccatcgtgttccaggtctgcatcggctgcttcctgtgctactgccccggcatgcccaacatcttcaacttcatgcccattcggtgagaggctgtgaggggcaaggacagggagggggctgtagggcacaggcctgggatggccttcaccttgccatgtgccttcaggttccagtggtggctggtccccctgccctacggcatcctcatcttcgtctatgatgagatccggaagcttggagttcgctgttgcccagggagtgagtgtggagactgggagcctgggggcaggggactgaaacgtttgagcagctgcacccacctttgatcctcaacacttggcctctaagcccttgaccctccatagcaaccagcactgacctctgagcccctgrccctgcctaagtggcacccccagcactgagtctcctttctccctctctctcccaggctggtgggaccaggaactctactattagagggacgactgccttcaagcatccctgcaactgccacagcaggtgggggcagggcwcgtgggaccctctggacagccaccaagatatctgagcaaccaagagtcccagccccaccagtatctgcttctgtagcccacggcaccccaaacttggagggacctgcccactcccctcccccattcccaaggttcgcacctcctggagcagcagcgcctgggcagtcctctgggctggcctcgggaaagccgccacctgtggtggcggtggggctctgacagggagtacagctgaccgcttctggagggtgtttctgttcttaggactccagtccaggctggacggctgcctgagggcccttcgttaaagacacgcttgtgtcctgggcgatggtaataaaaccagctcatgctgactgtgctgtatctggtgccaggcactgtcctcagcgtctctcattagtgcttgtgatctcccacagtcctgtacatgggggctgtttatccagggctgcacctccagtgcctagtacacagcctggcacatagtaggtcctcaataaacctgccttggggaaatgattcctattcctttgcccagggtcatggcatctaaacgcaagctgggccgtggcgataggcaccccctaccacctctgggctttctctgttctcagcacccttctccctcctggaggctcccagacacaagggggcccaagtcatttccacatcaagcatcccccaccccccagcggtgtctcctttctgagcctacctgcttactcctctgtcccggcaatggccagttcctgaacaactcctggaggtcccctcctcacacccctcacctgaaaggttaaccccatccccctacctcccatctctgccgctcctttcccagcccctctgttcacctctcttcctctttcttatgtggctttctctggctagggcctgggcttctccttccttgtgaccacagccccccagtcccccatggcttcagttgtttctgcagtgagacccacctctgtccccagcttcccccagtgttggtgacctacactggcctcttcatcaccccccatgcctgtacccatgcactgacccaatctgatagtcccactgtcccatcagtgtggtcccttctcccttggaaacgtggtgagccctcgggcttacaagccccaaactccagttatcctggaactctttgctcctcccttacctgttagcgccccctgccggtaaataaatacacacagccactgatcaccaacacctgggcttggcttctagtcactctcctaaccccacaaagccctgccctggtccagccctggcctcgtggcctcagctttcccatttcagacaacagccatgcagagcttcctaaagccaaatctgaccctgtccttcctctgcctagagctctccttggttcccaaagcctcctgtgatctgacccctgccagcttctgtagtcttacaagtccccttgaactcattccaaccagttatgttcccttgggaaaaacaggccccctctctgacctcaagaccattacctctgccttgccccaatcactcattctttaggtctcagctcacatgtcctctgctcaggggagcccgcactgcttccacggcaggccaggcggctcctctgggtccccataacccggggttttcccatcataaccccgatcacctgaagcctggctccccacagtccaaccgcccaggcttcaccgtcctctgccaactcaggcccagccactccagtctctctccctgaaccccatgtaagctgggattattccagttggtaattttgcatcctacacttgtctcaatatgtgtgaagagctatgtggggcatggaagtgtgggagaaagtgaccttgtcacaagtccacccagatagactgccccatctacttcctttctacatcaaagtcaaggtgatcaatcacttccagctcccaagagacccatggaccctgtctttactccaaacaatgaggaagagtggcctagatggcagctgccgtctgaaggcaaatgctccctctggaaacatcgagatggtcatagtgagctttcctaggcctaagcttaaaaaaaatcaggtggaacttcaacggcctggtggaggaggaggggcaatggtgctatcctactccctggggtaccccactgggaacaccaaggatggggagcatcttcctgagtggggagggtgtacatcaaagtggagcttaaacatgacattcaaaacttctgacacatccccctcagagaaaggcggggagccggcttcagtggaccaaggaaggctgagggtggaggggggcatccaggacaatgtccaagctgggggccccactgctctgcttcttggctgcagctgtctctccactccaccctgagaaggctcaggctgggatctgatctgagggccatagaactgaggagctcacagtcacaactctccccccagccccatgctgaccccatggcttgaacgatgttaagaatctggctggacaaattattctagggagcagtttcagaaaagctggttttgctggttgggtaaaaccaaaggccaagcaattggactgtccactgtgtaacaaggggccgcaagtggctgcaagtgggaggatgacctggttagacgggtttcagatagatcccctggctgccatacagaggatggattggagggggacactggggccaggagcctcagaggcaaccagcccgggaagggcccatgtgaggaggcccaggttggggctgtgaggaggaagagccccccaagggccttctcttggattctagctcccctctatcatctgttccctgagggccctggcctctgccactgctcaaagatcatccaaaccttctgtctactcctggcaaaccaggagcctgaggaacaagacatgggacaagtcagtgactggctagcttccagcttgtctacctggctcctgagacagaaccagggcctctgagacccaggtggacacggtattgggagacagttcccaagagagagaaatggaggcagcaacaactttccaaatactgtttacttcactaaaacctggagtgaggcagggaaaaggtacatcaatgtctgagacaccaagcctaggagtgcacattgacaacggcgacatacagggccaaagtgctgagggccagcagccccgttaccactgctcgggccagtagagctgcccaactgcccagcgagcagaggtggacgaaggtcctgcaggaaaatgtcacaataaggaagggagactagataacccaccccactttggacccagccctaaaccccacccaactcactccataacaaaggccttgtagacactgaggaacatcagcaggaggacagctggccggaaggtgtggtacagatcatagcgtgttatcatccagacctgagcagacgcgacgatgtaatggacctagagggaggcagaaagtcggggccaggccttggggaggagtatggccgccagcagaaatgtgtatgtgggagagcacgactgcctaccagactgatgttggagtctatgctcatctggatgtacttccagtcaaactcaatgccccgggctccgacccataggggaatgcagctgaggaaggcaaaggatgggattctccagtactcagacaccttcagcaccaggctttgagcccctgccctccagcacccccgtggaacccaggtgtcccttctcaggggtctgggctccaggctgctgtacgcaccgggacataataagctcagcagtggcccagcccagggcagcaaccatgatcttgtactctcccttgccggcattccgggacatgacaaggtttagacctatcaggtctgccacatccacgctggccttcatgaactcctgcgggtcaggttgaggcttaagtaagcacagggggacagggagccccattcctgaactcccttcccttccctggcccctctcaccccaatgaagtcatagatgccgccttcccaggtgggaaagaaagtggccaagaacagcatctgagaacagaaagcagaaagaggtcacttcaaggtgaggggatcaagataaaccacgtgggatttgtgggaagttcgtgggtaggaagagggcaggacaggttctgggggcccatctggaagaggaaccaccagatggtggcaaaattacaggaatcggggagatagaggataggtccccgggtccccgagggggctggaagtttgagttctgggtgatcacagggcatctgagtcaggtctgaaggtgctgctccttgggcagtgttagcagcacgtacggaatcagtgatcactcttaaccgcaccaaaaaaaacctgttagccaaccacactactgaggttttctcagttttactaagtgctacgcaaaagttgcttctaggtctcttctcaggtcgtgccctctttaaagtccatcctctctaggtatcctgacgcctcccagtgcggagtcccgagggcggtcccaccgtggggcggcgggggcgcggataggcaacgggggcgggtccctgggtctgcagagcctgggggccagaacacgtggcttcccggtggccctcaccttgcagagttggacaaagaggtaggtgactccagcctggacgcatttccagaaggcgttgtactcggacctggagaagcgggaggtgagggtcggcccgggccccgcgccctctccgccccgcgcccttcccgcactcacaggccgctgcacttgtaggtgatgaagtaggggaagtaggcaagagcgaagcagttcccgaagtgaaacagggtcatgatgccggccgcccggtcccgcccgcgcggggatcgcgaggcggcgtctccgggagcgggtctccggctccgccggctctttcgccacggccagggcctggcacccacctgactggcgggggcccgcgcgcgaccttctgggagcagtagtcccggcgcggggcgtcgcgcccagtgacgtcagagagcccgtggccggccctgggtcccaccgctgccggcccagcgctttggggagtgacttccggccatgcggggcctctaccgctgccatcgcggtcccggtctcctgaagtggaacccggcttggagtcgagcgcgacccctcgcccgtgggcgcaggcgatcgagtaagggtggggcgggcctcaaacccggatcagaacccgccctgaccggcgcagagatacgggacgcagccgtgagcactgttttttatttcaccatggacccatcggcgtggggcgcccgccccgggtgtccttcctcccccgggcagccagatgctggaacgggaggcacatgttccggccccggcccctgggaaggaaagaaaggaccttcccgtttcacttgtctcggctgaacatgtagcggaggaggtcgaccacccggtgactgtagccatattcgttgtcgtacctgtggaggaggggtcgggaggttcaagggggttccttccgaccaccccttagttcccctccctctaagtctccagctccttcccccttaccatgaaatgagcttcacgaaattgtcattgagcgcaatgccggccttagcatcgaagatggacgagtgggtatcaccgaggaagtccgtagagacgacctggaagtcagaatttcaaagataagtgtgtccggcagagcaaggacctccaggagctgaggccccgactcttaactctatcgcccatccatgcattcatctataatatttgatgtagccctactgtgtccagtctctggactggagggtatgaccaagtgcagggtatgaccaaggcactgtgtcagggtctggccaaagggcacaggtcacaaacaccctcatgctgtaccagtacatccctttcctaggaataatgcaagcgtttggaatgggccagcatggagggcctctctgaggggtggccatgagcctgggtctagatgactagaaagatctgaccggctggggccctcagcacagtgtctgaggtagaaggagctgcaggaagggaggacctgagggttttagccctagtgtcatgaaaggccacaggagtgttttcaatcctgaaaacgggtgatgcaatgtgattccattaaaacaaaagatcccagtgactgtgggaaagtggacctgcaggagttaatgcagggagacagcaccaaggtggatgtacaggggtccaccatgaccatggcatccactcctcacagagaaggcatctggccatggcctggccctgagcaagtattgaaaaaaatgggagctgttgtcttttgttcactaagcatgtattagtcacctgctgtatgccaggttggagccacaaa

SEQ ID NO: 7035 - DNA, 41241 bp, Homo sapiens
  misc_feature (1)...(41241): n = A,T,C or G, or insertion/deletion polymorphism (see Tables 1-2)
tgttgaatctggtagccacagtcacatgtggttattgcatccatgaagtgtaactagtgtaactgaggaattgaattttttaaaatttgatttcatttcatttaattgaaattgctacatgtggcagatagtcattgtattgatctgtgttgctaaagaagattgtgtaaaatggttttcataactttggggtagcagttggcatttttatgagactaggaagtatatgattatgtagtgttgtagtttatgtgactaaatgtggctccttatggaggagttctttaactttgccatacttataaagatagttattatttattctctctacttatattttgaaagtccctctcttaaagcaagtagatatcatggagtgagtctggaaactcctgttacagaacaccaggagtggccaaattatgactggtgccccctggagttgtgcacacagagtctgtggctacccctataagctgagtcacatctcaaggcaatgtcatattcacttttatgtctacaatgcttggtatggaattgattactgacaaatctttgttaagtaaggaatatatatctcaattttgatatccgcaataataaaggatagtgaataaaaaatattttactatgtgctcatagaacacattgtatgaatttgccctttgatgtatatattcattaagttctacatttatgaagtacgctttgtggaaagtattaatttaagtatttaatacgaatataattcagacacagtatgtctactgctgattaatgaagaagggaatgtaaaaatatgtgctgcatcataaagtaactgcactaatgaacatatgtgcaagatgtagttcccaatagcaaaggaagagaaagggatttttgtttggttgattgattttctcagtcctgtggcagaacaaaaaaggcacatcagagaaggaaggctgccatcagggaaatgacttttgaggcgggttttggaagatgagctggagctagcagaggggtggtgaggaaagtaaggcctgtgctgctccaggtactttgctaagggacatcatctcacatcggttttctccatactcctccaacgtagatgtccttaatcctcatttcaatgatgatgcagctgattcggatttaaagaagtttgcctaaggtgacatcgctattcagtgagggtactaagctttgaacctaggtatgtttaacgctaaagcctgtgaattgcaccatagtcattggtatcagtaatgaaaaatccaacgtgtttggtgaaattcaagtagtgtagtatcgccaagcacatgatacaaagagaagcaactgaagtgctggaatggaggcatgtgataataaaaaaccatctatgccatgacaaatacactggacttttttctgtaagtaatgtggagccctgggtgggttagttttaggctggcaatgacatcatgattcctaaagaaattcaggagctaaaatcaacagcatatttagctaattatttgacttgaatttccattcaaattggctttattttttcctgaatacgcagttgcttagaagtggttgagttccatcctggtgcgtgctggctatcaaccaacataggagtaaaaattcaccatgagtagtcagccaaaagacacatgcagatgcttaggaaaataaattataaatatttcttatgtctgccagtagcaatgagaagattttgctatattgtgttttttgatagttggcttgttttactgtatgcttatgaaaacataaagtagcaggacaacagatcacattgccaaatgatttctaggatttggcccaaggtttgatgatccctctgccgcttcttggctttgtatgctcagaagcacccaccatcagctgtcagccctgtggcaaaaggaggaatggggtcagagtcaggcaaacagaagccagagccaagtgttgttctgagaaatactagcatctgtttagtgcagtgagttctctgctttgtacttggcaacccacttgggactcatgctgcaaagggggctgatgatttaaaactgagggaggagatccagaggggagaccttggctcatgaaacatcctcttcacctctgtgatgggccgttcttcatgtcctacagtttgaactaaagaatggcctcggcttctcctgtggatgtaaacatattttgttgcaagtgccattcgttttatttgttgtataccttttccttcaaatatattcctggctaaactcctggctgtctctcctggagtgtttttttttttttgtattcttggggttgtaagaatcaggttcatgtggaggtgtctagaaacaggctggctggacaggaaggaaataggtggatatagttttaaatttatacacatcttttggagccaggaacttctacacaatctagcttctatgagataaaatttgtggtacgaaagaggagtggtaacatgaataataagagattttttttaagtctagaaaaccttagatgttgggagtgtaatcaagcattttagccagtcattttgaaaggtaagtgagtttaaatgaattgaatactcagttgtgaattagtgatactgaacatgtacactgtcttatcagtgtgtttcatagtgattggtaatgcccagatttccaatttgatacacagtccattttaaaaagatatatgtgtgtattttatacgatgctttgtagttttgaagttttgagataaattatttagaatcaaatgctcatggaaatgtctgtaatattaaaataggtttatttcaagattattaattcatttgttcaacgagtgttattgagcgtctgttgtgccgaaccctcattaacctcaatagggaaggtactaggttcaagaggctgaagaagagaccccgagccaacaaaggagacatggagtttcattaggagcttacatacagtggagagagtcagtggcagtgggctggacaggagaaccaacttacctacagaaatgatccagtggtggcaggctgggcaggaaaaccgcaaccacttgcaaacagcatgcagtttatgtagcattttcacttaacactctctcctttatgacctccacctggcaaccctcattaaccccaaactcagggcctcattcctctgtatggcccatgttccatgggatgggatggggtttcagatgttcctcacagacaaagaacaaatcttcgggctgtccactagattccctagcttgggacacactttcaggtgtgtctactgtacagggtcattctaagggtttgcttaagtttaccctacagcatcattcacgtctgctctctcatgtgcttgcgatacagtgaccatcaacacaagggccctggtctccaggaacttacactctgtagagcagtgtttttcaaagtgtggttcccagatcattagtatcagtgtgctgggaattgctagaaatgcaaattctcaagtccccggcctagacctattgaatctgaaactctgagagtggggttcagcaatttgtcttttaacaggtgattgtgaaagtttgagaactactgcaaaagacagataaattaactgatgattattaagtatgccagaaaaggctgagttttacaaagaaaataaaacagggaaagaagatggacagtgtaaaagtgtgtagcttttggggtgttgtctttgtctttgagcacttgactgatgtgagaatatctgggaggaaagctttgtggttatctcggttagagattttagtgagttgaggcacggttgggaattgtgatgtctttagaagggctgaacctccagaatttgctgttgaataaattggaaatggtgatgtgagagggcagaatgatcctaaaggttgttgatggtacctactgatctctgatgttacctcatagtaagatgggaaaaaatgaaatggggtggggcagggaaaagcagactttgggggaagaataacacattttattttagaaaagttgtttcaaaagctcattagccatgtgtgaagctatatttgtgagtatgccattcatggggaaggttggcactgggaatattaactggggagtcatggtcatataaatggtattttaaaaaactagttagcctgagatcaccaagggaatgaatgcacatggaggaggtctaaataccaagtcctggggtatacctggggggtggggtgggtggcattaggctaaagatagtgaaaattctaatgaatgataagtaatattttgctatgttgatcttgagattgatatgttgaaatggcagcatcctagaccaatcccaagtttaatgccttccttgaagttgccatgtttctgtttcggagtccttggtgccacaggtccctcttgactttcacaggccagggcttcttgccatacaggtaagtgttctcccttcccagcttatgggatccagactcatcagctgcccgctgtaggttgtccttaaaacttagagaatatgcagagagcatacacaattctgcttagaggaggagcactctccttttcctcttgtctcagttgtgatcttgtcttctttctctaatttccttttcctctattgaactttcaacaggcaaattctttggtctgcagagccaaaagaataattgtctttctttttaagttaatagtacttagatcattttgacagttgtcttatttattaccacttacacagaggcatttcttaatgttgaattcaaatgttgatttttagtgtcctagaccttgatattttctgatttgaataccctgagctgttgaccaaagcaacaatgaaatttataatttcttaacgggtgtgtgattcttgggatttctttcagaaaacaatacttccctgatgtaggaatgtatcacttaaagtaaaaaatgtttttaaaatttgaattatagaagagaataatcagtggatgattcacttcgtagaaaagttctttgctttaaaatgactcatcaagtgctattgggaacatttaaaatgttatttcaattgcacatactctttaggaagatacaagtttattgctttatatgtgtgtatcactgataaaaggtattttcatatatttaacaaaaatttaaagggaggaatggttaaatgactgtctaaggactcatacctctttagtgggcaaccaagtcttgaaccctagttaccagttgtcatgtttacttgtagaactaccatcacggccccaggggaacagcttaagaaagggataggaggaataaaatggaagcactctatagaataagtcttcatctgtactcctgatttaacaaattctgatattacccactgtgtttaggtttcagtgacaagttttcgtagcagttgcggctgcatttagctcttcacatcctcccaattctaaaactgcaaggtattgtaacgataatctgtcccatttcctcgtttttgaatgagaaaaccacagcctagagtagccattacttgccaaagctttttttcttagaagagaggggggatcttcagttatcttctagaatgtgacaaaattttgccaagatcatggtgcgtgctcactaaaagatgatgaagtttattgcctaaatctcaaattcagtcaagatgctacttaggccagcttttaaaatttgtataatagctagttttttatttaaatttttaaattgtgaaacagatcacaaattaaagagcacatataacatatatagtattacatatgcatatcatttaaaaatattttatatatagctatatatcttatgtatgttatttttactataagaataataataaaatataaaatgaacacacaggcatcaaccattgagtctaagaagtaaccattccacaatcttggaaagcccctgtgggtccctaatctgtctcaccccattccttgccctcagaggtaacctctgtgcactaccctcttgtggttagaagatggagctaggccgggctcggtggctcacgcctgtaatcccagcaytttgggagactgaggcgggtggatcacctgaggttggtagttcaagaccagcctgaccaacacggagaaaccccgtctctgctaaaaatacaaaaagccagacatggtggtgcatgcctgtaatctcagctacttgggaggctgaggcaggagaatcgcttgaacccaggaggcggaggttgtggtgagccgagatccaccattgcactccagcctgggcaacaagagtgaaactctgtctccaacaaaaaagaagatggagctacattactgctccggagccttgggcaagttattattctccctgtgcgtcagtttcctcatctgtataaaaggaatagyaatatatgtgttgtgaggactgaatgaggtcacccaggaagtgtgcttacaaaaatatgttgtgtagtcatcatcgtttactattcttgttactatcatcatgttcagttttacatttgaaggacttgtaatgttgccaacaagatggagtttgagggactaaaattgattttaagaataataatgttgttgttcctttttcaaatcttttaacatggaaacattctgatttgrttgggggggggrgcttttgacatcatctgtttcaccttatcactgtgtactttcaaaatatcttcaagatgctttcattgargcaacaagaaaattgttttgaacaaagaccctttagygtcagtcactatttcagaatataacaccagtcattgtttatatgatttactcttaataggattttgatattctgctgtgtaacgttgctgctgactgaatgtctttgaagacagtaaaatttgaccgactacaaaatattacttcatttttggggggtttagtctgtttggtaaggttactaaagagtacttctaaaagtatgagaggataaaggattgagatataagagaaaagttgacaaaatcagaaaactgtgcaatgaggtaatgagtaaccaaaacttgctatcttatcagtactgagaactgcagaaaaatttcttacttggagatttgtgcttttctttgagtattcataaataagagtgaaaaacaataatcacttttctcagtaaaagaaaacaaccttatacttgaggacttttgtttcaaagttggtaaggctttggatactaatataaaattcaccagtaaagtattttgaaactcttaatgccacctgtgcttctgaattcatatgaagattattgtttgagacctctgtggtgacatggacatcacacttgaggggtgagacatatcttcaccttctttacacactggctcatcttctatttagttgatactattgttcctcaataaaattatttttctctctattgatattattttcaagttgacttctagtcagcaactctgtaagtatctttttattggcttttagattctgtattttaaatgagccagcaatatttcaatttcattgagattgcattatatcattttgaaaacttatttgcctgtgattaaatttttgaacaatgtctgggatctaaaaactcacttgaaaatcattttttaaatcaaatttttttaaaaaagtgttacaattatagcaagtcatcatggaaaaataaagtaatatgggtatgtataatatgccttctaaacctctaagcatctggaagcagagatccatgttctgtgaatgacctactaatcttcttaatgagttcatagcaaggcatgtggtatttgcgatagaaaagactcagtaaaagctgtcttccattcagtttttgaaaagtgaatggatrccagtttatgttatttcctatagtgcctatcttaaactgatttttttttttttacttgctgaatctcatttcatgtcaatatgagttttgtattggtaatatagtgtttgtaattgatgatgtagccaactcctttattgaagtaaactgtgaagctaataaaacatcttcatgttttaaggccattaggagacatttttttctgtgtgtgtgtgtgtgtgtgtgtgtgtgtgtgtgtgtgtgtgtttgagaccaagtctcactcttgtcccccaggctggagtgcaatggcgcgatctcggctcactgcaacctccgcctcccaggttcaagcaattctccggcctcagcctcccgagtagctaggattacaggcgcctgctgccatgcccggctgatttttgtatttttagtaaagagggggtttcaccatgttggccaggctggtctccaactcctgagctcaggtgatctgcctgcctcggattacaggggtgagccactgtgcccggccgtgtttttttgttttgtttttgtttgtttgttttttaacataatgaatactacaacagaaacataattaaatagcttctaaacatttgagaagatgaatggatcactcgtttctaaatggatagccaggagagttagttaagtatttctgatcttatagtgaatgataatgtttgtacaacctaatagttgccccttttcctttctttttcttctctaatartaatagcaaaaacattgtttctggcattcagtgagtgccagataaatagaaaggctatgagcttgatgcacagtttcttttctttttcctgggtcctctctcctcccaacctacatttcttggcatctttccgctgtctgtttgttagagttctgactctgacgtcaaggactcacagtgagtgacccccgtggcaaacctgtaaaacattatacaacatgaataagaactttcttattagatctgcagctggctgagtacagacatatggcagcaaggatgttttggaagaaaggcattgcttgacaaagaacccagtctcttgaataaaggtttatactggcactctttgatgtttataatacccgatgccaggggcaaaacttttttccccccattatattgttattttactgtttaaaccccatcattttatatgttgcggtggctaaaatgtagaagcagacattttatgtgtgtctgtataactttaaaaggaaaaaaaaaaaaaagcaaaactcaaaaaactttctcaggctctgtctacccggctgtaagtgttcgattttctgaggctgagactcagattgaaagtgagggagtttgtaagaatgggcccagtccttttgagcaggttttaaaaggatgattaaagggtacataggctttgtaatgccctgacaactttaattgtttcttttggtggttgtcctttttatcgtgagtagttgttctcagttgctaaaaatttaggctgggaataatttccaacctaggaggttgtcacactgatttgcatttggtttgttatttcttagtcttttcaatgcagccctgctttcatcttactccctttctcaaaccccagctactgacattatgtacatggttgtgttttgtgatctgtgctagcacactggtgttgaataatatattgtgaaatattctgatggtgacaattcggtagttgccccaggaggaatgatgacactttgaatcagaggcacaaggacagagaagttcaacctagtggagagccaaggtaaatgaatgaaagcttctgcctccacaaggaatatctaagtccttttagcatggttctttgcaaccttgattatgtttataatgttcaaaatctttgatgaggccattgtcttcctagtacttactgcatctacaataatttagtcataagatattgataaataaggtatgcccattggacatgcctgatgggattttaattaacatctgcctttgacaactgaaacaactgaagggagggagaggtacatgacttttgcagagcacatattatgacagacgctaggggtataacatctagcaaataggtacttgatgacatttttatgaatactatgatttatcaaaataagtatatcctgagaagtatatatttatagatgaaacrgtatttacagagaatagactctagtttagagaaactgaagagcattagtaaaagtgttaataagaataatattttaagtactatgagggacttttttcctggtttttaggttttcatgttaaaaattcatgagcaggacagatatgtttgtcttgttgattttatctctataacgggaattcaaattttaaatatgttctagaatcatgaaagtcatggctagaaaggtcttggagattatctaattgaggagtcccaaatctctaaataaaatctaccagaagaatcataggtcaattactacatgtataattgttccaaataggtttttccagaaagtgcagaaggtagcacagtcctcaccaagttctttcattcagcaagtgctatcaataccacttaccaagcatatattttacttggagaaaatgaaaattgctccatccataattggttgagagcccctttaggtataataataatcttccctattatgtagttgagaaaactgagacccatatactaagagttgaattgtgttttccccaaaagatatgttgatatcctaagccctaacacctcagaatgttaccttatttggaaatagggtctttgcagaggtaaccaagttaaaatgaagtcattatggtgggtcctaattcaacatgactggtatcattataaaaaagagaaatttggacacagacacccctggagggcagatggccatctgaagacagagaattctaatgatgcatctacaagccaaggaaccccaagaattgccagcaaaccaaacagaagccagggagaggcaaggattcttctcttacagatgtgagagagcataggcctgttgacatctagatttcagacttccagcctctagaactgtgagataataaattactgttgttctaaaccactgaatttgtttacctagttatgacagctctagcaaactaatacatcatagatattagtagtcatggtctcctggagaagtaattagcaaggtagtcaagtctggaacccagtttaattcccaggttcagtgctcaatgcctgtctctagaaataaaactttttaatttcttttgctgtaaagataaatgcaccgtaattcacaaattgttatgaggactatttttctgttgtccatttttttggttatctttttactgacttatttcatttataacacaatcttgaagtctgataatttcaggtacagacttcatttattaaaataaaaactcaaacttgaggagacgaaagttattcgatcatttctttcacttcccacagttggttaatgaaatctggagaataatataattgttatatctttttctttgcttagcgtaaacactcaaactataagttatagctgataacactcaaattataacttataagctgtaccataattcatagtagtcaatgaattagtcagctaaacttgaacatattactacaacttatgggcatacccaactccagatagtagaaataagactcagagtatacatttcatgagataaatctaatgtgagtatccaataatagattcaaatatttttcaagaattgactatgagtctgtgaatatatattaatgactatacaatacttttttttttttttttaagagatggggtctcactgtgtaactcaggctggactctagctcctgagctcaaatgattttcccactcttagctcagccacactctgcgtagctggaactataggtgtatgccatcacgcctagcttaaaatatattttattaagaattggtgctatggaaaagtattgcttcaaccatttcccccttttcaagctaaaattaattagtaatttaaaaagagacatgaacatcaacaaattaaacaatggaacaaggatcattcaagtcctcctataggcctcttgatctgtacattaattggaataatggtctgttctttttgtagaaattaatcatgttcttaaacacctccatkcagtgtaagttctgactgtttaattaaaactttatagtaagctcaaactgggatcctgaaaatgaaaagatattttttgttatctggttcaggtttttgttaggatgagcactctcccttatgataatccagaggtctgctcctttgaaatgtcaccccaaagtaggttgcttgaagttcccagaggctaagagggttccccctatcaggacatagttatgacacctacacagctcccctcttagcttcatccctcttagaagagtttctatttatcttcatattctgagacgaaattgttccatttattctactaacctcagcaaaagctggttatgttaaaaacaaacaaaccaaaaaacctaactgcatctaggtaaacattttcccatatttgttcttgcaagatggctgataaggcattataagtggtgatccctttattccatcattacaggaaaaaataatgtttatttgatgtgaaggggaaaaattaaaattaaagataattctatacttcggatacttgaccatattaaatttacaaaatgtatagttgagttttaaaatcacaatataagtagatttcttctactcacaatcattatattagataagaaggtactcctcttgatctctcctttgctccatcataaaatccttactagatgggtaagacggtagttgtgataagacagtagtagcctatcctgtcttatacgtttctgtgaagcccagagaggtgacatgaatttctgaaggttgcagaactgagacttaaaacttagtgtgaaatttattctgttggaaaaaaaaattgcactgtaactatttctttgaactttgggaagtatatccttattagagaattacagtgtcaagacattgcgctattattaaacaaatgataccactattttgacaagagtggtactttccaaaatacctaagaagttaattgaagacttggaattatcagaggatttattttatgttgaaaattctgacttatttttaaattgtttattccatctcataaacttctatttgttatttaattttaggaactttgaaataaaagtttttttttttaatatatcttatgtcctgtgtgcaagtctaatggatagatctgtaccttgaagttccaacttctgccctcagagatgaaagtgacaaacagcaaaatatggagcagatacattgaaaactttaagaaacttaatttttatttagtttgtgcttatttactaatatgttctctgaatgcaaagtaagtatacatgtagagtcatctttatgaaaagctatataaagagctataaataaaagggatagataggtaagacaaaaaaaggcacactgacaaaatctgcggtaagaaatataatgagttagattctaggcatttgtcttatttaacatggagtaatttgtggatatatatatattgtgtgggtatttgaaatttatgtagttattttaaatcatgtaatttatttatgcaattattttatatttatgttaacttatttatgtaatgattttacatttattaagctgacgattatggtatatggaacttaaaggtataaatatacccatttatggtatatggaactgaaaggaataaatctatccatttaccaatcagtctgagagattctctggtttcttacaaatacagattggcaacaccgatgtggttaaacatgacaggcaaataactaccattcaatgtgaatattagcaatactgacaagagaaataacatttgggttgaatagatacatttatgtcaggtttttgtgtattagtttctctctctttttttttttttttttgagacggagtctcgctctgtcacccaggctggagtgcagtggcgcgatctcggctcactgcaagctccgcctcccgggttcacgccattctcctgcctcagcctcccgagagctgggactacaggcgcccgnnnnnnnnnnnnnnnnnnnnnnnnnnnnnnnnnnnnnnnnnnnnnnnnnnnnnnnnnnnnnnnnnnnnnnatattaagcgtcccatgctatattgagataactttcaaacataatacaattatggtagtaataataatttggaacttcaactatactacttgacattttagcatttatgtaattaattagttaactaacttgtaggtgccaggcacagctaggcctaccattaaggagtttgcatttttttcaagatagttatttatagtacagtatgaaaagtacacaaattttgagcagtattttccttttttcatggcttcccttattcaacttctttaagtaagtaaaattccacctcagaaatggttatccatgttccctatctcctccattcctattgtctctgccttgactcaagacctccttatctcttgcctggattatagaactgtgtcataacaggtctttctgcttggagttacccaccttcacttgaccacaatctgtgatacccagtttctttttctttttttttttttttgttttgagacgtggtctcgtcctgtcacccaggctggagtgcagtggcgccatttcggctcactgcaagctccgcctcccgggttcccgccattctcctgcctcagcctcccgagtagctgggagtacaggcgccaccaccacacccagctaatttttcgtatttttagtagagatggggtttcaccgtgttagccaggatggtctcgatctcctgacctcatgatccgccccgcccccctttggactcccaaagtgctgggattacargcatgagccaccgcgcccggcccccactttcttacactgtatctttctaaagaataagtctgaacaaagtagtgactattttaaaccaatagtatacatttactaaattcttagcctgcctttcaaaattacattcagatttttccaccattttctttttagtgcatcttaagtacaggtcatccgtgcgcccgtcttttttctgagcaaatcacctgtgtactttcacattcttagcatctgccaggggtgttccatatacctggcatgatcctccagcccccactacccgacctactttatttcttcctggtaaaaccctcttcaaccttcaagccacacgttatgcagcctttcctcgcactgagaaacagatactttaagggttatgatatttattatattgtaattatttacatgttttgtttccctctagagaatgagagttcctccaaggtggagactcattcagcttttcgtctctcttacataacctktgcctggcaggttgtaggtacccagtgattattgaattagttaatatacgcaatatggatttgcttgtcagagcatgagtatccatggctttctgaagtccttcaacctttgcttgtgctacttcctctattttggtcctcttcaataggcgaggtgattatgatctacctctaatgggtcacagtgaccccaaaggcaaagcaatatattgatctcccttaaaaggatgtatgccacgaaataagtgtttttatcttctcatccatattcacatttatactttaagtgcaatgtcctgagtgagacaaaccttcacactaatctgtgtaattaaaaatattgaaatctcattgcttggcaaccactctagacctttggacacattttctggcgctgttaagggggctcaggctgcaattgagatatagattacctatttaaaggaatcatatttttcccctttgaaatgtctgtcctttatctccttttgatggattttctaatttattaggctttgcttttttgggaagtaaattatacctgttgacacagttgcatcctcatgcaaaaacaaagatgatatcattaatattttatggcttaatcattaaatgtgaaagggtgaaatgcttgtattgcaattgaaatgaatcttgaattgaccaggtctttctctgtgggaataaaaagagaataggtatgaactttaataaaaaatggtgtttaactctacatttagcagaggtcttctaagtaattttgccatcagttttcttcccacaaattctcccattacataaataatctgctattatgttgatagactcatctttctgaaatatagacatgttcatataattcatagtttgaagtgtctgatgtctcctcttgcctttaaagaataccctgaactcttaaacttcacgtataaggttccatctgtcttgaccccaatctacctaggatttctcctcatccctggtaatctatacataccttaaaacccaactcaagcattacatgctttctttagctcagttttcactgatgccccagcctcttagggaagaattcattgtttccgtatttgtgaattatagcacctacccattcatatgtggaggaataaaatgtagagagtaagagttagtgtttcaaaggcagaccttctggctgtttgcattctgtctgtgggaccttcagaggattccacggagtaaaagcactctatgtgtcccagttctatcatttatgagagaggggaaataatactgctccagaaggttattttgaggatttttaaaataatgcatgaacagtacttagtacatgcctggtacacagtaaggactcaaccactaataaaaaaaatgttttgtgtgcttacattttgttttgatatgcttacatatttttcttccctattaaaatgagatggccagaattctgtcttcgttgtacaggcagcatccaacagctctcagcatataatattggatatgtgattattaatatatgtaaagggtaacatattggtcaaaacattaattatttggagaattattcgattaataaaatatgttttatacatattaatgctgaaatctctgctcaagtgttttaagaggggatttactcacagaaaataaaggaaaatgaaagctactaggtgaactatagtttaaaataacaaatccaaaaatgttagatattgcatctcttcagtggagtattatgcctggagccaattttgaaataaaaacaatgtaagtacttacaaaatctccatttggttcagactctgcaggtggaactaatgtaagtggaaagattcctaaataattccaaagtcactatgaataggaataatgatcatcatacatatacttatcacttctattagaaataagccatgcttatacatattgtttaatatagccaaaatatcttacacataaagaagttagttataattccctactctattcctcaatatttttaacagtgcttctcaaatttaaatagggatgacaagactgatgtttatcaggttttcctcaaggagatcctttactgtgaggtgtgtgtgtgtgtgtgcatagaggtattattgaaatatgattcacataccatgtgatttatccacttaaagtatacaattcattgttttttagtatattcacaaagttatggagctatcgccactaatccagaacattttcatcatgtcccctaaaacacctatgcctgttaacagccacttctcatttcacctacctctctactacttccaggcttaatcaatgactaatctattttctatctttatagatttgcctattccagacttttcttataaaagtaatcaaaatatttgcagtcttttgtaattaccatctttcacttakcataatgttttgaaggtttatccatggtgaagtatgtatcagtactacttcatttctttttgttgccaaataatattccattgtatggatataccatttttgtttatccattgattagttagtagacattttagttgtttttgctttttggctattatgaataatgctgctatgaacatttgtgttcaaatttttgtgtggatatttgttttcatttctctggaatatacatctagaagtgaaattgctggatcatatggtaaatccttgtttataagtttgagaaactgtcaaatggttttccaaagtgaatgcatcactttgcatttccactagcaaattataaaggtcctcatttctccacatcctcaacaacacttgttattttctatgtgtgtgttttaaaaatggtttttatagccatactgatgggtataagatggtatctcactgtggtcttgatttgcatgtccacagtagctaatgttgagcatcttctcatgtacttgatgaccatttgtatgtcttctttggagaaatgtctatttaatcctgtgcccatttttcagttagattattttcttttcattattgaagtttaagagttctgtatttcatatacaagctttctggtataagtctcatatcagatttatgatttgacaatattttctctcagtccttgtattgtcttttcactttcttaatgccattgttgtgtgtgcttatttttaaaacaaaatctgatgacagattattctaaaggctagattttaaggttgatatttgttttcatgatgcatctactattatttattttcgtattttctgaaattattagttttttaattacagctataacattttgaacaataaaattcttaattttagtgttttccaaaccgtgctctgtggtacacaagatgctccatgactaaggtagattgagagatgttgtttgctttatttcttactctgagcacacaatattaaaggccatatgatattctattttaaaaataacatgtctagcccagcatttccaaaagccgttttaatctttttccctgaaacagctattaaacccaagttctgtaatatatacttcagaaatattgttttaatctattctctgaactagttttacctggcttgtaggactatctgcctttgttcttaaaaaaaaaaaaaaaaacttgtgagagtctttttaaaattctatagtcagatctatgacaacaaaagagactgagacawccacaagttatttctaccatgtttgtttaactcaggagattgaatttgatgtgttatatacatggtatgaaccaaacgcataatagaaattgggtcttctctaccaatcagatagttagaaagatatgcttttacttcagagaaaattcaaagtcagctaaagtgtgtaggtctgtttcttttcaatttccagggccttttccattatgtatttgctgcctaccattattgctactattccatgaaaaatcgcactctgtgtgtgtgtgtttagatttgtatatgtctgctcaaatagagcttaatggtgacatttttatggcttcaggatgttggggtggagggaattatcttcccctcatggtcgctttgtgtcagatgatcattgcttcatctctagaatcctatattgcttctggacagggaaaataggaaggcagaaaggcaaaagagacaagctagctgagttttcccctttttaaagactttccttagaagcttcacacagtgacttctgcccgtatctcattaaccaggactgtgttccatgatctcctgatctgtaagggagttaaggttgggggaaatagtttcctagctggacccattgccatctctatgagaaccagggttctgtgaataaggaagaagaatacgacgtattataggatggacaactagcatttttgtcacacaaggcatgggatgacagaaaattctgagagtgaagagctaaaaattctttactacttgtgtattcaacagtagaattttaaaaatcaactccttattgtagcctaaaccacctgggttcaagcaatcctcctgcctcagcctcccaaatagctgggactataggtgtgtgtcatcaggcctggctaatttctaaaattttttgtagacgtgagatcccactacattgtccgggctggtcttgaactcctggactcaagcgatcctctggctttggcttcccaaaatgttgagattacaagtgtgaaccaccacacctagccttattttttttttttcctggacaacaccaatcagttattctttttaaaaagcatgtattgaatcccttaacacgtgccaattatattccacatagcaaataagatccataaggtttctgctatcctgaaacttactttctaaaatggaagatagacaaaagcaagtaccggttgagaatcccttatctaaaagggaccaaaactgtttggagtttggaatttttcagatgttcaaatatttgcatatacataatgaaatgtcttggggatgggacccacgtctaaaacacaaaatttatttatgttttatgtctaccttatacacatagcctaaaggtaattttatacattttttaaattttctttataaaacaaagtttgtgtacattgaaccatcagaaagccaagatgccactatcttagccacccatatgggcatcctgtggcaaaaaaagtttcagatcttggagcattttggatttttggactaaggatgctcgaactgtaatgaaataattacacaaggttatttcagattgcagtaaatgcaggaaacacacttggtcatatgctgaagagtgacaagagaagatgagggtaagactggccacttttgttcacttaataaaacccagcacctaataccatgcttggtgcaggataggtgctcagtaaacgtttgtgttggatgaatggatagatggatggatggatgatcagtcacagaaagtgtcctgaggaagtgttayttgaagtgacacccgaagaatgaaaatgagctgacaatgctaagaaaatgggaaaatgtattctaggcaagatgaacggcatccaaacctttaggttatatcagtgaaatcaaatttaattctaaaacaaatgagaagccattgaaaggtgttacattgattatctcatctgggcttcacaaaaattacgtgaagtaggtagtcttattatttccattttgcaaatgaggaaacttaacctagaaattataaaatatccagattcacagagctggtaagaatgaaattgggatttgattataagaaattcagctcgagtccacccttaaccactgtgcaatgttgtaaactataaaagtaaactgtaacaggactagattgtttaaacagcaagtaaaagcctgaaaagaagatatctgccaatttaatggattcaatttttaaccacattgtctattagtgactcttatgaattgaatacatagcacagtttctcagagcctccactgaccatctttctctttcaaagtaaaaattgtctttgtatattacattatggactggattattataaaagatctagtttctggttctaatgaacgctgaaatatggaattgctaaaaagtaaatttagttagaataacaatagcttgatagaggaaaatcattacaaactcaagcggagaattccagtttagctatgcccttgaagttgttattatactttgcatataatttattgattctgaaaagttggatttgccatcttctgagaatattatcttgggcatatggggcacaccctgcaaccagaaacagcacaggaatagtcattccttcatgacaacttctacgaaagtgtaaattgaggctaacaggraaatcaccctattactcctgtaaagtgacgatagctttcagttttcaaatgcgactttctgatcatgtttgaatgtgtttctgttcatgtttatggagaaatttaagaattagaattgtgattcttaattctaattcttaaatttctccacaagtaataggaaactaaagaatttttctgtggtaatttcattaggaaaactttggctaggacatggtgataatgtgcagatattttgtttgccatgtcacattcttccccttcttttctggaatgcaatcaatggtgaaacatgttttacggtaaaacatttaatactccaaattgtgaataaagcaaagagaatgtgtttaatrtattttttaaatcatatactttctttaagaccctctcactcctaacataagctagagttttccgtttcaatatataatcaaaaaaccaagtatcctattaagtgtatattrttgactcaaattgacaaggacattggtaaccttccttttttttttttttttttttttttttttttttgagacagggtctccctctgttatccaggctggagtgcagtagtgcaatcgtagctcactatagcctcgaactcctgggctcaagcaatcctcttgcctcagcatctagaatagctaggactaccaggtgcacaacaccacacctggctaatttttaaaatattttttgtagagactgaggtctcactatgttgcccaggattgtctcaaactgctggcctcctcaactgatcctctcacctcagtctctcaaagtgctgggattacaggcacaagccaccatacctacccctctatttatttagtttttgccttcaatcaaggatacagtacatcgcatttgcttgaaatagaaaaaaagaatgagcaagtctctcggttcttgtacttgtggtaggaatagagacagagaagtacctggttaattatttctgcacctgcaattctaacgacctcagttaactacagttttaggtcatactttactcttcctttttttctatttcttcctttttccttgccacatcatctattccactttattttcttttattcctaaatagaggtctgcataatatatcactaagaggaatacatttgcaataaaacttttttctgcaaaaaaagcattggttttattgtaaacaaacctctgaaattactttcaacatatcaaatgggtcatggacccgtgaagaattgagggggaaggtcaaatttaggggcagagatgtactgtaaacttagtcaaaagaatatcttcaagtcttataataaattactttcttcagcatttaagaacttgaacacaaaatgcacatgtcttgttaaaatctaattgaaagtggaactaaagtaatttttggcacaaatcggctttagaggacaaataagaaagccaagggtcgcgtaatggggctagtatatattgtagtccgtctatgcttttctcaacaacctcccaaagtctagctgattggggagtaagaaataagtagcagggaaaatgtttggaattttgtcttttgctgaaggtttcttggcacttatgaaaacttcattgaatgaaataagactttaaaaattttgtaaaagactttttggaaaaacgtaactttcacattaaaattatataaaaaccaattcagtatttttctcatttataagacttaaaaatgaattcaatgttttaagtcacaccaattactgagatatattttttaaaattacctatttatcaattttaaagaccatttctaaaaaaggagtttaagtagagaatattcctttgagttagatagtttttggtatacgtaacagcatacacacacacacacacatacacttttaattttcttggacttatatattttaggcccataaatgtaaaccatttggatatcaaagcaatgtttatgtttttcagcacgtaattttaatgctacagtctgagaaattgtatgttgtttaaatgcaatacatcacaatgtttgataaataaaaataaaaaccgttaaacctatccaaatgcaagaactcmtaaatattgttgagttaaagcttttgatgcagctgaggctatgtctggattttattattttccctaggatttccaattttttctaagaaaggagatcaattttatagattagtctcctgaagttgtgccagtgggttcgtctgagttttaataattttctgtagaaaatagccttgaatgtgtcttttcacggggcatggtatgaatgaaacctaaatatatagggaaacagagatattagcatgatccagtcataaaacaacaggtgaagagctagaaataataaatgaggcctttattttattttttatttcctactcatttactcaaattgacataaataatgcaagaggtagtttgacaaactgtacaatacagatttatagtcacattaattggtgcttaggggtttgggtttcacctgaagttaagttcatatagttaataaagtcataatgccttgtttaaatatttcatgagaaaattgcattttgttttgtctactcagaacctaaaatctgttttattgtggttattttataaatatttgcatggaatttttggagtaagtttatttggtttgtttgttttttttttaaacaggcctaactatcaattgcattggaaatttgattgtgtttccaactaacaaataataatacacctggaagtgcaagtcctttccatattgaacagactctctctagcttttccttagctgatcttttcaaacgtttgctatttgggcctctctggccccaaagagtagccttttgctactctttacgcttgaggaagattaagctatcccaggcctctcataaccaaggggatccattaatattaaaatttagatttttccactgttaatgcagaaaaccattgattcagtagacttcatggtcatgcacatgcgttacatgttactctgagtaatgctgcatgaagttttaattacagattgatcaaattctataaattgtgttttggcgtggccaaggaatgggtttttcctattctagtttaatagaaagtcataatatatatcatgtgaattttacgtttctcaatgaattagattgcaacaatgcctaagtttgattatatacttattaatagtgataacaattatagctcacatttagtaagtccttactatgtaccaggtatataaggctttttaaacctaatgattcatttaatgcttacaaaaccatacaaattggatgctattattagctaagtcatggagacatgaaactgaggcacaaagacattatataacttgtcaagatcaagtatctggtaagactgaatatcaagtcagaattgggatttgaaccagtctggactctagagctaacatgcataacatatagcctacactttttaattattcagaaggtacttcaagactcctgtggtgcctttgggttggcagtttcagtattttttatgcttacatagagcataagatatataaatataaaacattatatataatatatattcaaatatatattttatatgtgtatatatatttccctaataaatattgaaagaatgcacacatgaatgagtggatgggtgaatacagaaatgaaaaatttgtattgagatgtgctaatagagaatttggtataactaaacatctgatatataatttatattttgaggtaactctttagccaacattttaaartatgattaatttatagtacttacgaaggattttcagagacattacatttttctgttatttcactgttttaaacaagatggagattagagggtggaaaatggattctggagaaataaacccatcatattaactataaccatgagttccttgaagacaaatcaaatctgatgtcttttctttytccttatgaatatacttcagtacgaaggacctgatacttagtttggacccagtaattatttattgttgtaagtagcacagtaagaataaaaacgtttatgatttgcaaccagccaacctatattttaatccatatttaaccactggctgggttatgttacatttctcctctcttaactcatttccatatccataaaatatggagcatatgcctctatggtttcttggtgatgaaattatgtattaaaaattataaaactgtaaaaaatatatctcaaaatgtgtttgtgttccatggaaaactgtaaatctctcttgaaacaaaaaagtttctataatcacatacttctagaaatatttcatctgagttcctttaaaacttcctcaagctttaacatgctaacaggtactgggactatccaaggagggatgatattttgcagaatttcacaagcttattttactttattaccatttttcataaaatacctcacaggaaaacttaagcatgagactgatgtgattacattattattaatagtctccaaaattcaaattagcaatagaagttgtaaaaatttcaagtaatcaggataaaccagatgtattaaatgaaaataatggaagctttgtaagattagtggcagcatataggtttagaggaattattatcattgtgataacagggacagatacagaattatggaaacattctaaagcagtatataggaagatcattatcagaaatagatagagaaattgtagtagagaggctagaatttcaaactccagaatatctgaatttgcctctatctgaagccttctcattcccagtgcttatgaaatttacactggctgctatattgaaatgctaagaatcagaatcagggatttagtatcaatcaagtggatggaatttagctagttatcaccaactgtgaaaggaaaaatatccgttaaattcagtcacaatgctatatatcaggctctcagtgattttttaaaggagggtcaattttaagaattctaaggaatctctttgttcctgctaatttgtcygaaggtttacgaggaatacaggagaaagctaaattgtttggggaacagtaagagatttagattctgagaaagatcctggaggaaaagctggggccagtatgctgaaaaagacacagtcctcttgccctaccccaagagtaaagggcaagaggtagtggctgccaaaaaaaaaaaaaacaaaacaaaacaaaacaaaaaaacctgaaaaaacaaaaaagttttgtggagagatatcgaatggatatttatatggctttttgctgtattttgtataatgtaatgatgtcctcttgtctccccatgaaatcgtcagtgaaatcaacatcacttgctaatacattgtagagtgggattgatttgaggagcggggagatgtgatgaagtagctgtaatagaggtattgtgtttatgagactgtggctgctagtcacatctgttttacccacacgaggctgatgtggtcttctagtttgtaaattatgatatgcaggcggttcctgccagcagagatttaaaaaaaattatgcaggtgggtaagtctttttcagcaccacctgtattaggtctttctagatcccaaatcccagtattgacgactggagggctgataaacagtatatggcaaccccaggaattctgttagcttctttggcctaagccccggaccaaatgcagacttccactcttacttttctgaagagtgcaaggtaattttgacattcttactccgttaataagaagagacccaggaaaggaccaccaaaaaaaaaaaagaacaatttcccaaaatgactagacaggtgctgagactggcctaaactatcagagatcttcccaatccagagcactgacctctgctagagcctgcagtcaggggagacatacagttcaggctcatcttctcacatggaatgctgcagagagcaaatataggtagcatagaaattaaggaaaaagagtatgccaaggaargaatccaatcaaacatgcccaggttaaagaagtgcttttagtttcttatcaaatcaaaaaccgtgtgctcatcagagtaaatgtggttctaaaaggcaacccctgctctcatgcattttgtgactcttgaaaaacaaaacccatatgtaaagggacaataaaattgtactatttagtatgactaatataagggtgtctttgtggcatgtggtgcatattctataaattcttgttgtattgaatggaattaartaagagtttggggacagaagaatccctggtgtattagtatttccctagataattttttcttgtaattttgaattaatgaagctaataattaacttgtagaccaattttatactaaaggaaaatagtaaataccaaatatatagctatgatcacaaagatccaatccctttttaaatttaacatagagatgctttgctgctcctaaggtaccattcctgctcccgcctcagagcctttacatcttctatttcctctgtctggcatgcatttcccccaggtttgtgtgtctggctctttatacaattatctgataaaatgtcacttttttcagaaaggactttttcgatctactgtacttatataaacttacctctgcttccagcccctaccatccattacccccacttgttctcccttcgtttattctattctaagcttctttatagctttatcatcacctggtatactatgtttctgtgtttrtcttcttccttcactaaaatataatagccaggaggcagagatacatcttgttttgttcaatggcatacagtttgtgcctagaacagtgctttgcacataatatgcatacaatacatatttacttaatgagtacatgatgaaatagaaagtggactgtgtggtaacctttacatccttatatgtatattagttttatatgtcttcagaaatatgttttagccatcttcagctgctgtaaaagaatagttttcttgagagtagtgcaaagataactgtggtgactattactttccatcgttatcctctttttttcatatctaaaacttctcacctctttaaggtacacacaaataataattttttatttcccatctagttacagtcctccttcagctttcatccctttagtaatagttgtggtgaattttttctcccgagaagcycctaaaaaggcgttcatttttacgtaaacaaacaacaggagaaaaacatataaacatgaaagcaaaatattttacctacagaaatatattttcagcaatctatttctcatgctattgttaaaaatatctctrcttggatagaacctttttgtttccatgctgacttcttctttgcttctcctgtgaactttttaaattctgtgtttggcagcagttttgttttccttggagctaagtactgtgtaacatactgttagctgaaggctgtgatgtagaaatttattattaaaaataaaagacggagagaagaatttattccataaggatcaaaatgacttagtgtcaaagcagttaggattttcaaaatgctttctataacagattgtgtttcttttcaaggaagtttactttgtttgccaggaataaatttaagggtcttcattgtgcctatcttggttaatgagaactgagaagagaagaaacattctcttttaaaaaaaattttttttagagaatttcttcatcagacggaragattttatttgccatttgcaggcataaccttggtgacctatatatccccagaccttctggtaagatgcttattaaaatgtcattacccagaggagtaatcataaactagccagagggtattttttatagatggtgagagacaaacattttttttctccctgaattaagtagttatgtactcttatcaactagaatatatttaaacttacttttatttatttttccagtctcaatctctccctctctgttttatgtttctagcaactttatgtaactaatcttaaaatcattagcattccttctccaaaaagagtatcatatcatcttaataaagtttctcttttcccagaattgcttaagtagcatgctgctattcatttctcttgaaaktttagtcaaaatgaattattttgcaaaaaggaaaattccacagtttctatttcttttcctcattgtctgtggcccattaacgtcttttatctgctactatgataatgtcaaatgattactttggtcatctgcaacttaacactaatcttatctgtttaattgaaaggatgttttgactttctctttgaaataatatcaacatcattttgcacttaattctgaaattcattgacctcaatgtgcaagctgtcttctttactatttattgtgaataaccatttttttttatttgttgtaatcacacatcargaaagggctagggagatgtctttgtgaaacatttatccctatggttctgtttaataggagtacttaccagtagctaaatgcctcattttattttaaataatctgtaatattaagtcagtttatcacactatgagtagttttttttaatggattctgacaatatgctgcttattgtagtctttcatcctttatctgagaacwatgtttttatgacagtaaaatattttttatacaaataggataaaaattcatatgctgtcatgcgctaatatgaagtttatccttacatctcccactctccaccccatgccccatctagtggccagaatgctgtaatcgtgggaaggaataaagctctgacactatgcagtccctacccccatcattgcctctttctttgcattaaaaaaaaaaaaaagaaaatacactgaaataataaatgctaaattttggctcagattattttaattagaaatggaagtttaatgataaacactttgtattcttcaaatccaaaaggagaaatatcctgtttacttcctttggtgctcttattgactgtagaacattacagtatctcatttgtcatatgcagagttcattctttttgaatatatttcacataggatgtagatttctgtaacattttttattactttgaaaaaagtagccatagtgtacattttaaaatactaccacattcttggtcagctcatacctttcaaatataatataaagatgatattaatatataaataagaatggaaaagaatttctttgccctgcatatttctcagtttgttatataatgctaggaaataactctctgatacataacacacttggcaaattttactgttttatgctttaaaagaaaaagtcaaatttagatagtgaattttttgaaatgcatcttacaagctctgatttgcaaattaccaaattgatcttatcttctggagtaaatgatgacccaaattagtctacattttgagtgtttttgttctttgactaaaatcgtcatcgttaagataattaatggcagaaggcagtgaattacatgctttcctcattttaattctggtcctacaaaaatgtttcctttttgacttactgtcatcatgaaatattctctcttaaatcaatatattgtggattataacttgtgtttgtaagatttatttacctcttttagttgtgataggagaatttaccaccttattttgatcctgttagtttaaactcattagcaaggaggataacagtgttaatagtcagcattttgtaaatcttccagaagattttgataaatcatttcactagaagcctattgctcaatttattgccactttaaagttgccaaaaataatgagctcatcttcctattttaatgtaaggtattgtcaatgtttgaaatgtgtcaagaattgtttttgatagttctagtgaacaactaatgtttctaaatcatactacttatttcattagttaattattgcttgtgaaccatattataatcatctttagtatcaataaatatttttgagatgatataatgccartaaatccataaattaaaaaattaaagcattaaagaaatayctactatgtaagcattcaattttatataatgattatctgggtcagtgtacccaaaattgtgtgctagccaaactacaattaaatcatcatgataattccaaggcttaaaacaattgactatgtctgttaaaaatgagtagcttaaaattcattaaattactttgttatgttttttacctattatactgtgaacatttcacatgttcttttttataaaggccttggaagccaaattttaattgctctatggtatcaytttgtataccgtaatctattgagtaatttcccttttgttggataaacaattagtagcacattatagttactggatttttagatcttagtttactggttcaaagggtatgaatttttaataatatatgtattatatatattttatatgtgtgtaaatatatatatacaatgtgtataaatatatatttgttatatagtagcaatatatatgcttagtttactccctgttttccaaatattcaacattattaatttgcaaatataataggcaatagtagtatcttgtcattgtttatattgaatttcttttacttccaataaagttaaatgtctttccatagatctatttattttgtaagttgttctcactcttccctcagttttttactagggttgggattctttcaaatttgtaagaacccttgatatcttgaagatattattctttacctaagtttactacagatattttaccaatgtgacatttgtgcaaatactctaaagttttatatagccagatcaatttgtcctcttttgtaataaaaaaaaaaagtctttaaaaaaagatttacggacaggattgacagattgatagctctttctcgattccgtgggtggtggtgcatggccgttcttagttggtggagcgatttgtctggttaattccgataacgaacgagactctggcatgctaactagttacgcgacccccgagcgggtctgcgcctgccacctgtgcgggggccggcaggaccccgacaagcagctcatgtgcgatgagtgcgacatggccttccacatctactgcctggacccgcccctcagcagtgttcccagcgaggacgagtggtactgccctgagtgccggaatgatgccagcgaggtggtactggcgggagagcggctgagagagagcaagaagaaggcgaagatggcctcggccacatcgtcctcacagcgggactgggacaagggcatggcctgtgtgggccgcaccaaggaatgtaccatcatcccgtccaaccactacggacccatcccggggatccccgtgggcaccatgtggcggttccgagtccaggtcagcgagtcgggtgtccatcggccccacgtggctggcatccatggccggagcaacgacggagcgtactccctagtcctggcggggggctacgaggatgacgtggaccatgggaattttttcacatacacgggtagtggtggtcgagagctttccggcaacaagaggaccgcggaacagtcttgtgatcagaaactcaccaacaccaacagggcgctggctctcaactgctttgctcccatcaatgaccaagaaggggccgaggccaaggactggcggtcggggaagccggtcagggtggtgcgcaatgtcaagggtggcaagaatagcaagtacgcccccgctgagggcaaccgctacgatggcatctacaaggttgtgaaatactggcccgagaaggggaagtccgggtttctcgtgtggcgctaccttctgcggagggacgatgatgagcccggcccttggacgaaggaggggaaggaccggatcaagaagctggggctgaccatgcagtatccagaaggctacctggaagccctggccaaccgagagcgagagaaggagaacagcaagagggaggaggaggagcagcaggaggggggcttcgcgtcccccaggacgggcaagggcaagtggaagcggaagtcggcaggaggtggcccgagcagggccgggtccccgcgccggacatccannnnnnnnnnnnnnnnnnnncgggtccccgcgccggacatccaagaaaaccaaggtggagccctacagtctcacggcccagcagagcagcctcatcagagaggacaagagcaacgccaagctgtggaatgaggtcctggcgtcactcaaggaccggccggcgagcggcagcccgttccagttgttcctgagtaaagtggaggagacgttccagtgtatctgctgtcacgagctggtgttccggcccatcacgaccgtgtgccagcacaacgtgtgcaaggactgcctggacagatcctttcgggcacaggtgttcagctgccctgcctgccgctacgacctgggccgcagctatgccatgcaggtgaaccagcctctgcagaccgtcctcaaccagctcttccccggctacggcaatggccggtgatctccaagcacttctcgacaggcgttttgctgaaaacgtgtcggagggctcgttcatcggcactgattttgttcttagtgggcttaacttaaacaggtagtgtttcctccgttccctaaaaaggtttgtcttcctttttttttttttatttttatttttcaaatctatacattttcaggaatttatgtattctggctaaaagttggacttctcagtattgtgtttagttctttgaaaacataaaagcctgcaatttctcgacaaaacaacacaagattttttaaagatggaatcagaaactacgtggtgtggaggctgttgannnnnnnnnnnnnnnnnnnnnnnnnnnnnnnnnnnnnnnnnnnnnnnnnnnnnnnnnnnnnnnnnnnnnnnnnnnnnnnnnnnnnnnnnnnnnnnnnnnnnnnnnnnnnnnnnnnnnnnnnnnnnnnnnnnnnnnnnnnnnnnnnnnnnnnnnnnnnnnnnnnnnnnnnnnnnnnnnnnnnnnnnnnnnnnnnnnnnnnnnnnnnnnnnnnnnnnnnnnnnnnnnnnnnnnnnnnnnnnnnnnnnnnnnnnnnnnnnnnnnnnnnnnnnnnnnnnnnnntgcaagtgcctttgattcgttccttctttctaaagacgacagtctttgttgttagcactgaattattgaaaatgtcaaccagattctagaaactgcggtcatccagttcttcctgacaccggatgggtgcttgggaaccgtttgagccttatagatcatttacattcaatttttttaactcagcaagtgagaacttacaagagggttttttttttaatttttttttctcttaatgaacacattttctaaatgaatttttttgtagttactgtatatgtaccaagaaagatataacgttagggtttggttgtttttgtttttgtattttttttttgaaagggtttgttaatttttctaattttaccaaagtttgcagcctatacctcaataaaacagggatattttaaatcacatacctgcagacaaactggagcaatgttatttttaaagggttttttttcacctccttattcttagattattaatgtattagggaagaatgagacaattttgtgtaggctttttctaaagtccagtactttgtccagattttagattctcagaataaatgtttttcacagataaaaataaaaaaataaaaaaaaataaaaaaagatttagatttatttaattttttttttatttcccaagataggttgagtatttacctggattttattctattttatatttacagttttgtctttttaaaaatttgtcttttaaatctataattaatattaccatttattataaggttaggctttaattattttttaccctcaaaagtctatttttctttttctttcttttttttttctttttttgtgagacagggtgtcactctgtcattcaggctggagtgcagcagcgcgatctcagctcactgcaatcttggcctttcaggttcaagcgattctcctgcctcaacctcccaagtagctgggattataggcgtgccccaccacgcccacctaatttttgtatttttagtagagaaggggtttcaccatgttggccaggctggtcatgaactcctttttttcattagttgaataattcatcaaatacaaaatatttttgatgttttcttgcttatattttgttagcacacatacgtatatttattccaaattatttcattcatttgcatttttaatgctaaaccattatccccaaatttggttaagttttataatatatcttaataaccagaaaggtattttcatcacttgtaacattttctaatggattcctttcttttgagatggagtctcactttgtctcccaggctggagtgcagtggcgtgcgatcttgggtcactgcaacctctgcctcccaggttcaagcaattcccccgcctcaacctcccaagtagctggggctacaggtgcacactaccacgcctggctaatttttgtacttttagtagagacagggttgacccgtctggtctcgaactcctcaccacaggaaatccgcccgccttggcttccctaaatactaggattacaggcataagccactgcgccccggcctctaatggattcttttttattgtatatacttgaggtgtacaacataatattttgatgtatatttacaatgtaaagtaattactaaggtcaagtaaattaacatcgatcgtctctcatagttttaactttgtgtttggtgaaatcaccgaaaatctaccctcttagcaaacttcagcacactgtataacatcatgaggtatagttctcatattctgcgttgtatcgctacacttattcatctgacataactgattatatatgtttatactctccaatgaaatttatattctttcaaaattaaaaatactgttagcttttgattgaaatctagttaaacctgaaatctagttaaatttgtttgagtagaattgagcactcaatagtttatagaattaagtcttctttaccagtagcactgtatgtcttcagtaaacttttaccattttctgtatatggttatcaaacatttcttgataatattcaaaggcatattatttttgttgctattgtgaacagttgtttgttgttaagtctacttaggagtcattgctgctatacagaaaagctaataacgtacataaattcatttatagtccatcttattggtgtgctagcttattagttgtaaatacttcttcagctggtactgatgactaataagattactgacagatgaatggagtttcatttctctgagtcaatatcttttatttccttaatattcttaatgttaaatgttattttcaataagtaaatattcttctttgtaagcaaggtagctcagggctattaccaccataggaataacgtgatgatattttataggttattattaaaaatctacgttttgtgactatgtgggcatatttcatattaaatatttaataattttactctttagaactctcaagatttttatagttttgaaggaggattaaaaattattgaactgatttggccttctggttcttatcatttgcggcagtagatttaactgcagtagtcatttacccagaatattttcttaaaaagctaaaggcttaataatatgcaaataaagctttacatggtttaacatctatctaggatgttcctgacagagctacacagtagcttcttttatcacacagtgatattaaaatactctcaaaatgattagaagttgaaatattagctatcaaaccaggagtttgctactaatttaggtatgttaatttattcatgatagctatttaatatattactaataaagattggaacaacctgattattctttaaaataaagaagaaaaatgtttgtcaggtaaaataatcatttaacttattataattttcatctttccagctcatggggcattcagaatgggaccacaaacgagggccaagaggatcacaggtaagtttcttttccttttctttttcacgtttcgtttcgtaacactttcagccacgggttttctaaaactcaagagataataaaatgtagagcgaggaagaggcaaaataaccatgccatttgtttttatttaagttaactataattaaagtctggatttcaaatcccaaaggcagatgccaggatattccttctaagagctttctggtatcccagattggttgtgtttatatgaatatagattttatattcatcttgtctcggcagaatacattttgatcagcaacccactctctttattcatttcctttgacaatttttccgtgtattttcttttttcttcagcttcctgtttttggttaaatattttgaaatataatcagactaaactctgaactaattacaagattttgtctctaaattaactctcttcatctgagggaaacagaaagatgaaaggacctattatttttgaaaagaaacaaattctaagtctttctgtattaccagagtgttttcattgtcttgctttatgtcttaggcaaagagaaaagcttccatgacgcatttatgctttttaatgacctaattagacaatgtggatttgttttgctttcataattactttccctgatggaataaaggctgagctttacactgagaaaattatttctcctcctagagcactttgtgaagaaatgtaaaaataatttctctcatggcaggctatggttacctgactgtaaacatgcaaaataaaaattaagtgggtggaaatttttgcttctattgcacacattttgcatttgctactaaaaaatatataaattacaaagggcagttgaatgtgcaatactgtaaatgaaagttcattggaaagtgggggcttctcccaagtgtttacaaagctgatttgttcttgtgttgtcattaaacttgtgtgaataactctatttaattccggtcactaggaaaacaaaaccaagtcaatcaattgttttagttcacattttaatgactgattttatttctgtccagtatcaatttgattagtaaataatgtaaaccaattaaattaggatcatctaaaagaatttatgccttactttatttccctcattcttatctccccttcattttctctgaaaactcttcctctgtacacatctataaaattttaaatcaaaatttgctgcaaggtcagtaatgaagggattaaattaacatagagtaaattcttcatgattcgaaaccagtaaaaatgtaaagataagtgcaaataagaaggtccatggtttctgatgattgccaccaaaacattttgatattcaaaacatgccaagcaagttgttgaggacatgtctcttcaaagcaagggtagtgttatatatagaaaattattgtttaagatatacatcatttactctctattttgcttactttggtataatttatcttcaggtttagattggtcactatgtcaatataaattgacaaaannnnnnnnnnnnnnnnnnnnaaaaaaaaaaaacctcacaattgtacagtatggtttttgttaactttcagtataaaaaggacaaaatttttaaaattccaaatattgcatatagctagaaaatgtgagaattccacatataaacaaaagctattttcataaataaaatttgattatatttgaaagcctgaggtggttctaaaaagcaaaagcattaaaatcggcttgcatgaattaccattatcaacatcaagtcttttttggatctcttaaccagcaaaatagctattctaaatatagtatacctttgtcccattttgattcctcaactcagatgaaaactgtcaaagtaaaaaacaaacacaacacaccaaaagataagaacaataagaaccatagcaaaaaacattaaaaagaaagagaatttccaaagaatttggaaatttcaggtagataaattaagtcttaagtaataacctcttatctgatttcaattccctgctgacgaaataataataataataataataataataacaataatgttttcatgttttggataattgatcccttcttttattgctattatctccttggtcaatatgtctaaagccttccagcttttcaaggggaacttcagacaagttgcacttgaacacagacctcttaatagtttactccaaagccttgctcaagtcccatcttagttaatttagaactggtttctaagcacttcctatgtttacagcactgtggtgggtctaactgaagacaactgaaaagacaagtatactgctttccaagagctcacaaattatggttggaaatacagcaatatttgtatatataattcacatataaggcaatctgatagacgcaacattacatacagtatgtggtgcatgatgacatatctgtgaatgacagtatatatgatggtggtcacataaaattataataccatgttttcagtatgccttttctatgtttagatacacaaataccatttgttacaattgcctacatttttcagtacagtgacatgctgcacagatttgtagcctagtaacaataggctacagcatatagcctaggtgtataataggctataccatctggtttgtgtaagtatactctatgatgttcccacaacaaaatccccatcattaagtgacatatatacaaagtgtaataagactatatatatatattgggaggccgaggcaggcagatcaccagaggtcaggagtttgagaccagcctgtccaacatggtgaaaccccgtctccactaaaaatacaaataatgataataataataataataatagtaataataataagccaggcatgatggtgggttctgtaatcccagatactcgggaggttgagacaggagaatctcttgaaccctggaggcggaggttgcagtgagccaagatcatgccactgcactccagcctgggcaacagaacgagaccccatatcaaaaaaaaaaagactgcatatatacaaagtgagataggatttaggtggaagagtatttcttactccctagtagactaggaaatacctctgagaagtgatgatgtctgaggtgtggctttaaggatgggtaagctttcgaaagtacagaggaaaaggtggatgaaaaagctttggtaaaagtctgaactgagaagagtgtgggacacctttgaatatatgtgaatttttttataacttctgtataaatgcttttggatggcaactcttacagcaattactgtgaagggataatctggagaatgctatactttattgactagataggcagaggaagttaagagggtcaagagtttgaaactgagtactctaagaattaggaccattaacacagaacagtttagatgaaagatgatgacttcagggttggcaatattaagtgacaagtgaaggtgacaattccaaaatgaagtttcaggcacatactcgaggcctgattagaacaaagggtgtcagtttgggaatgctaatcatacaggagataattgagctcctccagtagataggcttccagaaaaatattaaaagaaaaaacagaataaaagtctgatttttggaaaatatgctataaagactagaaacaagctgaggagggagttaatatgagt

SEQ ID NO: 7036 - DNA, 66884 bp, Homo sapiens
tcgataggtgatatattctaatataatcctatagtcttaatatctaagttcttcaagtccagagaacggaaacctttttttttttacacatctcccattgataatacgttaggtggtgaacacaggacaaaatgggagcagggaagagtgcaaaccaaagcgaataaactttttgttgttgttattgtttttatatcctccaccagaaggtaagctctaacatggggacttttgagaaaggtaacttggcagagaaggggaaagaagtgctgtagtcagtggttggcttggaaaaatctcagcaacatcctaggccctgcaggctccctcatcttaacagcaaccactaaatatcactgtctctgtccaaccttgctgatcttgcgctgctcagttcctttttctttttcatccttgccttgctaaagctcaggctcttcactaaactactgccagagcgtccccatcagtctatcttgcctctttctgttctactccactgtctacactatcaccaaatttatctttgttcagcccagctgaaccttcggcaactccccctcaccctcagaatgacactgacatgccgcagactggcacttcagactttctctgaagggtaggtgcatcctacccttcccacctctcctcatcttctctcctttctcacactatgctccaccactctccacctaagccttcctctttcctgcatctgtacctctcgtgctggattctgtgcttgaaatatcttcttcagccttggcttctcaccacccccgatcctttaaggcccagctcaaaggacacctcttttgcgaagctttggctgatgttcacagctgagagtgaattttcatagttcttaactgttctcttgtggtttatattcttctgtatgttgtaattattggtatatgtggtgactgtgttcatatattttttctttttgtgttgtaaattactggaaggcaggttttatatctcaccctcagttgtatttctacacctcatgccttgctcatgatagacactccataggtggtagtccactcactcaacaaatatgtatgagttttgaatggaaaaatgagtgaatagatctgaagttgggaatggaagaaaaggaaaccagggtgctttgttattataatcaaggcagcaaggaacacaactggcgataattcaagaagcccacatgggaagggcaggagttcgtactacttagctatgtccttccaaaagccaaacaattccacacaccatgacatatgatgttgtcataattgtgtatagagaagtcttatctagtagcacatgctaagcaaagaagccaagccggaagatggtcttccagtcttagaacagtagtaggcaactaacaaataattgttgtattatttttatttaatatgtgagaattggtttttttaaaaaaaaatcagtggatttactgtccaacaaaagagctgaatcaacaattgtagatactggaattacctcagtaaatttaaaattattttccctcacctccttttcagagaactttatttcttattgtctcttgagaatggagggcaaaatgtgtcccaaagctataagatacctcgtgaaagtatcataagcacatcatggcactatcatgtgatactgtttttatgagaaaagagtcatagaataggtagaaatccacctattgggtacacccctttaaaccaaacacataaagaaaatatgcatctacaaagattcataaggtagtgaacagtcacttggcaaaagcactcactctggtcaccaaaaacaaatcccttttcagaaacacatcagtcacataaagcagagtccgcctgtactcacgctgctcagagagtgatgcgtctggtcacttggtgccaatctgggccacacgtgaaaagacactctttctccccagcctatttaaaagtcagtagataattttggaagtataactatttttccaggttgccttttaagggactttctagtccatcaaaaatggattaatgtgactcattaacacagctccaaatgcagtcagagagcaaaaaacacctttccagtgtcttagtcacttctatttcctaaagctgactctttgcttcttcattttggcaagaattttgttgttttctggctaatttaaaaacatttaaaagacagctcccttactaccaggcatatggtaggaacttgatacataaatgttaaatgaagtttctttcactgtatgtaccatgtcttactcacagatttgccaagtacaataatctaagaacattgaataactagaatgtgagtacttgaattcttttttcttctcccccaaaatacctaatataggactctgtaaacactactcacacatgcacatctgaatatgtgagaacctgcacatgcacacacagacatgcagtcttattagctgttgagttagcttagagcatccttgactaattaactttgggggttatctgttatagatctgactgttctattgtacctggagaataccaatatttttataggaacccaagggtaggaaaataccatccatgctgattctgatggttgcttagcatgttagctttattttattttttaatttatttttatttgtagagatgggggtctcactatgttgcccaggctactcttagactcctggcctcaagagatcctcctgccttggcgtcccagagtgctgggattataggcataagccacaatacctggcctgtgtgtttggttttatatagttgttatagttgaaaaattgattggtctgtggttgctgagttctataaatagatttctatctaaaactatcaataagttattccaataccatactgctgttaactgaaaacatccccactgttcagatggtttggggttttttttagttgtaatttgccctcagcctgatctgttctaatattgcctattttctttcagttgaaagctatgggcagacttaaattttaataatacacaaggcagtgggaaatgaaggtccaagagtcaagtggaatctattagactctgccacttatgagatggaagacccttggcctgttactcagcctctcaaactttacttttctcaggtataaaatgaaggtaataatggtacacacctctcggagtcgttgtcgggattgtgttagagaatggatgtaaaaaatctggcttacagtagttctagaaagcattagttgcagtcgttcttctttcctgggatcaataatccgaacacccacacagtgcctgtagggagttgctccttaatgtcaacttaacatttgccacataacccaaaacatgtccctccacagcctgtgaggccctgtgtgatctagtcctgcctcccttgccagcctctcgcccgctgcctgcctcccttcacttgatgcttttgagcaaattggcctcatcactcttcccccaactcaccgtgcagcttccacctgagagccttctcagagactcttgccccatctagatagtagaacactctccaccctgcccttcacctgtgtgatctcttttcaaccttcatgtatcacttatatagcaggacttttcctaacacccctctccaagattatgtctcttcttacgctctcacagtagccagtactctttctttctgatcttgctctgtcacccaggctagagtgcactggcgccattatagctcactgtaaccttgaactgctaggctcatgcaatcctcctttctcaaccacccgagtaactgggactgcaggtacatgccatcatactcagctatttttttttttttagtagagacaaggtcttgctatgctgcccaggcttgtcttgaactcctggcctcaagtcagtatgctttctttataatagttatcatattcttgcagttgctcttataatatatatatatatataatctgcaattatatattgtacgtaactgttataggctgaataatgtccctccaaaattcatatgtgaagccctagccattagtacctcagtgaatttatttgaagatagggtctttaaagaagtagttaaatttaagtaaaaaaggagcccatcagggtggactctaattcaatctgactgtgtcctttaagaagaggagatgaggacacacagagagagacatcagggatgtgcatgcacagagaaaggccatgtgaggatactgcaagaaggcggccatctgcaagccaaggagaggggggtctcaggagaaatcaaacctcctgacacattgatcttgaacttctggcccacagaactgtgaaaaaataaatttgtgttgtttaagccacccagtccgtcgtattttgttatgggaaccctcaccgactaatacattatgtaaggcctgtcttcctccattagactgtgaactccataagcagagggactatgttcatatttcaccaccaaactcttagcacatagtttaatgtctggctccaagcaggagccaatatatttttgtttaattcttgaattcatgaataaagaaataaatgatgcaggggcatgtctattttatgctgaaagctctgtgtgttctgggttcttcagtgttcttctactatgaaactgacggaagacatattgagtatttatttggggaaggcaagaacatcctacaaagcaagtgtcaaattctgcataattgaaagggttctgaaatgcacgactccagtgtggaatatgggcagcttaggagcaagagccccacagctgttgttgtggtctgctacccttccatgggatgcagtgcccacaatagcaaggtgcagttgcacatcggtgctatgctgtaagggccccactgctcccctccagtatcttaggataatgcctcagaactgggaatcccagtgtgatgctgggtcccaggaatgtgctatggcctcaaaggactgcctgagtgagttccaggttcagacttcccattttaccaacaccaagtgtctcaagctagtctttaggccccctgggaagccagatgctatccaggtattcataagaattatcctgattgatgcaagttgaccctctagggaaatctaaaggtccccaggatgtacttggagttgcaggacatctgggagcccacacatgtctttaggtgtatggagactatgcggtcacctgatttgaaggacaagaaggtccttatcccttcccaacagcacctctctccattattaggtggctaaatgcctaaaattccatcactaacatgtcactcttttaggtcagcatcactatatctggttgcctcttttgtaaaacgaacccctaccccaccaattgctcagtacattcagtcattagcatattatgaattagttcaccaactattttctccagatgggcttgacctggcttgagtcacaagaggggaaagaggacaaagacatctataggggaaacaagacaaaggacacaggacacaggaacagaggacgaagacatctataggggaaacagatcttgaatataaatcctgccaacttcagtttctctagggctcaggcagtatgaccacaggccatccacgtgcctagaccgtgctcatccatgagcccatccacgtgcctagactcatgaatcatgcagtgggattccagtacccatggcactgaggaagggtactgccacaaagttgtggcagttctccagctgtagaaggtaggcaataaaaaagcatttcctttatgctggtcctttgtttccttttccccatgggccttataaatagttaatctacctaagctggaaggagaagctttctgcctccagtaaagtttgattcctggaggcagatttttttttttaaatccagcaagtgtcagataattggaagggtggagtaacgctgtaaaccatgacacacctttgtcaggacatgtttggaagcaaagagttgaaagaaacaaggtggagagaaagaaaagtgaacatttttgaaagatcactcagctttaacacaccttggctgggtctggataaaaaaaaagtgagcactgcaaatttctagaagaaaacatcaggagaagaaagagagagggggatttattcaaagttgtttccaattccttcaaaacctcaaaccaggtaagtaaacaggaagactgacctttctccttttctctgagactttgatttaaggtttgccatttagaaattaaatgtttattggagaaaagaagatgaagttctgtagtttctagcattctggttaaagtgatcaattggttataaaagatgactttggtgtatgcattctgcttagggtaggtctttcaaaggaaataagtggggaaaaggagaaggctgaaggctggttaaaatatagcgggctttagagrcaagacctttctgcattgttttcagcattgtaaaatgacttgtgttgttttatttagaatatgatacgggcttataattccttctctcccaatctcagtttcctctctcgctatcttgctctcctcttccctctgtctctctctccactggacgaagagaacaactcaggggtgaagttaaagtataggtaagggggccttctagaaacagtccctgtgctgactgggcctctctgattaagccatacatggtaaacattgctgtttaccatgctgtaaaattacctctaatctaaagaaaagtaggatctttgaaatgatctgattaattcagaaattttgcaggatcaaacttagaggaataaaaaaaggaagaaaattgtttcccgtatatatactcttacgagtcaacttgggtttcctcctgccaaaaaaattcactttgagatgagaattaccagtttagatacctaagtggatgacgttaactggtaactgacaaattatcactttactttttgaagtggaggcaaaacctctggcacattccttcttttgagaagtagttaatcagtagtctaatagtggacttgtaaaacgtagcaagatttttaaaaggtatttatttgaaaagcagaatagtttcttcttacctccatatgttctctcttagagctaaggcacagatctgtcagaactaacctaagacagatgtctatccccacacagactcactccagagattcagaggtgtcctgctttactcttaggccctgcaaaacacccacatgagtctgatcagagtttacacaggaacaattaaagtgaacagctctgcttcaagcttgcatagaaacttaccagcctgggtaacatggcaaaaccctgactctacaaaaaatacaaaattagccaagcatagtggtgtgcgtagtggtgcacactcatattatactaaccccatctctactaaaaatacaaaaatacaaaaattagctgggtgtggcrgtgcatgcctgtaaccccagctacttgtgaggctgaggcaggagaattgcttgaacccaggaggcagaggttgcagtgggccaaggttgtgccactgcactcccacctgggcaacacagcaagactccgtctcaaaaaaaaaaaaaaataggaaaaaaactccttagattggtgaaactgacctgacctaagaactaaccaccttctcagattatgaaaaacaaaaagaagtctgtgtttacattgtttgtttcatttgccattattaacagtggcaggacacaactgtaaacaaaccagcataatcacaaagctggtgccctatcycacctgctcccagtcatgaaaatccaggataccaaatgtagcaagcagcaaacccatctctggggtgttacagagacaaagcctccaagatattcaattccagggcattggctttcctggcatcaaactgctgggcccttctgtgttatcaggtcaatagccagtggatggttttctaatactttggcaattttgttgttgttttgttttaaaatttaaagtgtatagagaatggagtaatagaagctataaaaatacttgcaattcattagcagagtataggaacatttgttcctaaaacaaaaaataaagagaaaaatacttagcttcttcattctctttgttgtatcaagaacaaagtgtttcatgtgtcattagaataagataatgtgatggtttaaacccaaatgtgatggtaaacagttaacgtgatggttcactgtcactaacagtggtttgtccttgtgtgtgtgtgtatgttagacagcatcggctgaatagttttaggtagacgtgacatcatttaaataaaggggaaaggaaaaaactcataaaagtagaaaaatgatttaaaattgtgtcttcttgcctagaaaagtgacatgggatcatttttacaccttcacaaaaacattagctataaaatagccacaaagcaaccctttagaactatggatggaaattagtataattttggaattgagagcttgaatgatctgctcatccttagttctagtgaagtggcccaaatatctgagaagttaaaaattatgttatttgacagtgcttccattaagtaggacttttggaagacgaacacactggtgaatcctgctaggataggcaggctcaggcatgtacctgggcaggaaacgttccttttcctaacgttacacttttaaaaactatcagcacttaaaatgtgtaaaaaagaagtcctgggaatatactgtaggtcccatgggaagatcctagtccaggcttgtgccccacgccatcactctccatttaatataactcacttatagaaagtttcctcttatatttcgtttaaaggaatcagtctcccaacacgtacctggcacctcagattggctgtggaacacacagayattggggtggcttcagattgagagagaggcatctacctgtacctgcctagagcaggttatatccacaaagtaccttccaatgaggagctcccaggccctgaaggagggcatctgatttctaagtaggtcatcacttcgtgccctctggaagttggggaatccttagcattttactgcagaagtcaaggctttgtcattgggattcagggaaaagatggagggcctagaaatgcctgctatgttttggataaagaaagaacaagcaaaactttccaggtttgctgcctggagactgtattcttagcaaacagagtcatgatccatctgcctaaatggctgcaagtcgaacccttccggccaatcccaaatgtatagctgtcagcagcaactttcactgaaagatcaaagtaagcaataacttgtaggaagtaaaagtttccgtggattgttataaacagttcatttcaggataatatttcatatcagttcaggtaccatcctagaaagctagtcacctccccactgactgccaggcgcatttaaaggtttaatctccccaaatgcctcctgatccacagcttattacctatttttttaaaagaaagtcagagaaggctttcagaggtatcaaactgatgcttaaacaaaggattgcaaaggtgtccagttgcacgtaggtttgcatgacataagtcatataggttatagctggaatgcagacagattcactggtcagatttgtccttgtaatgaggctagactcctttgttaaactgtgtatgaagcccctcctctgggctccaggaaacatacctataaagacattctttggcttctcagatccagctaggattttttccattgtgcctcattccttgcctcgagctgtgtttgaaaaacaccaacgagcaagaagttggcacatttactagggcctgaagctaagtgtacgaatcttggttactccaccagatcgttgatcagctggtctcatttggtcttggtttccatcagggaagtcacccagagccacagtatgactttcacggtccctagacacttttgcctttgtaggccccttcctccatcaaaaaactttttaaaattctattttacaactgcactggtataaagaaggacataatcctgattagattctgattatttttccttctgatgttaaaagtaaacattttgtgagccccaaaatgtgctgtgggcctaggcactgtgcccactttgcctactgggtaagtcgagcctgaaggcactaggcagagactggaaggagagctcttcaagcaaggggcacctggcaaaagcagtgtgcctcagcattctagaacccagttccaactacaaccaaaaaataaactagaaggaagagaaagttagaggaagggagagaaccacagggtaagtcagatttcaggtcctttcagaacctggggccaggcagcacagcaagaagagaagagcccagttgggacgggacccttgctgtgcattcctgtgtgtttaagacttgagctttcatccccaccaccgtttggcaacagccctgcctcataccatccatgctgagggacacagtggacaagattgcactggttttctttttcagaagcagagtaagaatgaagggagaatataaaaaatacaaatatgtattttcctacatgcttctatagattttacaggctttcttgaactgtttttcatacttatgtctgcagataagcacatgagagccgattatagtgaatgtttcatactttgagaagagtaaagttccatacaagtacgacaaatataattatttttatcctgatttaaatccatcaagtgccattcttacctccagactcttaaataatgaagcatgaatgtctcatatgcatagagttccataaagaacattgaacattatgggagacattaaaatgaattagttgatagcactaagtaccttgacagatccccttcagctatttattaccatggaaaagaatggaggttttatagtcaaacaaaggtcaggacacctgatctgctatgtaagcctcttgatgctcagcagggggcaggctgatcaactagacactgaaaaacaagatcccagcacaaagaaatagaatccaaagtggaacaattaaattaacctctattatacctgttacaagaaatgggaatgactcataaaaaatattcacgtgaaagaattatggtttaaattcttgaaatcatgtttttggttatcagcttcaacagtggggacctataattactaaaaacaatgataagtatgactatcatggtttctgatttttcctgcaggtggctatggtatggatgtaaccaagaaaaacaaacgagatggaactgaagtcactgagagaagtaagagcatcagaattttttaatttatgtrttttattatgaaagtaataaaaatttggaaacagaataagtaattcattaataattctaccacaaccactgtatcatgtttaagtgtgttcctaaatggactttaatccttctcataagacagctcttgttgatttttatgtcaaaagatatcctgctttttcttgaatgatgaaggttgtcatttccatgtacagtatttataaccctcatttttaatgatgggatagsattctgctaaatgaattcaccatagtttattttatcatttccaaatttaggggtacagggcaacagaaatctaaacgaataacatcctagttattgtatcatagttgacctctacrctgaaaattgaaaacaaataaatttattttgtggaactgcccaaataataaattcagaaacatttaaactctcctcctaccaactctaagtcaggaaactctttcacttattctgtgactttcatatatctccaataaaaaaaaaattctggctccatagacttgaaagttttagttaggaaataattcacttttatgtgtcaaagaatcccaaaggtctatacaatgagaggttctatacaatgaaagctgaaggactattattcaaatcaagctgccactgcactctacaaaaacatttcctttttttttttttttgagacggagtcttgctctgttgcccaggctggagtgcagtggcgtaatcttggctcactgcaacctccacctcccaggttcaagccattctcctgtctcagcctcccgagcagctgggattacaggtgcccaccaccacacccagctaattttttgtgtttttagtagagacggggtttcactatgttggccaggctggtctcaaactcctgacctcgtgatctgcccgcctcggcctcccaaagtgttgggattacaggcgtgagccactgcgcccagccaacatttccttttatgcattaagtactgtttctggcatgtccataaccgcatcttcttgctaggacaaccaaactaattagcaaaatgcagtatgaagaaggacagtgtgaatgagagtcatgtgggatggagcaggtgtcagcggcacagctgaaagtagcacaaaatgatcctgcaccatcttcctttactcttttctcctttcaccaccttccccacacgtatgtgcccatgcatgccacacacacacacacatacatgcacacatacacacatgcatgcatgcatacaagcacactggaaacctgatatcaaagaacaaaagccccagataggtagggtcttctgtatacccaccagagacggaggtagtgctgagggccacagtcagagcatgagtgatggattcaccatctctcagacctacaggaactaaatttcagaggccaagggactggttcttcaagtctgtctgtgatgtgcctggatcactgattttgccaaaccccaaatgtgacttaccaggagcacccttccttcccacaactccccacattcagggkttgccctgaagacattagaacgaaacataatgttcttaaacacctccaaattcatgaagaagtacacagtgaagtcagctagggtgttggtctcagctgaactgagagaccatggggaaggagaaatgcagagaaayggagtgacttgagacaagagggcctggtcctccttcaacctcagaccaggcctggactggatctaattgtccaaggagagacatcaacagcaaaacaactcatgtttcaaacgcagtgcataacttcttttggctccaaagagatataaacttattttccaagcatatgaaacccattgttgttgctcatatctttttgcacagtgggtcagatcacacaccttaaagcacaaggatagaaaaatcaatgtcgaacctaatttaatatgcttagcctgtgacagagcttagaccttgccaagatccagaggtgtcagtgcattacataagaactcatcttttctttgtctttttctagttgtcactgaaacagtaaccacaagacttacatccttaccaccaagtaagtaactacctcaatagctttcttttcagtaggtcacatttgaagggccccacacctgtaaccttttccatgggagctccaaaatttttgacatcttttttaacagctatattgacattaatttctatacaacagaattcgccagtttgaagtgtataattcagtgattgctagtatatttaccaagttatgcagccatggttacagtycaattttagaagatttccatggctccacaaaaagaagtgaccattagcagtcattcctcattctccctcctctctcctcagcccctggaaaccacaaatctactgtctctgtagatttgcctattccagatgctaaaatattggatatctgatctaacctgaacaaggattgggggctaccagtcaagcttctggttgaggctacttttttttccaggagctcctatcactcctgtaatattgatctgagcccaaaagctaccccctgcccccgcctccagggagcctagttccctggggatggggagagcccacccaccagcaggtgaagtcggagcagtgatgggctgccaggtggaacaccagcaacacagagctgccacacgcccctccagcacttctagtggctgccatgcctgggcactgaccaggcactcagaaaaagcaagcccaaccaggtcctggactcaaggagctttcatcgctcagccttttctactatttaaaatttcctaatatgcaacttgctatattccacccaggagacttttcttttaaatcaggtggaatactcactctagatatttgtataaaacaaaacaaaacaaaacaaaacaaaaaaccaacgaaactggagcatggcagcttgcatcttataatgtaggtgggaaaggaaccccaaactaagaaggtcctggtgaaaaaccagggaagccttccacagggtgggggaccaggggatcctctggcctgactccaccctgaaattatcacctgcttttgttcctggcagaaggcgggaccagcaatggctatgctaaaacagcctctcttggtggagggagccggctggagaaacaaagcctgactcatggcagcagcggctacataaactcaagtgagtgcccactagtgcaagaggtcagggaagaatgggtgacaaagagagagacaccaagaaagtcctacacaggacacagggcagacacaattttgaatcagtgcacaaaagggacaattacaatcacctgtcatccattccaaatccccctgagagttatctaaataacacacagcyattgggcagcagggctggagaccgggggtgcaaattataaatcatcagcatytgaagcctacttaaaatcagatccattttcattaagtccacaatataaataactatcattaattaagacttcatgggtaggtagctatttcctcactaaatcactccctttaagccatctctttagagaacaatgtgcacgcctgagggtttacaatttgaattaacaacgaaagaaacttaacgattgggttactgtgctaagggaagctggtgacatgtgatcccatgctgtgcaagattccactgggcaagcatccaacacaggcccattgttcccagtgaagcactctttcaaactaaaacaaaacaaagcaaagcaaggcaaaaacaaaacaaaaacaagaagcacccagatagcccctgaagccatttaaaatacttggaagtaagactaaaaaggaagccccaagacattagaacagccaggttgaccaaaagaaacacctgcccttacctgttgaggcacacttccacgctggattatattctagtccatccaagcagtgtctacaagaaaaatcctgccaaatcctttccatttccatgcatggtaaccatgcacaggaaggacgttcccaggcaataattccacctttccatttgtgaacagctgggggaatgctgaggtggcccctttcagctgtgccctcccgaagaccctccctgagtgtacttggttaatatagctgggtcacagtagccatttggttcacctctctgctgaagcactgagaacttatgctttttccctcttgcagctggaagcacacgaggccatgcctccacctctagttacaggagggctcactcacctgcctccactctgcccaactccccaggctcaacctttgaaaggaaaactcacgttacccgccatgcrtatgaaggtatcagtcccactaaccatacaagagaaccattctcttccccaagcaacttcactcattctttgaagatttacatgctggccacctgtgtctgcccttcacctttctccccactcctccttcatttcttttatggacttccattacttgaagacttcattcattcattcactacctcatttatttattcattcacccatttagttacttttccaactagtattttatccagtacctgctatgcgtttaacactgtgtagaatgccttgacgaatgcttaaatgaatcagacatagatcttgtcttcaggacctgtagtctaatagacaagttaagatgacagataaaatacaattgtataaagtagatggagattatcattttaagctgaggaaatcggggaaaattctatggaggaggggacatctgagcgaggtcctcatgacgagtaagagtttgatacccaaagatggagagatgggactgtccaagctgtgggagcagcagcataagcaaagacagccaggagagcccagggcttaagtcggaaattcagtggtacttacgtgcaaaaggtttgagggactcagattcagtgctaggataagatgtttagactttattccatatgcaatgggaagccacagagagtttttagcaaaacaatcatattttaggtccaggactggaactctggaagccatgtgttggaaaaattggtgagaaagagactaaacacagtgacaagttaaaaagaaatcctcggtcatccagagaagggacattttggctgggaccaggttggtaatgatggaggtcaggagctagaagtgaaagttatcactgaggtggaattgacaggtttggcaattgattaaatgtaaggagaaggcttcacacacaggttgggttcttggtggtgccaacaactgaaacagggaattagatggatgactccacttgatgaatccagctaattcatcctgaagcacagccacttgcccagctctctggcgagggtagcaagcaggcagtgggtgatgcaggatttgagttcagggaagaagtcagggcccagatacccaggtggaagccattcgcaaagaggtgttagaggaagtcagaagactaaaggagtttgccaagaaagagagtataaaagttgaaggaagcaaaggaaggtaaagcggagggaataaggagaaagaaaagccagagaacagagagaggaggaagagtcttttagggacaaggggagaccaggaacatacagcaatgctgaggtcaacacaagagagtgctcagggtcaagaaggagtcgtagaagaagacacctgagttccattactaaggttcctggagttcctggtgatctgcagaagcagttttatgtgggaaactgaccagccaggtggccaaggagtttaacagtgagaagagattggtgctggtgttggagaagcaggagtaaggcccagacactctagtgaatgatcacagcgggctagcatcccacacgcacagcagactccctcctgccgctgcaggacaagagctgctgggctgttgggaagccccaaatccaggtgaggtggattgcatcatcacagtgctttctgaggtcgggcctgaccagggatttgtaccttcattttaactgggtccacgtttgggacaagcctcataaggtcagagaggttcctggtgctgagggcaggttacttgatcagggcaggtcacttgctctaggacagacacaggacaagccggtggaggaactgaacaaaaaagaaagaaaccaaaacctcctgctctcctttgttcatccctgcctcatctgaagtaggtccttgaccagagcaaagtgctgcgaccagggccatgatgggtcgtgttttacatcatgagcctggctcctttgacatgcatgctgaagagcatacctcattcccccctgaaacactgagggctgtggaggtccagaaataagtaacaggcactacctcccgttttggaagctttatgggcctaagaggccatttgttctaagtgtttcatcccctctccagggagctccagtggcaactcttctccggagtaccctcggaaggaatttggtatgtcctctccttattttctaaagaaatggtcaaacgaggcactaggaaaatccctgggggagatgaagtggtgggagtaggggacctcatgagttaaatggattcttctaaaagagtttgacccctgctgacctatttttcccttgctttttatcctgaagcatattaaggggactatcagccacattaacttgctgtcataagcctttgctcgtggcactatagaaatggtaagctatatataaggctcaggcttggatggataagcccctaaggccaagcaataattgtagggattcttctttccatgagatgcacagaggcctcccaaagaagcagagcagcgagtagaacacacaaatgccaggcatcccggcacctccactattgcttgctttcaagggaactgcgtgtgcttcatgaacccccaagctgtgtcttcacttggccttaagtttttgttccatgttcttggaatctcactgtgcatatgaattgatgccaggatcattggttatacagtgattataattttctgtatttgcttacagtggggaaaccatggcagtctcgaataaaaaatcaaagggaagacttgggagctttttgatacatttgatcagtgtagtcagccagtccaaatggatcatgctccccaacagattaccttagctaacttaacattcaaaatgttagctaacttaacattcatttagctaatttaacatcataaatgtactagggcattgcaaaacattctctgctgttgctaagtgatcatcatttattaagcaactgctatacagaaaagcccctatctggatttagacacactatgaaagtaacccctccccaaatatatctgcctccatgtcaaaagtatttagcatgccacctcttatatatgcctaaaaatgcatttctttgtttctcagcatcttcttcaaccagaggacggagtcaaacacgaggtgagtgctgtcactgggttcagtccaattcattcaacaagtattttctgagaagttaatgtgtgtccagccttgagccagggagtgtaaggagtacagaagaataaataaggcatgctttctgctttcgaggagcttagagtatcctgggaatcttccaccggctctatcgggaggggaagggtagcttttgacagtaatctaacaagcacgtagaggcaggaagcaaaacacatgataacaatgtggggcatcatttgtcttgctgtggatcatctgaagatgcagataccacatctgctttcacttctggtctcctggctgactttaacaagatatgctctaattgcctttacacgtcaaaagatgagcaaaatctccccaaattttttttcaaaattcatccaggagataaacagctccatgacagttttgtaatctagtcatgtagacaatgatataggagagaaatgtggtcctgggagaagcagcccttgctaagctttgggcagggtagggggcagcatgttagggctgagctgaaggcagaattcttcacaatgacccacctagacttcctatgggccttattatcatcaataacttggaagttaggagtatgccaaccactcacaactttaggctgatagttgaaagatgccaattctccacctgaagctaactaataatgttagctaccagcttcctgcccctcccatctctgaagaggccaaaatggcaagtaaacactctggcttttagaatcttttgccaatgcctgagaccatggasgcaggagagaaccttggttctggcagccatgaggtggatgatggggaaaggattgaccattgctgattgtactggaacctccttgctcagcctggaattttattagaacatctccagctgcctgggaggtatgcagttggcaggatggggaattgttggaggtagggaggtctccctttttaagcagcactctkcttgggcacacctagatttcctgtttccagagctcagaartgtcagagcagcctaaagggccatctgctgctaggagttcagtgtcagggattgtgatctaagctccttcattcacacccttctctatctcttcccttgtacagagagtgaaattcgagttcgactgcagagtgcgtccccatccacccgatgtaagtggtcatgatcttgctgaaaagaaagggtccagaaatccagggctagtgctgtgtgtgtgtgtgtgtgtgcatgygtgtgtgtgtgcatgcatgcacacacatgtatgtacatgcatgcaatcataaaacatctttaagggtcttctgtgaattggaccctgggttaggtggctggggttaagccgctgagtaaaccgtggttcctgctgtgtagtagttcacagactaatagggagacagtaagtcaaccaaccatcgcaactcagtgtggtgagggaacagggaggagcagctccacggcagcccatggagatcaggccagagaagacttcccggggtaggtgttacctgaaaggaaactgaacagtggatcagttcggctcaaagggatgagcctgcatgaggcatcgaaggaacagttcaaagcaaggacataatgggatagtttaagattagagaagggtcagtagtagagtataagaatttgaactttatttcaaatgtcagagaccccccagtctctgtcgatggaatatgttagatacctgttgttcttgctagaggtatttaacaacgttttgaaatgagctcaactttaggacagcagtcatgttcaaggagtagaagaaagaacatggtcagtggctcaggacagagatgggtgcttgtccagagagctcagtacctagggttgtggagtctgactccaggcccgacaccttctcacctgagtccttccaggcttaggggtggtgaggcgaagggagttggggctgagagttccttcagcatacagtgcctgcaaacctgtgtctcctctcatgcactccccatgcatcctctcatgcactccccatgcatggtgcctcccacctctcctgcttccctgcttcctgtatgggaggcacagggagcttgctccacttttcaccttgctacaaattaaatcagccagatagacttgaaattaaatcacacgtgaacacagcataatatttaggagttatggcccacagattccttttgacagccccaggcatacaaggtcaaggacccaatatcagatgcatcctgtgcaggggatgagactgctgttgaagcatctgtttcaagggacctggttctctaactgcctgatcctagataatagtgtcttccagccacagaatcattcctgtgatgtttgatgaggtctaattaggaaatatctcccaagcaccttgacctccttgtgagacgcagaagatttttgaggctaatatgacaaagtaccaagttgataagtgctattcattagtaaaatgtgaatattataaagccaagcaaaaagttccaatgtgtgaggcagatgccattctccccagtagtcagaatgccacaaatgttccccccagttgcacagggactcaggaaagaactctggacttaacagaaacgtctgtggattctttcacagggacagaattggatgatgttaagcgtttgctcaaggggagtcgatcggcaagtgtgagccccacccggaattcctccaacacactccccatccccaagaaaggcactgtggagaccaaaattgtgacagcgagctcccagtcgggtaagtctgacagcccaggctgccgaggagtgtgagaaacaaacttacccatccaaacccaaagagtggactcagagacccagagaacagtgaaagtgagacttgaaattggggcccaccaaatctcattccagctagcacagggctttccctaatagcaacctgttttagggcatagatatttgtttgcttgtgacagctgcctttggtttcctaaattcccacaatgtaagactcrgcaggcattgaattttatggtttagggggtagaggttttagttatgttgattattagattgattggatattccctactttccacccctagtactgggccctatccaatactcaggtcttcttttgtgtgttaggattaatcctaaccatatccacccctaatgaaggggtttgcttatagctctcttctaggttttccttagagttagctttaagtgttccttaggtgatttatacacttcccatttgcccttttcccttccttcttgggtttcttttaccagtcccttgagtgtaatgagttcaccctcgtttagctgttcgttgtcacgtttcagtggttaggaccacttgatagggaccttggcagcttgggtggggcttatcttcttttcaagtcttaattagcaccgagatgccaggctggaagtggtgaactgtgaactcaagaggckgggtttgagttcgaagtccttttaagctaaaggatgacagggtggaggatatggccagtatatgatttcttaaaaactggtttttggtttccatagtaggaagatcagtagtcctatctaaatatgggagtccatatcataacttgtaaggggacagtccaaagtctttgcttggggctgttctaatcctaaggagtgctactgggagacattcgaggcattttagttgtaaagattagtttagtaatatgctttttgagaatttgacttattctttctacttttccagaggaagggggatgccaaggggtatagtaatcccatttaatgtgtaaactttccataattccccttagcacccttgaggtaaagtgatacccattgtccgaattaatattttttatcaagacaaatctaggtataatttgttttaagattatttttaccacattcctggcggtggcagttgggaggtggaattcctccacccagccggagaggtggtttaccattaccagtagatactttagtctccctattttgggcatttctgtaaaatctacttgaatgctttgaaatggccttaacccaggaggtcttcctctggtagtctgttttctaactacttttttgtttattctctggcaggttacacaacacccacacacttgtttagcaagggtatagatccctatacacccataattttttagtattgcatcacacatatcctggggaccccagtgaattcctttatgcagtatggacatcagttttctcattatgggtttgcttatcatttctctcccatcagggagcacccacctcccatcytcagtttgagtggcccctatcttgcccagctcttcctcctcctttttagaaaatttgggttttaatatcaccttagggatctgtgggattaggctaaacaatctaacttcttcctccagggaagcttgcttagcagctttatctgcaagcctgttccccacagcttctatagttttkcctatggctatctctgctagaagcaagaggctttttaaaacttgtttgatcagttccccatgtacaaattctttctccctgctatttattaggccccgctctgtccagatctttttaaaggtgtgtactattccacaggcatatttggaattagtatatacagtgccttcttggccttctagaagcttgagggcctggttaagagcatgtaatttacaggtttgggctgaccaattattggataatctacctttttcacataaggattatttgtttccattaatgacagcatagccattgtgttttttaccatttattacttgggatgacccatttacaaacagtctcatcccattatgtaatggggtggtttaactttagtttgatattaaggtctggtttaactttagtttgacattctatgatatccaaacagttatgatttgatgcctctttattctcctctccttttcataagaagctggctggattcaagaaaatacatgttgtcaagactaaattatctttttgtaataatatggcttcatattttaaaatctgggaattagtttaccatctcccaactctttgatttaatatattcctgacctgatgtggggtgctcactaccagggccctgccgaagatcaacttcagactcccctccgccagcagggccatggcagccactgcccacctgcacctttgtctccccatctcccgtcttacatggcctctctctctttccctgtctctctctcttcctcttgtactcttttttccttttacattatgtctctccccagtttcaccttctgtgtctttgatctctgtcttttcccgtctctttctctttcgcttattttcttttttctttttttttaatctctctgtctctgtcatccctgttttctctttcccttacactcagtttcttcttctttctctgggcgccagcgcactcgccatgttaacagcttacttacattagctctctcacactgtccacctttatctcggctgtttgcttcggctctgcagctcctgccgcccccacacctgcagctgcacagccggctcccttgccttcagggtcagcagcttaactctttctctctctgagcaccagcgtgagccatgccgtggctcccctctgtccgtctgcaagatggacagctttggctttctctctttctctttttccaattcgtttcttacttttcgcaaaaaccttctaattccttaattggctttttattccatccatcaacttttttgcagtttcttagtaatatcaggccagcttttagtcataaaattaacctttaaaaggccttgccctactaggtcctctggatgtaatcctgatttttttttttttttttttttttttattcctgagcctctgcagaaatgcagagggagtctcctcttttacttgttgaagctcgaatgcttttgagacattctgtgtccttgaagtggactctttaatccctttaattattcgttcccttaggtcctgyatttgggcccgatctttggggttattgttattccatctgggatttgcatttaggaatttctgctcagctggcgggactccttgcccgagaggatgctgtctttcccaaatggtcatggctgcccttttaattattcccctctcttcctcaataaacagaatagtcatgattgacatcatcttagcccaagtacaaaaattgggtcctaaaaattgatctagctgctttgctacaccgaggagattttccaagagcggccttatttcctatttaaaattcctaaccttagtacttgttagaggcacacttacatatccaacttctccctgtcccatagggacttctctaagagggtacatattagacatctgctgtttagaaggaatagggaaattctcaatgtccttcttacattgttctaattctytcctcaagtttggataaggatttacgggagcattgggtttagcttctttatgatccccagattcctcttcctccagccttcctgttactccctgatctccctgtcctctacttkgtgagatgtaaagtggaggcaagcgtgttatgggattccagagctttttattgggtgagggctttttactatgctcttttttttcctcttgaagcgggagcatgggggttaattcactaatttaacaaasagcataacccgtctcctcttgtgaggatggggttttattattcacatagagaattaaagcttggcacacccaatcctcgtctgagccaaacttaggccaaaagactgaaggctgatgaatgggctctttggcccagataaaacagcaatactttatcattttttgcttttccttgtccctggttcaagggttagcccttaaaaacctgcagcattttccttaatggactatttgggagaatgttagagggtgtctttttagttccctcttttgttgggcaggggctttaggtgtttgtttagggttgtcttggtgcattttgtkgcagcccacaatgcattgcaatcctagttagcttaggggctcttcaagtatttgacttatgacctaagtagctgggcaagctgataagaacagacaaaaatgagctattttgcagtctagtaaacttttaccttagactaaacttctttggtctgagtgagggaaactaagtggggggacctggtggggaaggggagaccaacaagcaggcattagctatccaagcaggggcctagtatatcctgtttcttctgtagtttgctgacctaagctgatttaagaaactttgtcttggaaatggaccactgtatacattatttccttcaggagaaaaggcaacaaggtggcagatctatcctggcctggggattcaaccacgccttggcaggcctttcaggctttgccagagaccttgaaaagcactgagcaccttctcttcaagcagtgaaaaaagtgggctgtacctatcctacccctggctggtcacccattccatatgcatagcccagccctaaatcctagagattctctcccaggacagtatgttggccagatcccccaaatgaagaatactggggaaatgtgtagagttttcgtgtattcattcagtgactatttattaaatgtctcctctatgccaagcaccargcattgaggaaaagcaatggacaagagagacacagtcactgcccttgtggacagtgggtctctggaggaagtcagaaaaccaacatgtcccagtcaagtaggatgagcattgttcagctgttccatattacatgtcccccaagtgcaagataggttctgtggaaggcagaaatataaattagcagagccgtggagggaggtgagggaaaaagctagatctactatgataggaaacatccctcccattcactactggagaaaagcctagagattgtgatctttcttgtttttcaccctaaaaccaaaacatcagggcactttctgacctgcatggctggctccctctcacagacaaatatgcagaactggccccaaatatgaagaagcaggaaaatcctctcttgggggcacagtgtctggctggtacataggaatgtttaaggagggtggaaccagagaaggctgccaggcatgcagtgtggccccagaccaaggactcccctgcccaggcatgcaccctgcaatggccatggtgcctggaattctactgaaagaggttctcttcggggtctcatttgttgctcctgaaagaactgttccctcagcgtctttgaagatggaggagttggcaacagctggagaggaatgccattggtgggacagcccaccaggagatggggagccaggtttagaaggagaaattgttggaccccaaggcaaaatttggctacctcagattttaccaggagccagcaaaaatttctaatccaagagataatgatttcaccagctctgagatttcagatggaaactaccccaggttcctggactgagaaagttcctgaaatgtggggctttcaatgcccaaaccaggaaatcccagcaaaatgaggtgactagattccccagcagggagtgttgatttgtctctcactggggtgtgtgcatgtgtctgtttccagtgtcaggcacctacgatgcaaygatcctggatgccaaccttccctcccatgtgtggtcctccaccctgcccgcggggtcctccatsgggacctatcacaacaacatgacaacccagagctcatccctcctcaacaccaatgcctactctgcgggatcaggtacctggcgggcagcccacaccctctctcacccctgaactcggcatgcctctatcctggagctggatgaccctcagaatgtttgccatcctcagggcctcctggagaggctttctgtggccaaacatcccaggagattccccctggaacttcagttcaattcaatctagaaggtattgcttctggtgcgtcccctttagaatatatagcacggtgtatcaggaaaactggaaagaacactgaaaatggatgtaggagatctagtttcatttcatatgaattgacggtggagccttgaataagtcatttgacttctctgagcttcagggaccatctctgtaaagtggggtcactcacaagagagcctttggctggacccactgtccactccaggtttgacagacctgagatcacctgttggctgtgacccaaggtgcagtgcaggctagtgtttcattctctgctgcaaggcaagagcctgtttttcctaaaaacaaaaatttaccaaaatataaaaacccaatcctggcatttcttctggtgcttctgtggtatccaaatctctatccctatctgggccagatgtccctctcaccagccttcctccttgcccctgcagtcttckgagttccaaacaacatggcgtcctgctcacccactttgcaccctggactcagcacatcctcctcaggtcagtgtcaccatcttgagatgacttttccaggctatttgcatagaagtgttaggatgcttcacccaagagcatgaagrcctttcttccatgcatactgcagctcagaagcagaggcacagggttgcacagaacctgccttcaaccacagggagaactcagaccccaagggaaaagtctcaggcgaggggacgtgagcccacattgacgtgcgtattctaaggtggcgcctttattttctggaagagttggaggattggaaatgaagggtctaacggaatcatcgtgtaggacattttcagggtaaaggcattgttaatttagaaggattttatttcagatcttttaaagaaaaatagaattcattgagtaactactttcagatctttctataartataacacatagtttgttggagtaactatattggggtaaataatgttactgcttatcttccaatgcaaacataacaacaattttaaagaaatatttatttgctatgtttccacatacatcttaagagcctatatgtaaatattaccagcctacatcttttctttttaaaggagtctgccttctccatgtgataatgtgactaataaacataatgatgtgggccttgtttatttacttgactgatatagaggcaagtacaagttttgcattcagattttcagcaccttcctccagttgactagaggcccaccaaatccagaagacattggctacatgttttatttcttctgcctttgctattttgctttgcaaagtcctgataaaaaccaggtcccaagggaaggtgggctgataccagatccttgatattgtgccctaaataacaaagctgctggccaggaggaataagcttctgcacgttgttgaaaacaaacaaacaagcaatcaaataaacaaggagccttcgaaaccatagtggaggtgggggagttttatgtgtttgtgtcaggagaaggaagggctaacgggaatactaggagtctgccaagttagtgcctctcagcacccgaggtgtctgtgtccatatcctaagcttacagttcccacactgtgcaccaaggcaccccagggtgtcacaggaaacagggaacccctatgatattttaaaattttgagagatctgtcagcaacatctgtcagaccctgtgcaaactactgcttttaacttggatggacctaactacgtaataagtagaactgttagtaatatttggcctggggtaggtaggtgggggtattaacaaatttactacgttacaaagagtgtgggaaccgaggaagtttgggaatctgttggcaaaaccattgatcatgaaagtggtttgggactctgggggccgtcctaagccagggggcatcccccgtgctccctgtactcacctgaccttggttgctttcacagtgtttggcatgcagaacaatctggcccccagcttgaccaccctgtcccatggcaccaccaccacttccacaggtcagtaggctagggttggagcttaggcgctggaaagtgacacctctttgcagctacaactcactgaattaggagacccaaaatgtccctgaaaatcagtcracctttcccaccaaagacacaacactcaagatatcaatcttgatcattaactggctcagacatgagtcaagcacacarggaaggctgtcctgtcaacagcatcaccttgtaaggcatcacttgtatgttcctgtgtctctcacagccaaactggttaggttggtggtcttgccagctcactgctgtccttgacagcccactgtcactgcaaatcaatcatctggttgattttatggtgcaccccctacaggttgccaccgctgtgccaacctgggggtgactggggacatgaaacctaggtcagcctttgcctccaacttgcctgctacttaattggaagagaaagtctaacacacatgagacaacgagaggctctataagacaatgggaataagtgataggccatgcagagcaggtgttaagggctgtaggagttcaggagagaaggagatgcatgggggtctaggaggacttcctggaagtagctagaaggatgaggaggattatacctaagaacgttccatctaaaccctcattactgtccccatggctggagagagttgattcatcatctgcttctcactggagagggtcgggggtacctctctgccagggctgaycaggcttctcctgagtcacctggaaccaccctcccatgctgacccagcttcctttcttgcagcatatggggtgaagaaaaacatgccccagagtcctgcggctgtgaacactggcgtttccacctccgccggtgagtgctgctcccagctgccagggdtcaggctggtgcacagggaggattactctgcagtaatcctgcctgtgtatccttccaatacacatggtatactggaagaggaaataggacccatgagtggtcttaggcctgcaaacgcaacttgccccaaaggcctcttggatgtttccatgagtgaataaaggtgaacattcccatgaatgttcctatcagaagggggcaggaagctccaccctccatacctgcctagggccaggcacttgcacattagccactgcccttgactggaagyctttggccttcacctgttacatgcagctcatggagccctcagaaactgctggcaccctccctgctttctacaaaatctatatcaactttgtccacatatttcagcaccatacagtgagctgtttcctccattgttctaatcctagtgtgttgtcttccattcaacaattcatttattggaaagcctttactgagcaccttctttgtattagatggacagtgttctaagtgctgacagtacagcagtgaacacgacaggatagattcctgccttcactaagctgatgtcagtggtggaggcagacgacaaacacataaagtatgcaagataattacagaaaaggatacagattataaggamagcaataagtaatgtggtagagataggagtgtgtgtatgagggtgaagtgctttagatggggtagtcagytaaagcctcctcaagaaggcaactcttaagacctggaggataaaaatgaacccaagttagttaaggaaggacttacctgactgggggacttttacccattcaataaagatcctataatctccaggaggggaggcagcccccataaaccagccatccagagcttctgacattgacccaaactcttggtggccaggcccagccaggcatagagggtgtccttggtccccaagatgcttcatagtaaccactgtcagcaagaacaagagaccctcatacacacctgctaatttacctccctcctccttctctttcttctccttcctcttcttgtcttttctcccctctcccttctcctggcacatgtccttccttcttacccattttctttctccccagcctgcaccacaagtgtgcagagcgatgacctttygcacaaggactgcaagttcctgatcctagagaaagacaacacacctgcyaagaaggagatggagctgctcatcatgaccaaggacagcgggaaggtctttacagcctcccctgccagcatcgctgcaagtgygtcagatcctgtgtggcttgggtttcagaagaaagccaaatagtgtaggagaccaaatgtcctagcaaggtggtttgggaccctatgagtcatgaaaccatagccatcccattctaatgaaaagcacctgtctgaatagtatgttccagggtctgccttgaatgcagatgagctgagaaaattcaggcaaagagctctcagagaggcatttgggcgacagcaagtctaaccgcaaacacagatcaggggagatgaaccccaggaaagaggggctcttcttaccagtctaacctagaccttcccaagcagggtagtgggcaagggcggggggaacacaggacagagttgagaggttgagaagagaatatgccaggttataatgggttctgtacatagcttctttttcagargacaccctaaaaaaagaaaagcaagctgcctacaatgctgactcaggcctaaaagccgaagctaatggtaagaacaaatatgattgttgtccaccttgacttcagcyaggccacatttcatttcattgtcttcggagaccttgctactcaaagtgtggtccacgggccagcagcatcagccacacctgggagtgtgttataaaagcaggatcccagccctagctcagatctgctgagtcagaagctgcagttcaacaagcttccyaggtgatttgcatttgcattactgaagcaaaagcctgcctctgccatgtctacgaaggcatttgttttctcattttactttttctccataatcttcagaactaatagaaaaatgctttgcaaagcagttgttagctttatttttttttcttcccaaatatctgcgttctttgtctgataaccacatttcttgacgatgccctataggaatctctccaaatcactgatttcagggaggtcagtaaaggaaggaaaatgttaagtcatagaacattttcaaatgaatgccaatcaaatcagttatcactttaacaaggtgagagattggaacctgactgtaagtctttaaagttagcagttcctgacattttaggggtaggtctagggctgtggagtcaaaagatccttttcagaatctgatgaaaggtatgaacaaattgccgagtaaattctacacatgcccacaaacactcaactttctttttctttttttgttttttttttttgagacggagtcttgctctgttgcccaggctggagtgcagtggcatggtctcagctcactgcaacttctgcctcccgggttcaaatgattctcctgcctcagcctcccaagtagctgggactacagtcatgtgccaccacatccagctaatttttttgtatttttagtacagacggggtttcaccatgttggccaggctggtctcgaactcctgacctcgtgatctgcccgcctcggcctcccaaagtcctgggattacaggcgtgagtcaccgtgcctggcctaaacactcaactttcaaatagcatcacggactcaggaacaatcctcctccaagctcatccttctcattcccaattccttccaccccargtcaggaacttgtgttcagagtcccttaaccaagaaatcagagtcatttctcacaaccacacttattgtttgaatgcaagcggcacccataacttggtgttccaaaaatgttttgaggtgttaaggtttaaggtcataagagaattaaaacatagtgctttcttccaccattaattgtttgccaagccatgtcttcatggatgtaattatcgcaaatatcagattagtgaggactgagatgctggatgttcctgcacgtcgttgaaagcaagtttattaagaaagtaaaggaataaaaaaatggctactccataggcagagcagctagctcctccagtttaaaagctcaggtcmatctgtttgtcctttcaggagacctgaagactgtgtccacaaagggcaagaccaccactgcaggtgggtgagaacygcgaaccctgcagtgacaggatccagtggggctgcttatggctaatggaccagatgatggtccctcgcctggaagcagtgcagtgcacagaagccaccagactctaaagagtttccctaaaggctcagaagggagcagggtgggggtcaggggagtggcaggctgtgggtcagaggtggccgcagaaggagcttagctcaggggatgaagctaacaggccccccgcccccagctgcccctaattaacacttgttagttaggttgtctcctaacacaacagggtgactgtgtctttacacagcagctcaagaagagactaagccatgcacgcctccagccccttagcctttcctcatttccttccaccgccgtgtgatagaagcaggtcaagtcctaccaccccattttagggaactaaaaacacttttcattacaaaaaacattgttttaattcactaggcacccctgaagagctgagtataattctaggcactgtaaggattaaagaaagcactgtgtgaactgaggcatggagatgggaacgctctaggtttgggcccagtcagatgcagaccaatgctatattcaaaataaagatgtttaagcctcgtgctgtgctgctaactcctctactattttacattccttgtcctatttcattcaacaaccttcccaagaaggaggcaatcttttttttttttttttttttttttttttgagacggagtctcgctctgtcgcccaggccggactgcggactgcagtggcgcaatctcggttcactgcaagctccgcttcccgggttcacgccattctcctgcctcagcctcccgagtagctgggactacaggcgcccgccaccgcgcccggccgaaggaggcaatcttttaaccccatgttataaaaacggaaacaaaggtgaagtgaccttctcaggttcacacagctggagccaggattgccagacttctggtcagcaccagtcaggccctgtgctcagtccaggagccagccctgtcctgggtggaacagcacaggaacttraaagcccccagtcgtagtcactcaggccagaaagycaccaaaagtcagagaatctggagggaaaaggcaggagctgcctgcatttgcttcattttccctgtctctttcacagatatccacagctacrgcagcagtggtggtggtggcagtrraggaggtggcggtgttggtggcgctggcggcggcccttggggaccagcgccagcctggtgcccctgcggctcctgctgcagctggtggaagtggctgctgggcctgctgctcacctggctgctactcctggggctgctcttcggcctcattgctctgggtacgtggcaaaggcagcagggcagcctgtgtggtaggaggcaggccrgccccactgcctgtcagaagggcaggaatctgtgaatgggcccacgtgttagggggcgaggggacctgaatgcattggtgcagacccttgttaccgcagatgagtaaactgaggccccaggaggtacctggccaaggacatgctgccacttagtggtggagctgaatttggatgcagcgcctgatgctcagccccacccttgctacacctgtaggccctggtctaagcacctggctgcccttggtaacaaggtcaggactttcttagcctttttgacttttgctgtttccaagcagccatatctatttcttttctttcttttctttttctttctctttttttttgagacggcgtctcgttctgtcgcccaggctggagtgcagtggtgcaatctcggctcactgcaacctccgcctcctgagttcaagcgattctcctgcctcagcctcctgagtagctgggactacaggcgcatgtcaccacacctggctaattttttgtatttttagtagagatggggtttcactgtgttagccaggatggtctcgatttcctgaccccgtgatctgccccccttggcctcccaaagtgctgggattacaggcttgagccaccgcrcctggccagccatatctatttctatcagctctcacaccacctcacagggagagtgaggacaagctttgtcacccagctcagatgagaagactgactcccaggccaggtttctttaaggctctgctgtgatgctgagcagctaatcctgctggtggccacggcagattatctctgcatgagtattctagcatgaagaagccaccacaggccccaatcccttgtgtcaggctctccactaggagcgagtgtatggaaggcgaaggaccgggccctcagtgacgcagtgtgtgtctgtttgttgcagcggaggaggtgaggaagctgaaggcgcgtgtggatgagctggagaggatcaggaggagcatactgccctatggggacagcatggatagaatagaaaaggaccgcctccagggcatggcacccgcggcgggagcagacctggacaaaattgrgctgcacagtgacagccaggaggagctctggatgttcgtgaggaagaagctaatgatggaacaggaaaatggtgagagcatcgccgggcacagggccagctcccctgagtccctttcttctttgcatctatgtggtatgtgtgcatgtgctgtgagyaccatcatccggcccactctcggcctctctcctcccctgatcctctcaatagcgctgagaggtaggtgggaccaagactgtggtcccactttactcctggaaaaactgagttctggaaagaataattgcycaagatcactggactagccaaatttagaatctgatctctagtctttgcctcagtttcttcttcccataccatgatccccttattgtktgtgtgtgtgtgtgtgtgtgtgtgtgtgtgtgtgtgwgacaggagatgtgaagctgactcaggatttgctttttcttgcaggaaatctccgaggaagccctggccctaaaggtattgccatggaytgaaccttgtctctgattcatttcctgcagttggaagtgagttttctgggtagattagaagcctttttctttgttctaaatggaaggatgaagagctgaatgatcttatggtatctgttgggaggtatctgttggttttagagtcagaatatcttagataaggcagcatctaagagaarcccagcaatgagcccaaatgacatagactctgggactgggagggactcgccgcatgtcgcctcaccttgaaatacagtttacatcttgtcaaatggttttaaaatacaagkcagagtatggcctttgggttcttgccccatctcacagttttcatatctttctggtttcaggtgacatgggaagtccaggccctaaaggtaattataacaygggcatttttaccttaaatattagcaagtgttaattgtttcaaacaatcagcaagtgtcagaaaacccaccttgcactccaagaagtaatttgacaacagatgggacaggtgtgtgaggaggagaggtttccaatcccagggacctttggctggacacagagcagttttccttggtccagctgaccrggattggcgagcttccctgtgcacaggaatctccaaaagagtttgggccacatttcccgagcctttgactcagggggtakgcatgtgggcaggagtctttatcttagtcatccacggtgattctgcagccagaagaatactgagcaccacgttcaagatgacaggatcccacctctctccagctccctcctcactccctaggcaaccccagggcaggaagtcagctcctccactttggggccctcgagtctcttctttcccttcagatccttgccacccacaccctcgcatatacctgggtcattgtcccagccctccttccccaagtctccagcccgcacacccctcctgaccatgttagtggtggggactgatactgccagagtacctgaacctgcarttgtcagataaaatacaggactcccagttaactttgaagataaacaacaaataatttttcactataacttgtcccaaatatttcatgggacatacttataactaaaactatgtgttgtttatctgcaattcaaatgtaactggacatctgcatttttatttcctaagtttggcaaccctacctgaatcccactagtgactgctttgggaattgggcacagtcttctggctgaccactctctcttttgcctttgttcctgcaggagatcgagggttccctgggactccaggtatgtactctctgatgacctccaggcctgccagtgttgcagctgctcaatcctagctgatggcttctgggaggaaaacaggggctgagatatccttgtgtgttcacaggtatccctgggcccttgggccacccaggtccacaaggaccaaagggtcaaaaaggcagcgtgggtaagaaacacatttttctttattcatttattcctcattctttcattcatttaataaacattcattaagtgcctgctgtatgtgaggccttgttttaggctctggagagacaccagtgaaccaaacagagaaaccctgctgttgtggagctgagatttgggtttgggagaaagacagtaactgtgagaaatagtgaagtctatagcagtttacgggtgatgcacgacatgggaaaggagagcctggagggattttgggaatgagagctggggagagtaattttacacagggaagccagggaaggcctccctgagaggccaccatttgagcaaagattcgaagggcaagaaggagccaagcaggagagatctagggaaaacattccaggcagagggagcagccaaggccaaggctcaggccccagggcaatttttaaggagcatcaggaaggggaagacctctgagctggaaagtccaaagggatgggccgagaggaggcaggctgtgtggggcctcagaggccagtgtaaggactttggctttgactctgggtgagttgagaagccatgtgcaggtttggggcagaggtagaacatgatctactcacattttcaaagggtcactctggcttccaggttgagccaaggctatggggtccaggagagaagcaagcagggaggccagggaagggctccaggcaagcgtctgccgtgggaggctgcctgtggagccgttagctggggtacgggatcctgacttggaggctggccatccctgtctttaggagatcctggcatggaaggccccatgggccagagagggcgagaagkccccatgggacctcgtgrtgaggcagggcctcctggatctggagagaaaggggaaagaggtaagaggcaattccttcaccggcagagttagctatgcctgtgcttccttctctctgtcaacacccgtccctccttcactctgtctctgtttctccccscttccttcatttactgagcacccaccctgagtcagggtctgtgctaggccctgcagagacgctgggcataggctgggctacagggccaggcctagggctgagaacccatctgacatccctggaatccaccgggaaagtggtcacaggagcagtggccttcctggagttgggtggtgagggtgaggagtcaggccgaggtggggctcagggggcagggcagggcagagtcaattgtaaggtggagtggggcacagacctttgagcctttcctagctggaaggaggccaagagggaggtggggaaggccccagacataggttcagtgctggagaggctggggaaggtgttgcaattccatccttaactatgagactgcttttgtcaggggaaaccaagacagataccagaagtcctcttaatgctaacagactgtgagcaggaagctttattttcagctttactttctctttaaaatattgctcaaccagacaataaaatttattgagtgcctactaggtgtcaaactccatagactataaagtctctgggggtagaagctaaggagttttgctgataagtggcctcactggggcaccaaatggatccaagaccactagcagggtgggaagcatcccctccaaatgacagtgccaggatagggggcagccacactggggcctctcccaaagtgctcatccctccatttctcctcaggggctgctggtgaaccaggtcctcatggcccacctggtgtcccaggttctgtgggtcccaaaggtaagtccagtgtgcaggaaggaatcaaagttttccagaggagaagccacattcaggatggatcacagagaagaggccctgggaccccagacagccctaaccccctgccccaggcctgtgcaggggtggtgggtgggtccaaagagcatcccccagaaaagcagtccctggggagtcaagactagggctgtaagtttagccccataatgggcttggggccatgtttccatctctcttcaatggcyccgttatgtgatccctaagtgggtggatggatcattcaggaaatcagaagttagaccatttccttgactgactgcggcccagatgcacacaccaaaagtaacatgtctgggcaacccagggagaatgggccccttctcaaaacccaaatgttctactgccccagcccaaatgttctactctgaccaggaaagagcaaagggtagtttgatcccacccagctgcaccccctccctaaggaggacatgcactggggtcacccctggcctgcaatacactcacacagccctcacctggaagacagcgtccctaacccccacctgccctgcaccggggccagatgtccccacctgtatctgcccctctgctgattgctgtcttgtcctccttctcaggttccagcggctctcctggcccacagggccctccaggtcagtttkctgcttcttgtwaataggttctgtttccagggcaaaggtggcaatgttaaaaggaaaaccaaatatttttaaagccaaagaagcaattataaagcaagcctcctagagatatagaattcaagtctgcatgtgtgtctcctgtggcagaggttgggctccctgatatgtcctgtccagatcccttctgacctggcttagggcttgagaccctccagcagcttcagcaatggaagtccccatcctgcctccatctgagcaagcacctgcctctctcttgtcccctatggccacagagcttgtcctgctgtcttgagaatcttgagctgtggccagtgcctctgccaagactckacaatgtgttctaatgcctgttcatcagcagaggcaaggaacctgggccaaaatgacttaaaaaggacttgggaaggagtccatggaaagcatcctttgacttttactatagggtgtgtgcatatgtgtgcctgtatgtgtgcatgtgtgtgcatacatgtctcatcattycaaagctagggatactcatctgtgtgcatggtttcttctgccgggcaggtcctgtaggtctccaagggctccgaggtgaagtaggacttcctggtgtcaaaggtaagctggagggaggcctggggggacagtgagggtctgatggacacgacccacagcctatgcaggctgacaagtgcaagaggggaagaagaagtcaggattgagggagcctgtcttcagagacagacattgccccttcctggttgtcccttgtagggcattttacaccaaggtgtccatttcctttttaggtgacaaaggaccartgggaccaccaggacccaaaggtatgccactcactgctgctctgtcattaccagggcctgcctcactcctgggagcccagatgggaccctcactgtagggtctgagggtgcacaggacctggaccaagatctcattctaatccaacctctcagatagggaaactgaggcacaaagaagggaaacaaagcactaacatcacattgaattctggggtggtgagtgtttctcggggtggtgaagacacagaattccaaggcatctgacctcttgtgtccatggcaccaatttgtgcaacagcaggggctggggagtcagtttgtagggggggaactgactctgccaaagatcagatgtgctcctttggctgcattaatgctgtgtcctcaccaacatccgctgacaggagttcacggatacagtgagaactaccctgcagccggggaccctgttactgggtgagagtgttttccttgctcacaactgtggctttttccacctcccccttgtttgctttaggtgaccagggtgagaaaggacctcgaggcctcacaggtcagtctgtcatgggaatctactttaatctatccacracttttgtaaatccatcagtcactaggttggaaaaaatccagaagtaagagaccgaatctgtttaaaacccttcagggaacytgtgatctagaaaaaacacaagatgagaaaataaagcctggagtggaggataaggrggtatccagatgtatagtccaaacagtaaatgtttggagcaaaaaagaaagtgtaggattgtctctgattcttttggggaatacagttgagaaaattaagctcttcccgaagcagcagaaagtttgcaccccggtatcctctcaaccactgacctcctgccaactggcatgattataaaggaaattgacagtgataaagctgtgactcaaggggtggttttcagtttccaaggaaataagactcatgcacatgcccatgattctgattaggtgtggtttctggttgagcccatgccacttcccaggggttccaagtggccctgaccttggaatcaaagcagaagctgcttycttgacctcttggaggagggagcagaccaccattgttaaagcatacacagcttgcaagtgtccaaccagctagttctttgtcctttgcaggcgagcctggcatgagaggtttgcctggtgctgttggtgagcccggggctaaaggagcaatgggtaagtgttccaaaggaatggattcagtgagttccccatctgaggggtcaccacgaccctggagagatccgtcttctagagctgcctctcctactctctaatctgcccactcctggtagagtctcccttgaccagtcatttctgtgtctgggcatcctttctggggatcagagagctgcaggtacctctgtgggtttctttccactttgggagaggccttgcagggcatggtccattcacctaagagctgcctgtgagctccccactcccctggggaagacagtgttgaagtccttaggagcctcaagtgttccaggaatcccagggctagtctcatggccaaatccaggtttttacccttttgttcacctgaggtgcctgtcagcctggctgcagaaactgaccaagaatctcagaggtagccaggtgcagtgattcacgcctgtaatccctgggactcaggatgatcgcttgaactcaggagttggaggctgcagtgagccatgattacaccactgcgctacagtctgggtgacagagcaagaattcatctctcaaaaaaaaaccaaaaaaaaaaaagaccatgttgaggatcaaacccaagaagggtttaagccttacctgtggagatgcagcatgtgtactctcgttcacttccccagctgtgagtgctgacactgtgctaggcaaatgagatgctttacctccctcaaggggagataagacttgcatgaggtgacaagtgtcacgcaaggtacagagtgctgtgaggatacagtcaaaggagagatttcttccaataggaaggacggaggagggggcatttcaagtggtcccaaaaagttggaaagattttaagcatgaccagtctggaaaattccatgcagggatgacagcacgagcagggaaagacaaagaaatgggaaagagcaagatatggtcccagaaggccaccattttggagagaggttacaataatgcctagagcagaggagacaagaacatggaggaccttgacttctaggccctcaagtaaacgcgacaagcattgagcatcgaggcgcttgagatgcaatgggaaggcactgaacaattctcaacaggaaaagagacaattgctggtttaggagaaggggcagtgggagtaccgtatccagagagtgtgacagacagggctgtcccgtggctgatggctgcgtgggctcctgggacacaatgtgcttcaaggccactgggacrgtagagggaggaatcgcagaaatcactccaggagcaactgagagaccttgcttctactttaccaggtcctgctggcccagacggacaccaaggcccaagaggttggtcactcatctgctgcccccagcctcactcccgtcacagcccctgttccagcatgcagccctcagtccccttaaccatagtgcagaggagcatatagcatgtggaagtgtgcagtgtccagttctgttccccttctcctttccacctgccagcaagtcaattaggaaaaccctcagaaactatcagttcagatgtgataaccagtttagctttcctaaatgtaaacacttccacgttggccattctctctctaggtgaacaaggtcttactgggatgcctggaatccgtggcccaccaggaccttctggagacccaggaaagccaggtaacagagcaggaagagggagccatggccctgcttagtgtgtgtgtgctttgtgtgtgtggatgtaggcatgtgtgtgcgtgtgcatgtgcaggtgtgcaggttgtgggggaaggggtgtatatgtgcatggttgtgtgtgtgcatgcaggtgtttacaaatgcacccatgtgtgccttatcccgttttcctccagcagctcagcagggaactgccatagtgttaggttgttttgcgtgcagtggctgtaggccctggcacctctgggtaactaagtctggcaattcagaagagtgggattaacagctaaacataaggatttctagaaaggggcaaggacactcttaaaactgcagacttgaaggtcacctcgctatcttgctcctctgagcccttctcctcttgtcctcctctcctgtactgggccctcaccaacacccacgaggccgaggaggaagccattgttagagtctccaccgagagcaaagagcaaacttctcagggttgcaggaagaacaaatgaaaaccagccaagaaagctgtgtggtcaaggcgggtgggcattcatcgggggcctctgagagtaggggcctcctcagcctcctttggcgggtgcccagacaggagccatagagggggaacctggggcagcattgggatccgtgagtgttgagcattccggatttgtggctctcctcagattccaaaagggtctgtgaacccagataggctcagcaccattgcctgagaaagtggtgggtcgcttcactgcaaagcccgaagaactgctctccatccagagctgagaggtccaaggatgctggctgccccggcatgagacgtgtccttctgtacccactgacccctccactgcagtgtccaccggtttctgcaggtgtgggtgtggctaccagggatggcctccacccttcaactcttccctcttgtgtctgattttctgcaggtctcacaggaccccagggacctcagggtgagtcgctggatcattcccacctgctgtctcccaccttctcctggggtaactgcttgggccagggcttttcctgcagtcaccagagtttcctctcctccaccaactccctggcacacactccctttcactatgagtcgtgagaagcaccttaggaaggaaaaataggcacagaacaatctagaacaccattckagtagaaatgagattagattgtgtgtcaattctgtctgcctgtgccctgttcccctcgggtgcaggaatctgagaggaaccccaagctcatagctgagctcccactagccaggagagctgttagtccagaggcccaagttcccccactggcatgacagggcatgggcgctcatccttgttcgggaaagcccagtttctctgggacagcctcagtgttaaagcctgtcctgtaattggaccattgtgcccccatatcactacattcatcccctaatttcctgaaagaaattaggcaaagattgaaaatgaaatcaggcagcagccccccagcagttgaattcatagggacatgcttccaatgctcttacagaggagttcagtagttaaaggcaagagggtgatgctgcattggactcaggaagccgagcccctcccctgcaggggagaagggagacagaggctgctctgcaggctccaggtggctcataaccccaagggatggaaccctccaaaactgagcccataggcctctgcctgctccaagccaagctgttgccccatttcccaaagagggacaagggctcagagcaagaggctccccggggttgtctagactaaggcggaaggcaaagctggtgcgtcccagggtttcagtcagcagtgtggctgtgctgagtgacggagcactagtgaccacccaagggtatctggaattgctgggccttcatcgtcctgactacttgttctaatcacatcaggacttcccggtacccctggcygaccaggaataaaaggtaagtgaatttccaaatragatttctttcttttcactggccatttttgtggaaggaagggatggacaggaggaggcctytctctggccagagcctggatcaacagtggcatctagtggttctagcagagggctatgaggctgggagcccagggatttgtgaaccaagcccagtcctcaagccccacccctccccaaacacctccycaccccacaaacctgagccttgctttcatacttggatgtctccaggccactgttrcaggaggttctagaagggcactgccctccccaaagcctttctgtgccctgttttgcctctaaatgcccccattagtgcttcatccccctggtwtgtaggcttggtcccctcctaacaagtcttttcccctggggcaggagctacctttgcccttatcwttcatatcagccttggtgtgaatggctacatcagacccttcctgagaggaggctttagtacaggcagagaggagtgttaagatgctactgagagggcaagtcgggtactcagaggggagctcatcctcgggggtctgactggggcaatgtggtgatgcccatgcacacagtgaccctcttgtccagttctgcctatcagacctcaaccccgagcaagttcagggacccacagtgctcagggatggtctttgtccttctgttcctttgattccaacacgctcctgaactttgacattctatggagctgtgctctgtcatgagcagtcactgtcactcttggtgggaccctaaaataaccactttccagaaatcatttccaatgactgattgggccaaggagttctttagggctaactaaatgtaattccaaaataatgataactgagtttataggtcccaggcagaccacactaggtccgtggatatgttcacgaatggatggtaccttttgtaagagtctcataggttttggaattcccaagaataacagaaaccttccctttttgagggcccgtgacttccagtccaagggggagttcagaccctgcctggacaacatgcacaagaggggccattttaccgaacgttggattgcatcccaacaaaacaaactcaagtgcttctcccgtcttgttcatgagccctggctgaaggatggtgagcagagaccatccctctgctttcctttaggggagagagcaatagtctcctttcattgtgtgaatgactgaattgctaacagaacttgagaaatgaaaaaaggggcccctaaagaatggtttccccaagtgagtccgtggattgtcagttctcagcactgcatccagttgatacgtttgggaatgtcctcttctcgaaagttctccacgcacacttgtattttcaatgctctgagacacaaggcagaaaagagatcttgttaacctttatataactcagaccttcttagacttacccactgcagagcccccctttaatcctgcacagcccctacaactgtcccacagagcactctaggaatcccgctctacctggcgggctcatcgcctctgtcctttgacctttgagtaattttcccacctaagrcgattcccaggcagaggtggtggaatgtgggagcatgaaggactctccagtcagccccattctgggctcactgaaaggcaagctttccacatcctcaagtgaagccacttctctgaatgaagacggatgctctggcctccagggactctggctgaaagattggggcttaatgcatcctgcttgccttccttcagttcattaaaatgcctttagcctgatggtgagaggcccagaagtgggtcccaaatgcaatcagaagccttgaaaatggcttattgagccactaattgatcctcagaacaaccactctcagccttttcctctcttcctaggtgaaccaggagctccaggcaagatcgtgacttcgggtaggcaggtcctagagggaccctcctttctgtgtctttcttatactgggcacctaccttgactctgcagygttctgggcaggatgtggctgggagttttttggatcagtagcgggggaggagggaaatttagcagcgatgagaagaagaaatgccaggctgcccaccacaacctggcttgggtcccagcgcctctgagtgagaaaagtagggctcaatgttccatgtgccttctgttttcagaggggtcatcgatgctcactgtcccaggccccccaggacctcctggagccatgggacccccaggacctccaggtgccccaggtcagtctattttcttgctttgccccaaatcagcaataggtcttggcggtagtgactctagccatatttcttcagatcctgaaacccagggcaggaactgaamctggtaaagagaataaggagtttggcctgagaaaagcaaactcttgcattctcagacaatgaggtagatcagttaycctacttcacagcataggaggtgaatgtgctctcagcatttagagaaggggaggctgaggcttggagtgggtaaatgacttgcccaaggtcccacggccaataagcagcaggacaaaggatttggcccagatcagtctacctccagagcctgtggccaatcagaagactcagtccttgagccctttgtttcctcctggaaaacaatttgatattctgcatccagggcaacaaaaatgctaggtatctatttgaagaaaatatctccacatgggatggtgacaaaaatatgaaaacttctgaacaaagttgttaggagataaaacgtttattgaaagagcaggacactcactaawgcctgctctgtggtttcaactgtattaatacaagatgcaaaaaagaaaaaatgctggaagaaaataaaatgcccacacattgaagagttatggacaatttgtttcctacctttccaaagtgcctgttattttgttatatgtgtttttaattattttaaatttttatgtacaaatgaagtacacaacttaccacaaccaaggccagaatgtaccagccttccctcctgacaagctccagtgagaaggagtacatagaggcatgtagaagtccctaaccattacaggacagcagcagagggggcagtcccgcctgccccggggtcccggtgcctgtcagagatgttctcacgcaactggaccgcagggctgatctcgaattgcttattgctctcaaataagcaaggtggcctctttgggtctctgttccatgccttgggaggaattatgcctttagttcttcctatgaccctacatgcatgatttagccttttcttcctcaaccccgtttccaggccctgccggcccagctggtctcccaggacatcaaggtatgtcacaccctgcaagaatgcaaagcgatgggcccagtcgggaggactttcctctcagggtggacatgggcctctctgttctagatgacgtgaaaggtgtgttttggaaaaggaggacagggccagggctcttcaccggggtcttgcaaggtgattccctggggcttggggcagctgtcagagaagktctgggattacaagaggaccaggggcagacttggccttgaagatgagtatctggcaggagtgtacagctgacccagagagcaatgacaaccgtctgtgggttctcggctgcaggcccaggctgagaggactcactcccgggtcctttaaggagcccaggtggagactgcygggcctcccacctggacatctggagtgcagaacagcagaggcttcagcccacccggtccagcgctcactctgagctatcactgtgttaggagcttggtcttcagtgtttcaccgagtcttcccaacacccccgtgatgtagatctttttgaccttggtttacagaggaggaaactgaggctgaaagaggttgagaacttgcccaaagtcaccagctagacgtgtgggagcaggggtttgaactcagactttctgacaccgaaatccaatgtatccccatcattccacatgctcttatcagctgtcagggagcttgactatggtcctgccctgcctctgagtgaggggcacccttagcagatgaggtgctgcaggctcttgtgccatgacacagggcctggtgtctgggctgtgagggtagcctggagtgcctggaactgcagatccagtgagaggtgagaagtgtggcagagagcagcctcgtgacagcttttgctcatttctattttcttctctctatagaagttcttaatttacaaggtcccccaggcccacccggcccacgygggccaccaggtgagtatcttgragacctttggaaggtggggagtttgggggacaggagattcaatgcacttagtgaggaagccaagatcctcaggggtggcatcagctccctgagctcagcatggcctcttccttgctctcttctgcagggccttccattccaggcccaccaggaccccgaggcccaccaggtgagagccgagcttaccactgggaggtgggagggggaggtgagaggtgggtagcaatgggaccctgagcccagggccctctgggctggyttataggaaagagcttccctgctgcctcctcctgagcagagggttcctggctcccctcttggcactaataagtcttgrgggttctctttcctaggggagggtttgccaggcccaccaggcccaccaggatcgttcctgtccaactcaggtaatgtcagggagtcaagtcgcacctgttctccacctcagcccttgtcctgccacagactgtggccgtagccttgtggtcacaacctactcaccaggcttcctgctcctgacttccatggggatatgtttatataatcttcctgcttgctgcacatggagggaataaccatgtcaacccaaccaccctggtagtctggcctgagggagggagccagctctgcccttggggagcttctggcctaaccagggagacctggttcctatccttggggagcccaggtctgataaagtaggcaggatacatgcgcgtgaagtaagtgccgaccgtacaacatagaaacttgtggaaataactttaaagcaaacattaggccagaacctgttcctagtggaaaatccatccacccatccatttatccatccatctacccatccacctatccatccatccatccatccaycyatccatccatccatccatccatccayccacccgcccattcatccacccacccattcatccatccatccacccatccaactatttgacaagtattgattgagcatctatgttgtcaggtgctgtgcaaagtgctgcttcttcacaaacatcagtgtccatactcaaactatttccttcctctgcagaaaccttcctctccggccccccaggcccacctggccccccaggtcccaagggagaccaaggtgagaacagtgtatcagggaacccagaagccagtatgtgtcctctgtttacctgctggttgccaggagggtttggatgaagctgaatgagctggggcatttttgcatccttctgccttatcccattaggaactcagcagcctggagcaaaggtagagggggaggcacaatagtcagaaactctacaaaggatagccacccaacattggcctagtgagaggagaggcacaaggaaccccaagttctatatctgctctagcattggagcccctatcccctcctccatgggcccattgaaaccacaacacctggttggtacctgtctcatagctctctgcctttttccctcaggtcccccaggccccagaggacaccaaggtacagtagagccggcatcaaacaaaacctggggtaggggtggggatggcaaaagctcacctcccaagagctttgagcttgatagaaaggcacctggtgcaaataagcaagagtagagcagtgtttctctakgaatggttgagtgtgtgcatgggtgtagtgcaagtgtgcgtgtgygtgtgtgtgtgtgtgtgtgtgtgtgtggcatctctaggtactgcccaaagggcaacgcagccccagcaatcatggatcttggggaggctctacagggctgttagtgggtgagaaaagtgaggctgactgtccctcccttggtgtgttcctcaggcgagcaaggcctcccaggtttctcaacctcaggtaagggctgaaccccgccccattctggctctggccagagcctctccaaaccctggctgactgcactgtgtgtgttgttggcttccagggtccagttctttcggactcaaccttcagggaccaccaggcccaccwggcccccagggaccmaaaggtgacaaaggtcagtgagggagcagtgagaaggtggtgaggagtaggggtgagcctggtgcccagagcccagagcctgaagagatggcagcaagtactcatcagtgtaaagtcttgggagagagaagaggctggaggaaggaaaggccagagggtggaagggacaaggacatggtgatatagcctctgtacaagggagctgtggtattattacaaaaaggaggccaagagacatgggacgattgttgagacacacactaataagtgtggtttggcttaaccagggaaggcttcctggaggaggtgaggcaaacttctcattttggattccaggtgatccrggtgttccaggggctcttggcattcctagtggtccttctgaaggtaagaactgaaagtgaccaaagttcctctccacttcttctggtgaaggctgatcattccagtgaggatgttgctctattcgttcattcatttctccatgattcrttgttgattggctgtcttctccatgtgctaggacctatgagctgcctttaaggaggttacgagttattgggttgaggggaaggacccaggtacatataatgatacctaacaatgcagacaccrcatgatggagaacagacagacccagggtgctggggagttgagagaagggggatgcgatgttgggggtccttcagcaggttgcagaaggaaagggcggtttggcctggggcagcttcctagctctgtgccactttcagacagtggctgttacaggctgtcctttcttctcttctcggggacccttctccttgccactatcctatttctcctcctgagaagaccctccctcctcagaccatggaagctattcctgggcccgtttgtctgaccctagggtggagaaaccgacacaggacgctttctctttgctgcagggggatcatcaagtaccatgtacgtgtcaggcccgccagggccccctgggccccctgggcctccgggctctatcagcagctctggccaggagattcagcagtacatctctgagtacatgyagagtgagtagctggccgccgcaagccgtggggacaagaacatggagatacagtctctttgcaagggagctgtggtatcatcacagaaatgaggctaagagacatgggacgatgtagggcagtgggagtgtgtgtgtgtgtgtgtgtgtgtgtgtgtgtgtgtgtgtgtgtgtgtatgtgtgtctatgtgtccaggcccaggtcttccccctgcagagccaggcctacaggcctatgagctccccaacaccagccttctcatagctgcccccgacacagcctcacctcgcccacaccctggggaggaggctggcgcacgtgctcatcccctacacgcacatgctttcacaccacaccttgcatgtgctcatttgtcaaatgggtggctggctggagtcttgctggcccacagccctcatgggccacttgacccagctcaggcctctgcctcagtttctccatctgtaattaggggaaggacagtgaggggaagtctaggctccctcctggcccagccttgggcccatgtgtggggcggggcaggcatgttatcatgtgcttcaggtcacctccgtggggagaacatgtcctcttgggacaggcttgactttgctttgttccttggtcggcaggtgacagtattagatcttacctatccggagttcagggtcccccaggcccacctggtcccccaggacctgtcaccaccatcacaggcgagactttcgactactcagagctggcaagccacgttgtgagctacttacggagtaagcccttccccaygccctgcacctggcaccttcctcctgtgggtctgcttttgctcccagagcctcatctcctcgtttgctgtttgctttgcccttctctggaacatgagttttaattccgaattcataataatcgggccactgggatacagtgtcaacaagggtctgtccagattcagggcggccacgctggagagacaccgagtgagccttcckgcaattgactaatgtgttcctaattataggttcttcccacctgtgcatgaaggttggcagcatctggcaggcattaggctaaagcatgttctcaaaaataaacttcctttcttacaaaaaaaaaaaaaaaatcccaacaacagtatttgactttgttatgctttcaaaatagcctcgtaatactccattcatccacttcccccaaagacaaacagctcggtgaccgggcctttcagattctggaatagtgagggtgttgcttcagtacctgctaagcaggtaacctgaggttttcttcccgacagcttcggggtacggtgtcagcttgttctcgtcctccatctcttctgaagacatyctggctgtgctgcagcgtgagtcacctgtggggggatcgagggtgggactatctttgctttctcctggcctcactcgtcakgcaaaccttgtcctcgtctgagccttggaagggctgcaagagggaggcagagtcctttggacaaagagccacttactgctctgatctgcttgctgagtcagcaaaccggctggaaagggggcaggaaatgtcctcccaagcccccatgccagacaagctggcaggtgtccctttgggaacctggcagcttgctggtgtcccccctgaacaccgtggtcctgcggacccagaactcacaaatgtcacgcaggagccagtttgtgcaggggagcccaggctgtggctggaycatggctgcgacccccatggcctgggtgggtcctgctagtgcatcctctsctctccaggggatgacgtgcgtcagtacctacgtcagtacttgatgggccctcggggtccgccagggccaccaggagccagtggagatgggtccctcctgtctttggactatgcagagctgagtagtcgcattctcagctacatgtcgagtaagtgtctgcaggaggggtggttgggaagggcctgggatgactgggatgaggactcgcagcgtgaacttccctgtgattgccccactgacccccacctgccagactgcaccaaccccagcaatgagcagtgctcagagccgttcaaacctgtgagcctggagcaggtcaagaagcatggcaaggaaagccaaaacgggggtctcaggcactcctcgtgtagactctacatacacacccatactcacactcacacaccacactcccatacacacacacccatacatacacacacacactacaaacaccatacacacccatactcacactcccatactcacacacacccatacgcacactcccactcacactcactcccatacactcccatagacacacacactcccatacacacacatatacacacactcccatacacacactcccatacacacacactcccatacacactcccatacacatactcccatacacacactcctatacacacacttccatactcagacacacccatacacactcacatatgcatacacacacgcattcccataaacacactcccatactcctgtactcacactcccatacactcccatacacacacactcatacacacactcccatacacacgctcccatacacacactccagtactcacgcacactcccatacactcccatacacacactcccatacactcccacacacacactcccatacgcacactccgatacactcccatacacacacacactcactcccatacacacatactcatacacacacacacasagaatgaagcacacaggcacactggacctgcttctccggccccgtgggcccctccgttcctcctttgggctcctcctctctgcctctcttcctgccaccatctcttttctttcttggaccccacttctgtccaaacctcttctgtatccgacctcctctctgacaggtgtttccatctgcctccccctgcctgatctgaatccatcacctccctaggttctgggatcagcattgggcttcctggtcccccggggccccctggcttgccgggaacctcctatgaggagctcctctccttgctgcgaggtaaggcccagcaggggacatctgtccaactggttggggaggaagcagagtcccttggcccaggccaggactgactccgtgccctcccttggtgtctcagggtctgaattcagaggcatcgttggacccccaggtcccccgggtccaccagggatcccaggcaatgtgtggtccagcatcagcgtggaggacctctcgtcttacttacatagtagggcactgtggagtgggatggggagggcaggggatgcagccgggccttgggggctcccatgggctttagcaagggcagtctaagtgctcctggagcctgtacagtgctgggtgcagggccctggagagcgccacatgtgctggcaaggggccttcagccgtgrcagggacagaggtggggagagatggctttcccaggcgcagcccggtgtgtgattagggccgacctgsggctccacctctcagtgactggagggctgagttgaatgaggctcagaattgggagtgggagagcctgacgggaacagccattcctggatgatgtcaggaaacagcaggctctggcctcctgcttttctctcctcccatcacccgggaggcccagcctcatcccctcctttcaggtggggcccacagcgccccragcacaggctgggaattcagcttcctccgcagcactaccccgacctttctttctcttccttctgcccagctgccggcttgtcattcatcccaggccctccaggacctcctggtcccccagggcctygagggcccccgggtgtctcaggagccctggcaacctatgcagctgaaaacagcgacagcttccggagcgagctgatcagctacctcacaagtaggtgccccgacggtgatgccccaccaggcaccccgcaggccttgcttttccctgtaagtggggcagggaggcacttaaagggacaggaaggccacacgagagccactggtggggtaagcccggtttccttccacaccaaaattctcccactcgggtacaagaaccctgaagttcacttctggtctctcaggggcattgacaccctgggagagactccctaactcccaagtctttctctccaccgagatctgagctcccactcatgcagcttctcaccctgcaggtcctgatgtgcgcagcttcattgttggccccccaggccctcctgggccgcagggaccccctggggacagccgcctcctgtccacggatgcctcccacagtcggggtagcagctcctcctcacacagctcatctgtcaggcrgggcagctcctacagctcttccatgagcacaggaggaggtggtgcaggctccctgggtgcaggcggtgcctttggtgaagctgcaggagacaggggtccctatggcactgacatcggccyaggcggaggctatggggcagcagcagaaggcggcatgtatgctggcaatggcggactattgggagctgactttgctggagrtctggattacaatgagctggctgtgagggtgtcagagagcatgcagcgtaagtggggacatttaggccttggtgctggggggaaggagcgtgggagcatctccagactggctttcttgtttgtggaacccccaggctgtgaagacagaatcaagcaggcaggkgctggaggggacaggcagccccagcctagctctcagcctactcagcttaaggagccccagtcctgggacccgagctgtggggaacagagcacgctgggggctttgtactttgttttcccaacacctarctcgttctgggtcccagatgagtcatatgaccatgctggattttctgctggggccragagaaggatgttggctaagagtcctttccccgygcagcttaacggcacagttacgcagtcaacaagcttttgatgccggcccacagcaggaagagacctgtgccagtcacacagtggaatacaaaggaagttggagggcttcacccttgctgcggcttgatctagttcaactgctttgggagtttgacactcggagggcactgtgctcctgctgaagagggtactgggmgatccctgcttcctgtgcccaagctctggtgttttacaggtcagggcctactgcaagggatggcctacactgtccagggcccaccaggcyagcctgggccacaggggccacccggcatcagcaaggtcttctctgcctacagcaacgtgactgcggacctcatggacttcttccaaagtaagggcatccaactgctttcccagcacctgcctcactgcataggttcccacgggtctgctccagagacaccagtctcatgagaaatctccagttattaacatttgagatgctcaaaattagacaaattctataaattctgaactttgtttcctcttacacgtccaaactccatcactatctctctgtgttactctgaacaaatgacttgatgtcccaagcttccaggtgatcaagactctaaggccagtgtttccttgcttttgcagcttatggagccattcaaggaccccctgggcaaaaaggagagatgggcactccaggacccaaaggtaagtggtggcagagagccagtmcctggatcctgtgttaacacccacctcgtactgaaaagcagctcctgtgctggtgccacaccggctacctgtgcyctcagtccccagactcatgtattacttagttacgcyccatttttccttccaggtgacaggggccctgctgggccaccaggtcatcctgggccacctggccctcgaggacacaagggagaaaaaggagacaaaggtaagtgttgactgctccacgttttgcatgttctggagggctgcaaggctgacgctcattagagaagcaggtgatttgttccagagcaagcctgagaaattcaggcaaatgccaattactccaggcagacactgccaaaagcagaatttgcataacaatcccattcacagtgaggaagaaaaggagagtgtcaaagcakggaggaaaaggagaaccaagctggtgtkgaaatggggcaaacaagttaaataaatgtagtcttacaaaagatttcacctttgaagccatctttgcagtagtcacggttgccataattgcccaagccaagatccccacaggccacaagatatgtttyaacttcctactgatcttctaactttcaggtgaccaagtctatgctgggcggagaaggagaagaagtattgctgtcaagccgtgagctagccatggcaggacagctcctggaccaggtctcataatgcatgtggcacttaggtccaagstctccagagggtgaaagctggagtctgtcaatgtcctactgagacagcacagccaacctagctagcaacatttgttttagtctgaacaatatatacttatagaattcagtcaaagatacacaatctgaaacagcttcatggggtggactctaacagtagttgcaatgttttagaatgagacttacttctctgctatctagatctgaactccttggcttctttacttagttcaagccccagcctaggaaagccagttacataaaagttggctcaggagtcttagagctttacctaaatatgagcccagaaaacggaggatgggggtggggcgccttcctggaggtgacacttgatgggggtgtgttctggttactgttctaaggctgtgccatcagctccttcctcccctgttcattctgcattctctagtcagttggctaagaagtgactcttgcaactaaaaaaattaagaaattcacttcccctctaggaggtgatgatagggtttctaatggttatatgtatatcacattcccatttgcttagaaagtctgattgtagctatgattgtccrtaggcccatactagagttcatggatatgttatactgaaccaggccagagcaaacagaaaaagaaggttgagggcaatggacaaggaaggaataaagggagaagagggaaaacagaaaacctgatgctggggacacagcatcagctcaagacgtcaccctccattctgcactcagaaaatggcacttgggggactgggcgcagttggtctttaaccacttttcaatgtctaaaaacatttgtttgtggtctataagatgaaacatcatttcaatcgtaaaatttcccattaaagaagtttttttttctaatatcatgtttaatgtgattcgtctgaccaaagaaagattaaaaaatagtctgggttaattgggtctgattctaacactgtttattacaaacacaagaaaacaaaagtggttgtattttggggcatagcttctggtatttcattcaatccctgaggtcttcaaaggcaaatctttagatacctgcaactatgaactcaatctggggattttacaaagcacatgaaagttttccccaagcataagttatttgaaataaacatgcaacaaatgagcaagaagatgattacttgcaattaggtagtgctttatcctggggcaatggaattatgattgtagggcaagtaatatatggaatatagaaacttctattaaagaaaaatgtacaaatctcaaatgccccaaagaaatgcacagtaaaatcagacactccaattgagaagagactctacttagccactttgtgaatttgttacaagttgtgactctcaaattgctggataattaaaaatgggattaaattgcatctatttctacaccactactcttctaaaaagactttattttccataaggtctctgctgagtatctcatattatcccagaaaaaacactccacttgtttcctctatatcaaacaaccgctaacggcaacaaccagtcaagcactacacactctacgtggtctttttgcctcttttattatatcctgataattgcctgctatgaattaatgagaattttttaaaaataaggctgggcgcggtggctcatgcctgtaatcccagaatttcgggaggccgaggcgggcagattgcttaagcccaggagttcgagaccagcctgagcaacatggcaaaaccccatctctactaaaaatacaaaaaaattagccggcatggtggcgggcacctgtgatcccagctactcgggaggctgaggctgaagaatcacttgaacccaggaggtgaaggttgcagtgagctgagaacgtgccactgcactccagccggcaagactccatctcaaaaaataaaacaaaaataaaataaaaattagttcatacagcctccagatttcaaacaacttgagttttactaagcaaaactattgtgtataataaaggaattgtgctttttaaataattttttttcaaaagaattcattagttttacccaaaggctgaattttttactttttaattgtagcttttacacttattaaaagtaacttccaaaaaaaggggggaaaaagatgttttgaccctttaaaaaaaagtagctttaggggttcaagtattatatcccctttaatagtgatccttatcttgattaatcaagacataggagttttttccttgttactagatctacctaagatacccaaagtcttcatcaagttttagctcaagtaaaatagggtacaagtccaaacttactaccttctctggacaaaactcagaaagaggatgggcagatatgaggttatgtcctcagctggatggcaatggatgttagcctcttttgtttcatttttttttttaagtcaagaatgagctcaatagtgcacaacgctcccagattagaaaatgacactccatgcctccctccagctggacacgtgccgagtgatgctgcctagcgtctactgaatcttgcatgaacgttatcaatgacgaagagactatttttgcagaagtgaggtcatatgatttgtgaaatgcttggtgagaaaaatcatccatcccaagaggaaaagaaattaaaaacatacacatatatacataggctgatagaaatattttaagcacctcccaaaggaggggtttgcattctgaaagacaacccccagcaagttatcactaaaaactacatttgagtgtgtgtgtgtgtttgcgtgtatgctgtggactacacacagctaggaatactaactctggaagggtcagaagacctgcggggactgcaagttttacaatataactaggaccaacaactgcaaagtgttctcaggcaggacactccagtttcaaagattctcaataaaagactgcttcccaaaattgattaagaaataactttatttttcatgtgtcaatcccatgattgaaaagacatgttgctctcaagtagataagaggcataatcttaaacaaaattctttctgaaaatttagcttatgaactcattacactgcaaaccagagaaggagcacaaaaagctgcagcccacattgaaacctggcaaacactctccgccaaaattagtagcaggaatgttaaagctttatcaaaaacatgtcagcaacggaatagcaacaatacagccattaactgttgtgccttcaacttaagaaaagcatttaaagaatcaccccatttcttataaaaatcatttctcagaaaagaattgttaatcaaaagactattagaactggaactctcttctttcacttcagttctagattttctttaatcaacaatatctctagttaatacttggacagaatttggcttctcagaagagtctttgtcatttaagcacagtgtggaatgggaaaaagtgtatagttacaaggaaactagaagagtacaaaaaaatagtcacttctgaaactcgctgatgctcaagaaatcagagacccttcattaaggtgggtctcatatgcctgagagctttgtgcttgaggaagtatgacttagaggtagctctggttctggtaatttatatttaattataatttgctgtatcctgtcacaagagagttctaatattttcagcaaagtaaaagcattcaacattttttccttacccaccctatagcttccccatagaaaaagataagaaaaagcttaatgtgactccacatagaatagcagctaattcagcaattcgcactgtatggttgttgacaggactaggaaaggcagcctagtgccccaagctgtaggagctggatctgcagaagtgtgcaggtctgctgtgttcacagcactcagggaaagaggggaggaggtggctgatgagggtgcacgttcggagaagtctgtatgtgtttcatggcatattctgccacagcaacaaaacaaccaaatcagcagtagatttgactgtacccttcgatttcaaagaagtctgcgcccctcgcccactcgccacctacacttcatgcaggaaagatagatcactatcatctatttgaatacagggcctcagaagaggtgggctggtatgggtacaaacagcgtattttataacaaaacactttttgaaaagatttatataactttaagtattaaaatgaatgctttacctctacatatgtatcactgtacagtcttgcacccacacgattatggtcatatttgaaagcgaactcaagcacaaacactgaatccaaaaggcagttttaagggagatccaaccttacccacagcgccaaccattccactctgagcctctctccttgagtcaataatctgaatgtcaagttgaaaggaacagaaagaatcaaatattcagaccaaattaatcaggcaccacacactatttagcgcacagggtatcaattaaatgatactagaaaaaaaatgtctactgcctgaggtattcattttttaaaagtcaataaactgaaaatttcaaaggagaaagtggtatgaagacgttccttcccaatccctcttcaaataaatcattaaatacactgggcaacattatactgtcatttttatcataacaatataaacaatttttatcatcatcctgaatattactttataaagatatatattttaaaaggctttcaaaacatttttcaacccagcatttgagaataaagcattaagagttttgtatacagtaacacattcatgtgataagtgtatgaatttacaaccatacataatatgtatatatgtatatatatttatataaaaaacaaacttggccagaagttaaggctacctacgaagttgtccaagtaaattatgcttgtcaaaacaattataaaattcaaatcacacatgcatttttaaatcatctaaatcactgacaaacaaggttcagcatccaaagttttcaaattaactgcaagaaagtgctacagacatttacattttctaaatatgaatcagtgttcccacaaagttacatttaaatttttcaccagcctcaaaagtaatataactgaaaacaaactttcacaatttggtacctagcactcttaagagagaataggttgaaaatggcaggcagcaagcatcattcacaaatgtgctgtctcagacagcaaagtacagtttataatactgtctgacctgacacgtggttgaaattctaagcctcataagggactaggagtgaacatttcattaataattacacacaccagcaaccacatgataaaggcttcaggcttttcccactcaaatcaaagtgaatgatttaaacatggaacaaaataaaaccaagacataagtagcctcatttcaaaataaggaaaagtaatttctgacgtgcctaaatatttaatttaaacttttaaaaaagtattctgaactaatgcctcttttaagattaatttctgaagatatatttataaatataactcacagcctgcaggcctctgacagagttttaaacagaattagctaagatggagagaaatcatttaaccagctcaggtattattttagaaaataaacacagatagctaaacctatattgcttaaatttcatgagttttacatttccaatttgcaatctaaaagctacctctttttttcatctttccaaactttgtacatgtattttaggatgaaaatttctatcaaacggtaagagaagcaaaaattccaaaacaaccatgtttttaattctaaagatgtttttgtccctgttgatcaaaaagaaaatcctacttacgacttgactgaaatttagtgttttaggcactatcttaagaaaattagcaccctcaattattagctcatgccaaaagaggtaattcgttttgacaaatcactgaaataatttttctcttttaaaagaggttgttcctatttaaagaaaaaaatatattcatttactgagtcaacagcatatttgagcaaatcatagcttttttatgagagctgatccaccaaaagaaaattatcccaactctctgcagcagagcttcaactacagaatttaggcattgagaagttacgtcaggtaagaagaatttattaatacttagtgatgtaacagtttttcttaaataactttaaacattatttctccaacagttttcaggtagcagtgtctaaagaacataatttttaagatgaatatacaaagtcaccttagtcaccaagatgctactttgccaacatggcctagcgtctgtcttagttcgttttcccttcatctttgcttaaaaacaaaacaaaacaaaaaaaacaaaaaaggaaaacacctagaaggtgaggcaggtgattgtcttcatgagctatctgagagactgtggcagaagatgagaacagaatgacatactgaaagagccaaacccacgcacagaatgcttccctttgttatgatccggtggaatgcaagctgggaataggataaaatttggaaatccggctctgtgttgatgggttaaggcattcagactccccagtcattttaaagaatacttcctgttcctgtagtttcctggcaaactcttcttccagtgtcttaaaaagaaagggaaaaagaaattgctatgtgctggtattatatatagaatttatgctgacagccaagataaaactacttgtccaaaacactttctttgtatataatcctcaagaagacacgcctgctcaattttttaagatcataagctttgtacagccctatgtgcaagtccagctcagccacataaatggacaatttgggtccattacttaacttccctatattagagaaccatttaattcctcaattcctctgctgtaaaaatagggataatttgctatgtg

SEQ ID NO: 7037 - DNA, 14325 bp, Homo sapiens
ggccacactgtcttctttatttttctctttggctcttacaaccatcttacacacagtggtcctcaccaatctgtgttctcactttctggggtttcagttacccgtggtcaatctcaagtctgaaaatattaaatgaaatattccagaaataggctgggcacagtagctcacgcctataatcccagaactttgggaggccaagttgggcagatcacctgaggtcaggagtttgagaccagcctggccaacatggtgaaaccccagctctactaaaaaatacaaaaaaaattagctggatgtggtggtgggcacctgtaattccagccacttgggaggctgaagcaggagaattgcttgaacctgtgaggtggagggtgcagtgagccgataccttgccactgcactccaacctgggcgacagagcaaaactccgtctccagaacaacaaaaaaaccccccaagaattagccaggcgtggtggcacttacctgtagtcccagctgcttgggaaactgaggcaggagaattgcttgagcccaggaggtgaaggttgcagtgggctgagattgagccactgcactccagcctggtcaacaaagcaagacccttatcttaaaaaaataaaaagaaagaaagaaagaaatattccagagatacacaattcataaattgtaggttgtgtgtcattctgagtagcataaaatctggtgctgccctgccgcctcctgcctgggatgtgaaccatccctttgtccaacatatccacactgtatatgcaaccctactcacccattagtagccaccttggttatcagatcaactgttgcagggcttctgttcaaggaacctttattttacttaataatggccccaaagtgcaagggtagtgatgctggcatagttacaattgctctattttattaatattattgttaaacaggccaggcgcagtggctcacacctgtaatcccagcactttgggaggccgaggtgggcagatccaaggtcaggagatcgagaccatcctggccaacatggtgaaacccgtctctactaaaatacaaaaaattagctgggtgcggtggctcacgcctgtagttccggctactcgggaggctgaggcaggggaatctcttgaacctgggaggcggaggttgcagtgagctgagatcacagcactgcactccagcccggtgacagagcaagactccgtctcaaaaaaaaaaagaattgttgttaatctcttactgtatctaatttgtaaattaaacattaccataggtaggcaggtagagggaaaaaaccatagtatatacaggggttggtactattccagtttcaggcatctaataagggtcttggaatatatctcctgggataagggtcctactgtactacatatttacttgtttattacttgttaagaaccttgaaaggaagaactttgtcattttgtctgttttgtttactgttgtattatcaatgcttagaacaatgtctggcacacagcacatgatcagtaaatacttgttaaatgaattaaatgatttgatcttatttataggagaagttgtattcaggattctaaacaccaaaatcatcaaagcaatgcaattgttttaaaaaggactcttggctgggtgcagtggctcacacctgtaatctcagcactttgggaggctgaggtgggcagatcgcttgagctcgggagtttgagaccagcctgggcaacatggcaaaacctcgttgctacaaataacacaaaattagcagtgcatgttggcacatgcctgtagtcccagctactcgggcggctgagcccgagaggttgcagtgagctgggatggagccactgcactccagcctgggcaacaaaatgagaccttgtctccaaaaaacaaaagactctttaaaaaaaaaaaaaagtggctgggcgcggtggctcacgcctgtaatcccagcactttgggaggtcgaggcgggtggatcatgaggtcaggagttggagaccagcctgaccaacatggtgaaaccctgtctcaactaaaaatacaaaaattagccgggcgtggtggcattgcctgtaatcccagctacttaggaggctgaggtaggagaatcacttgaactcgggaggcggaggctgcagtgagctgagattgcgccactgcactccagcctgggtgacagaagggagactcagtctcaacaacaacaacaacaacaaaaaagtgacaggaacaagatcatgtcctttgcagggactcagcaaactaatgcaagaacagaaaaccaaacactgcatgttcttacttacaagtgggagctgaacaatgagatcacatggacacagggaggggaacaacacaatggagcctgttagagggtggaatggggggagggggagcataagaaaaaaatagctaatacatgctgggcttaatacccaggtgatgggttgataggtgcagcaaaccaacacagcacgtttacctatgtaacaaacttgcacatcctgtacgtgtactccagaacttaaaaaaaaaaaaggtgaccatttaaaaaaatgatgcatcattataataagtgaagagtagtttgtcatagtatgcagcatgttcaattggtgacacatatatccacatgatatggacagaatagtatacctgtggacactgttggtttgccatccattaggcaacctccacactctgccttcttccttgcttaccaaatggttgatatgctcaagtttagggaggctcctaggtaataagcttgatcagttaaaccagtctgggtaattctatttctcttacctgtacagtcctgtgccctgtaacattttggtaaacaatagaccacatatgcgacagtggtgtcataaaaatataatacagctgaaaaattcccatcgtctagtgacttcttggtgaccttgaccctgtgtaggcctaggctaatgtgtgtaggtgttttagtttttaacaaaaaagtctggctgagcatggtgcctcatgcctacaatcccagcactttggtacatgtctgtggtcccagctacttgggaggctgaggtgggaggactgcttgagcctggtagattgaggctgcagtgagctgtgatcaggccactgcattccagcctgcaatcccagcactttgggaggctgaggcgggaagactgcttgagcccagaagttcgagaccagcctgggcaacatagggagacactgtttctacagaaaatttaaaaattagccaggtatggtggtgcatgtctgtgatcccagctgcttgggaggctgaggtgagaggattgcttgagtctgggaagttgaggctgcagtgagccgtgttcatgccactggactccagcctgggcaagagagtctttaccttgtctttcaaaataaaataaagaataaaaagtacaaaaagaaaattcctttttccacttctggacattagagcaagaagctgccatctagactggtgcagtggctcacgcctataatcctaacactttgggaggccaaggtgggtggatcatgtgaggtcaggagttcaagaccagcctggccaacatggtgaaatcccgtctctactaaaaatacaaaaattagccaggcggtagtggcgtgcacctgtaatcctagctacttgggaggctgaagcaggagaatcgcttgagcctggggaggcagaggttgtggtgagccgatatcgcatcactgcactccagtctgggcaacagagtgagaccctgtctcaaaaaaaaaaaaaaaagaaaaacaaaaagaagttgcgatctagcaaccatgaaagaaaagccaagaggagacaagctaggaccatattgtcgagctgctgcattaaccaacccttcttcttgtaggtgataacaaatgaattggttattatctctatatttacagatgacgaaaccaaggcactgagacaattaagtaacttgtctaaggtcagagtggtagaaccaggattcaaatccaggcagcctggctccagtctttaatctctatacctctccaaagcaagctaactgctacaagaccgctcccaacaagtacaaggacattatgaagtctttctggtaatgcaaaaggtgcttttgatcatttacaggtttcagtaggtgactgcactgtacatatattgctcagtgttgcagtggtacatatatattatgggtttttgtccccataattgcacatccaaaaagactccaaaaaggtattaccaaaaacaggtcgagttaagtccgagacattctgaaaaagcgatccactcctataactcttaaatccaccaggacttaattttgacacacagtaaggggtaaagatggaaaataacttttccccaaagagtaatcacatacaccaagactgtttttgactaatccagaaaaggaagttaatgaatgtactctttgggtcatgcatcccatgcaattttaggataaaacagcaaaataggaaaaacatgtttcttgctcttatgatgcttcctggtgtagtggaacagaaatgacaatgtagcaattccatgtgagatggtcctttgaaagagctaagtacagtgacagctatggactcttacctctaagctgtggtggaagatgtttgatggacagtacctcttgcacaacatactgattcacccctccacttttcaacaactcctctggggataatggcagatggaactcatacatttggggagccattctactcctacaggctcacagggctagaaaccaaacagtgaaaaagtcagggtctatattcaagacctgtcttcgtatctggttctattactttcccatccccaacatatataatggcttttagttttatagcaagctagtaacatcatctggttttgttagttccccacccccaacatatataatggcttttagttttatagcaagctagtaacattatcttacgggatctgagattgaccctggactagaaactaattctagtagtgactttggcacttggtcttgacacttaaacctctgggctttatctgtaaaaacagggttactaaactctgattacttcataaagttgctctgatgatcaaacaaatcaagcagtacgaaggtgtttaaagaactataaagtggcatattaatgtgcaaagtactattatttccatttttatgtgcaaagctccttaagtatagagagaatggtctgatctcgtctgaggccaaaacagtgccccagcatgggctagtgggcttcctgcaccagaatggtaagagcattaacaatgatgatttatttatcctgtgccaagtctgttaggctgtttgcatgtatcatatctgatctaagtatcctaacctcaatcccatgaggtgcataataatacaaatgagtttacagagcggaaattgaagtaagaaagttaagcgatttgcttaacatcttccgttgcggatctgttaagcgatttgcttaacaacttccgttgcggatctgtcagacttacagtttctcacacatcgcgccccagggatatacctactaggcctattgtattttgcccaagactgggtcacactgccatgtactcgactttcctactcttttacgacctgcaacaccacatcttacctggggatctcacccgcggctctgattccggcagtcaggctgaaatgaaaaggaaaaaacacgcgtgcacaacacgcaccaattagcaaggcagttttcaagtcggcggagaatccggccaatccccggcaggcagaggcaaagggccgcctctgagtctggcaacgcgcgggcaaagccacaaataccgagttcaaatctcaacggctgcaggacggccaatcgcgacgcccgccggagcggccggccaatcacagcgccgcccgggggcgggccaaggctccggctccggcccccgctcccacccccggcccgcctgcgaatccctccttggccgcaaggtccccctttgcccagtcggcggggaggaggccgtatttctgctggccagagacgtcgcgtccctggctgggcattcagtcacccccaggaaaggaggcaagtccacgctgggagttagaaggcatcgcctctaatccaggtttcgccatctcctctgctaagtgacgtccagcaagtcacttcactttcaggacctcaaatctcctccccagtagtaaaataggggtaataaaaacagctacagcgcaagactgttgtgaggcacagagaaagggcttggtcattggaagcgggttccaggttctcaaccttcatttccttcacggttgaagggcgccaaagaaagcggaaagggtgaattttcttgaaatctcagttttggggaatcttagcgacgagtcgcggacctcagcttgtccggcgctccaaaacttccggcaggcggaccggaagcactgaggcgggaagggtggtagaggcccctcctgccggaacccggggggcggggcttgtggctgttgcggatggggcgtaggtgggcggtgtgcccacagctrcctgggtaaggcccaagatggctgtcttcgccttagtactcgtgtgaagttggcrgggacggttcctgtcatcttcttgggcttatttggtgtgctgttgaaggggggagactagagaaatggcagggaacctcttatccggggcaggtaggcgcctgtgggactgggtgcctctggcgtgcagaagcttctctcttggtaagtrgctgatgtaggcaccccgataactgcttcgtagtataataggcggctcagattaattccctcccttccscatccccaggtgtgcctagattgatcggtataaggctcactctcccgccccccaaagtggttgatcgttggaacgagaaaagggccatgttcggagtgtatgacaacatcgggatcctgggtaagacttgaccttcgacgtggtacacaatttcagaatggcaattasgctgtracgactatcttttcctcctgtgtagagagtggtactgtgctcaatagtaagagcaaacacttatgtagctgyttacattgtgtttggcactgttctgagtcccctcgtataatttttacttcataagtaaaaataaacartttttccaragttaataaatggcagcatcagaattttaaccccaagcagtctggctccagagtctgtgctattgttctgtactgtaatgtkccttgtctataggtgctgctcagcaagatgcaaccgtgggttgaaagcttagctggtgtaggatgagttctcttgtcttggatctaatgtgttctctcacattacacaggaaactttgaaaagcaccccaaagaactgatcagggggcccatatggcttcgaggttggaaagggaatgaattgcaacgttgtatccgaaagaggaaaatggttggaagtagaatrttcgctgatgacctgcacaaccttaataaacgcatccgctatytctacaaacactttaaccgacatgggaagtttcgatagaagagaaagctgagaacttcggaaaaggctcatctgtcaccctggagaagggaaactgtacttttccctgtgaggaaacggctttgtattttctctgtaataaaatggggcttctttggaatttgatagccacatacttttgttttcctytagatgctgcctctactcatgtagactatgaagtcttgactcatcctagatyttaggatyttaggtttgggcttcacaccacttgccttttacagtctagctatacctaatkcctttaaaaagaaaagttggtgagaatgttattggcgctttttgacataatgctgttatgttaatagtgtttytaaagagccttccacactgaaatgaaatataagagaaaaatggagtcatacttctgtactactctcataaaatatttattaggcatattctctgagtaggaactataggaaaaacaaaaaagtgtgaggtgtcctttccatttaaatatgaaacattaagtaccatatgaatggtagagatggsggatactaagcctgactggtcatcagttttctgggtgttttaacatttcaaaagcctagtcctaacccctaaagattgatcagtagagctgagttgagtctagggcatctatgtgttttgttcttttttaataataatttttaaraattacagctgggcagaatggtgcccacatgtaatcccagcattttgggaggctgaggtgggaggattgcttggagacaggaatttgagactggtctgggcgacatggtgaaactccgtctctactaaaaataaagtggctgggtgcggtggctcctgcctgtaatcccagcaccttgggaggcggaggggggcggaccacgagctcaggagatcgagactatcctggctaacacagccctgtctctactgaaaatacaaaaacaaacaaacaaaaaaattagccaggagtggtggcggacgcctgtagtcccagctactcaggtgtctgaggcaggagaatcacttgaacctgggaggtggagcttgcagtgagccgagatcgtgccactgcactccagcctgagcaacagagcaagactctgtctcaaaaaaaaaaaaaaaaaaaacaacttagctgggcatggttctgcatgcctgtagttccagctactcatggttctgcgtgcctgcagtcccagctacacaagaggctgaggtgggaagatcacctgagcccaggagtttgaggctgcagtgagctgagatcatgccactgcattccagcctgagcaactggggtgagactgtctcaaaaaaaaaaaaaaaaaaaaagtgaagttagggctgggtgcagtggctcacacctgtaagcccaacactttgggaggccaaggcatgaggattgcttgaagccaggagttcaagaccagcctgggcaacatagcaagaccccatctctatattttaaaaaacaaaaactccataaaagtgaagttagattaataaatacttgttgcggggcatggtggttggagcacacttataatcccagctactctgcaggctgaggtgggaggatcctttgaaaccaggagttggaggccagccttaggaacatagcaagaccccatcttcaataaaaataaaaagcacttgttaaattacaagtgggttttggataaatggattgatgggtatatatgaaaacatgatcctgggtcttacggaaatgtttaggagagtcagttttcagaggggtggctggaaggagctatgcataagaatggagaggttgatgtgaaatgtgagtggctgtatactttacatgatttggtggtgctagagtggagaaaataaaatatttgggactctgctaagtgcaaggtgccctgaagaagatatctacatatcctggtagagtatctgattgttagggaagaggaaattagtaggtcaataggcatttatagaatatttcctgattcaaagatacaaaaggttttgttttcaaggacagaacaatcttgtttgtggtatgaaacagtatataacgttttctttgaataaatattgaattattatgtgcaaagatatttggaggaacaaaaatcaccaaggtagggttggttcctacctctaagtagtcttcattctacttaaaagatgtccggtggctcacacctgtaatcccagcactttggaaggcctaggtgggcggatcacgaggtcaggagatcaagaccatcctggccaacatggtgaaacctcgtctgtactaaaaatacaaaaaaattagccaggtatagtggtgtgtgcctgtaatcccagctactcgggaggctgaggcaggagaatcgcttgaatccgggagacagagaggttgcagtgagctgagattgcaccatgcacttcagcctgggcaacagagggagactctgtctttaaaaaaaagaaaaaaaaaaaaaaaaagacgtctgaaggatgtaaagttacaagatggtggaccaatgtgatactctgcagaatgtgcaaatggtccacattttttagattacatcgtgacagagaacagaattaacatagccctgatgaaagaccatgactgtatactgttgttcatcccctccgtggtggactgcttctgaccaacatgctttagaaaagaatgttggttgggcatgctggctcaggcctgtaatcccagcactttggggggccaaggtgggcggatcacctgaggtcaggagttcgagaccagcctgaccaacatggagaaaccctgactactaaaaatacaaaattagctgggcctggtggcacatgcctgtaatcccacctactcaggaggctgaggcaggagaatcgcttgaactcgggaggtggaggttgcagtgagccaagatcgtgccattgtactccagcctgggcaccaagagcgaaactctgtctcaaaggaaaaaaacaaaaaagaaaaggatgttcgccaggtgcagtggctcacacctgtaatcccaacactttgggaggttgaggcgagaggatcagctgagcccaggaattcgagatcagcctgggcaacatggtgaaatgctgtctccacaaaaaaaaaaaaaaaaaaattagccaggcgttggtggcatgtgcctgtagtcccagctgctgtggaggctgggtggaaggattgcttgagccttgggggtcgaggctgcagtgagctgagcttgtgacactgcacttcagcctaggcaacaaagcaagaccctgtctcaaaagaaaaagaaaaagaaaaaagaaaaacaatgtatttgctaaatcagtggtcacaaaccacaaatttgaggctatgttaatctgctccaataaagatatcccatccagcagacaattagcactgggattcccacttggttaaattggcagcagcttcatccagtttatacaggggtaagactggaaaaaagaaaaaaagaagagatgtgtatgtaaacaaaatgtaaatttaaatatgataatgaaagcgagtcccatgagaggtttttttttcttttttttttttgctgagggggatgatcagaaaaggtatttgttgaaaagatggcattagaatgagctcttgaggccaggagcagtggctcatgcttgtaatcccagcactttgggaggccgaggcgagcagatcacttgaggtcaggagttcaagaccagcttggccaaagtggtgaaaccccatctctactaaaaaaatacaaaaaacaaattagctgggcatgatggcacatgcctgtaattccagctactcaggaggctgaggggggaggatggcttgagcccagcaggtggaggtggcagtgagctgagatcaggccactacattctagcctgggcaacatagcaagatcctgcctttaaaaaaaaaaaaaaggaaaaaagaattccacccagtgcaagaggcagatgaagaagcatagttatgaaatccagtatgtcatgacatttaaagtttgttaatagctatgtgtataggtgtggagaggaagagacacctatcttttcctgaggaagcaggaatggggacgagaagggctttagagaagaggtgaccactgagttgtcttaagggagtggaggctagcaggttttccaggcagttgaagcagaaataaaggcctagagtcaagaaacagcatggtgtgcatgagaaagctatgagtggtatttactggtggagctactgcttgtggtaaaagacagggaaagagatgggaagcaagagtcagatcctgaagattgtaatgattattaaaatttagcctttagggggccgggcacggtggctcacgcctgtaatcccagcactttgggaggctgagacaggcagatcacgaggtcaggagatcgagaccatcctggctaacacggtgaaaccccatctgtactaaaaatacaaaaaattagcctggcatggtggcgggcacctgtagtcccagctacttgggaggctgaggcgcgagaatggcgtgaacccaggaggcggagtttgcagtgagctgagatcgcaccaccgcactccagcctgggcgacagagtgagactccatctcaaaaaaaaaaaaatttagcctttagtaaaatggtgcagccactttggaaaattggcagttccacaaaaagttaagtgtagagttaccgcatgacccagtaattccactcctaggtttatacccaagaaaactgaaaacatatgtccacacaaacacttgtacacaaatctccttagcaacattattcataatagctaaaaagaagaaacaatccaaatatccgtcagctggtgaatggatacacaaaatgtggtctatccatacaatagaatatggaatattattattattattatttgagacagagtctcgctctgtcgcccaggctggagtgcagtggcccgatctcggctcactgcgagctccgcctcccaggttcacaccattctcctgccttagcctcctgaatagctgggactacaggcacccgccaccacgcccggctaattttttgcatttttggtacagacggggtttcaccgtgttagccagggtggtctcgatctcctgacctcgtgatccgcctaccttggcctcccaaagtgctgggattacaggcgtgaaccaccacacccaaccagaatatggaatattatttttttaactttctttttaacactccttcctgcacactgacaatggaatattattaagctgtaaaatgaggtactggccagcgtagtggctcacacctgtaatcccaacacttttggaggccaagcgggaggggaggatcacttgaggccaggagtttgagaccagcctgggcaacatagtgagaccctgcctctaaaaaataaaaagaaaaaaatagctgggtaggttggtgagtacctgtagttctggtgagtgcctgtcgtcttagctacttgagaggctgaggtgggaggatggcttgggcccaggagttcaaggctgcagtgaactatgatcacatcagtgcactccagcctgggaaacagagcaagagcctatctctctctctaaaaaaaaaaaaaaaaaaaaaaaaaatagggccaggcacggtggctcacgcatgtaatccctgccagcaacaagaacaaaactctgtctcaaaaaaaaaaaaaaaaaacaacgggtggtggctcacacctgtaatcacagcactttgggaggcagaggtgagcggatcacttgaggtcaggagatcgagatcagcctggccaacatggtgaaagcccatctctcctaaaaatacaaaaattagctgggcatggtggcgggcacctgtaatccccagttacttgggaggctgaggcaggagaatcgcttgaacccaggaagtggaggttgcagtgagccgagattgcgccattgcactccagcctgggtgacaagagtgagactccatctcaaaaacaacaaaacaacaacaacaacaaacccaaaaattagccgggtgtggtggcaggcgcctgtaatcccagctactcaggaggctgaggcaggagaatcgcttgaagccgggaggcagaggttgcagtgagctgagatcgcgccactgcactccagcctgggcaacagagtgagactgtctcaaaaaaaaaaaaaaaaaaaaaaaaaaaaaaaagaaaagaaaagaaaagaaagaaaaaaaaaaggcatcctcttcttgttctaaatcttaaatggaatacatgtctattaaatatttgttatgaatctctagtatataacttttaccaagttaagatatttccttctgttccaagtttaacattcgttttgttttaattatagatttgcattttttaaaattccttttacaatatcaaatgagataatcaaaaagaactaaaacctcatcttttataacaggaatctaattgatttctataaaactgataaagtggctgggtacagtggctcaagcctgtaatcccagcactttgggaggctgaggcgggtggatcacccaaggtcaggagttcaagaccagcctggccaacatggcaaaatcccatctctactaaaaaatacaaaaattagctgggcatggtggtgcatgcgtgtaatcccagctacttgggagggtgaggcaggagaattgcttgaacccaggaggcggaggttacagtgagctgagatcatgccaccgtactccagcctaggcaatagagcaagactccatctcaaaaataaataaataaataaataaataaataaataaatctgata

SEQ ID NO: 7038 - DNA, 54718 bp, Homo sapiens
cgcaagcagaagaagcgggacgctctggccgcctcgcatgagccgcccccagagcccgaggagatcgtaagggtcctggggaggacaccgcgagggggcggagggggagcccgggaggcttcggattgctgggacggcccgtgactgctgcgtccacatctgcagactggccctgtggatgaggagaccttcctgaaagctgcggtggaggggaaaatgaaggtcattgagaagttcctggctgacggggggtcagccgacacgtgcgaccaggtgatgctcctagccgcccctgaccagcctccctgtcagttgccacccccactccgttcggctcctgggtcagcccactgtgagcctatttgagaggaggcaccggtgttctttggatgggtgggtggctggggcgctcagaatgggtgtcccttccccgtacaggaattgacctaaatccttaaacccttttccaacttgaatcacctgcagagcaacaaatgtcacatgtttgtttaggaaagaaagaaaaatagaatcaaataaaaacagaccaggaccagaagatgtgggctcaaatcccatctctctcactcacgagttgtgggacctgtggctgggtcggtgccctctccatgcctcagtttcctcctctgtaaaatggcctacttccctcacaacatgttacggtgatcaaatggaatattaggctgggcactgtggctcacgtctgtaatcccagcactttaggtcaaggtgggaggagcgcttgagcctaggagttcaagaccagcctaagcaacagagtgagaccctgtctctatacatatatagataaagatatagattttttttttttttggtaaaaggaaaaaaggaatattagcacctcagtaactcagtattcactgaatgaatgaagaaactatcaagcatgtgttaagatatgatatttttgtttctcatggtatagtactgtactttttttttttttttttgagacagagtctcactctgtcacccaggctggagtgcagtggcgcaatctcagctcactgcaactttcgcctcttgggctcaagcaatcctcccacctcagcctcccaaagtgttgggattacaggcttgaaccaccactcctggcctatttttttttcatggtaaaacataacgtgaaatgttccactttaaccattttaagtgtacaattcagtggcattaattacattcacaatgttgtgcagccatattttctttttttttctttttctttttttttgagatggagtcttgctctgtcccccaggctggagtgcagcggtgcgatctcagctcacagcagcctccacctcccaggttcaagtgattctcctgcctcagcctcctgagtagctgggattacaggcgcccgccaccacacccggctaatttgtttatttttagtagagacaaggtttcaacatgttggcccttgacaacaagctggtcttgaactcatgatctcaggtgatccacccaccttggcctcccaaagtgctgggattacaggcatgagccaccgtgtccggccccttacagccatattttctaaatttttcatcacccatcatacttctttttgttttgcctgaaactgcctctttcacacttcccggggtgctttcttgctctcgtatcctggaatttggcacattagtggttttccacctttggtctgcattattgtagacttggaccacatgtcctttctgttctttagactccagagtcttcatcctctcagtctgtccaactacctcctacttccgagcaccatgctaggtgccagaatacaaaaaaacaaaaaaagcaaaacaaaacaaaaaaacagaccagggttggttccttggggagactgacatgtaaccagatcattagaataaggaaagatactcactgtgtgtgtcctgtaaccagatcatgagaatatggaaagatattgtggcttgagcgtttcaaaagtccaaggcagaaaggagaaggggaaaagtttattctttctttgaatcagtgatcagtgtcacctgttcatgctggccttgtgctaggcacttggggagtccagcaagacttgacctgccctcgaacacactctcacagttaagggtcatctgggccctagggaagccctggcctagaggtttcaaggaaatgatggcatttgagctgcatcttgaaggagtagcagattttatcaagcactcccaggaagtgagggcaaaacaggcatgcttggcagaggaaaccacctgtagagaggcatggcttgatgtgcctggggggcagtgagaaggtcgggttccctggggcagagggctcccaggctggtctggatagagcataagggagctggcagaacacagaaaacatgggggccaagcacaggggtgagaatcaagctggggggaaggcctgggcctcagcttgggtgggagatgggctcaggcctggagccagaggccaggccctgacagcctctctggggacagttccgtcggacagcactgcaccgagcttccctggaaggccacatggaaatcctggagaagcttctagataatggggccactgtggacttccaggatcgggtgagtgagagggcaggtattcaatgggagacaggaggtgggtccagcactgacagacaccctctccctgccacctgtgccaacctgaagcataaacaggttgctcaggtgccagactccacctcagtggcttatgtgaccttgagtaagccccttctcctccctaagcatcctctgtgagtctggcttggaccagatgggccctgagtgttcttctgttccacttggtccattgcccatgcccaggcctgctccctgtacctttcccctagatatccctctgccttcctggctggggtacattacccccgaatactttcttccctgcagctctgtagttagaccccctcatttctttctagctggactgcacagccatgcattgggcctgccgcgggggccacttagaggtggtgaaacttctgcaaagccatggagcagacaccaatgtgagggataaggtgaggcaaaaacactcagaagcaacagatattggggtggctgtggggagaaaggcaggggtccaagggcaggaaagcctagggggcaggaaggtagtgagctagtctggtttctggctgcagagcagggaagctaaaacagtgtcctactgggcctcccagcccagggatgggtccctgccatccacacaggcccttgaggaaccaccatctgaggataggagcaggaagagcagacaagaagggaagacaagagactcactgtgttgggggctttgggaccactcaaaagatgcaagatttgttcatgttatctgtcattatccttctgtctacctatctattcatctatccgtctatccatccatccattcctccatttattcatcccctcattcatttatttatttatgcaccatccttctattcattcattatttcatgtacaaccttgaacaagtgacagcctctgagcttctgttgctcatctgtgaaatgtcttgcagagttcttgtgtagcttaggtgggaaaacatgtgtaaatgaattatttattcaacataaggcaaatgtcttgtaagcttttgccatgtccattacatagtcatctctcaataaatgacatctattatgattattaaaagaagggtagaagagtgagcagctgggtgagaggagaatcacagaaggcttcccagaggaagtggcatttaaggctttagagttaggccattggataggatggtaagaaattgtaccattctctgcccctccaaggctcaggccttggcactaggacttggaagagggattaagctggagttaggacagcccccgccttcccaggggtaccacagttcaggccccgtcaactagcagttcctgattcctcccacccagctgctgagcaccccgctgcacgtggcagtccggacagggcaggtggagattgtggagcactttctatccctgggcctggaaatcaatgccagagacagggtgagtgctagcctgtccgctgctcacccgccatgggtgtgtgggcagcctgcgggcccctacaggtggtgtccttcctcctggggccttcaggacttggctcctgagcagggtctccagcccacctcccatcacccttgcctcctcccactgcccacaagggccatagtgagtgccacactgactctaggaaggggatactgccctgcatgacgctgtgaggctcaaccgctacaaaatcatcaaactgctgctcctgcatggggctgacatgatgaccaagaacctggtaagctcattccctccttgattcagtcactggcgtgagcactcatacagtggaggtgctgtcctggtccctggagcagcccccgcctagggacatgtatcattggctctggccagcaccatagtacataaacttgtcctcttccagagcaccattccaactgtccgccccattctctatgtgtgtctatgtccagagtgcaagtgcagagagacagcaggaggggcagcaagaggacttcccaaagacccccaagtaggccagagggggtcctcaagtactggcccaaggaggccagaatcatgaaaggccagagctggaagggaccgagcactcagctggcatgacagttcctagcaccccatgtcagctcctgtggtctttgagttttcttaggatctaggcaggaagtccttggaaggggaaggtgcccagggaacaccttggactagggaacacttagtccaagttcttctttggggcccagagcattcacaaaaggaggccatgagagagtccctcgggctcaagaaaggctaaagggataatgagaaaagcaggaaaatatggagaaggtataaatgaggggttttcaccctcagcattattgacatttagggccgggtgattgtttgttgtaggggaccatcctatgccttgtaggatatttaagcaacattcttggcctctgcccactagatgccagtagtacccatcccctagtgtgacaaccaaaagtatcttcacacaatgccagttgcccccatttgagaagcactggtggtgtcaatgagggtaccttctgtgaaagccttcaggacagttaacagattttctcttgccaacccccacgccccgtcccgccccctccaggcaggaaagaccccgacggacctggtgcagctctggcaggctgatacccggcacgccctggagcatcctgagccgggggctgagcataacgggctggaggggcctaatgatagtgggcgagagacccctcagcctgtgccagcccagtgaatgcgtgccccagcccagccagctacccagcccctctctgtgtgcagccggagggtcctaagaatggctcccggagctaactgagggcccagccttttttctgcatgatccaggagcacataccacaaactaccacaataaaaaagctgtttttgctaattgcgatgttcatttccacttgtgtctgaaatctttgggaatgaaggaagactgggggcaaatgctggtttggggaggagggaaactgggagccggttggccctctgagccagccctgcagcttctttactgtggtctcttttcctttcctccctgccactcaacttttcctgccccttctcacatctccagggccaggcttggcccctgcatggattgacttggtaatacactcatcctggcccccttcctggtgcctgctgtcctgtggggctgtgagtggctagcacaggcttgtcacgtggctgccttggcaggaggagcctggtaagggagcggggcaggggatggacagcctgtcacaggcagcttcttgcccagccttgccacacctcccacagggcaggacctgctcagccaatcagctccaccaacctcagaactgcccgtggaaacctggctgggcttctggcttcagagctgggaattgtgggaggagggcccagatcccactggagataccgaaggagatactctttagtattgggatcccagaaaccagtcctatatctggccagagggacactgggttgtggcatctctctagctgctacccagaaggaacagggccccctggggcctataggccttgcccctgaccctgggaacacccagctcaggcctgccccagtggccacaagtcagggaggccgcaaatttttaactagaaacattgatcattaatagggggttagaaagagttcaaactaagtctcactctgggacatagaccaattgtgcttcaggcctcctgcagagatgctgggtccccaagtctggtcttctgtgaggcaggggctaagcaggagcttgtccaggaatgtgggggtctgggcctcaggggaggggaagaaggtggacattgcgggtatctacccccctgtgaccacccccttcactgccactgcagaggtggactatgggaaactggaggagaatctgcacaaactgggcaccttccccttccgaggtaagtggggctgtcctctgtgggacctggggagatgtgagtggccctttagccagagaccaagggagggtacacaggctctgtcaagctgtccagggatagtctggtactcagtgggtcattttattatgggagaggaacaggggagactggtctggagtcaggagacaggcaggaagctccacgctggcctgtaaccttaagctaaacctcacctgcttcagtttacccagctgtaaactgttaaagtgcctttgtagctcccagagtgattctgaggttggactggataatgggcgtgaaagtccttgtcaaccttgtcacttggtgcagatgtgaaggcatgtggctggggtcacgtggcagcccagccacagtcccagttccctccaaagtttgtttgtacattctcttctggacaaagcctccttgccagaattagttctcctgtgaccccttggctcctgtgactcctgttgtggctcctgtgaccccatctctctttacacatgggtctccccaactctgaggttagggaccagatgatatttgcaacaatcaacatgtaacagagtcccaggcacaataaatgaaggtagaagaaaatgtcaaattctgcctgccctgctccgcccatccccattccttactgcacaatcccctgaggcagtgctctctgtaggaccatcccacagatgggaatctgggcctcagagtgacatggtcactgcccarggtcattcggctaacacatagctgagctgaggtttgcacctcgtctgactgcatggcccatgctccattttactccctcgctgactctcattataaaccctttggagctgctaggccacactatttcaacggagtgtctggtcagcactagctttgttgtggctgctattgaggcagtatcgtgtagactgtggactctggtttcaaatcacagctctggagtgagcgcctgtaatcccaacactttgggaggccgaggcggagggatcatgaggtcaggagttcaagaccagcctggccaacatagtgaaaccccgtctctactaaaaatgcaaaaattagctgggcgtggtggtgtgtgcctgtaatcccagctactcgggagactgaggcaggagaatcgcttgaacccgggaggcagagattgcagtgagctgagatcataccattgcactctagcccgggcgacagagcaagactccatctcaaaaaaaaaaaaaaaaatcaaatcacatctctggcactgacttagtgtgggatgattgctgtccctatcggacacatgggagtgataatgctcatattatgggatggttggacaaaaaaatctgagagaatgcaagtgaaatcgtgctataaattgtggagtaatatacattggaaggtactgattccaatggtaataatgattaaaatgacagtgtgattggcattgcagcaaagctgctttgtgactgtgacccctggcctgatggacacgttgatcattcatagctcagtactgagggaatgtgccccttccttggggacaatgaatgccctgtggagggccacgttgagcagggcacaactgttaggtttctgctggtgcttggctcgtggggcctggaggtttggtgaggtcctggttctcttgaagtgagaagcattttgagcctctaagtgaagaccttacttcagcttcaaggttcaaggatgctctagttcagggtggggagggtggactttgcatctggtgtttgcctgacacccagagaatccacagagacccccagactcttctctggaccctcccttctgggccacccacccactcttgcagagggcatggggtgcccaggagcacaggcttccgtggatttagcaggctgtgggctgcacatacccacttgtctgtctccctcgcaacctatgcaggctccagctcccatctgatcactcacccacacaccagagagccagcggggtgtggtaggaagagcccagcatcttgagttagaggacctgggcaagaatcctgccacttctgccagttaacagagaccttggggaaaccacttaacctttcaaatccagtcctcgttttagaataggaactgagccttcaggcttctagccacagggtcaatataatcctcccaaggcactgtcacagaaaacacagagatagagggtcccttccctgcttccagggtgcagccaaaatgcccaggaaggaagacacaaacaactttagctctgaaatctgtgtttctcttgccctgtcctggcccctgaggtagactttgcagcccaacactcaggctgaggagggaacgtatcacattgtaagggcctcctgcagccagttaaaggtcctctgaagaggagatgagggccaggcacagtggmttactcctgtaatcccagcactttgggaggccaaggcaggaggatctcttgagaccaggagttggagaccagcctggccaacatagtgagaccctgtctctattaaaacaaataaataggaggtggaaagctgccctggatgaatcagtgaagagttagagattcttctggaaagcactccctgaaactgtgtagcttttttttttgagacagagtcttgctctgtcgctcaggctggagtgcagtggcatgatttgcctcactgaaacctccgcttcctgggttcaagcgattctcatgcctcagcctcctgagtagctgggattacaggtgcctgccaccacgcctggctaatttttgtatttttagtagagatggggtttcaccatgttggccaagctggtcttgaactcctgacmtcacggtccgccggcctcggcctcccaaagtgctgggattacaggcgtgagccaccgcgctgggcctcttatttatttatttatttttaagatggggtctcagtctgccacccaggctggactgcagtggcacgatctcggctcactgcaacctctgcctcctgggactaaagcaatctgcccatctcagcctcccgagtagctgggaccaaaggtgcacaccactatacccggctaattttttgtatttttagtagagatgggattttgccgtgttgcccaggctgatctcgaattcctgagctcaagtgatctgcctgcctctgcctcccaaaatgctgggattacaggcatgagccaccatgcccggccccgtgtagctctttttaaaaaatctttttagcattgctaatttgtactgattatttgaatagagagtattctttttgttttttctttcttttttttttttttttgtgatggagtcttgctctgtctcccaggctgcagtgcagtggcacgatctcggcttactgcaagctctgccttccaggttcacgccattttcctgcctcagcctcctgagtagctgggactacaggctcccaccaccatgcacggctaattttttktktgtgtgtgtgtatttttagtagagatggggtttcaccgtgttagccaggatggtctcaatctcctgacctcgtgatcgtccgcctcggcctcccaaagtgttgggattacaggcgtgagccacagcgcccagccaagagtattctttttaaataaaaattatgaccagagactagaggaaggggtcattacagaagggctctatggccctgaactcacacccataaacaccctcaaagatggactttgaattgttatttccaaatgaggttagccaaccacagaactagtccagcaggactgggaagatgaggttctccataaaacacttgtgtcctattccttccatacatagagtggaccatgctttcttgcaaagatataatattttgtatatattaaaaccattactctgttaaagaaaatattttgtttaaagcatcacaatgtttacaaccccattttggcatttcttatttttttttaaatgggctagatgcttttgaggggaaaaaaaaatacagtggcccaggcctgtttataccctgagaggccttggagattaattaggcttttagttgtctgcacctatggaaagcctggccagccagcccacctgctcacaacccgaaccatgcctatttatgggggggcaaattctgggtttgtaggtgcctcactaaggcaagaggtagcagctaccatcccggagtggccccagggatctagacccgatgaagtctcctgtccactctgccttctcagcccactgcttgcctctccaccctcagcccattgtgacctcatgttagttactccagaatgagctccttcctgggttcttttccctctgaactctgccctgtagtgaggcgaggggctgcaaatgaggatggaatatgccaggctggcagcagacatgggcactggatggaggtgcactggtctcagatggctaggaatggataccagcccagtcaaggggatcattctgtcatggccagcctgacccagcatactttgccccctgggggccaccagatggggagagagagaaaccaaagactggaagatacaaaggcctaagttgtagaatggattccaagcagaaggcagaaggactcagaattggagaagcagccctttcactgagcctggggacagctgtcagggtaggagacaggacccaggcctcaggcaatgcctgccaggctagacatgagggatgctgcggcctctccccaccccactctccccaccccacccgcaactgccttcctcacaatggggttcattgttgaggtggtggggggcacctagggagggtgcagcagggggcctgcctgtcagacatccttggggagcctgccctttcaagcatgaatcataccaccagagatcacccagcktgctcttagctctgcctgcctggtgtagggtcctggagaccttcttggagctcatccagcagccatcatgcaaggtggtgctggggactgccctcttgctaggaggtggaggtctcatgctgtgggttcagagaaagaggagaagaaaggaaacctctgagtgtccatcagacaaggacaagtcaccagaatcccataaagcaaagaatgaaagctggattaaatcccactttagccgcctttccgaagagaagctggccctcgacaacaatgccagcgctagtggcaatgctacccagactgagagtgggagtgaagaggtcagctccacggttcacatagagaccttcaccacgaggcacggagaagtgggctccgctctgcaccgggaatccttcaccagcaggcagaagacatctgggccctcagtgatccaagagatccaccaggagtctggaaaagccccatccactgatgaggccacgtgggccgctgtggctgcctgcaccaaggagattgacacccaggggcggcacctggctcactccatgctgcagcgggccatagcttaccagcactcaggtcacctagagtccaaggacatcaaccaggaggagctgagggccctcgaggaggtagagatgaagctgcaaaagaatttcctcacccagcgggaaaacaccatagctggtgccaatcacacacacaccttctatggccacagtcaccacagtcaccatggccacccaagccaccagagccacagcctgcctaatcgcagacactagatctgtgacttcttggaagccacctaaccatggatggagacgcccctgcccccagcaaggctggctcacacacacgtctgttttctctcctatggggccatctatgcaggccagggtgagatgctgtgcccaaatccctactttcttaggctcctcacggggattatgggctctttaaactccatgagtggggtctgccacagaagatggcccctgttggagggagagctgggaggacacagcgcaggtgagatagaccctgaggcccctgaagacccaccaagagaagacagatgggagcaggcaagagccccacactgatgtcattgcctggaacggagccaataaagctttgtgtgccttcactctgagtccaggggctctgtgggcagcctaaggtctggcagggatggagggagggggctccctctccagcagtcctctggagtggagtggagaaaaggcccccgacctggggccttttcactgggcctcatttaaagctccataaaacagctaccctggtctcaggttctggaaaaggggtacctctagacgtctcaacacccccaatctgatgttgccagggaagaggggagcagccaggtattgggcttggaggagaaacaggctttcagaggagagtaactaagccaggtgggaatgagggcccctgtcgtcttggtgctatctttgctctcaagtcatgtggcatcctacaaggcagttctctcaccagccccacctgcttcctggggccccttgggatccatgttagtacctccccaccacctaagtctacagctactgagtgagcacaacactttcttcttgtttgtttaacttaatttaatttaatttaatttaatttaattttaagttctgagttacatgggcaggatgttcaggtttgttacataggtaaacgtgtgccatggtggtttgctgcacctatcaacacgtcacctaaggtatttatttagccctgcgtgcattagctatttaacctgatcatcttgggttcttttttttcttttccctttttttcttgttttttatgtatgtatattttgagacagggtttcactcctgctgcctaggctggagtgcagaggcgtgatcacggctcactgcaacctctgcctcttgggttcgagcgatcctcccacctcagcttcccaagtagctgggactgcaggtgtgtggaaccacacctggctaattttttttttttcttttctttcattttgtgtgtgtgtgtgtgtgtgtgtgtgtgtgtgtgtgtgtgtgtgtgtgacagagtctcgcttcattgcccaggctggagtacagtggcgcgatcttggctcactgcaacctctgcctcccgggttcatgcggttctcatgcctcagcctcccgagtagctaaggccaaaggcacacaccaccatgcctggcaaattttttttgtatttttagtagagatggggttttgccatgttgcccaggctggattacagtggtgatatcatagttcactgcagcctcagactcaaactggcaaaattcaaataaagtccttagttaatgacattgtaccagtgttaattctttggttctggtcatcatattatagctaggtaagacattatcattggtggaggctgggtgaaggatgtatagaaaatccctgtacttttttttttttttttttgagacggagtcttgctctgtggcccaggctggagtgcagtggtgcgatctcggctcattgcaagcttcrcctcccgggttcrtgccattctcctgcctcagtctctcgagtagctgggactacaggcgcccgccaccacgcctggctaattttttccatttttagtagagacggggtttcactgtgttagccaggatgktctccatctcctgacttcgtgatccgccagcctcggcctcccaaagtgctgagattacaggtgggagccaccgtgcccagccagaaaatccctgtactatttttgaaacttttctgtaaatctaaaagtaattcaatatttcaagttaaaaaaaaagttttcagacaatttgattatgagtgtgtgtcaaagtttgattatcgttgtaatgcaagcaaaatgacctgtaagcagctaactcaaatatatactcttggtaagaatatttttattaaaaaaagaatggtcaggctgggcgtggtgactcctgtctgtaatccctgcactttgggaggccgagatgggcagatcacttgaggtcaggagtttgtgagaccagcctggacaacctcgtgaaacctcgtctctactaaatatgcaaaaatgagctgggcatggtggtgcccaccttaatcccagctgcttgggaggctgagttgggaggattgcttgaatccaggaggcggaggttgcagtgaacagtgatcgctccactgcactttagcctgggcgacagagtgagactctgtctcaaaaaaaaaaaaaaaaaaaaaagagaatggtcagatcactcactgttaagactacgtaaagacaaagaagagtagttaacagcttctaggctcttgcctgagagttggctgggagggtggctaattttccagatcaagtcttaattccattaaagttcattgggggccgaacacggcggctcacgcctgtaatcccagcactttgggaggctgaggcaggtgggtcatctgagatcaggagtttgagaccagcctggccaacatggtgaaatcccatctctactaaaaatacaaaaaattagctgggtgtggtggcaggcacctgtaatctcagctactcgggaggctgagacagaagaattgcttgaacctgggaggtggaggttgcagtgagccgagaccatgccactgccctccagcctgggtaacagagccagactctgtctcaaaaaaaacataaaaaagaaaaaaataaataaagttcatcacaaaaatgcttaagcatttcatcaggaatgtaatttctttccagagggaggttatgaattatgtcatgcaaaaaactttggccgcagaccagggcagaaaaaaataaagaacttctttttcttttgcacaacaaattgtcaacacacacctcaacacctatgctaggcaccacacaggaggccagaatgcatccaggcaaagtaaggcaagcactgggcaaggaaaacagaatgctgggtagccgacttgagcttgttggcccgcatttggaaggtgttccaggcagaagggaacaacacaagcaagggtgcagagggagggaagtgcagtgtctggggaaccatggcagtcaacttgttttttttttgagaccgagtttcactcttgtcacccaggcttgagtgcagtggcacgacctcggctcactgtaacctctgcctcccgggttcaagcgattctcctgcctcagcctcccgaatagctgggattacaagcgtgcaccaccacgcccagctaatttttgtatttttagtagagatagcgtttcaccacgttggccaggctggtctcgaactcctgacctcaagtgattggcctgccttggcctcccaaagtgctggaattayaggcatgagccactgcgcctggtcttttttttttttttttttttttttgagacagagtctcactctgtcacccaggctaccgatcagtggtgcgatctgggctcactgcaacctccacctcccaggcttaagcaattctcctgcttctgactcccgagtagctgggattacaggtgcgcgcctccatgcttggctaatttttgatttttaattttttttatttttttaagacagagtcttacactgtcacccaggctgcagtgcagtagcccaatcttggctcactgcaacctctgcctcctgggttcaagcaattctcctgcctcggcctcctgagtaactgggattacaggtgcctgccaccatgcccagctaatttttgtatttttagtagagacggggtttcaccatgttggccaggctggtcttgaactcctgaccttgtggttcgcccgcctcggcgtcccaaagtgctgggatcacaagtgtgaaccattgtgcctggcctaattttaawttttttttagtagagacagggtttcaccatgttggccaggctggtctcgaactcctggcctcaaatagtccacccgtcttggcctcccaaagtgctgggattacaggtgtgagccactgtgcctggcccaatttcttattttataggagaggtcagattgaaaaattgtgtctaatcccacacatgggggtgggggtggaggattgaagagttctagggacctttgtagatgggtgctgtccatggggaaatattatacaaggaacaggtaacggaaatgcagagcagggaggcccagtggagagatcccaggaagacttctcagaggaggtggcaatgatgatggactaagaacgcataataatgtctggggacactccttatgtgattctttttagccacagtaagtcaccatgttgcttatgtgtccccagccccaaacgcccactcccctcactgccaccccagctcccagagcagcaagtgtaatcatgggggcaggggagagtatcttcctttgtcttacagctggagggggccttgtacacccactcctaatatcacagtaggtgtacaatgagaggtcattgagagcagcctccccttcaacaccagccaccctcctgatttaaggtttgagcactttctcctgactccataagaatgacagctaacacttattgagcaccaggttctattcgaagtactttataaatagtatctcatttaaacttcaaaacaactctgagaggctgggtgtgatggctcatgcccataatccccagcactttgggaggccaaggcaggcggatcacctgaggccaggagttcgagaccagcctggccaacatggtgaaaccctgtctctactaaaaatacaaaaattagccggcatggtgtcaggtgcctgtaatcccagctactcaggaggctgaggcaggataattgcttgagcctgggagacagaggctgcagtgagccgaggtcgcaccactgcactccagcctgggcaacagagtgagactctgtctcaaaacaaaacaaaacaaaactctgagaaaggcactaatatcatcactattttttaattgagttagcctgggcttctctgacttcagggcctgtgcatctgacccctcttctgtgagccctctgcttttctgctttttccccagtccctgcttcattggagatcctggccttttcctctcctctggccccctctctacactaacagggacacatcaggctcacacctggacatctaaccagggtgaaggaggggctctttggggtacccactcacagatttctgggacattttcttatcctttaaaacagtcctataagctaggattgaaatgatttcactgtcatcccatagaaaaggaaacagactcaaagatgtgatgtgacttgttcaatatccagaggtgactcttgagtctagtgctgccctgactacgccacactccctcttctccagccaggcacttcttccttcttgggagtcaggcatgagtcagttgcccccttcaatgagacagaagagagggctgtgtcatagaagctttgagcacagtgtctgcttctgactcccagagtgcaagcctcagctgtcctgctgtttagaccagctccacctgtagggcccctggaactgaccagcaggatgagaggtgaaggaagagggtgatggtggctgaatcagtggccgcagcaagaacctgccccagcccaggacggcaggcagggttggggaggaagatgactttggtattggaacagagagagtggcaagagtttgatctttgactctttagtcagagggtgctggtccaatcgtagctagattggagtcctcacccagggctggcagcttttacggagagcactgcagccccatgtagcaagacacagggaggcccttccttgggctgctagcctgacacacaggaatcaatcccccagaagcaatcccacaggagcgagaagctgtgtgcctccagacgttccctgcaatgttaccaatgcaaaataactaccaaaaaaaaaaaaaaaaaagcagctaaatatccaatgagagatatcctgatatcctggcaactcactctggaatctgacggtgtagtgaacagcatggaaaaagttggtggaatgaagtggagtctacatcacacagtgtcccctgaaggatgactcacaggaacaatttctcttggtcccagtgccaggaaactctgtgtttctccggggcagttgctttgcttttatcttttgggttctacatgtctgttagctgaccatgtttcccttttagctctggctatcaggaaactccacatcgaatttctggctcatttctcacaactatatggcaggaactttgtataccaatactgcttgtggccttattttcatttccttctcccaaatagcctccaattttttttttttttttgagacagggtcttgctctgtcacccaggctggagtgcagtggcacaatcatagttcactgcagcttcaaatgcacctggtttatttattttttatttttttgtaaagtcagggtctcactttgttacccaaggtggtctcgaacttctggcctcaagtgatccccccatcttagcctcctgaagtgctgggattacaggcccaaatatccttctattaattaagaatcctgttgtattgtactctgtgtttgtaaactactgccattttttttttctttaatggagtgggatagagaggagaaagaagaagaaagagaaagttaagcgggctgggcactgtggctcacctgtaactggtacaggtatactggttagacatatcccaagtaagtgattgataaaaacaggaaaacgcaaaataaagcaatgagattcacttttcacccagaaagttggcaaaaatttgttctgacaataccatgatttggcatgtatgacattctatgctgctcctgaggtctacactgattgattagaaatgtggcgcacagtcaggcatgggggctcatgactgtaatcccagcacttctggaggctaaggtgggaggatcacctgggcccaggaattcgagccagcctgggcaaaatagtgaaactccatctctacaaaaaaaactacacaaattagttgggcatggtagctcatgcctgtaatcctagctggctaagacaggaggatcacttgaaccyggggggctaaggctgccgtgagccgtgattgtgacactgcactccagcctgggtgacagagtgagaccctcaaagaaaaagtaaatacataaaaaatgtgtcacagatgaaggtgcacatagctatgactcagcaattaacacaccaaagtatctgaactctagaggaactcttagacatatgcacagaagactttacagaaaatgtttgtttcagcattgtttgcaatagcaaatagaagaaaacattcttttcttcttttttcttttttggtagagacaggtaggccattttttggtagagacaggcagccatgctgccctgcctggttttgaactcctgggctcaagcgatccacccaccttggcctcctaaagtgctgaaattataggtgtgagccaccaggcccagccaaaagaaggaaacattctaaatgctctcaacaagagaatgacaaataaattgtgttctaaccttacaacagaatactatacagcaattaaaatgaatgaatcagggctacgtgtgcttttatgaacaaagctcaaaaaatagtattaaacaaacagcaaactgcagaaggctatttaagcttaattccatttctacaaggcttaaaattgtaataaccttattacataaggatcacttgagcccagaaggtcgaaactgcagcaagctatggttgagccactgcatcccagcctgggcaacagagtgagaccctgtgtctaaaaaagaaaaatgatgtgaacagtcattgcagctgtgtgggaaccttctgtctgcaaagatgggaaggaaatgtgtgaaagattatggtgtcgtaaggtaggaacaccaatgtcctagttgttcggtagaggatgggaaggagttrgtcagctgtgtctcttgcaggcttcgtggtccagggctccaatggcgagtttcctttcctgaccagcagtgagcgcctcgaggtggtgagccgtgtgcgccaggccatgcccaagaacaggctcctgctagctggctccggatgcgagtgtgagccagaatgccctgggccctgsgggtgggtggatgtgcaggatccaggctcctaggccctagcttgggtcctgtctccttgttctgcctcttytgggacatgctgaggcaccttcgcttggcccagtgtcctggtccaggcctccttctgcctgctctcacctctctccttcctctggcagccactcaagccacagtggagatgaccgtcagcatggcccaggtcggggctgacgcggccatggtggtgaccccttgctactatcgtggccgcatgagcagtgcggccctcattcaccactacaccaaggtgtgtgtgaggcctgagaccaagaggaggctctgcccagggagaggagataagggaagctgggaatagggtggtgcttcacatgaacggcagctataggaaacgggtggactgccaccatggatcagctgcacgacattgggaggcttacctgaccactctgtgttactgctttctcccctctaaaattggaggaatgatgtcatctgtctcatagggttgcagtgagcattaaatgagatcaggaacataaaggccttagaactgtgcgtggcatatggaaagcactccataaatatgacccactgtgattgcttacactcggggcacgtagcatgggagggaggcctgtccaggtggccctgtagtgaagcaggctgggacctgtgggtgggcaagtctctggctcttgggacctggggcggctgccctytcctgyttttctctgcgcccccctccccaggttgctgatctctctccaatccctgtggtgctgtacagtgtcccagccaacacagggctggacctgcctgtggatgcagtggtcacgctttcccagcacccgaatattgtgggcatgaaggacagcggtggtgatgtgagtggcagcagctccggggctggggtcctctcctccttttctgggtcctagcacttttgctcctgagggcagctctgagatctgtttccaaccttggcttctgtgtggattctctctgtcgtgcggrctctctgggactttcttgagggcatctctttgagcacygggctttcattccaccacacttacccggccctcatccaggatgaggctctgggcacagctctcacaccacatttgctgttgcaggtgaccaggattgggctgattgttcacaagaccaggaagcaggattttcaggtgttggctggatcggctggctttctgatggccagctatgccttgggtaggccgcccactgctctcaaattgtcatgggtgaccaagagatacccaggtacctgggtcttccrggagagatcgtgagggctggggctgggtctgcagatggtagtttgccagcctgcccactctgaaaactcagaaacctggccacgccgcttacctgtctgaattcgggatgctgtgagtaaccttgttggctgaaggaggatggccgtgtacaatccctggcctgtagtagggatgcctgcagtttgttctgagtcctgagctccatgattagatgacaaacttagctgctctaatcccaccttgtacatcattctctgagggcagaggccctggggccctcctctgtagttcaggagtccattttcctctcccctgtcccagaccagaatgaattgtcagatctacagagttgagccagggatcttcagttgcctgatcagattctgttccaatccaggatccctaggaatgtcacttagatcaactgctcttgtctgtttggggtcagggtccttgggtttggattagatttgagccctggagggaagggagaagaagggaagctgttcccttcagctgaagccccagtgagtagagatttgagkgacttttccagcactgcaggggagaatgcttgttcctattccatctggtccctccagactttggctggttgtctaggcctttgtacatctcccctgccatgtcatggcctctacggtgaaggggaagaagaagggatccatttctccctcattcctggaagtggagtagattaaaaataaaaaaaaaagcacaggctctggaggctggggggaatctcagctctgcagtttattcactgagtaatgctgggcaaagcaytcacctctctgggcctgagtttctactctgtgtacagagggatcatgaggattagagagcatcagggccatgctgctgtagcgcgcctgggacacatagtaggtattccacaaacaacagctctattagctcattctgaattgcctactctctctacggttttgaggccactgtrcctagggttccactcctatctarccttagaagcatacttacaggcttgcagaagtggcgggggtttctgagatcacagccaaacccattttcattgccccgatgggcacaaagaggactagagagggtctcattcaggtttatgcagtcaatgggaagacatgcctggtgacctgactctgtccagagtgctttccatgcccactgctgtctctggttgcatccactggggggaataaaatttcaaaagagcaaaggcttcccatccgtcctaccctcttacaggactgatgagtcagggggctattggaggaagctggaggtgtcaactgtcagatgggattttattccgggaggggttcagggaaggaaccgtccttgagttcactttcaggctctgctccctgcccctcacagatcagccctgagcagtgcttgacctgcgggattctattttgaatatgcaggcagctcttctctctggaaatgtatactctggactcacagagcatgcctttgatgtagccagccaagtgacatagaaatctgtatctaatgtccccaggctgaagaggtgctgggaccagggcttgggatgcctggaggggagaggctctggctgatgttctgcgtcttacttcgtgcaggagctgtkgggggcgtctgcgccctggccaatgtcctgggggctcaggtgtgccagctggagcgactgtgctgcacrgggcaatgggaagatgcccagaaactgcagcaccgcctcattgagccaaacgctgcggtgagccagtggcagcgggggcgcggcctggcggggggtgggcagtctgtgtcctcattggagcaggacccagggctggcaccaggccccactcagtctcttcctttcagaaaatcctttgagagaacatcccagtgtgggaactccttgtgactcccagaaaatcctgacttcggacaaagtcgagcaccactgattgtcaaacttaagtgtgcattaaaatttccytrggggcgaattaaagttccaacttttgggcccaagaagatgcattgaaacaaacatcctgtgtgattgtgacagagtaaccctaggaccacacttagagatgcctggagagaaagagtgtaaaccaggggmctctaaatccgtgctatcgggggccaggtcctgaaaaaataggaatgactggggctggcaaaggagttagaaggcaggagagtgttgtcttcaaataatcggttctgtgstcagactgtataccccaattctttgttgggcaagcaaaggagaacttcagagagaacgcccatcaagttcagggtcattctgaagtctgaggcaacagaaaaatatgtgcccctgtattcaagttttaatgtacattttatcctttctttccttcgttcctttgttccttccttcctccctccctccctcctttctgtctttctttctctttctctctttctttctttccttctttctttttttagacagagtcttgctcttttgcccaggctggagtgcagcaatctcagctcagtgcaacctctgcctcccaggttcaagcaattcttgtgcctcacactcctgaataacagagattacacgtgtgcaccaccatgcccagctaatttttgtttttgttttcatttttcagtagagatggggtttcaccatattggctatgctggtctcaaattcctggcctcaagtgatctgcccacctcagcctcccaaagtgctgggattacaggcgtaagccacagtgcccggcctattcttttttcttttcttttcttttttgagacatagtctcactctgtttcccaggctggagtgcagtggcacaatcttggcccactgcaacctccgcctccctggtgcgagcaattctcctgtctcagcttccctagtagctgggattacaggcacgtgccaccatacccggataatttttttgtatttttagtagagacggggtttcaccatgttggccaggctggcctcaaactcctaacctcaagtgatcctcctgcctcggcctcccaatcttttttcttttattttttttattttcgaaacagggtcattctctgtcacccaggctagagtacagtggtgtgatgacagctcactgcaacctcaatgtcctgggcttaagcaatctttttaattttttatttttatttttgtagagatgggggtctcactatgttgcctaggctggtctttatctcctgggctcaagcagtcctcccacctcagcctcccaaaatgctgagattacaggcatgagccaccatgactggcctactgtatattttatatttaactttttattttattttattttatttatttattttgagatggagtttcactctgtgcccaggctggagtgcagtggcacaatattggctcactgcaacctctgcccccgggttcaagcaattctcctgcctcagcctcccaagtagctgggattacagatgcctgccaccacacccggctaatttttgtgcttttagtgaagacgggtttcaccatgttggccaggctggcctcgaactcctgacctcatgatccacccgcctcgacctcccaaagtgctgggattacaggcatgagccactgcgcctggccaaactttttatttttagataattatagattcccatgcaactttaagaactaatacaaagggatcccatgtacccatgagccagttttccccaatggcaacatcttacaaaactgtagaataatttcatagtctggatattgaccttgatacagtcaagacacagaatatttctgtccctacaaggatccctcatgtcatcctcttatagccatgcctactcacatttgccttcacaggctccttaacctctagcaaccacacatacattcaccattttataattttgtcagttcaagagtatactatatggaatcacatggtatataacttttggggattggcttttttccactcagcataattctctggatattcatccaggttgtttgttgcatgtatcaatagttaattcctttttatttctgagtaggataccatggtattgccgtaccacagcatgtttatttattatttatttattgagacagggtcttgccctgtcaccggggatgagtgcagtggcaggatcattgctcattgcagcctcaaccccctggctcaagcaatcctcccagcttatcctcccaagtagctgggacaacaggtgcacaccaacacacctggctaattcttttttatttttagtagagacaaggtctcgctatgttgcccaggctggtctcaaactcctggtctcaagccatctttcctcagcctcccaaagtgctgggattacaggcatgagccaccacggctggccccccacagtatgtttaaccattcacctgttgaagaacagctgggttatcttcagtttttggctattaaaagctgccatgggaagggagcagtggctcacacctgtaatcccagcactttgggaggccgaggcgggcagatcacctgaggtcaggagtttgagaccagcctggccaacatggtgaaactccgtctctactaaaaatacaaaaattagctgggcatggtggtgcacatctgtaatcccagctgctcgagtggctgagcaagagaatcgcttgaatgcggcaggtggaggttgcagcgagccaagattgtgccactgcactccagcctgggtgacagagtgagactccgtctcaataaataaataaataaaagctgccatgaacattcatgaacaggttttcgtgtgtccataagttttcatttttctgggatcgatacacagcagtacaaatggtgggtcatagggtagtggtatgtttcattttctgagaaactgctggctgggtgtggtggctcacgcctgtaaccccatcattttgggaggctgaggggggtcgaatgcttgagcccaggagttcaagaccagcctgcgcaacatggggagactgtctctacaaaaaatatagaaaattagatagatgcggtggcatgcacctgtggtcccacgacttgggaggctgaggcagaagggaagatcccttgaatctgggaggttgaggctgcagtgagctgtgattttgccactgcactccagcctgggctacagagtgagatcctgtctcaaaaaaaaaaaacaaaaaaccaaaacaaacaaaaamcaaacccgaaacaaacaaacaaaaacccagaaacaaacctgctaaacctttccagagcagctgtactattttaaatttacactgatgtaaacgtatgagtgatctagtttttctgcagctttgccagcatttgttgtgactattttttattttagccattctgatagatgtatagtacagatgtatggtacaaattaaaaccgtctcattgtggttttaatttgcatttctctgatggctaatgctattgaacrtttttttcatgtatttatttgctatctgtatatccttttcagtcaactatctatatttcttacgcattttgaaattggattgttcttttgactgttgaattttagttctttatagcttctaaatactagtcctttgttagatatgtggcttgtaaatatcttttcccagtctacagcttgtcgtttcattaccttaataggtcttttgcagagcaagttttacattttgatgaagtacaatttatcaacattttcttttacggatcatgcttttggtgtcaagtctaataactcttaaagagttctgggcatggtggctcacgcctataatcccagcactttgggaggccgaggtgggtggatcacgaggtcaggagttcaagacctgcctggtcgagatggtgaaaccccgtctctactaaaaatmcaaaaaaaaaaaaaaaaaaaaaaattagctgcgggtagtggcaggtgcctgtaatcccagctcctcaggaagctgaggcaggagaatcgcttgaactcggagggcagaggttgcagtgagccgagatcatgccattgcactccagcctgggagacagtgagactccatctcagggaaaaaaaaaaaaatcttgaagagttcttagaagatcgtaaagattttctcttatttttttcttttaagttttatagctttatgttttataagtctgtgactcattttgagttaatttttrtataaagtgtaagacttaggtcaaggttttgtgttttttttccctaatggatattcacttgctgtagcatcttttgctgaaaaggccatctttcctccattgaactgcttgcgtgcctttgtcaaaaatcagtggggcatatttgtgtgggtctatttctgggttctctattctttccattgatgtatatgtctatctctctgcaataccacacagacttgactactgtagctaagtcttcaaatcaggtagactgattcctcccactttgttctttttttattccttcaaaattgttttagtctaatttctttaactttccatataaattttacaagaatcttgtttatatctacaataaaatcttgctgggcctttgatcgaaattgcgttaagcctgcataccaatctggggacaactgacttctttactatattgtcctccagtccttgaacatggtacatttctctgtttatttagatcttctttgatttatttcttcagcattttgtagtttccagccaacaagtcctgtacatatttttaaaaactracacctaaggatctggtgcagagtggctcacgcctrtaatcttagcatttttggagatagagacggcagtattgcttgaggccaggagtttgagacccacctgggcaacatggccagaccccatctcttaaaaaaaaaaaaaaaaaaaagacacctctgcactaggatctgtactaggcatctatggacatcctgctgcctggagggtagaagagccccctggctgctccctacacactgcctccactgcattgcctgtgtgtctggcagcaggtggggtgggctctggtggccttttgaagatgagcagtggtgcaagtcctgacttccctccccctggcctgctctgacaccacccagctgggagcgggggtggcagttcagactccttcactcagtctttgctggcctggctggttttcggctggagtagagcagttactgtctgaaagctttccatcttgctaggcaaccccttttctggtcctctggctagagagaactggcttctgttagtgcgtgtattgtctgtacccattggcactgcgtgcttgctgacttcttcagctccaagtctgggccagggtacgtagcactgtgttacttcttgggtctctaggtcccttgttggtcttccttctctctgccttccagagtcttcttatgtcttttatataatgtccagatatatatataattttttatataatgtccagataatatttttatgtaacgtccagagcttttagttgtacttattgggaagaattgggacaagtacatctactccatcttcctgaaagtaaatgctctaagtatttttctaaatggtgatttttttccccctaagaacattaaagtgggtgaaaaaatattgaaaattgagaagtaggtatgttaaaactcacagcactattttaggcttaaatatttcatataccaaaaacatgatttattataattttattttcctggctttaatggaagcaaactcatcaaaacatatttttccaagtctacttctagagaaagaataaccgctaaaaagacaccagcagggcacagtggctcacacctgtaatcccagcaatttgggaggctgaggcaggaagatcatttgagctcaggagtttgagcccagcctgggcaatagagtgagattttgtctttagtaaaaataaatgaaaattagccaggtatgagggtgtgcaactctagccccagctactcagaggctgaggcagggagattgcttgagcccgtgaggtcgaggctgcagtgagctacgatcatgccacttcactccagcctggacaaaagagcaagaccctgtctcaaaaaaagaaatttaaaaaatacaataaataaaaatgaaaaaatacaccaaaaaatacatggggcacacatgattacttatgcatgagccttctatatggtggggcacagctctgttggatcctgtctttatttaaagtttcattcattgtggatattttttgcattaattttgatttttaaaaaatattgcattgaaatattacttattttggctgggcacggtggctcacgcctgtaatcccagcactttgggaggccgaggcaggcagatcgcctgaggtcaggagttcgagatcagcctggccaacatggtgaaaccctctctctattaaaaatacaaaaattagccaggcatggtgttggtcacctgtaatcccagctactcaggagactgaggcaggagaaatcactcgaactcaggaggcggaagttgcagtgagccgagatcgtaccactgcactccagcctgggcgacagagtgggactgtttcaaaaaaaaaaaaattgcattgaaatattacttattttgatgattgagatttttggcctccccttaagttttgcatgcaaggtaagggcctcatgggcctggctgcagtcccaggctgagctaggcactccacaatattttgtttgggtaaagtgatgggtgggctctaragctccctcacagctgtatccttacctcaaaggggcagattaacttagatttacagaaacgacagctgaggaggtaaatctgagtccctctggaggtgaaggtgcttctgagatgggaccttctataaataggttataagaacttgcagaaacgagggccccgttgggcacaggccgtcctgcacatactgaacattccactggggtggggcctctgctctcccactcccagtgcacctctgaaaacgaaggtcccagaacccgcatgccaccgggacaggaaacggagcggcttccagggctcatgggaactggtctaatattagcagtgtttttctcatctggcccttgggacgtctctatggggtaggtgttgttatcactcatttcacagatgaagcagcttgggctgcccctggggaagagtggatgcctagctgtcatcccagatctctgcgtgtcatcccgccctaccccatcctgcctcacccttcattctgtgtcctctcctgtgccagctctgggcacatacccaggaatgcctggaacacctttctgctgcctaggctgtaggctcagacaccccgagaacagcttgatgtcactctattgcccatccctggtcaaacacaatgtccttcctccaccttcccaccagcctgcctcctgcccctggctatatttaggactttctacagtctttgccaccaaccccttcttagggtttgaagaggggccacatcagatatctttggaaacccatggcaggagtgagcttttctctgggcacctcttatttccatcctgtatcctgggtctttcccacctactcaggctttgggtaaaaaggccaggctattagaacatcatgggggtggcgaggcctgcaggagggtggcttaccacccattccragaaaaaaaatccatgcttgataaagcctccgggactctagtggtaaagttattagtcaatctttcatcagtggttcctggcctttttatcccaaacaaccttttatttttatcctcctaaggttttagcttctctccaaataaaactttcttaaggactacttttgtagtttttaggtagtgaaagattcatctaatatttctgatcagcatgaaataaccagttgctataccaaaagcaaggaaatttgatgcttcatttattctgtaatattccatacacgattttaaattataataggccaggcgccgtggctcatgcctgtaatcccaggactttgggaggccaaggtgggcagatcacttgagctcaggagtttgtgactagcctgagcaacatagcaagacctcgtctctacaaaaaatgcaaaaattagccaggcatgctgtcatgcacctgaagtccaaggtgctgtggaggctgaggtgggagaatcgattgagcccaggaggtctaggctacagtgagccatgatcataccactgcactctagcctgagtggcacagtgagaccctgtctcaaaaacataaacataaaataaaaataaataaattattacgggtgcagtggctcatgcctgtaatcctagcactttgggaggccgaggcgggcagatcacttgaggtcaggagtttgagaccagcctggccaacatggcgaagccctgtctctactaaaaatacaaaaataaaataaaataaaacgagcttggtgtggtggcaggtgcctgtaatctcagctactcaggaggctgaggcaggagaatcacttgaacccaggaggcagagattgcaatgagctgagatcaggacactgcactccagcctgggtgacagagcaagactgtctcaaaaaaawaaataaataaaaataaatgaataaattataacaatagctttaggtcccccattatcagggaaaagcctttagagatcatgttgtccagccccttccttttttagacaggagaacttactcagagataataagtaaatgacatacagtttatacaacaaaacttccttgggaaatgatgctttgcttttcctgggagaccatttagtgttagggtcaggaggagctatggggaggtgagggcagccasatgcaaggggagtagaggtctgggctgtgcctgagactctcacagatccttccccttcctgacttcccaggtctggtgtgacctgcgtcaggtttcagggagctgggctgcagactgctgatgctctagtgcctagacctgcagccttgctgtcttctcccaccccagcttgaggaccaaataccactctcctctctgttggagtggatttttctcctaaaaccaaaggaggcactcttcttccccaatctgaagtttttgtattttgctattacagacctgctctctggtctctaaatctggattcccaatgtaccctgggtgccatagagttggcrgttactttcctkggggaagagggtaggacttcaatgttctgaaagtgacagatctccgagttccagatatgggtgttcagcaaatttctcagtctcttctaacaggccctgctttgcaggtgacccggcgctttgggatcccagggctgaagaaaatcatggactggtttggctactatggaggcccctgccgcgcmcccttgcaggagctgagccccgctgaggaggaggcactgcgcatggatttcaccagcaacggctggctctgagggcaggcagggtccatggctggcctgagcccatctcagcctcctgccttgcacytgcagcctgaagcggagagcacagggggatgagggtggcaggyagcggggagccgatagaggctcctttgcctgctgtggtcctccaggcagcctttcacaggcacgcccatgcatatctcctattctaacggcccctgacctctcccttttggatcctaaactgtgtctctggtctgaagactgggaaggagcaatttctcaatttatctttctactgtggatgctttcctacgccctgaggcacatgaagtcagamaggaagggcagaggggcaagtaggcacagtaagggaatttttttttctttttttttttttttgagacagagtttcactctgtcacccaggctggagtgcaatggcatgatctcgcctcctgggttcaagcgattctcctgcctcagcctcccgagtagctgggattacaggcgcctgccaccacrcccagctaatttttgtatttttagcagagatggggtttcaccgtgttggccaggctggtcttgaactcctgacctcaggtgatccaactgcctcggcctcccaaagtgctgggattacagctgtgagccactgcacccggccgggaatttatcaaaggggggactacttagatttggggcttcaaacctgagtctagcacaatgcagctggaggccagggctactcctacaaacccaagttctgactccttccagggaagtatcagcttaagaaacttgatcaggaaagtgacactggtctttcaaagagccctctttaccctcccatccctgccctccacactgcaagctgcattccagccacaacgcccttttctaaatctattttcattcatctcctattctggtctgtagccttgattccaaccattgaatgcacggagacagcccagtggcttgtcagattggtaaataatgacacctggtggataaatgttacattctagaagactattctggtcagcctaggtctgaaacactaaggagacttggcctgagatagggccatccacttgcctacaggcactctgcttttattattaaaaatagtcactttgttactataataaaatttaacagaaaaaattagtgtggctatataaagatggacactctattgctatgcagatcttaggtttcctggccagatgtcaagaacctttctaaaggcaaaagagctctgatggtctgccttctcccagctcgaagagtgtccccagcaatactgagccaacaggcattcacttactggagacctggggaaggggtaagaggcaaaagagagcaagtgagctatttagaaacaaacacttagcacttttattttatttttttgagacagagtcttgctctgtcattcaggctggtgtgcagtggcacgatctcggctcactacaacctctgcctcccagattcaagtgactcccctgcctcaccctcccgagtagctggaattacaggtgttcaccaccatgcccggctaatttttgtatttttagtagagacagcgtttcgccatgttggtcaggctggtctcgaactcctgacctcaggtgatcttcctgcctcggcctcccaaagtgctgggattataggcgtgagccactgcaccccttcagcatcctttttgattaaagtgctaagtgtttagggccaggcagcactttgggaggcggaggcaggaggatcacatgaggtcaagagtttgagaccagcctgatcaacacggcaaaaccccatgtctactaaaaatacaaaaattagccgggcgtggtggcacacgcctgtaatcccagctactcaggaggctgaggcacaagaatcgcttgaacgtgggaggtggaggttgcaatgggccgagatcgtgtcatggcactccagcctgtgccacaagagcaaaactccatctcaacaacaacaacaaaaaaggatgctttctccaaaatatttaacctttttcagtggtaatatttgactagtggcagaaaaatggagatacattgtaaaaaaattactccttaaaagaaagtgtaaggttaaaaagagaggtaaatagatacttgtttagggcagaggctaaaggagagaaaataaaagatctcaatcttcaacccaaaaccaggctctgaatggcactacagcttggggcttagtgcctggggtcctctcacaggcaacttccagaggagcaaggctcagaggagaatcaagtttaggacttgggggaaaagttagggctaggcaggcagggtagtgcactgggtaagagctcagcctctgggcttaaacaggtctgggtttaagttctgggatctgccccttagtgtctatgggaccttggagaaactgcttaacttccctgagcctcatctgtaatacagggataataatagtaccttcctccaacaaggacgtgcatgtaaaagggttagcgtgggggtcaatgttccaccactctcctgttgcagaaaaagggaaactccggcaggagtggacctgccagaggtaacccagcaggtgtggccataactagtctcaggacttaagtactctgatgctcagggtgagagaggtccagtaaagggagctggaatcagaaaggctcggttacaaatctcacccagctgtgctacctactagttgggacagcctgagattgtctgatttaaataagaaaaaaaagttcatacgtcctcctctgtagaggctgagaaaattagatgacttgataaagtgtgcagggtcagttccaagggctaacccgattaacttttacaaacagcaaatgggttgatattcatgaagacgcagggccagaaagtcaggaaaactaggtataggcagttctggtgatttctttattctttataaacacctttttctacagtacaattcagagaataaatagaggcacrcggctataacttccaccacaatctgctgttgaagagacattcaatgtgaggctagggagctagaggtgggggacgtatttgggtaccagggtaacgggaggcctacgtaataaactgcagagatcccatcagtaaggtctgattgcggcctgacggtcaaggctcatgatagaagagctacagtgagccaaatgctcctttagttccccacagtcctagagtaggtccaattctaccaaaaccccaggggttcgggtgagtctgatttattggtccactgggaagaaactgtgtcagcccaagccatccgtatgaattcagttcactccatggtagtgcctgaagtggcctaaatattctacccttttccctggagttagtcacaaatacaagtaataagattactgtttacatgagtttttttcttgattgtcccaaaaagggatcctgttccccatctaaggaaggagagaggcacacatggggattatctgctctaagttgatgaaagaagacagcctgtcttctaaagggaggaggaaatagcactcttaccgaatccttcacggggacataggcaggaatgaataccagtctgatcagaccaagtggaagcctgcagccatgattccaaccagcatgaggagtaacatatggaaaagctctgccagccaggcacagtggctcacacctgcaatcctagcactttggcaggcccaggcaggaggatcacttgagcccaggattttgagatgagcctgagccacatagcaagaccctggctcaattttttataataataaaattaaaggctgagcgtggtggctcacgcctgtaatcccagcactttgggagaccaaggcgggtggatcacgaggtcaggagtttgagaccagcctggccaatatggtgaaaccccgtctctactaaaaaaaaatacaaaaattagctgggtgtggtggcgcgctcctgtagtcccagctactcaggaagctgaggcaggggaattgcttgaacctgggaggcagaagttgcagtgagctgagatcatgccactgcactctagcctgggcgagagtaaaactccatctcaaaaataaaaaataaaataataataataataataaaaaaattaaaaaagaaaagctctggccttgactttcacagggctgctgtactgagccacccctatcttttccctatttctccagagtggcacagagcactggccctaagctggggctaggatcacctgtccccaaagcagcagaacgaaggttctgtatcacttggcagaaaatgaagcagaagggtcacagcaggctacactgggtaacctgaggtcttaggaacagagtatcaaccagtgagaagaggtggctcctctgtcctccagcacataagggttagggaaagacagaaccaccaatgactgctgcagggtctgctggccagcatcctcagcacttttctgtggtccagttctggaatggcaggtgacagggcacatacaaggcctctgctccactgtcattgtcaactcatctcagctctgattcatttgttcacctcgaatcaacaacaggggcactggctttacccaatacttatcagctggtgcccactgcgctgtcaggcagtgagatttctggctgacttggaggcgctctgggcccgctgaacaatggcagaacacttctcacgycgcagcagcttgttgttctcaaagagaccttcattgcgggggattccatgagaaccatcrgggaaagtcagcaggcctttgaggagggcagagaaaatatgggagtgacaatggcattaatgtctcaaagatgagacatatctttggccttgatatgtccaggccaaagaagagaaaaactcccagctctactcaggagtactctattgatgagttcaatggataggtgtcagggacggccactatggattgctggacacccgcaggattaaaactaaacaggtatatttccacccatattatgcccacctaagtcagccatcctgctgggctgcaacttaccaaaaccatctactctgccatttttaaattccccctcaaaggtcatgttgtcatatcgaatgaagactccgacgccattaaacttgccctgggcaaactccccctcatacctgcagaaacaccaagaagttagccttcagtggaaagttagctgtccagatgaacggagtcgagcagctgctgatctctgttatttaatgatgctaaggagcaagccgattctaccagtcacatagctccrcctaccccacctattcccaaggagcagagagtatatatgacatgaagccctgatctcaaggaaagaagataggatgtgaatgggagtggggtggaaagtcactcacttggttgacatttcaaattttaggtccacttaaaaaatagctaataaaagaactacttattmctcatctgtgttctgcagggagtgagacaaggtcaggattgaccagatatttaccagagtcccatttttctgtcagaccctcccttatttaaggctaagaaaggaatgacctcatacccaccttgaaccatctgagaaggtcaataccccaaagccattaaagagcccattctcaaaatgacccaggtaggtgccaccatctgcaaacatcagttgaccaaaaccatgcctgcggcctgaacaaagagaagrataggtgtcaggttggaaggaggcagcttcagggtcccttcttactcttgtagcatcccttacctgccatcaccctacccacaaagaaaacaagagaagcagtgacattagcagggcagaggattattagccagagtcaggcactgggaaaacctggctcctggggccttcccatcttatcactacagattaaagcaggtctacccaagtatgaataagagagcacttaaaaataacaacagctgaccaggcgcggtagcttacacctgtaatcccagcattttgggaggctgagggtggatcacgaggtcaagagatcgagaccagcctggccaacatggtgaaaccccatctctactaaaaatacaaaaattagctgggtgtagtggcgcctgcctgtggtcccagctactcgggaggctgaggcaggagaatcacttgaacccgggaggcagaggtttcagtgagctgagatcgcgccactgcactccagcctgtcgacagagtgagactccgtctcaaaaaacaaacaaacaaacaaaaaaacaactggctgggcgcagtgactcacgcctgtaatcccagcactttgggaggccgaggaggcgggcagatcacctgaggtcaagagttcaagatcagcctggctaacatggtgaaaccccgtttctactaaaactacaaaaaattagccgggcatggtggtggcgcgctcctgtaacccagctactcaggaggctgaggcaggagaatcgcttgaacctgggaggtggaggttgcagtgggccgagatcatgccattgcactccagctcgggcaacaagagcaaaactccatctcaaaataaataaataaataaataaataacaattgctaacatgtgtatttatagtgcctttactatgtgccagcctctcttcttttttttttttttttttttttttgagacagagtctcactctgtcgcccaggctggagcacagtggtgcgatcttggctcactgtaacctccgcctcctggttttaaatgattctcctccctcagcctccccagtagctgggattacaaagtgttgggattacaggcatgagccactgtgcctgccctaaattcttgagccttgagagaaattgtacaggtgkgatgtgaccttggctcctccaatcccaggcatttcttcctggctttcaaatacctggtgtcccctttaatgcggactgttagaggagagacttcctgaggctctgctgggtgggctgtatccaccacaagaactcccttgaattctgtttgaaaggcatgattactcctgcaacatcttgctctgttttctggtcagttcagagagtaagcacagccctgttgttataatgaagctgaaaccagtgctgctaatcaggctgttagatttgcccagtagctttaaggtgctaaatggatactggttgtttttttttttttttttcctcagagaggcaatgtagttagattttgaggacaccgagtcaggctgcctgctgtgtttgccttcttgttctaccacttagagttctgtgatcttgagtaagttacttagcttctccttgcctcaatttccccatctgttaaatgggaataataatagtatgtgcctacctcataaggttgtcatgaggattaaataagatgataaatacaaaatgcttagaagagaggctggcatgggccgggcatggtggctgatgcctgtaatcccagcacttggggaggccgaggtgggcagatcacctgaggtcaggagttcgagaccagcctggccaacatggtgaaaccccgtctctactaaaaatacaaaaattagccagatgtggtggcaggcgcctgtaatcccagctacttgggaggctgaggcacgagaatcgcttgaacccagggggcagaggttgcagtgagctgagattgcaccactgcactccagcctaggcaacatagtgagcgagacctcatctcaaaaaacaaaacaaaacaaaacaaaaacagaagcaaaaaaaagaaagatataactcattcctggaggttgaattaacaatagcattttcaaattcctttatttaatcctaaaatggaataaaggaatggcaggcactatatggaattaaatcctggagttgaaaakgaagatccataaagttggctatatatcctgatgtatttgtcctccagcaaatgaagtgttcatcatggatactccccaggggtccttctcaccctccttccactcgccacgatattcctccccactggagtaggtgaaggaamcttttgtcagggtcatggtgacagattacaggataaaaggatgaaactgtaggaaataagcaaaggagaaccagtgtcatggaatggcgggaggaaaggactgcaaggcaattttatagatacattctaaaggccaccagcctggtaagtgtacactgccttaggtgcatttaaccaaaatacccctatctccaaccaccaccagcaccatcatctccacctctgcccaagtgctcttatcctcctgcttatcttaaaagttttcagccagttcctattttctatgacctgggatggaaatctacaaatattaatctacaaatatttatttgatacctactatgtgctcagtcgatgtataaaatacagtatcttcccttgacgagtttataatctagttaataagactaacaatttaaacactgaattatgccagagataatgtgattaagtgccaacttggatggcagagattaacaaagacatgagatggccagaatttaaaacaagcagacaagcagtggagaaggcaaagagcaattccagaatcagaaaacatagggaacaggccaggggcagtggctcacgcctgtaatcccaacactttgggaggccgaggtgggtgggatgacctgaggtcagttgtttgagaccagcctggccaacatggtgagaccccgtctctactaaaaatacaaaaattagctgggcgtggtggcaggagcctgtaatcctagctacttgggaggctgaggcgggagaatcacttaaacccgggaggcggaggttgtagtgagctgagatcacaccactgttactccagcctgggtgacggagcaagactctgtctcaaaaaaaaaaaaaaaaaaagaaaaaaaaaagaaaatatggggaaccaacactcaaagggcaaggaacactctaagggcaatgtgaacacgagatgttccatggcaaaataagaagcctggtctcattacagttgagggtttatttggggagtattaggaaataagcctgtgtaggtacatgtagccacaatcttaaatttgaagagaggcctggtgcagtgactcacacctgtaatcccagcactttgggaggccgaggtgggaggatcacttgagcccaggagttcaagaccagcctgggcaacatagcaagacctcatgtcaaaaatgtaaaattaaaaaacaaaaaataggccgggcgtggtagctcatgcctgtaatcccagaactttgtgaggccgaggtgggyggatcacgaggtcaggagttcgagaccagcttggccaacatggtaaaaccccatctctactaaaaatacaaaaattagccgggtgtggtggcgggcacctgtaatcccagctactcaggaggctgaggcaggagaattgcttgaacccaggaggcagaggttgcagtgagctgagatcacaccactgcactccagcctgggtgacagagcaagactctgtctcgagaaataaataaataaataaataaataaataaatctgaaaagaatctcatggatttagcccaacctctcattttataggagaaatagaagcccagagaggtaataaagtttgttgacagcctcccctgactatgctagtccttttttcctgtacagcacagcctctgcttttagctcaggctaacttaaagagacctttgaaagctgggcataagagtttacagcatatgagggaggaaaagaggcgacctctgcgggtttgtgaaccaggatgtaatatgaaggcagtgtgtaaggaaaatgaatgtggtagcacgaagtgggatgaattggagcagcaagtccatagtcagaaaagcttgcaaggaagggaaatatgataatgaagcaaattgtaaaaatgggcagagttattctccctccgttcatgaccctacaatgtgacaaggcagatcctcccattaagaggcagagttggccgggtgcggtggctcacgcctgtaatcccagcactctgggaggcggagtgggtggatcacctgaaccagaatggccagcatggagaaatcctgtctctactaaagatacaaaacattagcagggcgtggtggcgggtgcctgtaatcccagctactcgggagactgatgcagaagaactgcttgaactcgggaggcagaggttgcagtaagccaagatcgcaccactgcattccagcctgggcgacagagtgaggctctgtctaaaaaaaaaaagaggcagagtttatttattcctccacctgctggacctgggttggctgtgtgacttgttctagataatggaatgttcgcaaaggtgatctagcagaggtctgcaaagcacctgtgcactgggcttgccctcttgctacacttggacctgttctgcccccatgtaaatgagtccaatctagtctactggatggtgagaccctgtcccagctggccacagatgaacaaattgctcaggcaagactagaagaactgcccttctgagcccggccccaaactagcgaccacagactcacaggataaataaatggttattgtttcaagccactgtgttttctggtggtgtgttattacccagaaaaagctaactgatacgttcaggcatgagtctgggagatcacagtataatgggagcagaaggaacaactggggggatacatcataggaaaacaatcagtaacatttggggactggctagatatggcttcacattagtggtgaaaggatgtattgaaggatattctataagaagggaactgcacggtggctcaaacctacaatcccagcactttgggaggctgaggcttgcggaccacttgagctcaggagtttgagaccagcctgggcaayatggtgaaaccccatctgtaccaaaattacaaaaaatccaaaaattagccgggtgtggtggtgcgttcctgtagtcccagctacttgggaggctgaggtggaaggatcgcttgaacccaggaggcagaagtgcagtgagccaagatcacgccacgacactccagcctgggcgacagagggagaccctgtctcaaaaaaaaaaaaaaaaacggaagaagaagaagagggaattaagataccccccaaaatcattaaatataaacagaggcaaatagtacgtcatttgatagactaaaaaatacaagccctatttcttttttaattccctaggtctcttcattcatcccttcatctttcatttatttatttatttatttatttatttatttatttattttttagagacagggtcttgctctgtcacccaggctagagcacggtggcacgatcatagctcactgtaacctcaaactcctggattcaaggcatcccgtcacctcagtctcctgagtagctgggactacaggcgcacactaccacatctagctacctcctcatcttttccagatctaagcaatacaatgttttctccagtaattttgayaatgcagattcctaggcccaaactcagacttactgaatcagattctgtagtcagagcctgggaacctgcagttttaataagcacatcattagatccttacttcaaagcttgtggcctactgctacaataaatggaaatactgtgtgtgaaaagttctctgaactataaatcactattgaaaagtcctctatcaaccaagcatggtggctcatgcctgtaattccagcactttgggaggctgagcagggacaattgcttgagcccaggagtctgaggctgcagtaagtcatgacagtgccactacagcctgggtgacagagcgagaccctgtccccctccaaaaaaaaagtcccctctgattaataagtaacctagagtctgaccctcaggcatctgactgagttccaacaggacaaggacacattctcctcagagtactggggccagacctggtggagaaacaggaaagaattcttttttcttttagagacagggtctcattatgttacccaggctggacttgaactcctaggttcaagagatcctccaatcccctcttagacttctgagtagctggaactacaggtgcatgccactgctcccagctcaaaacaagacgggattctttttttttttttttctttttttgagacagagtctcactctgttgcccaggctggagtgcagtggcatgatctcggctgactgcaagctctgcctcccgggttcatgccattctcctgcctcagcctcccgagtagctgggactacaggtgcccaccacsacgccccactaactttttgtattttttagtagagatggagtttcaccgtgttagccaggatggtctcaatctcctgacctcgtgatccgcccgccttggcctcccaaagtgctgggattacaggcatgagccaccgtgcctggccgcaagatgggattcttaaatctcgggggcctggcgccaacagctagcttccttttccttcaagtcccagggaagccaaaacctcatccagtcaagatggagttccaaagagtgggttccatagtttcatagcacaaaaggggtctggtatattttatgcaaaagtgatgctttaaatgttcaactaaaacaacccatatgttaaatttgctttctccacattgtcatggtggacagtgctagattatttatatttcaattcaggtggcacaaccctctctaataatcaattgcactaaccccagagaagctgtctgaaatacctttataacagaagctaacatttactgacctcttactgtgttccatcagtgttgtttatttgttttgttttaagagatggggtctcactcagttacccagcctggaatgcagtagtgtgattgtgattagagctcactgcagtctcaaacttctgggctaaagtgatcctcccgcttcatcctctccagtagctgggactagaggtgtgtgccaacacacccagctacttttcaaattttttgttgagatgggtatcgctatggtgcctagactggtcccgaactcctggcctcaagtgattcttcctcatcagcttcccaagtagctgggattactggtgtgagcatcagtgttttttgttttgttttgtttttgagacggagtttcactgttattcttccccaggctggagtgcaatggcgcgatctttgctcactccaacctccgcytcagcctcccaagtagctgggattacaggcatgcgccaccacgcctggctaattttgtattttcagtagagatggggtttcaccatgttggtcaggtgacctcaggtgatcctgacctcaggtgatccacctgccgcggcctcccaaagtgctaagaatacaggcgtgagtcaccgcacacggcatgagcatcagtgtttttaaaatatattatctaatttcatctcacaacaactttttggggtgggtattattattatttccactttagggatgaggaaactaaggtgcagagaggataagtaaattaactaaggtcatacatgtggaaactaacacgtgaaagttagaatcagagctctgacagctggccttgctggcacaagttcttacagtaacttgctaacttataccatactatcctatctggcctcccaggataatatggtggtgttgtagactctgagcacaggaggacttgagttcaaatctgagttcactgtataattatgggcaaggtatttaagtatctctaaatctcagtctcctcatctgtaaagtggagataagatatgtatttcacatagttggcaggtggattaaattaaatatctgagagtcagtgggtgacagaaaagaaaaataaaagaaagaaaatgacacacacgtaagtacctagaacactgctagggcctgtccactaaatgttagtttctttcctctttcaaagttttacacttaaactcacacatatacttactgtaatgaaaacttctctaggtctttcctcagtaaaaactgctaccaatgtaattcaaacaacactttgaaaaagaaaatctcagcaattttgactaaagagctgaatactaagtagaggaaaaacaaactatagttgccacccatccactctttatcaacatcctacaggatatttttattttggcctcatgtcataacgattttttgttttttaaggagacagtgtgtcgctctgttgcccatgctggtgtgcaatcgcttgatcataactcactgcaaccctgaacttgtgggctcaagcaacccttctgccccagcctcccaagtagctaggactataggcacacaccaccatgcccaactaacttttttgtagagaccgtgtcccactatgttgcccaggctaatctcaaactcctagcctcaagcaatctctggccttggcctccgaaagtgctaggattataagcatgagccaccacacccagcctcatgccttttttttttttttttttaaagagaacaagcgggctgggcacagtggctcacgcctgtaatcccagcactttgggaggctaagatggatcacctgaggtcaggagttcgagaccagcctggccaacatggtgaagccctgtctttactaaaaacacaaaaattagccaggcgtggtggcacatgcctgtagtcccagctacttgagaggctgagacaggagaatcacttgaatctgggaggtggaggttgcagtgagccaagatcatgccactggtctccagcctgggtgacagagcgagactctgactcaaaaataataataataataatcataatcataatcataatcataatcataatatgttctgatgcttgttctctctctttttttttttttcttgaaacggagtcttgctctgtggcccagactggagtgcagtggtgcaatgtcggctcactgcaacctccacctcccgagttcaagtaattctcctgcctcagcctctcgaatagctgggatttcaggtgaccgtcaccatggctggctaatttttgtatttttagtagagacagggcttcaccatgttggtcaggctggtctcgaactcctgacctcaggtgagccacccatctcagccttccaaagtgctgggattacaggcatgagccactgtgcccagattttttttttttttttttttttagacagagtttcattcctgtggcccaggctggagtgcaatggtgcagtctcagctcactgtaacctctgcctcccaggttcaagcgattctcttgccccagcctcccaagtagctgggattacaggcccctgccaccacgcccagctaattttgtattttcagtagagacagggttttaccatgttggccaggctggtcttgaactcctgacctcaggtgatcctcccgccttggcctcccaaagtgctgggattacaggcatgagtcactgtgcccggcctgatttttgtttgtttgtttgtttaatggagactggtgctggtgactttgctgagtagcttcagcagagggacctgaacacctttttttttttgttttttgttttttgagacactctcactctgtcacccaggtggaagtgcagtggctcgatctcagctcactgcaaccttcgtctcctgggttcaagcaattctcgtgcttcagcctcctgagtagctggcattacaggtgtgtgccaccacgcctagctactttttgtatttttagcagagacagggtttcaccatgttggccaggctggtcttgaactcctggcctcatgtgatctgcccacctcggcctcccaaagtgctagattacaggcgtgagctaccgcgcccagccagaacataatgatttttgatacagacaccaaaagcccagaaatggtctaatgtgaaaacagctaggcctgaccagagcagggttcaatgacatcttctacgccctggctctgtcccagccatgaggacagacgagttataagaatccctgtgctctcacccaaataagagaaaagattcatttctcgcctaaatgaagggcaaccttgtggagactcttctagagatatttgggggccactcccataggactttctcccttcttcagttatcagtcaagcattccatttccagtatctctcacacagaagatatccgaggcaaggaccattatcttcttgtagtaaactccctccaaacctctgggagctattttctgagacgtgatgctggtacttgccatgtcatctctgtcctatcaatgtcccacaaggtcagcatccaatttcaggctcacaagcctcttatcaccagcccagcatcagagtgtgctggggtagaggccaacatgactccattgcaaatataacattaatgagagcatgagaagtagttttccatcagaatagcagaagaaaacgctttccagtacagacgggcattttgatcaggcaatcctcagctcttcccagaactaagttacagcactaaaagtcagcttatggttgaagtttcattccttcaaaacacatcagttagaatctgaagggctgtatcttccactaaatcttataattaaacaaccattccaaaacctaaacacaaaatcactatttatacaaaaagattataagagcatttcctttagatgtctggcagcagttaaccaacttgttttcactcaaaatttggaaggagttattgcagtgggatttgaggagtcatattgactacacagggactcagggaaagtactgccttgtatttatttactttttctcaaggctacgtgaaacttccaaagagtggcattctaccttgttccagaaggaacagtataagattgctgaaagaagggaacatttctccagtttgagggttatttacggacaaagtactagttttcaagtggtacacctaaccactttttttctttctttttttttttttgagacacagtctcactgtgtcacacaggctgaagtctaatggcatgatcttggctcactgcaacctccgcctcccaggctcaagagattctcgtgcctcagcctcctgagtagctgggattacaggcgtgccagcacggccagctaattttcatatttttagtagagatggggtttcactatgttggccaggctggtctcaaacttctggcctcatgtgatctgcctgccttggactcccaaagtgctgggattataggcatgagccaccacgcccagcccctaaccacttttttagtatgctgttagctcttggggattataccctaaatattttaaggaagccaatgaaactgaaaaggttaccttcttattaccaaatgtggcggactgtatttccaagatgtttgcaacagtatcttctgtcttacatgtttgtctacaatttgatctggccattgatccattaaaaggtgaaatctacctcccctcccttgaatctgagtaggcttgtgactgcttggaccaaaagaacacaatgaaaatgatggtgtgggccgggcgtggtggctcatgcctgtaatcctagcattttgggaggccgaggcggacggatcacctgaggtcggaagttcaagaccagcctgaccaacatggagaaaccccatctctactaaaaatacaaaattagctgggtgtggtggcccatgcctgtaatcccagctacttgggaggctgaggcaggagaattgcttaacccaggaggcggaggttgaagtgagccaagatcgcgccattgcactccagcctgggcaacaagagtgaaactctgtctcaaaagaaaatggtggtgtgttctgaggttagatcataaaaggtgatgcaacttccatcttgtcactgatacactcacacttggagacccgagccaccacataaaaagcctgactacacagaggctaacactgaaagccaagccacacagaaaagccatatattggtgttccagttggctgcccttacctttgaatcatcctatcccacgtaccaggcatcagtgaaggagccttcagatgattccagccctcagccattgagcctgcattccatcccatatcagggagcagagagaggcctccccatggtgccaggtccaaattccctcacccacagaatccatgagcatcatatgggtgttttttttttgtttgtttgttttgttttttgagacagagtctcgctttgtcacgctgggtggagtacagtggtgtgatctcggctcactgcaagctccgcctcccgggttcaagcaattctcctgccttagcttcctgagtagctgggactacaggtgctcgccaccacgcccagctaatttttttttttttttttttgagacggagtcttgctgtctcccaggctggagttcagtggcacgatctcagcttactgcaagctctgcctcccaggttctcgccattctcctgcctcagcctccccagtagctgggactacaggcgcccgccaccatgcccagctaatttttttttgtatttttagtggagacggggtttcaccatgttagccaggatggtctcgatctcctgaccttgtgatccgcctgcctcagcctcccgaagtgctgggattacaggcatgagccactgtgcccggccccggctaattttttgtatttttagtagagatgaggtttcactgtgttagccaggatggtcttgatctcctgatctcatgatccgccctcctcaacctcccaaagtgctgggattacaggcatgagccaccgcgcctggccacagtatgggtgttttaagctgctaaattctggggtactttgttatacagcaataataactggaataccatgtttcaacctaaccctcccaccatcctctcccattggttttcaacagtacatactacaaacttccattccattttgacttaggcacatatagcaaattcccttcagcaaatgcttgccaaaatgatgtccattgccaagaccacagtcagaagtgctaatgaaagggaatgtgtgtagaatccatgagtctcaggccatggttgaatacatttggctagaaactgtcacatgtgcccaaatagttgatattgtcactatttgggacagtgtctggattttatgacttttataattaaccatgctaatgaatagctttacagctactgacctaaaaaggaatttcaccagtaaccatggtcattgagacaaacctagtttaacaaagtatagtcagtgccgatgaagactgaaagcccaatacttttttttttttgaggcagtctggctctgtcatccaagctggagtgcagtggcgtcatctcagccactgcaacctctgcctcctgggcccaagccatcctcccaccttagcctcctgagtagctgggactacaggagcatgccacgacacccagctaatttttgcattttttggtagagacagggttttaccacgttgcccatgctggtcttgaactcctgggatcaagtgatctgcctgcttcagccttccaaagtgctaggattacaggtgggagccaccatgtctggcccaatactttaataagggatgcaaatcagtatttctatcagttatccaaatcatatttttaaagagaatatatggctcaggagtttaggctacagatacacccatggaatccagtcacaaaccaagatgattcacacttctaaacagacactcaccctttctgcactcctgatagatgggttgcaaaggatcagtccaaacatttacataaaagaaaattactattctgtccctgtaaaccaacacactattagtctgcactatataccatattcctggtatcttcattttcttttgtcccagacatttctttttaattattattattttcttatttccaaacagaactctgaggcaataacgagaatttttgtttccgttctttttatcgttttctaattttaagaaatcaacgtattaaacaacatttttgtattcacagtaaactgtgtccaatttaagaggattaaaaaaaaaaaaactgacataaagaggaaaaagggccaggcatgatggctcactcctgtaatcccagcacgttgggaggctgaagcaagaggatcgcttgagcccaggagttcaataccaagctgggaaacgtagtgagacctcatctctacaaaacaatacaaaaatttgctgggtgtggtggtgcatgcctgtagtcccagctactcaggaggctgaggtaggaggattgcttgagcccacaatttgaggctgccggggtgagcagtgactgcaccacacctgtactccagcctgggcaacagagccagaccttgtctcaaaaaaaagaaaagaaaagcaaaacaaaacaaaaggttggggcggtgggggagatccagttagagaatactgggtggaggcagccaccctaactacccacatgtccccccagaaccacccttcccagggtacaatagtcttgtcaaattatttcagtaataaagaaagcagttcataagcttttagaatcctaaagagaagaaaatgaaggctttgatgaacaaagattagccttgttaggaacctagaacaaaaagtcaaataatactccccttttttttttttttttttttttttgagacggagtcttgctctgtcccccatgctggagtgcagtggcaggatcttggctcactgcaaccgccgcctcccaggttcaagcaattctcctgcctcagcctcctgggtagttgggattacaggcacgtgccaccatgcttggctaatttttgtatttttagtagagacgaggtttcaccatcttggccaagctagttttgaactcctgacttcgtgatccacccgcctcggcctcccaaagtgttgggattacaggcgtgagccaccgcgcccggcctaaatatttttttttaagtgttttaaaaggagctcgaaataactgtttttcattataagtctaacctcctctttcctcatgtgaaaagtaaagaaatgtatcgttgctatatgaagggttcgtttagggaagactgtgggatggttagattgaagaaagtgggaagaaaatactggcgccaaaaagatttttttttttttttatttaaaggcgatgatgacctgggggtgattgggactagggagtaatactgccagaatactatcctatttcacgggaaagggaatgccagggctggactccgatatagcagttattcctgctggtacctaagcagttcagagatgctagaatgcagggataccacccatcaactaaatgaagcatcccattccccaggcttccatatgtgggagttctctccaccagtgagataaaggcgggctcagggaaaacaaagccctagaccacaacaaggcaacaccttctcgcaccccattttcaccttccaggcgcgttccttcctgcta

SEQ ID NO: 7039 - DNA, 71553 bp, Homo sapiens
  misc_feature (1)...(71553): n = A,T,C or G, or insertion/deletion polymorphism (see Tables 1-2)
tatacagaaaggacagactgattcttagattcatttggatattataaagattcatattagtcacaacaatgttgaagggaaaaaaagaactaagagcttttctactttctaattttgaaacttaccacacaagctgtagcaatctcaagacagcatggtactagcataaggatagatatatagatcaatggaagaacattgagagtccataaataaatccacacatttttggtcagtttatttttgaaaagggtgccaagaacatttaatggggaaaggataatattttcaacataaatgatgaaaaaaacaaatacccatatgcaaaagaaagattggagttggacccctaacacacattatatacaaaaaattaactcaaatcgattacaaacccaaatgtaagagctaaaataataaaactcctaggaggagacataggtataaatccttgggaccttggattaggcaataatttattaaatatgacatcagaagcacaatgaaccaaaaaatgttttaaattgtattttattaaaactaaaaacttctatgtgtctcaggacgctatcatgcatgaagagacaactcacagaacaggagtaaatatttgcaaattatatatctgataaagatcaaagatccaaaatatgtaaagaactcttacaattcaacaataaaaagataaacaattgaattaaaagatgggcaaaggaattcaacagacattcctctaaagatgatacataaatggtcagtaagcacatgagaatatgctcaaaatcattattcactaggaaaatacaaattaaaaccataaagagatacctctttatatccactatggctatcattctaaaaattaaatatagacagaataacaaatgttgccaaaaatgtggagaaaatgggatgttcatacactgctggtgggaatttaaaatgtttcagccactgtgaaaaatagtctggcagttctgcaaaaagttaaacactgagctaccatatgacccacagattcactcctgtatatattcccccaaaaaatgaaatcatatgctcatgcaaacacttgtatacaaatatttatagcagaattattcacaatagctaataaatgagaataactcaaatgtctatcaactgaggaatggataaacaaaatgtggtatgtccatacattggaatattgttcaatatcgttcactcatgtaaaggaatgaagtactatatatatgctacaacatggaagaactttgaaaacatcacgctatgtgaaagaagccacacaacataggccacatatattatgattctattaatatgaaatgtccaaataggtaaattcataaaaatataaagtagattagtgtttgcagagaatgcacgaattagtatttctacttgttgaaaataggaagtgactactaacatgtatgtagtttcttttgggggtgatggaaatgttccataatttcatagtggtaataattacataacaccatgagcatactaacagccactgaattgtacactgtaatgtaataaatgttatgtaatgggaatttgtgtccatttaaaaattgtaaaaaatagccaactatggaaaaaatttactggttttttttttcagattcaatgttataaatgaaggaaataatttcctttcctgcaaactttattgcacattcattcagattttctctttcactgtcccatttcacattctggaaaaatcagatattttaagacaaaactactcttttcctcatttggaaaacatttgtcctattatcttgcatagacagttatgttttttgtcactactgtttctaccatggcctcaactatacatattagttataacatttaatgaaagaaaataactaacataaaaaaactagaaaagatgattggctactttctttcttatacagtgaatcctaaaatggccttgaaatctggtaccagctcctctatgatgcagtctaagagcagtcttgccctcacagggacctaatgggagaaatgctcacaagtgccctggtaggctgaacttggtcccactgtggatcttaaaacagcactgtatactggctccaggccctctcatctgtgatttgagagcaggcctgcccactcagggacccagtgggacacatgcccattcatgaacccagaggcaggcctgaagacctgggtctcagctgtaggccctgaggcagccctgttacttggttctcttttctctcagctgcaatctggaccagcactgtctgcctaggaacctacccagtgacccagtaggagccctcctaaggacccagaggaagccacattcatccacatatctcgtaactagcctacaatctgtggactctaaagtagaccctcatcccagtgccagacctactgaccaaggtctaggaggcagtccaatttacccagggaacagacagaatctaagcctactagagccccagttaacaggcctgccaaccacagacctcactgttgacccagcaaaaccatgtgacctggctctacctccagttgaccacaattctggaagcaatcttgtcaatcctgggaacccaacaggaggatcctgaggatctttacctgtaaaaccagtctataaagatgggaaaaggtgtttgctccttcagatgcatagaaaccaatgcaaagttacacagataatgatgaaccaggcaaacataataccaccaaaggaaactaatgaagttccagtaactaatctccaccccaaatggagatctacaaatttccccccaaaattcaaaataatcatcttaaagatgctcagtaagatgcaagaaaacacagatagacaactaaataaaattagaaaaacaatgtatgaacaaaatgagaagtttaataaagaaatagaaaccattaagaaaaaacacacaaaaattatataagaacagaactgaatattttaatggagagcttcaacagcaaacacagtcacacaaaagaaagaattagtaacttgaagacaggtcatgtaaatagttaattaaaggtgaaaaaagaaaaaaaattaaagaagagtgaagaaagtataagggacctatggaataccatcaagcatgcaaatacacatattatgggagtcctagaaggagaaaagagggaaatgagcagaaagcttatttaaaggaatactggaagaaaaatgtaaaagctagagtattggtggcaatatggggatacgaaaatcctcatgcactactggtagaattgtggtgtgatgcaaccattctggagagttatttgtcactatttagtcacttaagtacatgcctctcatacaacaatctcactcctgtgtatgcgtcttgcaagaggatttacctgtctcaaagggtatatgtaaaaagatatttatcaaagcattatttcctcatggcaggacaatagagacaatcctgtttttatcattaggagagtggaaacattaaacctcttggatgatcaccaaagagggctatactgtaataaaatgcaattaataaaatacatacatataaacatataaacatgggaggatgttttaaaactagcaataactaaaaagaataagaaacaggcaaggtctttttccaatactctttatataaaataaaaatacacacttaagactttcctttccagtaatggtatacaaggtaattgagaccaaacttcccacttaaattaggaatggttggttatatatatattcactggaggtattgaaaagcaaagactgtgaagaattatgaatccaaagttcagaagcaacatagcaacccaaaggggcaattctgtgtttaagggcactttccccttagggtatttaacagctccagaatatttggctgagagatttagaagcacattttaaagcctttagtaaataaaattgcagcgtctagagtccaaggctcatgaaactggggcaaggagatgttcctgatagaccctttacatattgtgttgagatatcaaactgatggtataattcaaatggtccataaacatatgaaaagatgtgtaaagtcattaataatgaaaattaaggcaagatactgcttcactcatcagattgataaaaagtaaaatgcctagcagagtaaaacgatggtaaatatataataaactgaaaatatccactgttgcagatgggtattcaaatccatgtaatactctgaagagcaatttaccaatctgatagatttcaagatgtacatacatatatagcctataacccaatctctgctatataccctagagaaagtcttgcaaatatgcttaagtagacataccgtatttgtagcagtattatttgtaatgttgaaaactatgaagaatccaaaattcagcactaggggaatagagtaacaggttcggccacattcatacaatagaatgtcgtatagatggtcattaaaattaataaattttatcctcattatcaatgctaataagtcttaaaaccataatagtgatgacatattttacaatatgtgcataccacttatacatataaaatacaaaacacaaaattatgctatatattatttacataaatatggattaaaaacataaacacatcttgaagaatacatatcaacttcctaatcccacaacattggaagggaaatgagattggagagaattacaaaggaaactccaaccatatttgtcttgatttatttctttttttgggttggtggatctggtaaaaactggaaaagcttctagacaaattttaaaagagcgctaccattgccatctttcatttcttaagaagaaatgaccttaaacaaacttggcaagtgtttaattttattaaagttgggtgcatgtaaggtacgagtgtcttttatcttgctctctatatttgtgagtatatatatatataacatttcataatttaaaagaaattatttcattctatgataatgtgacaaaagaaacaaagatgtgaaataaaaactaataggaaggaatccactttcagcagtgtggccaggaatttgctctccaaagaagggatgattaggctgaaatatggagaaagagaaagaaagttgatttaaaaagtttcaagcaatacagtatgtaaacagacaccaatgtctgcagtctaaggatggcattaaatctgctggtggtttatatgtgatcatcattgtactacaagttctatgagagcatggatactgaatatcctgttcaatattgtattttcatcaccagaatagcacttagcacacagtatggctcaaaaaaaaaaatctcagataaagtcaatgacatggtttaagggactcaaacgttagagtgctcagacagtaacaaggacagataggatcaactaagaatctgatcaggtcaatgctgtgaaatagacaagtgtgatctttgataactcctttctaaaatctctttgatcttttatctcttttatctttcattgatcctctactcttgaaatccttattttatatcactttcttccaggaccatgtactcaatcaactgctaaaaaagaaaacccaaaaaccctaaagtctatagttataactcactcagtcccagaaatgaatctgcaatgcatgagctactatcatggtaacatgtccctgacattctttgtcagcatcctttgtcacctgcttgtaaggattttgaaagagatggagaaaggtaggttgaaggttccttatcaggaggtttgctgtcaaagctcattctaaatggaatacaaattttatcttccagacatgcctcagtacctatcagaatttagccttgagaaaaatgaggcaaccactgagagtaatgacccttttagggaatctgtgctcaattctgaactctattcagaggccttggggtggggcttgtttgtacatagtggccacataaagcctggtaaactcagctggtctccagggcgaggctgagggcagagagttggacacaaccctgagatttatccctcacaatgcggaaagacagacttcttcatttatgtcttgtgctacttcttatcctgctttctgccagtgactcaaactctacagaaccgtaagtctcactcaagaccccttcctccagagtgcgtttcagtctctcccttgtgtcttcgctttgccttcctttgtaaatgccacctttccactcattacaataccttccaaatataagaaattattccagttaatcccttgtttgtctttcatttatcctctattcttgaaatcattttttctacactgggccaatcagagtcataaatacgattagtcactaggaagcatgattaaataaaacactagatcccaacttcacagaacagttcttttggatggaaggcactgaatatagagatattcgaaatatatagtgaagtgcaacttaacatgtattgtaggccatatatatatatacagaaagtatagytcctttatttttcaatcatgtatcaagtcttcaccaacagcccccagtgggggaccaaagcagggaaaataattttaaccctatccagttgtaagttggtacaactcaataattgtaagacttcttttccacctctccccagttcctctcctctatagtgtctagagaactgtggtctccattaactcctaatagagaaaactgtcagagtccttggtctcaaagttctccgtccttcttggctactgtcagtctgacttctccttacttgctggcatgcactgttgaagtttagccatctggtttctcttgtgtgttcaggacccaacagtcctctctaactgactgtctcacttcagctgtttcatatcccatagaactcctacctttgcatcctgcctcaaatactatggctattgtttcaacacagcctgtgatgcagggtcaccttgcccctttgcagtccaggccatttaaggtccctggccttaacccagctgcctttacatttcttccagagaatggtgagaactcttgggtccaataatagcacataggcactgaggtgtcctggagaggttaaacttctacctctctcttgcatacccacactgcacttctagatgcctatcgtgtctcctgtattccagactgatacagggaagtcttcagagtcccaaatcgggaaagggataaggggtccctctgctctgtgtgttacccttatccatctaacacaaatagccttcttcaggccaaagcgcagaaagcagaaataaggagttcaatccagtaagtctcctgctttcctcaggctttttccttgcacaatttcctggcaaccggtaggggtacatttctcccccactatccctctacctcatctacagcagtgggctctactacttccagctgctctccatccagaaagcatatgggaatatgtggaggctattttgctttctgagagcagactgaatggataaagcgagtagcgtgtattgggtcagaaacattaagcaatttgtggttctggatgcattcctacactacattggaccatgctgccattgaaaccatccttttacgttgtgtctgccactgaacaaagaacaacaagcctcatgccctagttgtcacaagcagaaggggtgttttctccctttataaggagaaaacttaacttcatccctccagaattaacccttgatgtgataaatgtgagagactacaaargagaaccaatagccattctcccctgccttggggcagtaagcttcagaaagatgaaggtttcaggggaataaaatgaaaaagagaaaattaaaagttatcactttaatatttgctacatttagtccctgctaaagaggcaaatatttaaaatgcaaacattcatgattgagtaaacatatattaaaacattttagcagctcactaccaatgacatcttgggcaagtttgtcaacctggatttgttctgayttcaatatctgttaaaaaaatattaactgaactcatataaaatagttctttagaatatcaaatatatgtggaattaatttttaatcgtgatatcttttaggcttataatttataagaataaaaatagtaaataaattataaatatatatataccttcttattaagatcaaagaactaaaggaaaaattttttgatggggatgtaaaaaatgatacatttttattatttattatgctgttaaaagagcagtgatcaggagatcagaagcatccagataccagaaaaagattaagacataagagactagctgaatgactatcagtgagttactgaactgccctcagcttctctgctagagaacaaaaccttactactcatacagtaaaatcatctgaaacttggatgatttcagagtggccctggagattcatggcatatagttttgcccaggaacactttaaaacacatgtagcaagactggtgtgctggagcagactacatggaggatgaggggaccaaatttgagttccacattccacaactcaattatccttggattctctcctcctagtctcacacctattaattttgtaaagcaacaatattgggtttcttgtgtcaaattgcctgtccagaaaacaatttaaaaagtaagagtttatgttggcaatggaaagtaagggtagtaaaataatayaagaaaataatagtttttacttgcaaatttactctataaatggcctaaccctgcagatattgaatcatgaatcaytgaatcattaaagctttgaagagttacattttagtcacaatttactgattttactgatttggcatgggggcagggattttatccatctgttatggattcaagttttggggactgatgaggatctcatgttttagcttccatgaacatggagagtatcatgcatgtaccttacagcattgctgggaagattaaatggcttaatacagagacagcttaacaattcttgtcatgtggcagatgctcaaaaacagcaacaacaaaaacacattctctttcagcccatgggatttcagagtgtggagagattatattgaattggaggcttctggaaagtgacaggaaaatatggagtggggggcattagagacaaaggacactcatcaataaagctaaggccagaatgtgaggcttacacaaaaaattgcctgtgcctctgaaaaactgaaaactttcaacaatttaaataaaaaagaaaagacttttcaaaataatatgacttttagtactcatataaactttgttttgtttttttttgaaacagggtctcactctgtcactctgaaagcactggtgcaatcatagctcactgtagcctcaacctcgtgggcttaagtgatccttcttgcctcagcctcctgagtaactrctactacagccatgtgccacctggctaaattttttattttaatttttgtagagatgggggacctcacaatgttgygcaggctgttctcaaactcctggcctcaagtgactctcctgcctcagcctcccaaagtgccgggaactaggtataagccacttctcccagcctgaacctgtttgtttttttttattgaaaagataacctatccacccatgtgattcgaaacaaacatgtttataaacatggacatactaatattaaattattaatgttaattgcctcaagaaattgagcataaagggaaatgataataaaatacagtgtgtgtttgtgtagtgtgtgtgtagcagggagttgtgcatgtaaataattgacaaaattttcaaactcgttgataaaatattgactttgactgagctgtatctgaggagcctaagagaaacagcaaatactttttttcagtgttgctgatattaagaaaatgattttgcaatatagacatgtgttattttgtgtaatgatatatgcttactgaagttctttcagttgaatttctgtaaatctagtcacggtgttcattccaaagtgatgtttatctagacagattttaatgtaagtcctttttacaatgaataatcactcccaattttttatatatgtgtgtgtgtttgtgtgcgtgcacttttatggatatatattcaagaattcagattctttttaaaggtcaaagttaaagtttaaagagctcagactgctctttacagcaaggaatgcctgtgaaattgtaacatcttggaaagcaatctccagtgttgtatggctccagattgtgtggctgaggcatggctgatgagtaaaagataaaatttttgtgctgatctgtgacagaacctccattgacttagtccattgacttttagaataaaactgattgcaccaattaatacatattgttatgaaaacacmtttatggrtgaaaacgcttactatcatcagtttttctctaatttagacttcttcctttcccaggcagtatatggtgctggtcccctccctgctccacactgaggcccctaagaagggctgtgtccttctgagccacctgaatgagacagtgactgtaagtgcttccttggagtctggcagggaaaacaggagcctcttcactgacctggtggcggagaaggacttattccactgtgtctccttcactgtgagtgctacggtgccagctggctatccctgcttgatacattttattgagctctataggtcatggtgatggagctctggtgtgcgatcccaaggtatgactttaagaatgtagttaggacttcaggggccaggtgcggtggctcacgcctgtaatcccagcactttgggaagccaaggcgggcagatcacgaggtcaggagatcgagaccatcctggctaacaagatgaaaccccgtctctaccaaaaatacaaaaaattagccgggcgtagtggcaggcgcccgtagtcccagctacctgggaggctgaggcaggagaatggcgtgaacccgggaggcgaagtttgcagtgagccgagatcgccccactgcactccagcctgggcgacagagcgagaytccgtctcaaaaaaaaaaaaaaaaaaaaaaggaatgtagttaggacttcagaaaggactaaaaatagtgagttttcaactattaaggaacaaagcattttttaccagagtaaggaagaaatactcttctaaatttcattcctaaataataatcctattgcccacaaaaatttcatgacttagaggagttttctagttttgattgtaactgtctctttaaggatcgggctggacatttcctagaaatagatcatatgaaaatttcatgataaaaactttgcatgcaacataattttttgcacatgcaggataccctaagcaaacacctagtacctctttaaagttgcctaacttgggaaactcagctcctatgctctcccatattttttcagagatgtttctctccattgcttcagaatatacatactcagttaaaaggcatctaatttaataactagagctctaggtgaactccatggagatctgggttctattgatggccactcttactgataccattcctccatctcacattaatatcgtcactcttatgtctgaagaaatagtcacaccttccttctccttggtgaagctgaaggagagataggaaatagcaatgactgaagaatgcagagggagaagactgcacagttcctcagtagtaaaaaatcctttgctttttagctcccaaggatctcagcctcttcagaggtggcattccttagcatccagataaaggggcctacgcaagatttcaggaagaggaacacagttctggtactgaacacccaaagtctggtctttgkccagacagacaaacccatgtataaaccaggacagacaggtaagtagggaaattccactgtttggggcaacactgagaagggccacctgaacagccaaagtctccattatcctagccccgtagcctcctgtcttattacccaaattacctgctttatcatgtctgaatcttatcggagaactacttttccagtaagattccgtgttgtctccgtggatgaaaattttcgccctcgaaatgaactggtaagcatccactatctgtggtttgggttgtgggtagagtgggaatactcacccagagtgaggtagaaaggtacaagaaaagcgagaggatgaaagacacttgtttttgaacttggctccagcctcagcacagatttgcagtcttatacaaaacaaaaattgagggacaagagatgaggaagttctttctcttataacagtatttaatcagtctggcaatagctgcatttgttactctgaacacactgcattaagaatattaaagaagcatagaaaaaaggcactattcctattcatactttcaaggaatttatgattaaaaaagcaacaaagaattatgcttttatgaatatataggtatatacaatagaccatattataattttattatatattcgatacatatagtatagaaatatattatacacaaagacttttttatgctaattgaatttcccttttttcaacttaccttcaatattagtgcaaaggaacaaagctrcttttaataggtagaaaatagacaatgttgaaattagaagaaatattcttggtttacttkcaaccaaatgattctgggaattctatttctgttaggtctaaatcataatgacatataactctattaatatctatttcccaacttatgaaagtaagcagtatagtcatattattcactaggagaattttagtatccaaataatattaatacttaaagattcaataatatcattcaccaataataattttcagggaaatggcaacacataataataattattgaatatattgtgtatgctcatcctagaactatttaataatttccctgagatttttccagttctgttatgtttcttgttgaatttagctacagataatattcttcctcagtttgttgtttgatcacaagtctgaaattgtagcctttgctggaattctaatcacatctcttctttccttttatcatatagattccactgatataccttgaggtaagtatcagaaaaagtatcttataaggaaattagtgcttttagagrgtaggaggttctgataatactctagacagatgaactactttaaaaawtttcagatctgaattcctcctactcccagttgtcaggttgattgtattttctcttccttctgtatttgtctttccagaggcaatgctaattatcaccttcaaaatcatttgagttgctcaaggactattgtgactaaatgattaccgcccatgtttcttgtttcccttcagaacccaagaagaaatcgaattgcacaatggcagagtctcaagctagaagctggcatcaatcagttgtcctttcccctctcatcagagcccattcagggctcctacagggtggtggtacagacagaatcaggtggaaggatacagcaccccttcaccgtggaggaatttggtatggattatggaagatgaaaaaggcataacattttggttcctagagtgtgagctcacttagatcctttgaatttcctgtagatatgttgaacttgcagtagagtcagacttactgcttctaagaccattaggacggtgtgaacacagaagctcataagagcttgctgattttcagtagcaaattacgctttgccaagtatgaaacttcttgtttcagtgaaaccaccatcatttgttaacgtcactgagacccgctgtgctcaagaagtcagttagattctgcatgaattgttaaaccttaccatcttaaagttgatacattggaaagtaaatctaacattcagagtgttattttgggaaaaattatagacatactgaaattatttgtatttccaataaatgtttaccaaccttccttattcctattatctctattaacagtgcttcccaagtttgaggtcaaagttcaggtgccaaagataatcagtatcatggatgaaaaagtgaacataacagtctgtggagagtgagttacattgtttttatctaaaattttatattttgcctcaattttgagkgattatgtaggtacaaaattataaatttactttgcctcagcacttttgtaatattactcctttgacttctctttatttaacgacttactattaaaattttcaaatacataaaagaayagaaacacacttaattatgatttaacaataaacatctttccgtattgtttcatcatatattttgctttaacatcttaggataaatcacaaagatcatgatatttttctgtacatgcagtagtatgtacctctaaaatacagagacatygtccacttctgcgacaacacgatcacttaacaaaattggaagtaattttccaaaactaattgcaagtttacagtcaagtatcttcaattgtcctaaaaatggtctcataaagctgggtgttcgcacattggttttggttattatgactcctaagtaccttttctttttccaaactctctacaacggaaattttcaatcacgtgccaaagttaacagagaagtaaaacacaatttcatgtacctatcacctatttttaaaattgtaaaatttgccaggttctttttgtcccatttcctcctctacagtagtttttttgctctaatattttaaagcaagccataggaatctataaatatcttagaggtttaaaagtctataacctcctttttttaatgacatttcgctgaagatcatcagttggcctctagaagtcttgcttgcagaatctgcctgtttgttttctcatggaacattgaattaattatgcctaatctttcctctgggcaattttaagaggatacattgaatgttttacattgatctttttgatagaacaattgttcaataaccagaaatagtgcaatggtagaacaaattgtttaataacctgaaataatctctcccccagaaatttccactccaggaaatttcactttctccttttcttcatatgtataccataaatactaatcctgtcattgaggaaggaggatgcgctgatacgatggactaaaaatgtgacagagaaacctaaagatcacaggtcacaattactgggcaaaagccaatgattaggattttatagaagtgacttaaacataatataaatgatccagtgactgatgtcatgattatgaagggtactagactcagaatcggcagtgatgagtgtgcctcccctatcagaacttactgttttcactaggcattctgctgcttctctgtgcctccatctcttaagcagtagacagagggcatgaaccttacctatgaygttcctttccactgttgccctctgtgattacagatacctcttacagttccttttaacctgaagaagcaaaactgatagcctacaaacaaacagtcccagagggagcacgcagggtaaaggaatatgccagcctaaatattatataccagaaacaccaaaacgcctagatctctgcctcatttcagcctcagagcaatggccaaggagttatgtgtccaaattaatagtgccgtagtgcagatatctatatgttggagaagggcttcagaataagctgctttgattctatctttttatttgaagtaatttcagagccatttgcaaataggaaagaaaaccaatgtccaaaacaaaattattgtgtattattctgttacccattatctaatcagagaaaggactaatataacatgtgcacacacacataaccccactaattattttgtatttacatgcctcatgtgttcctaggcttctttttctccctctctctcccttctcttctctgtgcatgtgtgtcagtgcacgtgtgcgtgtgtctgtgcattttgtgttagatttgcttagttattatgtacttatttttattcaattcatcatctacatttgctcacttggtatacagaataagctttgatattattaaaacaaaataaagaagaatgatagaaaataagtaggttaaaaggaagaaacatttttttagtagacagagtctctcacccaggctggagtgcagtggagcaatcttagctcactgtagcctcaaactcctgggcttatgtgaatctcctgcctaaacctccttaagtagctaggactacaggtgcatgtcaccatacccagctaatctttttaaaaagcttgtagagattgggtcctgctatgttacccatgctagttgggaacttttggcctcaagcaatccttcttggcttcccaaagtgttggggttgcaggcatgagccaaagcacctggccaaaggaaaaacatatatatatatatgtttgcatatatatatgactgcactgtaccaccacattctctttgggattaaatatatatataatatatattaatatataatatataaatatgtaatataaatataatatatagataacttatataatatataatataaatatatataatttatatattattaatatttatattatatattatatataattaatattatatattatatattgtataatatataattatatatattatgtattgtataatatataattatatatattatgtattgtataatatataattatatatattatgtattgtataatatataattatatatattatgtattgtataatatataattatatatattatgtattgtataatatatataataattttatattatattatataatataatatataatataatatataaatatataatatatattatatttatatattatattatgtcatatattatatattacattatatattattaatcagtactctaataattaataattattttcaacattatacataatatatttatatataatatattatattattatatattatattattatatattattaagcagtactccaataattaataattattttaattaaacattaaaatataataattataatattatatattaaatatataaaaatatttatataaatatatatattcaatcccaaagagaatgtggtggtacagtgcagtcaagtttcaaaggttttaatggctaatatttttgagggagacattttccagacagctttctacttggtgggcacccagatgataaagatgtgtaggcaactctaaagagggacagttctgtggaggagtggtagtggaaaatgcaaacagccattctcaattcctgatttatttctcatgtaccagatacayttatgggaagcctgtcccaggacttgcaactgtgagcctgtgtagaaaattatctcgtgttcttaattgtgacaagcaggaggtctgtgaggaattcagtcaacaggttagtaggyggtattctccctcagtgctatcactgtttacraccagtgagactccattttactaactagaaagagggcatcaggacaagcttgtcgcaaaatatcccccaccaaaaaacgaatttctgttcttagtcaacaagattctcatttggacgactaactttggaggttacaaagcagatatgagtattaagttctcgaaggtcaattaacttacttaatgcaaaaaaaaaagttttcttgtcattagagacagaatagtagattcagtgactattgatctcaatcagtttgacatttattggttttggtatttttctcagcttaacagcaatggctgcatcacccaacaagtacacaccaaaatgctccagattacaaatacgggctttgaaatgaagcttagagtggaagccaggatcagagaagaggggacaggtgtgagtaatgaacgaatatgggaaataaaacaatagtttactttccataacaaaataaaggtcatttgtaagaaagaaattttatgactaaagtaayttctaaaagtactgactctttatatttttcagacctggaagtcactgcaaacaggatcagtgaaatcacaaacattgtatccaaactcaaattcgtgaaagtggattcacactttagacaaggaatccccttttttgcacaggtaagatatgttgtaatgcacaggtaagcaaagtatccagttgcacctaagcacaggacacaatgatgcagcccacacttggttagtgttatcagttaattaatatgaccaaaaaccatgaaaccaaggagaaatactttcctttctaaatatcactgatgaaacaaacagacacatactaaattattatgagaatcagagataatattttaatatgtagctaataaagatacttaatgtaatgtgacttagttgttatatcaaacctcttctttcatgcagtttagaataaatgatatttctatcatgacctgggcagcatcagaattttcagagtttgtaacatttatggctgtcagtgttctttttatatctgttgatctcttctgacataaataaataagtctttaattttaggcataggtattaaaataacatgcatttcatggttattattattatatttttatatgtttaacttatatattttaacaataataaagccaataaaatattaattttattcatattgataattaattttacctgttttataattagtaaattgagacatttggccaggcatagtggctcatgcttataatcccagaactttgggaggccaaggggggaggatcgcctgaggccaggagttctagatcggccctagtaacatagtaagactctacctctgcaaaaaaaaaaaaaaaaaaaaaaattagcagtgggctggtggcgtgcacctgtagtcccagctgcttgggaagctgaggtgggaggatccctcgagcccagaacttcgatgctgctgtgagttataatggcaccactgcactccagcctgggcaacagagaccagttgtgaaagaaaagaaaagaaggaaaggggaaggaaaaggaaaagaaggaaaaaggggaaggggaaagggaagggccaggggaaggggaagggaaaggaagggaagaaaacattctcatgtgtattttcttagctggtttgttgcaggagataataataacgttagtaactaacatttatggaataattatcgtacaccaaatatcttctaatgtatttttattattttaaattttttaaaaattgatacatcatagtatcaattttggggagtacatgtgattatttaatacattcaaataatttttgaagatccaatcagcataattgagatattcatcaccttaaatatttgtcctttttttgctaaaaattcaaattattctcttctggctatttttaaatcacaacagattattggaaaactatagtcgccctactcctctaatgtatttttaaataattatttaatcttcaatactaccatataaaggaggcacaactattatcccccttttaatgaaggtggaaaactgaagcgcagagaagtaacttttttagctagtagagttcagaacacagccaagcattctagcctccgtctatgcgaaaagggaaaaacagccagtttaaattcatttcttttattcttattccaagtgcatattaagtggcaagttgtagttattaaaaatctccctgactttggccgggcacggtggctcacgcctgtaatcccagcactttcggaggccgaggcgggcagatcacgaggtcaggcgatcgagaccatcctggctaacatggtgaaaycccgtctctactaaaaatacaaaaaattagctgggcggggtggcgggcgcctgtagtcccagctactcgggaggctgaggcaggagaatggcgtgagtccaggaggcagagcttgcagtgagccgagatcgcgccactgcactccagcctgggcgacagagcgagactccgtctcaaaaaaaaaaaaaaaaaaactccctgactttactggaaatactacaaagtttcatagataagctatgtaggacatgaggatccaaatggaaggaaacattttgtcgtaaatatgaaggtttggtggggtttttttgagggggaggttgttgttttagttatagcagcaaaagcatttgttcacatgagttcagtcctctctgggtgttgttcacatcaactatcaagtacttttcttctttaggtgcttctggtggatggaaaaggtgtgcccatccccaataaastcttcttcatytctgtgaatgacgccaattattactccaatgcaaccaccaatgagcagggtcttgcacagttttcaatcaatactaccagtatctcggttaataaactttttgtccgggtaagtatagaaagacaaatctctgaggacaaaggaaatgttaggaacagtgatatattcagaagaaatgtacagattgcatttaagagtaagaaataagaagatatctaactttgagtttacaaatttgaggataatagaatttcatgaaaaacaataaaggcattagaaaaggcactgcagaagtgcctgataatttcactatcattatctgtaacattttatatagtatgaaaaaaatcttatttgatttgggtcgtgaacaatatcagctgcttcagtaattcatgtactttgttttatgttattttttccaggtcacttagaaattttgtaaagtgatcacacacacacacacttaatatacactgtctaatgacgatgatcaaaagatttccctagctaaaaagttttcatgcttgttatctcaaagaagtgataaaagactataatttatggatttcagtgtcgataaataacatatacattatttctgtttctcagtttcacgtgttaactcagtttaaaaacatgtaatgatgtttaatgttttctatgtgatagacactcgctctccctaggatttaaaaggtgactaaatagtgtccctacactttaaaatttcctattttcatggagttaaaagatctgtaaattattagtatgatgtgtttatgcgcaaaaggtttttttaaataggaactttattatgagaccaaatagaagagtccacaaaatatgcctaataaatttagaaaaaaataagtgcactttgaagaaaagctaaggagcagttaccacaagggaaatagaattgtgcgcaaaacattatctgcaaggcttaaagtttcagaartcacataggtcttaaaggttggaagtcacaataatgataagaggcataaatgctaatttactaaggattactaaaaacaattttgaagctcataaggtaatagaatgttttattaatacaaaccctaattttaattaagccaattcatgaggtaattctaatatctgaaaaatcccttttccacttgtttgagttatttatcattctcatttttcctctagttctgaggggcaggaggaaaatgtcaaagtagtaatgagttagcagaatcagggcaaaagagataaatttgtggatgatttccttttaatatttgaatgttgggagactgaaaattcatttatttggctgtcgaccagtatgagggagaggcatagtgtattttagagtggaagacaccgttgtaacyattcattttggtgagaagctaaggtgamgaatttcaagacagtattctttctttgcttttctgtttactcaggttttcactgtgcatcccaacttgtgttttcactattcatgggtagcagaagaccaccagggygctcagcacactgcaaatcgtgttttctccttaagtggaagttacattcacctggagcctgtggctggtaccctgccctgtggccacacggagactatcacggcacactatacactgaatagacaggccatgggagagttatcggagctcagtttccattacctggtaagaatgaggccatggaatacaattgcagcttatcagtaggacaaaagtggtcaataggctcaggaatgtcaaaataaactacttgcacacagccaccttgtgttcttgttgtgcgtccttcattccatgagttttcttgaggytgattctctccagcacagacttgacaactgaaagtgggtcatgtggggaatagaaggctgagaactgtgtccagctcaagaaayttccttcactgttttttcatttcagatcatggctaagggagtcatcgtcagatctggaacccacactctgcctgtggagtcaggagacagtgagtatcctcagattcatctctccttgctcccctaacacatccttacccttccctcggtgacagttcataaatgggaaatcgtttccatcatcccttcacaataaggaggacacgcaggaaaatactcgtcttatgactctttggcattttaaaattcaacagtcaacagataaatgtgattgtctactctgtatcagtcactctgctaaggtacactagtttttcactttagtttgtttcttctaacagcaaaacaaagctcttttcaaaatctaagctgccttctatttatctccacccccaataaagtgtacattgattaaattaacattgcagagaagaaaaaagtaattatcatgggaaatgggaaggaagaaaggtgatagatttttttttcttgtgccaggccatgagtactttatatacgaaattggattcacttcaagaataaattgaggcctggggaaccaagatcgttttctattctaagtcaaataatctagaggttaaaccactgaaaagagaacccgtgaacatttttgtaattaacctaaactaagggaaacattttaccaatttccaccacacccctaagctaaacttaataaccattaggatttgctccatgcctaatattttctatttatgtagtttctcttcctgctaagctggaaaaattaaatattaatttttaatttttatttttcagttttgaaaattgaaacaattttgagaaagttaaaatttatgcattattaatcagtactctaataattaataattattttaattaaacattaaaaactgctgccagttttgaatatcagttttttcccaatactagtgtagaggtagttagatatggagaatggaccccactgtgtacattgttcttcaatttttgttgaataattttcttctaatactggtctatgtatcacattcacagaaataatcaaaggttttaaaacatttatttgattttttcttttataatattccaatttgaattttattcataacaggaagagtctgtatgaaaatctctatatagtaaaatgaggactagttatttaatcatttactttgtgaagatgccacaaaattttattgaaagtagctgagtcaacaattggaaaaaatttctctatatagctaattaaatcataattgtttcatcataaaacaattttaaccacatattttaatagttattaattaccgatttactcttcaccaaagaattatcaaaagcacttacacctctatgataaaagaacaaattttattcacaatttgtctaaattcaactttttaaaacttttcaaattgtccaagttgagcttcctcatattgttctcttttcacactattcttcatactgtccaaattattattacctaaattatttgcctatttaattttcagaattgagattttaaataatgaaatcttctcaaattttattatttattattatgtttaaaacttttattttaggtttgaagggttcatgttcaggtttgttatgtaggtaaactcgtgtcatggggtttgttgtacagattatttcgttacccaggttctaagcctactacccaataattattttttctgatcctctttctccacctaccctccaccctccaataggcctcaatgtcttctgctctccctcctcccgccctccaccctcagataggccccactgtgtgttgtcctctttgtatccattatgttctcatcatttagctcccacttataactgagcacatggaatatttggttttctgttcctacattattttgctaagaatgatagcttctagctccatgtatgctcctgcaaaggacatgatggcgttcttttttatggctgcatagttccatggtgtrtatgtaccacattttctttattcagtcttccactgatgggcatttaggttgattccatgtctttgctactgttcattgcaacagggttgcaatgaacatatgtgtgcatgtgtctttatgacagaacaatttatattcctttggatatatacccagtactgggattcttgggtcaaatgatagttctgtttttagctctttgaggaatcgccacactgctttccataatggctgaactaatttacattcccaccaagagtgtataagcattcccttttctccacaaccttgccaacatctgttattttttgactcttaataatagccattctgactgatgtgagatgataatctcattgtggttttgagttgcatttctctaatattcagtagtattgagctttttttcattggcttgttggccacatgtatatcttcttttgaaaagtgtttattcctgtcctttgcccactttttaatgtggtggtttgttttttccttgtaaatgtgtttaaattctatacagatgctagatattagacctttattggatgcatagattgcaaaagttttctctcattctctaagttgtctgtttactctattgatagtttcttttgctgtgcagaagctctttaggttaattagatcccatttgtcaatgtttgcatttgttgagattgtttttagtgtcttcttcatgaaatctttgcagttcctgtgtccagaatggtattgcctaggttgtcttccagagtttgtatactttttggttttacatttaagtctttaaccaatcttgagttgatttttgtgcattgtgtaaggcggggatccagtttcaatmttctgcctatggctagccagttatctcagcaccatttattgaatagggagtcctttccttgtgtttgttagctttgttgaagatcagatggttgtgggtgtgcagcattatttmtggtctctgcattctgtcccattgatttgtgtgtctgtttttgtacaagtactatgctgttttggtaactgtagccctgtagtatagtttgaagttgggtggtgtgatgcctcctcctttcttctttttgcttaggattgccttggctatttgggctctttttttagttccatatacatttttaaatagttttatctaggtctgtgaaggatgtcrttggtagttttataggaaaaacattaaatctataaattgctttgggcaatatgaccattttcatgatattgattcttcctatctatgagcatggaatattttttccatttgcatcatctctgatttctttgagcagtgttttgtaattctcattgtagagatctttgggcaatatgaccattttcatactgattcttcctatctatgagcatggaatatttttccatttgtttgtgtcatctctgatttctttgagcggtgttttataattctcattgtatagatctttcacctccctggttagctatatttctaggtattttattctttctgtgacaattgtgaatgggattgcttgcattcctgatttggcttttggcttgactgttgttggtgtataggaatgctagtaatttttgtacattgattttgtatcctgaaattttgctaacatcatttttcagcttaaggagctttggggccaacactatggggttttctagatataaaatcatgtcgtctgcaaacagggatagtttgacttcctctcttcctattctgatgccctttatttctttgtcttgcccgattgttctggtgaggacttccaatactgtgttcaataggagtggtgagagaggacatccttgtcttgtgccagtttttaaggagaatgcttccagcttttgcccattcagtatgatgttggccatgggtttgtcatagatggctgttattattttgaggtatgttctttcaatatctagtttattgggagtttttaacatgaagaggtgttgaattttactaaaatccttttctacatctgataagataatcgtatttttgtcattggttctgtttatatgaatgaatcacatttattgatatgcctatgttgaaccaaccttgcatcccagggatgaagtctacttgatcgcggtagctaagctttttgatgtgctgctggattcagtttaccagtattttattgaggattttcrcatcratgttcatcaggaatattggtttgcaaatattttgttgaggatttttgcatcaatgttcatcaaggacgtttggccagactattttttatgtgagtcccacttctcckcatgggggcaaccccacaacctgggactgcagccaccaccaccccacccccatcagggttttcaggctggtagcaactttacatttccctgggacggagctcacagagggtgaggctggctgccattttttccatcttgaagcttccgttgctgtaactttcaggttccgaagagcaagtagtgattagggtgtagcatggatcacctgcacagcacagctgacccactagttctttyagttgtgatgtgaggttaagttgagatctttctaacttttcgatgtggatgtttagtgctataagtttccctcttaacaccgccttagctgtgtcccagaaattctggtgtgttgtatctttgttcttactggtttcaaagaacttcctgatttctgccaaaatttcattatttacccaaaagtcatgcaggagcaggttgtttaatttctatgtaattgtatggttttgagtgattttcttcttattgaattctattttaatcacatggtagtccgagagtgtggagtgtatgatttcatttttctaaatttgctgaggatagttttatgtctgattgtgtgatcggytttagagtagtgccgtgtgcagttgagaagaatgtatgtgttgttgttttgtagtggatagttttgtagatgtctatcagatccatttgggtcctgtgctgagttcagatcctaaatttctgccttgatgatctgtctaatactgtctgtggagtgttgaagtttctcaatattattgtgtgggagyctgagtctctttgaaggtctctaagcacttgttttatgaatctgggtgctcctgtgttgggtgcatgtagattttgtttagttaggtcttctcattgaattaaaccctttaccattatgcaattctcttgtcttttttttttttttttgacctttcttggtttaaagtctgttttgtctgaaattagtattgcaacccctgcttttctctttttctttttttttaaattatactttaagttctgggatacatgggcagaacgtgcaggtttgttacataggtgtacatgtgccatggtggtttgctgcacccatcagcctgtcatctatattaggtatttctcctaatgctatccctcccccagccccccacccccgacaggccccagtgtgtgatgttcccctccctgtgtccatgtgttctcatttttcaacttccacttatgagtgagaacatgtggtgtttggttttctgttcttgtgttagtttgctgagaatgacagtttccagcttcatccatgtccctggaaaggacatgaactcatccttttttatggctgcatagtattccatggtgtatatgtgccacattttctttatccagtctatcattgatgggcatgtggcaacccctgcttttttctattttccatttgcttgacagatttttctcctttcctttatctcgagcctatcagtgtcattgcatgtgagatgggtctcttaaagacggcataccactgagtcttgcttcttcatctggcttgccactctgtgcctcttaattggggcatttagtctgtttacattagaggttaatattgagatgcgtgaatttgaatctgccatcatgttgttagctgtttgtcaacttgtttgtgtaactgctctatagtgtcactggtctgtgtacttcagtgtggttatgtagtggctcgtaatattctttcctttttatattcagtgcttctttctggagctcttgcaagttggatctggtggtaacaaattccctcagcatttccttgtctgagaagcatcttatttctccttcacttatgaagtttagtttggctagatatgaaattcttggttggaatttattttctttaagaatgttggccaggtgcagtggctcatacctgtaatcccagcactttggggggycaaggtggtcagatcatgaagtcaggagatcgagaccatcctggccaacatggtgaaaccccatctctactaaaaatacaaaaattagccaggtgtgatggtgcacgcctgtagtcccagctactcgggaggctgaggcaggagaactgtttgaacctgggaggtgggggttgcagtgagccgagatcatgccactgcactccagcctggtgacagagtgagactctgtcaagaagaaaraaaaaaagaaaagaaaagaaaagaaaagaaatgttgaacataggccccaaatctcttatggcttgtagggtgtctgctaagaggcccaccattagtctgatgggcttccctttgtaggtgacttgtcctttctctctagctacctttaacattttttttttcattcatttcaaccttggtgaatctgatgattgtgtgtcttagggatgactttcttgtgaagtatattttggggttctcttcatttcctgaatatgaatttggcctctctagctaggaggggaagttctcatggatgatatcctaaaatatgttttccaagttgctttcattatgctcatctctttcaaggatatcaaggagttgtagattcagtctttttacataaataatcccagatttctcagaggttttgtttattccttttcattcttctttctttattcttgtctgactgttgtattgcagaaagtcaattttgtggctctgagattctttcctcagcttggtctgttctgctgttaatacttgtgattgcattacgaaattcttgtagactgttgttcagctctgtcaggttggttatgttcttttctatactggctattttgtctgtcagcttctgcatcattttattgtgattcttagcttccttagattaggtttcaacattctcctgaatctcaatgaccttcattcctatccatagtctgaattctatttctgtcatttcagccatctcagcccwattaagaacccttgctggagaactggtgtgattgtttggaggaaagaagatgctctggctctttgagttgtcagagttcttgtgctggttctttctcatctttgcgggctgatgttccttcactcttagaaactgctgttgttttgattttttccttttatcctattcgatgaccttggaggtttgattgtggtataaggtgagttcagtcaactgactttgttaccagaagatttgggggcagtggaggcagggaggagcaaggctcagttcaggactcctggattgcatgctgtaactctggggaactggtatctggctccagctttgttctctggctccttgaggttaagaacatgttgcactgaagggaccaaggtgctcccagaccactggtcacaacacttccatgggtgatgtcagccaaagcactttgcaggatggtagcagtgggatccctcctcattcacatgtaccagcagcatggcagtggcagcgtggtggggtacacgctcatcagctgtggcagggtgctagcaggtgccaggttgctggcctttgtgcaggcattcatagcaatgatcatggcagtatgactcaggggattgggggatccccactagcaactgtgcatgcatttgcactgacggtggtgttagcatgggggtggggcactggtgggtgcaggactgtatgaaccttttgtgtgcattcatactggtggcagtgtctgtacatggctaggggtgggtttgtgtgttttgtgcctagttttgcactggcagctccattgcaggggcagggtgctggcaggggtggggttggcgagcttagtgcctgccaatgctctgatgtcagtggctgtgtggtaggagtaggggtgatggaggacactcacgctgccagcagtggcaaggcagggtgcacacacacacatgtgttggcaaattttattattaaaagctttaatttcctaccactattctttgccataaagtcaccayaattttttttctggttttatgacatttcaatctaccccactttccttgttgaactcaagacagtgataaaagggcttccttccttttagaaggggagcttatttcctttttgaggtctgagctaaaacttgatctgtccaactgaacacaaatatgaatggcataacactgccttaaggatattttaagcttcctttcttcccaaacttaagagctttgcagtataaacacatagtgatataaaayaagtaatgttaagctaaagtcaaatttgcatgaagttggaaaaattccayattctacgtagagttataacaatttttaattgagtgccaccaatctcaggctttaatataatcattttaaaaaagtaaattttggccgggcacattggctgctgcctgtaattgcagcattttgggaggattgcttgaaccgaggagtttgggaccagcctgggctacatagcaagatcctatctctacaaaaatatataaaaaattagccaaacgtggtgttgtgcacctatagtcccagctactggggaggctgaggcagtacaatcacttgagcccagaaattcgaggctgcagtgagctatgattgcaccactgcatttcagcctgggcaacagagcaagaccctgtctcaaaaaaaaattacatttatttaaggtgtacaacataacgttatgggacacatatagataataaaatgactactatagtgatggaaagtaacatggccatcatctcacctacttactcatttgtgtatgtgtggcaagaacagctaaaatgcactcatttgacaaaaatctaaaatatagtaccattttattaactacagtcttcatgttgtgtgttagatagctagccttgttcatcctgatattatactttgtaaaatattcctaagggtattagacttaatttttaatacatatggttaagaaaaaaataaaatcaattatagttcttctacaattctaattgtccttgtcctacattattttgagtttcaacaatgtcgagagactctgttatcctatgtattgtctaactgcaccaagaatatgttactggaaaagaacttggaagcacaggaatttaaagccatatagctgggaatctgggacaggagggatgtagagaaaaggaagacatggaaataataccagagagtatctgtcctttatgtacaggcatctcagaaacttttcagtcattaagtctctcgtggttttataattaccgttattcaactaaatgtgggccatctactcaagtccccagtggaccattcagaaaatggaacttttgttsttgcccttttgtagctacctggtggcccttcaccctgctttaaaatgtaaagtattttctgaagtgttatctggtaccatttaatgcttccagtagaaatataccaatgtacttataagagtttaacactgcaatgaaaactccaagaattaaatattcttttaggaagttcaattagtatgaacttttttttacatacagagctttttaaaagtcatatatgacaaaataaacttattatatcttacaaattatagctctatatttaaattgagaatcacctctagtctgaaatgtaaataaaatagttgtcacatatatatgcagaaaatttggagctactgatatttaattgatttaggcaacagttaagtggaatatcaaataaaaaagatgtgagtgaaaggaactttgttaacttctgctataattaaagttctgaagggagacattggcctactaatttcaccaaataactaatggcacatagagagactaagccattagaatgaatggacgcagttctcaagtggataagaccaagcaatagtgtccttatgacactatttttatgacctttttgtctcacttatgaccattttgtctcacttatgaccattttgtctcactctctccatgttccagtgaaaggcagttttgccttatccttccctgtggagtcagacgttgcccccattgcacgaatgttcatctttgccattttaccagatggagaagttgttggagactctgaaaaatttgarattgaaaactgtctagccaacaargtgagcgatttaacataaaattaaaagaacacaaataaatgatactgtaggtgccatctattttaccccagagaaaactaagtccagaaaagtaaaatgagttgcccaacagttcccaacaagtttatggcagacccaaatttctagggatctagtacagcactttttcaattacacaaagctgctaccaaataaaatacaatcagttttgtgttcatgatgctcttctctgctgattcagttgtgtgagtatgtaaaatgctaagactcaaaagttcccaaaacctgaagaataagtgtaaacacctagaattaccttatcatgtgtcagagataaagatggccatctaaaaatctaacaaggtatctatccttattctgcctcagttatctccttaggacaagactaagctaccgagaagctatattttgttaagattccccacttatgtaatagtcatgtttaaaagagtgagtaaattaatgtgtcgccaaagcattagataatttggatcctgtctaaatagaatcacttttgatcactggagtaggtaagcttgttataaaattaatacttgcaaacataagggaagtcatgtaccttttaacagatctaactatttatgtctctagagttgttgggatctgtgaaagtggtaataartgatttacaaattattttctatttttaaagtgaaggaaagttgtaaaaataggtttctgactgacattaccaacatagtcatatgaactgaatataagggtggcttaggaaatgcaggtgactgcaagatcacagaagtagggaaaacactggttgaygtttccttcatttcccacaggtggatttgagcttcagcccagcacaaagtcccccagcctcacatgcccacctgcaagtagcagctgctccgcagtccctctgtgcccttcgtgctgtggaccaaagtgtgctgctcatgaagcctgaggctgagctctctgtgtcctcagtgagtttccagtggccttggggaccaggaagggccattccagaggctcagatcaagaagcctctattagccctttgtcagatgagtaggttgcgaaaattttctcccattttgtaggttgcctgttcactctgwtggtagtttcttttgctgtgcagaagytctttagtttaattagatcccatttgtcaattttgtcttttgttgccattgcttttggtgttttggacatgaagtccttacccatgcctatgtcctgaatggtgatgcctaggttttcttctagggtttttatggttttaggtctaacatttaagtctttaatccatcttgaattgatttttgtataatgtgtaaggaagggatccagtttcagctttctacatatggctagccagttttcccagcaccatttattaaatagggaatcctttccccattgcttgtttttctcaggtttgtcgaagatcagatagttgtagatatgcagagttatttctgagggctctgttctgttccattgatctatatctctgttttggtaccagtaccatgctcttttggttactgtagccttrtagtatagtttgaagtcaggtagtgtgatgcctccagctttgttcttttggcttaggattgccttggcgatgcggrctcttttttggttccatatgaactttaaagtagttttttccaattctgtgaagaaagtcattggtagcttgatggggatggcattgaatctgtaaattaccttgcgcaccagcatggcacatgtatacatatgtaactaacctgcacaatgtgcacatgtaccctaaaacttaaagtataataaaataaataaataaataaataagcctctattgagagtaaaatataacagtaaaaatacgtaccacttgccgagtacttgatagtttctcaagctgtctcatataggttttctcacttaatctgcccaacattccrgagaataatagtcccattttaagattagaaaagtggattcagaatagttgagagatttgttcaagataagtggcacaagctgagatgtgattttgaaattctgaatctgcctgcaactttgattccttctatgacacagcttctatttctgtaaagaatcaaatcttaacctcagttattaatgtcttacagtgatcttaatgaaagctatattttgttaagattccccacctacgtgatagtcatgtttaaaagagtgagtaaattaatgtgttgccaaagtattagtttggatcctgtctaaatagaatcacttttggtcactggagtaggtaagcttgctacaaaattaatacctgcaaacataagggaagtcatgtatcttttaacagatcgaactatttatgtctgtagagttgttgggatctgtgaaagtggtaataagtgatttacaaattattttctacttttaaaaaatgacctactacacctttgttagcaatgttgattcacagactaaaattttaattatctgcttttgactatagttatattaattcatgggggtgacacttggcatgtcgtgatgatttatttattttattattattatttcaagcttactacatgctggatctattgtaaaagctggggaaacagaaggaaacatatcacagtccttgtccttagagagaggcaataaaaaaggatataggtggatcagcaaaataaaaggtgaacattggttaataattgccatttggagaaaatgatatctaatatggggtttttgaagaataattatcagaaggaagggaaaagttcagaaactacttgtctaacctatttaaaactagattactcgtgtttggaactttttaacataatgcaagaaaaaataatgttatgatttgatctttgataaaaagttatgagaaattttatagctttaactccctcatgaatcaccatttaaaagggtcaatcaacttatctgtttgggaggtattattacctttcaatgttggttggtaaattcgtaatatgaaattttcttttgtttattctagtttctacttcatgtctattaaaattttaaactgtgagataactatatctgagacccctgtcctatttttaattatcaaaattaacattcttcaggttggagcatatccactagtgccccctgatctgyaggggtgtgtcccaagaccttcagtgggtgtctgaaactgtggatagcactgaacccaatgaccatcagctggaacacatttctgttcctgtcttccacccacaaatttaatgccttttccatcttaacaaagcacttatcgcgtgctgtagccataatttttgtagtttgagatgtgacagcaaaacaagcatgattttctttttccttcttcaccatttgatagatagaagattcgttcttaccgtagatcttggcaacctcagcatacattattttttctttccttatcaagtggggaactttcaccttttcacctaaaggaagcactttacggcttctcyttcacctcccaattgccagcatcaatactctggtgcattggggccatgatgaagtaaaataagggtgacttgaacacaagcactgagatactgtgacaatcttgtaactgaggattctgggtgactaaggggcagggagtggctacagtgtggatccaccagaaaaacagaggattcatatcccgagcaagatgaagcaggaaagtgtgagatttcatcatgctgctcaaaatggcagcaatttaaaacgtatgaattgtttatttctgaatttgccatttaatatgtttggatcacagttgaccacagataatggaaatcttggaaaccaaaaccgcagattgggggattgctataatcaaaatttttcttgatcttgatttgtattttattaacaggtcaaaatatctcctcatagcgtaataattattaggcaagagacaatgactatatttctgtattttagttagaagaaacaacaagaagttaacccaaaacaagaaaactttctctctgagtgctttctttggtaatatgcctgatatttttacactctctgtttatggaagtctagtctaagctattaatttcagcatgtagtacaggaatttagtctacctttcaacagtttatgtctgtcttattccgtttagtcacataaatttaacagtcacttcagtaaggtttggtaaactttgagtgttgtggaagtgagaagaaactatgaacataactgaagatttcagatgataaagttatagaaacgtttaagcgtggtcgctttgaataataatagaaatcattagttcacccaatataaataatacatgttcatttatgtacctatttaattctactcaaaaacaaaggtaaataaagaagtagaaagggtgtttgcgttacctatctactgctgyataacaattttcttcaaaacctagtggcttaaaacaataaacatttattatcacatgcaatttctgtgagtcaggaattcagagcagcttagctaggtgggtctagcttgtgacctgccctggttgcgattaacatggcggccaaagctgcagccacctgacagcttgacagaggttggaagatctgcttccaagacargtttcttgagagctattggcaggaggcctcagttcctcaccacacagaggtcctagggctgctggtgtcccacaatgtgacaactgattttctccagagcatgtgatccaagagagctaatgcgttccaagagtgctaaacttgcaatatcttttatgacctaggcctgaaagacatgtcccctcatttccacaatatcccattggctacagaggtcaaccctattcattgtgcgacgaacaatgttcgggcatgaataccaggaggcagagattattgtgggcaattctggaagctgtctccacagcctgacctctgatccccagcaattcatgagctctcacatgtaaaatatactcgatcctctctctgagattctcattgtaaaataggaacagctsaaaggctaaatatcatttaaatcaggtccaagtacagataatgcctctcaggtgtgattcctcaggtacaatacctctagatacaaagacattgaactaaagtgtactcaagttatttggccccacacacttaacatgcaatggtggaactggcatagaataatcactattgacactcctgttcaaaaaaggggaaacaagaggcactcaggagttactcgtccataattactctgagatcaagcctggcaaatggaagttctctgattaagactcaatcttacatctgtccagggataaatattcaggcctctggccctgccctgtgggttcttgaatctgttgaatcatccattttccataaaaagtacactgcatagacattggtctatccaatataatggcataagttcatttatgtgcctatgtggttcttttatttttattttgaatatggactgcgttttatttatttatttctttcttcaacttttattttaacttcaggggtacaagtgcagaatgtgaagggttgttacataggtaaacatgtgccatggtgatttgctgcacagatcaacccatcacctaggtattaagcccagcatccattagttattcttcttgatgctctccctccccacaccctaccttctaataggccggagtgagtgttgttcccccatgtattctcatcattcagctcccactcataagtgagaacatgtagtgtttagttttctgttcctgtgttagcttgctgaggataatggctttcagctctatccatgtctctgcaaaggacatgaactcatcctttttatggctgcatagtattccattgtgtatatgtaccacattttctttgtccagtctatcattgatgggcatttagattgattccatgtctttgctatcgtgaatagtgctgcagtgaatatatgcaagcatgtatctttataacagaataatttatattcctatggctatacacccagtaatggaattgctgagtcaaatggtatttttgcctctgggtctttgaggaatcaccacactttcttccacagtggttgaactaatttacactccccacaacagtaaaaaaagcattcctttttctctgyaacctcatcagcatctgttgttttttgactttttaacagcagccattctgactggtgtgagatggtatctcattgtggttttgatttgcatttctctaatgattagtgatgttgagcttttcttcatatgtttgttggctrtatgtatgttttcttttgagaattgtctgttcatgtcctttgcccactttttaatgggtttttatttcttgtaaatttgtttaagttcctcgtagactctggatattaggcctttctcaggtggttagattgggaaaattttctcccattcttaaagttgtctgttcactctaatgatagttccttttgctgtgcagaagttctttaatttaattatatctcatttgccaatttttgcttttgttgcagttgcttttggcattttcatcatgaaatctttgcctgcgcctatctcctgaatggtattgcctagattttcttcaagggtctttatagttttgggtttcacatttaagtatttaattcatcttgagttaatttttgtatatggtgaaaggaaggggtccagtttcaattttctgcataaggctagccagcattcccagcaccatttactaaatagggaggcctttcctccattgcttgttttygtcaagtttgtcaaagatcagatggttgtaggtttgcggttttatctctgagttctctattctgtaccattggtctatgtgtctgttctttatcagtaccatgctgttttggttactgtaaccttgtagtaaagtttgaagtcaggtaacatgatgcctccagctttgttcttcttgcttagaattgtcttggcaattcaggctcttttttggttccatatgaattttaaaatagatktttctaattctgtgaagaatgtcaatggtagtttaatgggaatagcactgaatctataaaatactttgggcagtatggccattgtcattacactgattcttcttatgcgtgaggatggaatgtttctccatttgtttgtgtcctctatgatatccttgagcagtggtttgtagttctccttgaagaggtccttcacttcccttgttagctgtattcctaggtattttattctttctgtagcaattgtgaatgggagttcattcatgatttggatctctgcttgcctgttgttggtgtatagaaatgcctgtgatttttgcacattgattttgtatcctgagattttgctgaagttgcttatcagcttaagaatcttttgractgagataayggggttttctagatataaaatcaaataaagataatttgactttctctcttcctattcgaatacactttatttatttctcttgcctgattgccctggccagaaattccaatactatgttgaatgggagtggtgagagagggcttccctgtcttgtgccagttttcaaggggaatgctcccagctttttcccattcagtatgatattggctgtgtgtttgtcatatatggctcttatgaggtatgttccttcaatacctagtttattgagagtttttaacataaagggatgttgaattttatcaaaggccttttctgcacctattgagataaccatgtggtttttgtctttagttctgtttatgtaatgaatcgcacttattgatttgtgtatgttgagccaagcttgcatcccagggatgaagcctacttggttgtggtggataagctttttgacgtgctgctggatttggtttgcaagtaytttgttgaggatttttgcatcgatgttcatcagggatattcgcctgaagctttctttttttgttgtgactctgccaggttttggtatcaagatgatggtggcctcatagaatgagttagcgaggagtccctccttttcaatttttggaatagttttagtagaaatggtaccagctcttctttgtacctatggtagaattcagctgtgcatccatctggtcctgggctttttttggttggtagattatttattactgcctcaatttcagaactcgttattggtctattcaaatattcagtttcttcctggttcagtcttgggagggtgtatgtgtccagtagtttatccatttcttctagattttctagcttatatagacagaggtgtttatagtatttgcggatggttgtttgcgtttctgtgaggtcagtggtgatattcccctatcatttctgattgtgtctacttgattcttttctttttttcttctttattagtctagctagcagtctatctattttattaactttttttcaaaaaaaccagctcctggattcattgtttttttaagagggtttttcatgtctctatctccttcagctcagctttgatctttgctatttcttgtcttctgctagctttggggtttgtatgctcttggttctacagtccttttagttgagatgttaggttgttgatttgatatctttctagcttttagatgcaggcacttagtgctataaatttcccacttaacactgttttagctgcatcccagagattgcagtacattgtctctttgttctcattagtttcaaataacttcttgatttctgccttaatttcattgtttacccaagagtcattcaggagcagtttattcaatttccatatagttgtgtggttttgagtgaatttcttaatcttgagttctaagttgattgcactgtcgtctgaaagactgttatgatttcagttcttgtgcatttgctgaggagtgttttacttccaattatgtgtccaattttagagtaaatgccatgtggcaatgagaagaatgtatattctgttgaattttggtggagagttctgtagatatcaatcaggtccacttgatccagagttgagttcaggtcctaaatatctttgttaattttctgtcttaatcatctgtctaatattgtcagtggtgtgttaaagtctctcgctattattgtgtgggagtctaagtctctttgtaggtatataagaacttgctttatgaatctgggtgcttctgtattggatgcatatatatttaggatagttagctcttctggttgaattgaatcctttactattatatactacccttctttgtttgtttgatctttgttggtttaaagtctgttttgtcagaaactaggattgcttttttctgttttccatttgcttggtaaattttcctccatccctttattttgagcctgtgtctgtccttgcgtgtgagatgagtctcttgaagatagcatactgatgatgggtcttggctctttattcagcttgccattctgtgtcttttaactagagcatttagcccatttacatttaaggttagtatttttatgggtgaattagatcctgtcatcatgatgcttttttgcagacttgtttatgtgattgcttcatagtgttctggcctgtgtacttcagtgtgtttttgtagtggctggtaatggtctttcttttccaaacgtagtgctttcttcaggagctcttgcaaggcaggccttgtgttgataaatttcctaaccattcacttgtttgaaaagaatcttatttctcctttgcttttgaagcttagtttggccaggtataaaattctgggttggaaattattttcttttagaatgttgaatattggcccccaatttcttctggcttccatggttttggcagagaggtccactgttagtatgatatgtttccttttgtaggtgacttggcctttctctctaggtgyccttaacatggtttctttcattttggcattggagaatctgatgattttgtgtctttgggttgatgttcttgtggagtatcttactggccttctctgcatttcctgaatttgaatgttggcctgtcttgctaggttggggaagttctcctggatgatatcctgaagtatgttttccaacttggttccattctccctgtctctttcaaggatcccaatcagtcataggtttggtctttttacataatcccatatttctcagaggttttgttcatttcttttcattctttcttctctattctagtctgcctgtcttatttcagatagataatcttcaggctctgagattctttcctcctcttggtctatcctgctactgatacttgtgattgcattgtgaagttcttgagatgcggttttcagctccatcaggtcagttatgttcctctctaaactggctattctggctaccagctcctgtattgttttatcatgattctcagcttcttttcattgggttacagctcagcaaagtttattgttatccactttctgaagtctacttctgtcaattcttagcctcagcccggttctgtgcccttgctggtgaggtgtcacagtcatctggaagagaagagacactctggcattttgagttttcgttgtttttgaattaattctttctcatctttgtgarcttatctacctttaatccttgaggctgctgccctttgaattagatttgtgttaggtcttttttgttgatgctgttgttttctgtttgtttgtttgtttttcttttagcagtcaagccactctatcatagggctgctgaggtttgctgggggtccactccagaccccagttgctttggtttctcccrtacgtggaagtatcaccagcaaaggccatgaaacagcaaagatggcagcctgtgccttcctctagaaactccatcctgtgggggtactaacytgttgccagcccacatgcaactgttggaggtggctggagaccctcattgggaggtctcgcccagtcaggaggaatgggatcagggaccttctcaaagaagcagcctggctgctttttggtagagcaggtgggctgcattgggtgggatccttcctcacctggatcacctgtattctccaaagccagcaggttggagtggcagagtcaaccaaactgcagagatggcagacacccctgccccccaggagctcrgtcccagggagagatcaaagctctgtctttagaaccctggctggagtacctgaagcccccacagaaaggtcccactcgatgaggaggaatggatcagggtcccacttaaagaagcagtctgatcacaatctggcaaggcagctgtgctgcatcgtgggggaccgttcctcatccagaccatctgtattccccaagccttcaggctggagtggctgagtcctcagaaccacagagatggcacccacctctccctgcaggaactcaggtccatctcaggtggactccaacccactgccgtcggctggctgagattccaagacagtgagtcttaacctgtgaggtgctgtggaagtggggtccacaggatgatgctctttggctctctgaatttagcccccttcctagggatatatacaaacagatttcctgcctttccagggatcccagggccggattatgtaaaactccagggtttctgtgtgcctgagcwgctgctctgccaagactccacatagctttgtgtatcagacccaagaccctggtggcatgggctcacaagggtatctcctgatccatgggttgcagagatccttgggagaaatgtgatttcccaggcgaggtcgcacaatcactcaccgcttcccttggctgggggtgggggttccttccgttgccctcccccacctccgcccctgctgcttttcattgttctctgtggctcaagttgcttgcctagtcagtctcaatgtgagaacctgggtatttcagttgaaggtgctgcatttaataagctttttcattccactccgtaagtgctgcagaccgcagctgcttctaatgggccatctatacgattttctgtctgagaataagcctgagtagacatagatgtttaacaggtggcaataataatatgtagctaaattcctcagggcattatgtattaattaaacacagatgcaagttacgtcktctttctatatttggtctatttttacctctagactctacaatgaagttttaattaatccttcataayttaagattttgttaatctttggaagcattttcccaagtaggtttcatttctttataacaaaacaacactgttaaatataaggaaaatcttcaactatctctaaggtaccaactacatgaacgtactcaagaaaagattggtgataattattttatttctctcagttcattctatttcaaaagaaaagtaagtaacagttctgcctttgatccccccactgctacaggtatataatctgctaactgtgaaggatctcaccaattttcctgacaatgtggaccagcaggaggaagaacaaggacactgtccccgtcctttcttcattcataatggagccatctatgttcccttatcaagtaatgaagcagatatttatagcttcctcaaggtaaaattctcactacttattaacatgctggcttgtgagtttttgaatgttaataaaactctgtatctattcataatcttagtaattatgtagccttgcctctccatttttcagcagasaaaaatgaagccaataaaaaggttaaagtctcttgtraggatcacacaaaagctcagtatgtgagtcagggctagatctaacctctgcctattcatctggatactttttagttatatttaggtttttttwtttgcaaaccaaaaaataatgaataaagaataaaatcttaataatccataagtttagtaatttcactactctatatttactgtcaagtgtttcgccatagaattaatataaggatactggaattacatagagaagtctctaaggataatatgttttatatattctaatcaagcttacaagtagattgaacaattatttttttccaggggatgggattgaaggtgttcactaactcaaaaatccgaaaaccaaagtcgtgttcagtcatcccttccntgtctgcaggagcagtaggtcaaggrtactatggaggtaaaacagcaatttgcttttaattttatttcatgtccaacaatattactatgcccaaaatgctaaaatgaggtaatgtagccctatttccactttatacacacaaagaaaccaagattcaaattaattgtttcttgctgaggtgacttagctggtgatagctagaactgatcagagatttttttttagatacatccratacttcagggcacaaaatcagataaaatacaagattctgatgtactgtaagagagggaaaatgctgacaatggaaagaaagagtaattctgattatggaaacaggaaagacattcatagggatgctgtattttaaaaaacmtaaagaaggacaaagggcttcactggtgacaagaaacaacgtgaacatcacagaaatatctcataatccatggccaaaaccactattcaaatacagcagcctttttcaacacccttgaacttattaaaacatctgtcccatcaccaggtctacttacacttgaacactacccagccatttgtcatccctctctcatgaatccaactccctttttctccaaaatattcctgacatccatctgctcacaaatatttatatgctcggattggaaatcagatatcctatatgtgaagtgggtgtgtcatatctcctctctaagcctcaaatccttcattaataaattgaaggaatttgactaatggctcttcaagaccttgcaaaacgcccaataagataactaaatataatgcaccaacacaaattaagaactttgattgtttaaatagcattttctatgttccttggcatttaagattaatatccatctttaaatgagctttattattaagaaaatgacaccttttaaagggccatggactgtttaagtataccttcaatgatagcacaaatttcaaacaatttctcaaaaatggtaaatatgattttgtcttgtaactgagatgttatataaataacgagaataaagaataagggaaaggaaaatagccatgagatttacatagaacaaacttcaagtttaaaccattgaggtttggggggaaggaaatgttcttgaatttattaaattcaagatggaaaattgacggcatataataacactcaggaaaaaaagagcttctaaaatgtgtgatgaatacataacagggattgaaattagtagctataaatgaatcaggtatatgaggaaataaaagagctaagaaaactgaaatatcttgtgaaatttcttgataagaacttcaacaacatgaagccatttccatgactacagagaacaatgaaaagcagcaggggtggaggtgggggagggcaacggaaggaacccccacccccagccaagggaagcggtgagtgattgtgcgacctcgcctgggaaatcacatttctcccaaggatctctgcaacccatggatcaggagatacccttgtgagcccatgccaccagggtcttgggtctgatacacaaagctttgatgcagagactatgaaaggacacgtggaaagtcaagttgacagtaagagtaggaaggatatagccatggtccactaaatggagttgaaataacacataatgccatggtttgttaactgcaataactggaggagttggagggcccttgacatatccagtagaaaatggaaaatagttcatttaggtgcatcatccttttagatatttcaatatttaagataagagtgaagacagagaagacaaaacagtgagaaatcagagtcagagatagaaattgttaccacttggaaggacatggggcaaggtgtatgatattcactaaagaaattactactgatgctttcttcagtggagaaaactgttagggtgaaattgctagaaatatatttttccttgtaagtattctttcacaaggtatttctgaaatatcagatgggatacatggagggagatcttaaatcaaattcaattagtaagcatgatttcaggcacaacgtggacaaaattgctttcatgtctagctctccaccctctcacgttggtaaatgatttctttgtctgaaccacacagccattccaaatggaaatatctgtttttgacaactgaattgtttatttcagatgtcaaaaaataagtggaataaaatctaatgctctaatcttatttcccagagaacaacagttttgcaaagttccatacagtratttaaagtaaatttaatttatgtaaaagtaatttaatgtaaatcattaaattctgttcactccactggtaatttcatttttagtatagcaaccactctcaatgtctaaagagcattttacaattcctgctcagtttctctaagaatgaagcaatactgtctcaatttcaaaattggtccttcgccacaaaacccataaaactgtctccaagtgatctcrtttttccagcttccattcacatcaaattatgctatgtctaggatacatagaatttccacctttgacaaagactcctctcttttcagggaatgagggatcacaaagtatttcccaagttctacaacttctacaagacttttaggacagtctgagcaggaaaactgaaaattttgttctctaacgtctcacatgtgcaccatgaaattaatgaatgtttttccctaactagacaattttctcttactttagcaggtctaggagtagtagagagaccatatgttcctcaattaggcacatataatgtgatacccttaaataatgaacaaagttcagggccagtccctgaaacggtgcgaagctattttcctgagacttggatctgggagttggtggcagtgaagtaagtaactttactttcctccatttgctggaggggagggaatgtggttcctccaacattttcawttctaagacaatcttcctgaaaagttctgaataattatcttaacctcttcctctttaggatagacctaagtaaaatgcgcaattgcataggctcattaatacaattgtctcagtgctgagcaattctaaaataattatttctgatactgtcaaatagtagacatgagaactataaatattcagttctatatatactgcttaatgtcgttcagggagccttctgtaaatatcagggctggagcaggcacataaacaaatcaggctacattaatccagtggtctaattgttggtcatgattcttaaaaatgcttatttatgggattatacaatagcaagggaagttaaggactaaaatgaatcgcaattcaaatatttttattcaaagtacagacatgtgggatatgatcatttgttgataagggggagaggtaccattcagtggctttcattttcccaactcagatcccaggacataatctagtgttcacacgaatgcacactcgcatatacccttaagtggattcagttcttgacgttagctttatgcatattaattctcacttgagaaaaggtggcttacattcattatttctgttcttcacttgccctccyccccagctcatcaggtgtggctgaggtaggagtaacagtccctgacaccatcaccgagtggaaggcaggggccttctgcctgtcygaagatgctggacttggtatctcttccactgcctctctccgagccttccagcccttctttgtggagctcacaatgccttactctgtgattcgtggagaggycttcacactcaaggccacggtcctaaactaccttcccaaatgcatccgggtaaggaaaatgagggtgaacaggaaaggtgggtagaacaaaagattcctttgatcagtcagctactgattctgttcctgagactaaggataattcaagggattgtgtgttagcactgtgaataattagtgctatgcaaagcaggacatgatcagaaagataatacaatgatatatgtgctatgggtgcttaaatcacggctctctaagccacaccttgcttttctatttcttagcgcttgcagaattctttgctgcaagttaggttatatgccaggaacattcttgaagctgacacacaactcagctttctcagttccacgagagtcattmtccaacccgtcatcttgaaatctccaaaatatataattttaatttatcttatagcacttatctctttgtaaattatgtaatagtggttgtatatagatcatctttcttgtgacacaatatcctcaagatcgggagcctctcatctaccattcccagtgttttatgtcttgtatggattagacatgtaatatatgttgtaagaaataggagaagaaaggaaggaagaaactatgaaaatctacatagcagcagatagtattccctagggcaatatacaatcactgcttttccctttcctctgccactgccaagcctgcacgtccacaagctaccctaaggcaaatgccaaatcctcctaatacacaaccaatcttgatttgtatcattgccattgccatgcttcttaaagcatggatgaatctatgtgacatacatttttcttmcaaatcccaatttactgcagcatctyacacttggccccaattctatgtgttcrtgtcgttccatattctgatcatttctgtctctgcctcacatggggtgataggtcagtgtgcagctgaaagcctctccagccttcctagcttcccaaaatacaaagggagaagaatcctattgtatctgtggaartgagagacaaaccttgtcttggacagtgactcctaaaactctgggtgagtgacagtacccaaaagggcctatcaatcaacaaggacggtggctgtctgagtacttttttcatcatattctctcttttatttgccatagatataattctataaagttagttttttttcctatttctatccactatgacctcctcccactgttctcacccaagctagtccccagaatcactatcttggacattggctacttagtatacattaaccttgtgggtttctttttttttagccttattttctattctggacaactataagtttaaggtgcagcccttaaaggtgattggactatcaaagtggatactcatgttttcaatattccttgttttagggaatgtgaacttctcagtgagtgcagaggcaatgcagtccttagaactctgtggaaatgaggttgttgaggtccctgagattaaaagaaaagacacagtcatcaaaaccctgttggtggaggtaacatatttttgggagtccctaacamctgtaagaatgcaacaccgggcggtcactcttgagacaacaaagaaccattaatatcatgctcacacaatacatcctgtaagactaatggaatttcctgccctaaaagcattgcagcagacaacattgccagctattgtaaattttttttcacaaattatttgagtgcaatttccttttttttttttgagacggagttttgctctgttgcacaggctgaagtgcagtggtgcgatctcggctcactgaaagctctgcctcccgggttcatgccattctcctgcctcagcctcccgagtagctgggactacaggcgcctggctaatttttttttttttttttgtatttttagtagagacggggtttcaccatgttagccaggatggtctcaatctcctgacctcgtgatcctcccttctcggcctcccaaagtgctgggattacattgagcgcaatttcttgatctccacctctctcctaagattcacatatctctcatacccattagctttgatttactgcccttattatctcttcccattttctctctaccaccctccctggttcttcaatgttttatggatttgtaataattcaataacaagtaggatgttatgttctcacttataagtgggagctgaatgatgcaaacacatagacacatggaggcgagcaacatatatggggcctgtctgagagtgggagtgacagaagggagagcatcaggaakaatagctagtggatgctgggcttaatccctaggtgatgggatgatctgtgcagcaaaccaccatggcacacatttacctatgtaacaaacctgcacctcctgcacatgtccccttgaacttaaaacaaaagttgggaaaaaaagagtaggatggtaaacatcattcgtgtaaaccctacccatcaaagaaaggaatccatgtggttctcttgtcaccaggatgtttctatcttttctccttttctttcctttcatccaaggctgaaggtattgagcaagaaaagactttcagttcyatgacctgtgcctcaggtaagagtccatcttcataatcatagtgagatcaaaaccacaaaggggtataaacctcaagttacaatgcacattcattttatctcccagttttcagagtgttccatgaaagtcagcataatactaaatatttctttatgtatgttttacagatgaagacattgagcccaagagagcaagttaatgtgactcaggtggtacagacaggactaatacctgggctttcttggttcatacgtagcccttttacctggatagcccagtggctgctcactgacaagcccagctgcagaagcttagagtgtcccaggatgaggtagaaagagagcagggttggccgggtgtggtggctcacatttgtaatcccagcattttgggaggctgaggcgggaggatgacttgaggtcaggggtttgagaacagcctggccaacatggtgaaaccctgtctctacgaaaaaaacaaaaattagccaggcctggtggcgggcrcctgtagtcccagctacatggggggctggggcacgagaatcgcttgagccgggcagggggaggttgcagtgagccgaaatcacaccactgcgctccaacctgggcaacagagtgagactcttaaaaaaacaaacaagcaaacaacaacaacaacaaaaactaaagacagcagggtcatgataagtttgaatcccaagagatagtctctaaaacagctgctgacaaaacatatagcatttcctacccatctcactaaaaatgtgtgttttccgtgtagaaaataatttacatttaagttcatcatatcattaagaagtagttgtagcttttatacagaaccgccacattattagttctatgtccacagtgtatacagcactgtatttgtcatttgagaaggactaatttaaggtatattcatgttatctatttataaacatgggaatccattcaaatatagtgtaagggaggcagtaaaataacttgtattatcayggttataagtcttaatattgctacaaaagtggagagcgatagttcccccactaagtcttaggcttcttttagaaagctactgagcacagccatgcaaaaatatagttaaatgagaagaggaaggactctggaagtcacacagtgccaaaagcaattagactatcaaaggtagtctcatcattaagtcaaattcttattccttgcacccagagttccacaaggagatataataatattactgctaactctaataataaaataactgcaataataacaattgctcacattcgttgaaattgaatatgttgcagatactgttctgaatgttttacatgtgttttttcctcaaatcatcacaatttacccaaggtcacaaagcagggccagtaccatatccagggagtgtggctctgaagctctcactacattataatcactaaattatattgtaatcatagatgtcctcctttaacatgggctgtctgtttctaaaggtgctaatgtgtctgagcagttgtccttgaagctcccatcaaatgtggtcaaagaatctgccagagcttctttctcagttctgggtgagtcaccttccatttagtaaacctgggccaaaagagttgccactgtacatcttatctacgtatttgtatttgaattatcaagttcttgatagctgctattcttttttwtttttttgagatggagtctcgctctgtcgcccaggctggagtacagtgacgtgatctcggctcactgcaagctccgcctccygggttcacgccattctcctgcctcagcctcccgagtagctgggactacaggygcccrcyaccacgcccggctaatttttttgtatttttagtagagacggggtttcaccgtgttcaccaggatggtctcgayatcctgacctcatgatccgcccgcctcggcctcccaaagtgctgggattacaggcgatagctgctattcttattaggattctggaagtcacactctgtgtatataacttttctcttacctaaatgatagactctgaatataaaggccatttttgttaataatgttggctatttatgaactgaaattattctgacatctaatctttcacattccccaggtgacatattaggttctgctatgcaaaatatacaaaatctcctccagatgccatatggctgtggagaacagaacatggtcctatttgctcctaacatctatgtcttgaactatctgaatgaaacccagcagctgaygcaggagatcaaggccaaggccgttggctatctcatcactggtaagtgagacagagaaaaatttactttgttactctartgaaacttttcccaattaagcttcagttatatcatcaaatattaacccatgatgataatttttatgaaaacaacaatcttcccacactctaataggatgttgtgtttgatctatccataacattcacaaaactatggcagatcacagaaggtcataaaatgtccatggcgcctggatgcatgagcctaaacatatggatggcctgcctttctttaatgcttcatgaacaatctgaagccttccatttcaggttaccagagacagctgaactacaaacaccaagatggctcctacagcacctttggggaacgatatggcaggaaccagggcaacacttggtaagaaagaaaatctattctgagtttcaactatgagttcagaacgtgcacatagattacctgtcttagtccattttctgttgcttataacagaatacctgaaactaggtaatttataaagaaaagaaatttatttcttatagctatgaaggctgataagtcaaaagtctaggggccgcatctagttgagagtcttcttgctggtgtggactctgaggagtcccacggtgatgcagggcatcatatgactagaggattgaatgggctcacttgggtctctccttctcttcttttcttttctttgttttactttgtagagactgggctagcatctcctcctcttcttatgaagccaccagtccaactgtcatgatagccctttaatctaggaatagattcatccattcatgagagcagaaccctcatgagccaatcacctcttaaaggctccacctctcaatactaccacattggggattaagttttaacatgagttttggtggagaaacmatttctaaaccataatgttaccttatttaattcttatagctaccctgggaagtgagagttattagcttcattttacagaggagaaaacatattcagtgtggataaataaatgtgtcaggagcaaacatctaataagtggcaaaattgagaacacttttaggttgatttttttaatccaatatacccagaccctcttccttctcatgttgctaagggaacattataggtttgtaacttgcccccttaaattgttgctcagccctaagaggtgttagaaaaatgctagaataaaaccacaaccattactggcagagcataccttactaccttctactagatgatatcctttctctctctctctttgtagttttaccacacaggcaaacacaggggaaaaaagtggaagggcaggatgatggagggaaatatttactgaagcagaacattagaagttagctgattagagttaaaactacagaaagtaagctaagaaatctaggaaaggaaataaattcataragcccacagtgtaaaagcaaatgacttagttaaccaaccaaraaaactggaaggaacctgaacctctgaagtggcataraaatgctttaggaagcaaggacaagctggtaatgaattgaacaacatgtggcagcaaaaaaaaaaaaaaaaaraaaagaaaagaaaaaagaaaaagagatgtctaagctaaaaagaaaaagtctccaaactctcagtaacagctrattgactttcttgggkgcacactgtgatgsgggagcctgtgtgtacaaaacagagcagtaaagtgctcaatgaaaagagcctcagcactgcatttttcctccccctaggctcacagcttttgtactgaagactttcgcccaggctcgatcctacatcttcattgatgaagcacacattacccaatctctcacgtggctctcccagatgcagaaggacaatggctgtttcaggagctctgggtcactgctcaacaaygccataaaggtgaactgttccacaaacttctgagcctgacacacatcaacataacatcccccaggrgtgaagggaggaaggaggcacaaggaaattgcaaagatgaagtcctggatgatgtgggatggcatcagggaaagagtattacactttctacagagaaggaagaaattgggccagatgcagtggatcacacgtagaatcacagcactttgggaggccaaggcaggtggatcacttgagcccaggagtataagactagcctgggcaacatagcaagacccagtctctacaaaaaacattttacaaaattagccaggcatggtggcctgtgcctgtagttgcagctacttgacaagctgaggcagcaaaattgcttgagcctaggagcttgaggctgtcatgtgtgatagtgctactgcactccagcctgagctacagagcaagaccctgtcgagaragagagagagaaggaaatggtatactttgaatggaaacagatactgaggagcgtttccatcaaacaacagaagagaatatactaacacttggcactggaattaatcaaatcaatgttgtattcacagggaggtgtagaagatgaagcgaccctctccgcctatgttactattgcccttctggaaattcctctcccagtcactgtaggtaccagctcaatcccattccctaccatgaaaactgtagatttgctgtctggaatgccaccctgctaagggttgagtctcaagtatcttttggttcaatgatgagggatttctcagactgataagctctttggttgatgcattaagagagatttacacttgcccagtaatgcccatagactatgtatcaaaaccaatcctaaaaacasgttctctagtcttattctttaagactgaactataaagggaagagatcgaaatatttttctatttaaatatgatgaatatctagctgtctgcctatctgtctgaaatctattaataacatctgactgtcaatatccagctctcggcttgctctgccytctattcaccctagtttgacacaaccacattttgcctttacagaaccctattgttcgcaatgccctgttctgcctggagtcagcctggaatgtagcaaaggaggggacycatgggagccatgtctacaccaaggcattgctggcctatgctttttccctactgggaaagcaaaatcagaatagagaaatactgaactcacttgataaggaagctgtgaaagaaggtgagagcacttataagtgggagctgaacaatgagaacacatagacacagggaggggaacagcacacattggggcctgtctgggaggtgcggagagggagagcatcaggatagatagctaatgcatgggggacctaataaccaggtgatgggctgatacatgcagcaaaccaccatggcacacctatgtaacaaacctgcacatyctgcacatgtaccccagaacttaaaataaaataamatttaaaaaataaataaataaatagataaataataaaagtttttttaaaaactgtgcaaaaaaaggtgagagcaaacagcaaatggtaccaaatttccatttccatttacactgattctacaaaaagaagaaatatattccttctgaaatccacaagcttcatctgtaattccttagccaagtcatacattgtgagatcagagcacctcttataaaactgtcttctctgggattgcatatgttacacagagcagaacataatagacataatgctgcagataaataatgcagttttatttctacttgctaaaaccaatataatagacaaatagattcattttctcatgatttctctctacttacttgaatgaaaagaggtacaacagctcttccataccccctaaattcccacccaatgccgtcctggctgcaccatgctcacttcatgctctgggcttctcctaagctagtgctgctatagtctcctttcagctaccatcataattatctaccaggatctcatcagccacgctgagatgttctctgacatttacaagatccagagatggaggaaggactgtgcctggaggtggaggggaagatggtcagtaggacaaagggtgacattgatgactcgcttattggtggagatgccttcactgaagtttcccaaagcgaaggtactggaagcagagtaatcattggtgttgatattgtcatgaacaatcacttgcaggaactgacttcacaaaagaagcctacaagaagtacatcaaagctgacataaaatcaaagacaaacttaaagaacagagaccagaaacagtaaaaccttttataacaggagctgcagaacaaatcaagcacactctttctaatctcagaaactaccagttcttcatttgatcttagccaaaaggtcaagaagcaataaaaactaccagttctttattggtgaaaacatgaacccatatggcatggtgcctctgctggactaccatgaggatggtgtgactccatagatgattttccatggtttagaaatggaaaaatgttaacaaatttggcagttactttggatgtatcacctgtcataactggcttctgcttgtcatccatacaacaccaggacttagacaagtagaactgatgtcatcttgagatcttcatttattttgaccatgatttatttggagcagaggcattgtttttaaggaaaaaatgtcatagaggttgtctaaaaacaaaatgcattcaaactcatttgaaagagtgtcatttagtttagtacatatttaaactcaatctatcttgtagtgttcttggagaaactagagtctggttgtagaccactactagaaagaacacaactgccatgagataacttctacagtggaaactatttctgagtatggagtacaaaaacaacaacaacaacaacaataacaacaacaaaaaacaaaacaagaatcaaaagttttaattctgagttgaattagcaggaaagaacatgcttatagcagtgccaacatttgaagtggtgccttatacatttcatcacctacaatggaagtagttaactctggaagaggttacaaaacaacaaaaasggactgattcagttggagagaaaaaaaaagaaagaaaagaggtacaacaaacagaaaatgcaataacattttcaaactatttttatctctatttgccagagagagcatcacaaaagtcacatgaggtcaatagttaagttttatattctagtctatactgcaattctcagaaaatatcacgaacaataaaagaactctctctaccacttttctctttcatcagtccaactaaaataacattggagagattggtgagtatgctctatgcttcttcctccatcaacctaccctaccttcgtaccacaggactaaatcaagttcagcatagaagtgtgagttagtgagttttaggagtttatgacatagaagaccttgcttctcctgtattattttcagctccatgtattatgaatgtgcattctcttatctaccagttataattacttattgatgagttacaattatctcctttttctcacccttaagacaacctcgtccattgggagcgccctcagagacccaaggcaccagtggggcatctttaccaamcccaggctccctctgctgaggtggagatgacatcctatgtgctcctcgcttatctcacggcccagccagcccccacctcaggggacctgacctctgcaactaacattgtgaagtggatcatgaagcagcagaacgcccaaggtggtttctcctccacccaggtcagtggttcccaaagagtcttctgctccaggttcacttggcaattgggaggcttaaaagtagaacagttaatggaaaagagaaggcaattattaaatcattgaagaagtatttaggaatatttgaggaccatgagaatttaaaggaaagacttaagacatcccccataacacttttcactaagccctatgttaatatattagcaacatggagacktacaacgagcatctttaccctctaaagccacgctatggtcattggacacattctagaccagagtttttcagcatcaacactattgacatttcgagccacatcatcgttgtaaaaggaactatcctcagccttataaaatattcaatagtatccctggcctctccccattagatgccagtagcacgtcacttccagttgaaacaagaaaaaatttcctccagttgggaaccaatgttccagacatcttcagaatctaacaagaaatcctctaagatgtattccccaaaaaatgtgtgattaaaagtacagtgactaagtagaatccactttgatctttttggaatgagaagttccatttcaactactccaaggaactcagcttcttcattcctttctactttccctgagagtgctcttcttactttctctttaagttgatcttttttaagctgaagctcttgaaaatgtatttttctagcataattctaaaagtattttatcgagagtataaatgattgtattaaacacccagagtgtctggcttttccctcctacatgtcttctttcaacagttaggatctccatagtgaaacttttgtttttcagagagattaggtggggtaaataaaaacaagctagatgaaggtaaaaagaaactcaagaaagtgcaacttgtctcataccattttcatgtacagtaaatttttatcactcttccatctaactggtcaatcatctacttaaaaatggtcactatttttgtcttaacttcttagttttagacctattctttgaaggacatatccaaaaggactgtcaatgaaaataaacagtgacattaataaacattattagccttttatttcatttggagaaactgcagcatgattttgataatgtctgaaaggcagagaaaaaggaaaggtaattagtgaagatctaccttaggggtaaaaagccagcttccctcatggtaggctaacacagactttgggggaaaatcccagaygccaaaaatttactctttggggcggttgtccactcgtctcttccaggacacagtggtggctctccatgccctgtccaggtatggagcagccactttcaccagaactgagaaaactgcacaggtcaccgttcaggattcacagaccttttctacaaatttccaagtagacaacaacaacctcctattactgcagcagatctcattgccagagctccctggagaatatgtcataacagtaactggggaaagatgtgtgtatcttcaggtagggctccaagcttatatgggtgagartcaactttaaacttgccaattgaaatggaaactctgttccttccttcctgggaaagtaaaaggcacctctggagacgttaagtaatgaggaagtgaggggtccagaaaaagagagaaactgatagtgtctttgctgtttcacagacatccatgaaatacaatattcttccagagaaagaggactccccatttgctttaaaagtgcagactgtgccccaracttgcgatggacacaaagcccacaccagctttcagatctcactgaccatcaggtaagacgttctaacctaatcacctatctttggcccaaaagcaacttggaattaacagaaattaatagtccatttggaagctatgttattagattaatataatttagaattgatatatctataaatgaatttaggcttttatcattatgacgtgatcctttctctactaaaaatataaaagtaatatatactaaataacaaatgaactgtatagtgaggtgtgcaaaaaccatagatatgttaaaaatgccaattagcaagattcactaccaaagattttgatttgatagttttggggtgatgcttaaacatctgtaattttagcaagtggtagatctgatgtatatgcatgtgtccaatgtcagtgttgcacaagtccagggaacacagacctttgtagaatattagggacaacttcttgaagacagacaggcttaaagtgatgcttgaaagcagaaatttggctttctttcacgtataaaaccctaaattctttttcctttgacactacagttacacaggaaaccgtcctgcttccaatatggtgattgttgatgtaaagatggtatctggttttattcccctgaaaccaacagtaaaaatggtaggtgtattttaatcctaatagacttcatacaaaagtatgttctgtatccccaaactaagaccataccaatatcaaaaccatgtcaacatcatcctgcctcaaaaaaatatttttcccaaacccaggaagtaaatgaactatttagttggccgtaagctaagggacatatgtgataccagagaaatgcacaaggagtacctatccttaggccactcatagtttagtcaggaatttaaagcacatgggcacaaaacaataaaaccacccaagaaagataggatatggtttaaatcccaaactgactgatatgcactaaaaatttgggaaggaaaaaaaatcaacgtgaactaaaattatcaaagatgccagaggctctaatgtgttacttggatattgaagaattgtggaactcctgacctgaaaacaattagctttcttctcttcagagaatgaccatttgtcccttattacaatctgctctagatctcacaccattctcacatctgttctctaactttaactgaagttttctaattctctccagcttgaaagatctagctctgtgagccggacagaagtgagcaacaaccatgtcctcatytatgtggaacaggtgagggctctgacatcctggctgagactacatatgggtcgtctttctaagtgagtctctttactagaatagtcggtaacatgaggaaaacaatcattagtaatgcccttccagaaaggtttatctattccaagaagaataagaggggaaacctttgaactccatgtagtgttctgttctatttttaattgtgttaaaattggaatatgaatatttctatgaaatttaaagtacaaaatcaatagaaaaaaggtgtaccatgtattcctgttgttttaaaggccccactccctgacgatatgaataaatattaaacttgaagtgataaatcaataggactaaaggttatcatgcattcctgttattttaaagaccacctccacaaaatgaataaatatgaccccagtggttgcctaatgataatgttaacattctaaaatgtcaccataaaataaaatgaggattttatgaatattatcaaatatgaccataaaacaaagaaaatgttttatgtatccaaacagaaagaatacttcgttgttttaattacagattgtatgaaaccatgtttctccagcttagaacacattcacatgggcccagagagttaatctcataacaagggactacaaaagaatagggttggctcagttgtttagaagaaaatctgtgaaaatttgttgactktaaatagagttcccaaggatgcattctaaaacccatcttgacatccacaaatgtctggtcacctaaagacacyggtgaaaaagagtcaaagaacaataagaatatgttttgctcatgggagaaagaaggaggttttctaggttcttgattactcccacttttcstttcaggtgacaaatcagacgctaagtttttccttcatggttctgcaagacawcccagtaggagacttgaagccagcaattgttaaagtctatgattactatgagacaggtgagtgaaagaaaaatgaaacaatcttaaccagagccaagaaatggatcctgttgtgacagttgatcctcttcttagcccacttagtcaacattaatcttttgtttctttcctccaagatgtacactataaaaacgacttactacagtctggccaacatagcaaaaccccatctctactaaaaatacaaaaaattagctgggtgtggtggtgtgtgcctgtaatcccagctactatggaggctgaggcaggagaatcgtgtaagcctgggaggcagaggttgcagtgagctgagatcaygccattgcactccagcccaggtgacggtgcgagactccgtctcaaaaaaaagaaaaaacaacacaaaacaaaacaaaaacttactgaacaaatttatcaattagtgtttcttgagtcagaaacttaagaattaaaaagaatgataatatatagtcactgctttcaagtagtttagagacatagataacataatacagataaaaatattacataacaggaaagactattagtgacaaatgagtgttagtgagctaagcaataagtttgagaggcaaaaacagcacagaaggctggtgctcaggaagaacaaacaggaagaaagatctgatttggatcctagaggatgagtggagttttgggggtctatagaagtaggaggagtgtttcaagctggaacaataatctttgaaaagtaattaagggagcaagctgaacaaagtgaatagaagcagagaggtcatggaagagagaactacaggttagtgcaattatgatcatcttcccaagaatttaaaatttgaacagctgccatctgaacaggcttcagtccccatctccagtctcagggaaagagaatataaatatgttaatgatcctgtttaattcttgtctatttacatgaagttytgacaattctgatagggcgtgcttttctccagtagtaaagtgactagacagatttagcatggtccctagttcatagatctttcgtttcttccttcacccaacgttatctttcagatgagtctgtggttgctgagtatatcgccccctgcagcacaggtaagagttcaccacttatgaccagtrctagatggcattaacccactctccaagggcccctgcaatttaaattctctacaaggcttttcctacatctgagacaatccacatggcatgtcctcacaccaagacaaaactgtggcgtagcatgcctattctgtagcggactctccaatttcagatattcactcccagaaaagtcaataagctttgtttatttgtaggacagctatctctaaaagcgacatttcacttcacagctaattgggcttccttcaacacaatggtcaactaatcacacacctaaaaccaaatctagccttacacttaattttgtaaatgaagctttattggcacatggccacacttattattaacattggctatggctgcctttgtgtgctgattagtcatgacagaccacatggcatataaacctaaaataattaccatctggcctttcacaaagtttcctgaccctgcataagctcactctgctgcccacactcaactgaatgctcctcaggaaatgatacaacctccttacgtttttcttttctccatagatacagagcatggaaatgtttgaggaccatacaggctgtatattttggtggattctctgtcctatacatttacttagaaggaatggagttatttgtctctataaaatagacactaaaaatatttgctgaataaatatgtacttctggtcaaactatcacttgttgcatcattcattcatcagacattaataacatgttcacatgatgagttatattctttctgtttaattttggtgcaaaggttggattctaataggttagcattctagtaggaaagcagagtggaggttgcaggtaaagaaattgaatgaaaattcagttgagaaaggtggaaggtgagaacataaggggatgatagataatataaacgtggtaatataactggactggaagggtcagaagattagaagaagagacatcagaagagatgtttgagatgaggagaagtgctgttataggaaaaactaatatctagagaattgataattaaagtgcattttaggataagattattatatggattaaaaaaataaagagatgagagtgaaggatttagataaaccatctacaaacatggataataaaattaataagtttaaagataaaagtaacagtggtgaggatgcagtgactcaagggttaaaatcttcaaagaataaaaggggagtaacctgcatcctatagattattttaatagaaagagacatggtggctacagttaaccatattgtattcttgaaaaatgctaaggagtagagtttaaccatatgacaactatatgaagtaatgtacatgttaattagcttgacttaaccattctacaatgaatatatatttcaaaacgttgtacatggtaaatatacacaattttttctgcttaaaataatttctaaagtaatttttaaacatcatttaaaaataaacaaaggtatagcagatggtaaaatcaaatggcatgagagtagttaatgccttttatggagagaaaaaaaatcaagtatttgagaagaggcaagaatgacattatcctatctacagaaacagggataaatgtagtgtgggagaaaaaaaaaactggtcacctcttaatggagacataaaacaagtcaaggtctcaataggaagacatgcttcaaattcatacataaaggcaacatttggagaaggctataagatattttgctaataataggttctgagttccagaagacttagcttgaagggttcaaggagtcatagaagaatggtgggtggatataccagagtggagccataacacagtaagaaactggctgatgaaagatacatgagtggagaagtgaagtcagcaagatgacagagtaggaaaccctggtcttcccccaggcttcccccctgtcccacacatgaacaccagtttagtaacaatcatggacaaattccctttgtgagaaattcaaaggctaattgaaagactcctgtatcctaaacaaatgcaaaagcagactcaccgaagccagtaagattcaggacatgctacggcttatgagaggctaaaaaacagaaaaaagaagattcagaacactcccagcatagcataatacaattagaaagaggccccctagctcccagcttctcttaggggagagaaggggttacttcacacatcttaacttttctgagggttctccccagagaactggtttctatcttgccagtgatagagttctgacaggacaagcacagtctagctgcttgaaggagaatgaagatggcaagttggactggtaggcactatagatccttctccctggtcagcagagtgtgtggacaaaaaatttcctgctctcagctttcccttagggagagaaagagttgatccatgtgtctaatgccctaacttttctgtagatacccaaacaactgacatctgccttgccagtcggggagctcagatgagtctgcacagtctagccccaccttggaagaaaggaggtggcagcttggaattctagatgccattaatccttccccttgctagcagacagtaaatggatttttttaaatcccagctctcaacttccgcctgggaaaagaaagagttgatctttgcatccaatactccaacttctctgtggctgaccaaagaattggcacctatcttgccagtcaggtagttctgatgggtccagcacagactggctgcctgggggagaaagacagcattgatttgaagtggtgaacactataactcccctagctcatcacaaaacaagcagacaagaaccacagcttcctgcttctccctgagaagagaaaggattgttagaatctcccacaacctccaacaaggctgattgataggaaccttctcctatacaagactagtctgtgaagaatgggagaggtgccttcctttgtctaatgcagaggcaacaacacagagagtcaaagaaaatgaagaattaggcaaagatattcctttaaagaggaacaaaatacattctagaaattaacactaatgaaatggaattatgtgatttactttatggagaattcaaaataattctcataaagatgctcactgaagtcaaaagaacaatgtatgagcagtgagaatttcaacaaaaccacaaaaagtatcaaaaggtaccaagcagaaatcattgagctgaagaacacagtaacttaaaaattcactataagagttcaatagcaaactagataaagcagaagaaaagatcagttaatttgaacaccagtcattggaagtagttcagtcagaagagaaaaaaagacaaagaaataaaaagtgtagaaaacctaaggaacttatgtagcaccatcaaattgaccattatacaaattatgagagtcagaaaaggagaatagaaagagaaagaaagaaaaaacttattcatagaaataatgactaaaaccttctcaacctgaaaaaggaaatggaatccaggttcaaaaataactaagtaagatgaacccaatgaaatccacataaaaatacataatcattaaattatcaaaagtaaaagagaattttcaaagcaataagagaacagtgacttgtaagatagacaagatgcctgataagatgatcagctggtttttcagcagaaatttgcagtccagaaggcagtgaaattattcacagtggtaaaataatacaaacctgctaaccaagaatactatacctgggaaacctgtccatcaaaaatggaggagtaataaagactttctcagacaaacgaaagctgagggagttcatcacctctagatttgtcttaccagaaatgctaaagagagtttttcaactgaaagaaaaggacactaaacagcaacacaatatcaagagaaggtatgaaactgattggcaaaggcaaatataaagaaaaacacatgatactgtattactgtaatgctagtaagtcacttttacttccagttaaaagttaaaagagaaaagtattaaaaataacaaactaaaatatgttttaaaacataaaatagatatcaattttcacaaaaataaagtgtgtagggacagatgataaagggcaaagtttttgtatgtgattaaactgaagttgttatcagcttaaaacagactgctataactacaagatattttgtgtagactccaaggtaaccccaaaaagtctataaaagttacacaaaagacagagatttaaaaatcaaagtatattggtacacaaaaaaacaataaaacacaaggaagacaggaagagaggaaaagacagacaaaataattacaaggctaacataaaacaactaacatggcaaaaataaatcttcccctatcaacaattactttaaatgcaaattgagtaaacctcccaatgaaaacacatatagtgactgaaaagttaaaaaaacagacccaaatatattctatatacaaggtacttactttagatttaagaacacacataggctgaaagtgaagggatgaaaaagatatcccatgcaaatggtaatcacaagagagtaggtgacagggcaggagtatcatcatcttggacaagcactggcattttaaagttccccttaatcaaaaactgccccaaagggcattggcctaatggctaacgtcagcatgaccataaaccacaaatgacatctctgaccagaaacattccaacacgaaaataaaccctccccgaccagagatatgcctgccccaagataacctcccctccggccagagagatgtcagccccaagataactttccctctgaccagagacattccaaccccacaataaacttctcctccacacagaaacattccaagcctgtgataagctctctcaccctaaaacccttaaatactcttagtctgtaagagagagtggtcctgactaaaattggccagaagcccctctcaggtttattctccaaaataaacctgtctttgactgttgagccactaatcgtgtttctttcctctttctttaactcttacatttggtgccaaaacccaggacgggtgttgtgggtagaggctctcttgcaacccaggaagcagtgggcagcggcagctcatcccactggatcctgagagtctctggccaaccaccccatcttgcctcttacttcacttttcaagtgatttacatgagcaggacaactaacctgaagggaactgtgaggctcaggctggggctactctccagtgggctctcagagtcctgagacctgaccacttctgaccacccacagtgggtattttgctctctaacacttgtcccctcctcctccctcatcctcactttcctttctctctgtctctctctgtctctctctctctctctctcttcctcatgtggctctggttcaagaggccctttgccaattccaactggaacatccaatattggacactaatccagccaactggtaagatctgccttcccctgactttctcatggtacccgggaaagtcaggtatgccatcctgatcctcagaggaccagtgggactaggctagaagaaatcttggggacacccagtttcttctcagcttaattgttctctttagaaagaggattctgggtctctgtcttttgtctggggacacctacaacaaaaacagacaccctaggcttcttcttaccagtccacataggtgctcaacaatccaaaattcctatgtcctctccactgagctgtctccttcacagccttgccaaacttggcttatgggaagcataaagccaaagtgtgtggctttttattgcaacgtggccgggccccagtgcaaattagataatgacagctaatggcccgaaaatggcacctttgatttttcaaattctcagggaccttgacaactttataaccaggaacagcaaatggcaggaggttcttgcctgaatattcaggctttcttctacctaagatcctgaccctccctgtgtcaagcttgcacccctcatgaaatccttcttaataaaaccctccccaggtttctccttcctctgaaattccttccttctaaaccccttcctctgaaaccccttttgaccctacagatgaatgccctctctatcctcatccccctggatccacttcttgcctgtccgaaccctcagccccaaactccactcttcctccttctccacctgttactcattcaaaaactgcttcaaccagtcaaaccacctctgcctttctcctactctgggaagtggctagggtcgaaggtattgcttgtgttcatgtccctttctccatgtctgatttgtcacagattaaacagcaccttggatctttctctgaaaatccctctcattatcacagggaattcctgcacataacccaatcctttaatttaacttggtatattatttatataattctaacctcaaccctcacccctgatgaaaaagagcactcagcttaattaaaatcgatgtccaagctatgagtatattcaaaggcctttatgtttttctcttcataaatcttgttttcctggaaaaggttttttcccagtcaactgaattacttttctccattctttcttgccactcttggtgcaggtattaaagaccctaaaatgacttctggtggcctgggattccttgggaaaacagaaaagttgccacaaatcccatttggggaaaaacctttgttttcgtt

SEQ ID NO: 7040 - DNA, 31119 bp, Homo sapiens
cctggaaaaagcaccatttgattggctaaaaggcattgcgggagttctcacttgggtcttagattctacccagaactggcaggtgagttttcaggcttccggcggtctttgactcgaaggttggttttcaccagggacccgcccgtatctacctaggaatttgtctgcttcccaccactatcagtatctgtccatttatactaagttctaaaataggcaaaattaatctataatttaaaaaaaagaaaaattcaaaagaccaggcttgatggctcatgcctgtaatctcagcacttcgggaggctgaggtggaaagattactcaaacccaggaattcaagaccagctcggggaaaataaggaaacctcatctctacaaaaaataaaaaaaaattatcctagcatggtagcacactcctgtggtcccacctactccacaggctagctgggaggatcatttgagcctgggaggtcgaagctgcagtgagccatgtttgcaccatcgcactccagcctgagtgatagagactctatctcaaaaaaaaaaaaaaaaaaaaaaaaaaaaaaaaaatcagagcaatagttgcctctaggactaggagaagatgactggataggagcatgaggaaattttcttggatgatgaaaatcttctaaattttttgattacagataacagttatgatgcatttgtcaaaataaattgaattgtatccttaagagttgtatatttcggccaggtgcagtggctcacgcctgtaatcccagcactttgggaggccgaggtgggcggcacaaggtcaggagttcgagaccagcctggccaacatggtgaaaccccatctctactaaaaatataaaaattagccagacatgatggcaggcgcctgtagttccagctactcgggaggctgaggcagaagaatagcttgaacccagaaggcagaggttgcagtgagccaagatcgcaccattgcactccagcctgggcaagagatcgagactccgcctcaaaaaaaaaagaaaaaaaagagttgtacatttcatgacttatatattttgccttaacaagagaaaccagaactttaaacaaatatggaactcttactagtaggcttgcttcacacatcgtatggcttatcagttaaaaaatcacttcctgtgttttcttatatgtgaataaatgtatacatacaatgaatataatgggaacttggttcactcttggaaataaacaatttcctagctctgtctgctgacactgaagcagtgacacacaagtagcaacaaacacaactcgtaatcacatcttggtttttcaataccattttccactaaaagaaccaagaccccttggtgaaatgactgattctaggataagggtaagagaaccacaaaactttttaaaaatatacatttgaggcatacaagatattttgattgatacacatatacatagtgaagtgattacttcagtcaagcaaattaacatattcatcatctcatgtagttattttttttttttggtggtaagagtacctaaaatctactctcctggcaaagtaccagtatacaatacaatattaactatagtccttatgttacacactagaacattagaatctaaccgcaacttcgtaccttttgacctacatcttcccatttcccctaccccgcccctggtaaccatcttcctacactgtttctatggtgatttttttcaagactccacatacaaccgatatcatatcatatttttctttctgtgtgtgtcttatttcactcagcatgatgtcctccaggtccattcatgctgaatgctacaagataaaatcggaacatcttatgtgcctgaaagtaaagaattcctcaaaaaatcatatggacatgtcaaaaggataaaggaggcaccactaaaaggctcccactggctgctcaacagaggcccacaccctcccgcaacttctcggcctcatcagtgggtggactgcatgttcctgtggtaggaaacacaccctcccctcagagatctgaatctctaatcttgcaggtggggaagggagcatttcctttaacttaagtaactcctttattaactcttcttcagccctagaagtaacagctccttttcgtagctgcttcttctgtatcatagagtcctcttttagtaactgatcatcttttactagaaaataattctttaaatttttcctgttaaaatcgccaatatgatatctgtttctgaatggaccctgattgatataaaaacgtatcacttcccttgcatttctatccaaaaaaaatgcaaacttaaatataatcatgaggaaatgatagccgcaggaggcagacaaatgcctaggcagatccccagtgaaaccccatctccaagctgaagacagtttaaagcctgaaagccaagctacaagtcaaatccatggaccggattaaaaacctgtcttcccatttggcacatttttctttgattgatccccacctttcacccattttatatacacctaccctttcctaattggttttctacactgtcgtgcccacctttgagtggtgtcttcactttaactgtttttgcatactcacaaaccaatcagcacacacttcccattctgaatccataaatgcccagacctagccacattgggtgagaaaccacctgactgcaggggtgggggaccacctccacctaccgcatcccctctccgctgagagctgttccatcgctcaataaaattcttctccatccttctcatccttcaaattgtcagcatatcctcattcttcttggatgtgggacaagagttcaggaaccaccgaatgcagatacaaactataacacaggcagcaggtcaagtgaggcctgggggttttgcgggggggggtgtcactagctatggacgggtccctggttggcaaagtgaccgagaaaaatcctacatcagatatatcaaacaaaaccaaaatgaaagacattctacaaaacaagtggccagtacctatcaaaatttcaaagtcaagtaagatcaatgacaactaattacaatgtgtgactctggcttggctcctgtgattgttgggaaatcggaagtaactatacatagcatctattgaaacgtgataaaattttgaatacagactatggatttggtaatattgtattaatactgtagttcctgattttgatgagaggatgtccttgtttctaggaaatacacactgatatatttaatggtaatggaagtttactctcaacctgttcaaaataaactaatgtatatggaggggaaaaagatgaatttaggtaaaatgtgtaccagagttctttgtattatccttgcatcttctctataaatgataaatatattaaaattgaaagttaccaaaaactatatttagtccttgaaatatggaaaacatgatcattttgaaaagcatctgagccgggctcagtggctcacacctgtaatcccagcattttgggaggctgaggcaggcagattatttgagtttaggagttcaagacaagcctgggcaaaaatgtgagaccctgtctctacaaaaaatacaaagattagctgggcatggtagcttgcgcctgtggtcccagctacttgggaagctgaggttctaggactgttaattaccttcctctcttatgattatacagaacaggaggcatccttcccatttgatttcagaccaacaatcctagaactgctttctaaacaaggtgaacaatttaccttgtgtgagagaaggcagtgtgggtgtaggtttattgtggggagtgtgcttgttaataatgaggctaagaaaggaggcaggccagaaatgcaaacaaacaaacaaaaaaaaattctgctcatttcaatttttgccccagcaagaaccttgagctcagttctcagaggtgagagttctaacacagaaagcacccagaaagggcactgaggtctgagaagcaaggaagtgacccaggttgtttgcctctggtcggaaagggaaactacccctgcttccactctgacagcagacaagttaatcaacctactcaattgcatttttggcccattccccatttccaacatgaacagttcctcccctccagcccaatgccactctaggcagtcaccaagaggtaagatttctgaaatcaaaacttgaattaaccaacaaaggaacatcaattctagaacggattgtaacagggatttttgtcttttttctctgctgtatccccaagatctatattatatattctgtggttttggcacatagtaattgctcagtaaagctgtgttgagttacttgataaaaagtaagtcagtagaaataacttaaatgctcaacattaatgtcattggttaagtagcaatgcatagaactaaatattatgctattaaaaagtttatttgtaaagtcaaggatatggaaaaatatttgatacatacatatctttttgagataggttctcactctatcaccaaggctggagggtagtggcaagaccatagctcactgcagcctccaactcccaggctcaagcaatcttccagcctcaggctcccaagcagctgggactacaggtgtgcaccaccaagcccagctgattttttttttttgaaagaaggggtctcactatgttgcccaggctagtcttgaattcctgacctcaagtgatcctcctgccccggaatcccaaagtgctgggattacgggcatgagccacagtgtgggactgatacatttttgaaaaaaggaaacaacatatattcatgaaggaaatacacaccctcctggtgagtttatgtatgatttttgttttgttgttttctgtgttatctgatcacaaattactttccttttcaggaagaaaaaaatttaattttttttttattggggcaacatccaacccagatatgattactacctagcctgaactgaatgtattactaataaacaaagaaatgcagaatggcatacagtcggtaaagcgtagtgcttgagagcatggattatggagactatttaaatactggctccataacttaatagcttgggacccacggtgttacttagcttctatctgctttaatttactcatctgtaaacttgggataagatacttcctcataaggttggtgtgaagaccaagtgaattaactatcgtttaaagcacttacaaaagtgccgggcaccaccgagatatgcatccgttagcttttattattattagactcaaaacactgtagtagttctaatgagaggggtaagaatcaaaaatccaggcacctgcatagagccagagaggcacacatagaagcaacgtaagagtggaagcggaatgaaaacatgctaaagccaggtacaagccacaagcgagggtccacaggaagaaattgttaattctgaagagagtgaatgcacgaagttacaggaaaaataacatctgaacagagtttaagaatgagcaggacttcaacaagtggctagtaagacataaggaacctacaaaagatcttagcaaaggcgcaaagattaccatcgtattgctcgtttcttcctactttgcagaagtaacctctggcgaacagaggtggttgcagagcatgcttatcaagcaaaataccacgaagcagtaaggaacgacagagataacagtaacaataataattcaccccaaggtactcaactggaaaaaggaaatacagaggagaggtgtcgttaagaaagccaggacgcacatcacggccccgtcgctgcactactctcgtctaggggtcaacagtggagtcgagactcgaagcttccacgcggcggaacagcgtccctctcaggcggcgaacgggctagggaagcgcccggaggagacctagcgtgagaactacaactcccgcggagcccgagggcgagctgcctgcgtaacttccgcttccgccacctgcccctcgcaccctcttcactcgaaccctacccgggagcggtcaggcgcgtgaccccgcgtgaccggggtgcgcgagccgagaggccctggaagcgggactctgggaccccattgaaagaaaggcaaccagaaaaggcgaaacgacaacctcgatagtgattggagctgayggaacgagggcggagctaaagtcccagaatactggccaatcagagtttaagattatcagggagcccgggaaggggaaaggggcgaaatggttctatggtcacatgccgcggggtctggtgggaggagcggttgcccagcggcctcttggcgcttcctgtttccggttcccagagtggggcacagcgaggcgctagggrgaacgctggcctctgaaactagctctgggaccggggtctgcggccggcccctagctggccccgtctcccatccccagaagggtrttcactggggattctgagctttggctactccagtttcccacgacacgtgagtgtgaggggcgtggaggaggaggcgggctgggttgcgctcacacttaagcgtctgtgacaggagccggaatcgcattctcccttgaccatggttctagcyaaagatctggctgaggagccctaagggtagaatggaggcggaggcatgagagcggagagtcacggagttccgaaaggtgtgagggagaaaggacttccaagaccagagaggggatttacgatatttagaaagcagggaaaggaaaataccccaagtatggagtccgttggaggtgttggtggatttatttgtaggaggaattttggcctgcatcacggtgggaggtcaagtggcatcatttggagagggtatggctacaagcgcttggaaagtcgggacactagacagagcgagaatttctggcaccctgggagagctttgagggggatgcgactgtggtgtggataagaatggctgayggacggattatcttgtgttcctcgttgtggggagcttccgctcttgggacatagccgctacttgtctgaggctccttctctcttgagttctttcagcattaggccttttagccaattgaggctgcttttctaaacatgtaggctgctggagaaaaagggataaggactgctacatcagaaaggagccagcgggaagacagtagaaattccactggtaaatggccatggctgtcttaacagatggggaagtgagtgctacagaggcccagtggtgtaagctgcttcccagttgctggcttagtcattggccaccctaataaaggataatttttagcattgccaaataaaatagatctgtcgttagagaataagaaaactgaaagatttttcaagatcataaaatcctgctccttatttccaaagtatatagacaaactcttgtaccttgagaatctaattgtagcatattaaaagggggctacygggcccttccatttcattctcttcctgattgttgcacccctatgtttataagttttccagcagttatctttatgccacgaatcgtctaaattgccccagtaacttcacacacatttaatatctgtgtaatgtacagcaagtaatttaacaagtaattctgtaaagcatcagttttctcatctgtgaagtatgaaaaattatacctattttctgggttgtgaagatgaatgaacataatctagggaaaacatttagcgcatatgccactgaattaaagagaagcagcttaaatttaaagacaagccttaagcaggaaagaagaatacagtataaatttattatcctaactttttgaataataagcaaatgaaagatagttcaactcagctaatggctgaggtgtttaacctttcatcccttcctaattttgtgagattccttgttctaatttaggaaaagaaatcaactgtcagtttttaattaggtcctgagagactggaaaggaaaatggcaggctaagtcagtctagaagaaggagtctcctatttctttttagtgagtcagctggtcaagttgtgtgttgagcagtgggttaacttagggaaggtgggagttggaggtctgagttctttatttcacctcctattcagtcaactgtgtgaggaatcacttccccttcacttcttagtagaaaaaaaaaaaaacccacagttttggctgtctactctcatctccaaaaaattgttatgcacatagtggaaatatacatgtagttgttcaacacagaccatgagctctggagctagactctctggctcactccactagctgtgtctcagttttcttactggtaaaatagcaacaataattgtatttactcataaggttgtgaggattaattagttaattaatatatgttaagtgctttgaacagcacctggcccaaggcagtagtctgttgtttcctgctgttgtgtggtttcagtgcattaaatgtgttatgagggccttggacctcttggttagctatgattattctatggaaactaccataatattacagtagagaattgatgtttggggtacaggaagtcaggtagacaatttcccgggattttttgctttagtggggtgtgggaagtggaaggtcagatgttaggttgtttaggggaatggggaaagtgcattcacggccaaggttggagcttccattttcccatcttcaaactcattagtacccatgaaaattctgcctgtttcaagttttatattttaaaaatgaggtggagtaagtggacccgcatgaaaaagaactagagaactttaaagaatattcaaaccaaagtccagacttgcagcgttttttgtaagtgagaaaagtttagaagagttaaatcaggaaattgtccgtgatactcttggaataaacaagtagcaatggcctgagggatcattaacagataccagagtaaagtgttttgcaagggtaagtcagtctgtcctgggtatgaagatggataagagaaaagaaaatgttaggttttggtggggtttttttgccaaaaccayaatgacctttgcaccagtctagtaagtttgggaargagagctgtctgtgtgttttcattcctagagcagtacaagcagcaggtgcattgaatttactcaattgtaaagtggcttggtgatccccaatttgttgtcattgatttgtagtgtaaaagacaactgtacttatgggaagtctagaaacccttgagatttgtgacctgtagaggccaaagaggtttcagaagactacatcaagccatcaaacagtaaagaggcaaggatggctccacccaagctgtcatcattcttttttaagttctttcatttccctcttcccaactttgtagtttgttctgaaagactcacctatacattagactacaagttacatataaatgaattttctgctgcagatgctcttgttacagagatattaaaatgtactatgtgttgcatatgccagagaatcttgtactttctggataattaaaataccatcgatttattacacattcatacgctttatctctttcctctctctcctgatcctayctgccctccccaacacacactctctcccaaaggatgttccctttctacagctgctggaggactggactgctactactactcctggctgtggcagtgagagaatcctggcagacagaagaaaaaacttgcgacttggtaggagaaaagggtaaagagtcagagaaagagttggctctagtgaagaggctgaaaccactgtttaataaaaggtaaatgagaagaaccttaaagagcttgagaaaatatttatgttaaagtcttttcttcttactgattttatttcataatgtgctctcttttatgacatagagcaaattctcagcccagtttttagttgctgtgtgcagttttctcatctttcacagaagtgtagctatttccaagactggatccaagagaccagcttgtagaaatttaaggattatttgacacctacatataataggactttagaaatatcarataaacatatttaggccgacacatgtcattataagtgtcaggaaccttcagatatataaatctgaagttggtccctaagaaacgagactatccgatgaacatgggcccttattcattggaacatggttactaacaggcattctaaaaataactagaatattgagctatcaagatagctcaagtgtgttttaataattcatcatcagcaataaggatggtctgtcaaggttatgaatatcttaaaattaaacaaatattcactcagccatgacctcaaataaataaatcgagcatgttgtttgttttgttttaattaaggaaagggatgctgttattcctgaggctgatagctagtaactctcctcttctttcttcccacttctctttacagctttgagagcactgtgggccagggttcagacacatacatctacatcttcagggtgtgccgggaagctggcaaccacacttctggggcaggcctggtgcaaatcaacaaaagtaatgggaaggagacagtggtagggagactcaacgagactcacatcttcaacggaagtaagaaaactccccttcctaccatcgattgactaactgatcccaagtcaatccctctgacaatcctgtatgtcttggccktttctagtgtcttcagcatatcatacgtgtsgttcggcacacctgagactgtaatataccacaggatgcctaattccacagctcctctgtaagccacagctcaggacagttgtgcattaaaatcagtgaaaaacttaygcaaaatgaagactctagccagaattgttttgttttgttttgagacggagtctctctctgtcacccagcctggagtgcagtggcacaatctcggctcactgcaacctcagcctcttgggttcaagcgattctccagcctcagcctcctgagtagctgggactacaggtgtgtgccatcatgcccagctaatttttgtatttttagcagagacagggtttcacaatgttggccatgatggtcttgatctttgacctcgtgatctgcccacctyggcctcccaaggtgctgggattacaggcatgaaccaccgcgcccagccaactctagccagaattctgtagcctagagtccttttattcacccaaatacttttaatgagtttcacactagacttamaaataccaaccaccaccaccacttttcatcaaattaatcaaagtttaccagttaaattttaagagctcaaacttttttttgcaaactactcagtctgcaaaactttacccactgatttttgtgctatggtggtgatatttcttaaaagtcatattgctggagakgaccatgtaagcacctatggtccaattccctcccatacagataaataagttatacaaggtagctatttactcctggtaaataatacaataaaaaagtaacaaaagggtttggggctggggatcatgtgaccaggttctcctcctgtttcctaatcctgtgactgraaagtcgtatcaccttttgacsttgttttctcatatgcaaaactaggagcagaatctttaccttattcacctcacaattactgaatcaaatgatattttgcaaaagaactgaacacagtaaatactaaagaagagatatgcattccaatcttagatatccactctgaatttatctggggctaagttgaaatcttagatgggcttacccctgctgctcagcaattgtatggaacctctttttttgcttttagaaggtattcagaaaatgaatcagtgttaaggtatggatcataattggttttgcattgtcagttgcctacctttaatgttaaaaattaagattattcttaaatgaatatctgattcttgtcttaagggaacacaagtctttgtaagcaaacaagtttagcttggcatttctggtataccaagttcgtactgatgagggttgtttagttataaccaattgcaatgaattacgcaattccactctgccataccacccagatctgcctctgcttttcccccaccccatagctccattttccttgtccctcctcaggtaattggatcatgctgatctataaagggggtgatgaatatgacaaccactgtggcaaggagcagcgtcgtgcagtggtgatgatctcctgcaatcgacacaccctagcggtgaggcaccctgtgttgtataagccgagggaggagactgaaaggactgacctgaggttggggagaatatccagaggggacacratacgttgggatggacattagaaaactaggagctcagtttctctctgtgtcagacacgcatcttccatggaaaataggctgctgaaccaggaaggagcagatgttttttgggttttttattttgttggacaggagtcaaaacacytaaccacctgaatgtgttatgccatctcatcatcaggacaattttaaccctgtgtctgaggagcgtggcaaagtccaagattgtttctacctctttgagatggatagcagcctggcctgttcaccagagatctcccacctcagtgtgggttccatcttacttgtcacgtgagtatgccttcctttatcagaacagaccttccttccttttgtttttaaggtcagtaactatatggtggtacataagcacaaattgtatgtgtacattatgctgtaattgatggggataactttttaaatcctctggctataaaataattctgccaggacacagggctcacgcctgtaatcccagcactttgggaagccaaggcagatggatcacctaaggtcaggagtttgagaccaacctgaccaacrtgatgaaactccgtctctactaaaaatacaaaattagccagcacagtggcacatgcctgtaatcccagctacttgggaggctgaggcagtagaatcacttgaacctgggaggtggaggttgcagtgagctgaggtcgcaccattgcactccagcctgggcaacaagggcaaaactccgtctaaaaaaaaaaaaaaaaattctgactgcaagtttttgaaaaatgagatttaatgtttagttgccggtatagatttgcatttggaggtgcttttttcccctactgcaggactaggcaatttttatattatttcattagattatgagaacttctagagaaatggaakcatatacttaatggtgattattcttggccatagaatcacacgctgtcacattttgtctgggcctttgcttctcttggactgacagcactctaactggttttctaagagttaccagccccctttttcatttagwatcactactcatttttccttttcagggaatgtatcttaggaracagctgacaataaatgcagaggttatcctatctgagtttttactatttcccagttcttaagtatagatgtctttctctctctacaggtttgcatcactggttgctgtttatgttgttggggggttcctataccagcgactggtagtgggagccaaaggaatggagcagtttccccacttagccttctggcaggatcttggcaacctggtagcagtaagtaacagggcagctggttgaatttgtagcctgcaaacaaggttgggtgaccaaccatcctcgtttgttcacactgagggggttcctgggacacaggacattgagtgctaaaaccacaaaagtcccagcaaacaagacagttgccctagtacagagtagtaagtggcacagcatccatttctggccttggtaagacattgctgaaagagcaacactgttgaccagatgggctcttctaaatctgatttagcttttaagagggcctgggtgggaagaaggtgaggcctaataagaagaaactttttctcctgttgccccaaattgaatttaggctgattgtcagatcttttaggttttctcattatccctatagaaaaccaattcttgccacattcctagaccataagtacactttctcatatcctaaagttagatgctgcgaattatttccttyttttttytccccctacaggatggctgtgactttgtctgccgttctaaacctcgaaatgtgcctgcagcatatcgtggtgtgggggatgaccagctgggggaggagtcagaagaaagggatgaccatttattaccaatgtagattgcactttatatgtccagcctcttcctcagtcccccaaaccaaagctacacagccagatttctcaagcagtctcaactccagtccctcatctcacccttactattgctcttgcttyccagtttgcttttgatttgcatcttytcactagtaaaactgccttccctttgttccttattttctgttttttctctagagaggtacagttgtaagtcagagttaatataatagggcctgtgaaaacagaggcttttgcattgtctcttgacatcagaagttacaataggcatatgggcaaaatggtgtagcaggctcactggccgtttgttttttaaacacattttcacaagtttttgagacactggatttctttaattaaaaaaaaaatgccaagaaacattatttatacagggttgattgytttcatgttgttattctgtaccctatagtagcctccatgagaatctggtatttyttgctgcttggaactactttgcagkgattacttggttgcagtccaagtactctcgtttagtctgagcctggagatgttctagacttgcttctcccacctctgagattaggacaggaaaaatgtgaaatttcccaattacaggattatacggtaccatcacatcatttgtggaaattggggtgactgtatagctgggattgggctaaggactgtggtcttatctgtccacatacagccaaaatgcctatccagaaatccagttcgttggaaaggaaaattggtactcctgtgccacaggggttccagaaaagggaagtcactttaccttgcggtggtgggatcctgatgtctttcatccatttgtagtaaaagctggtaaagcttttcttaytcctggttccctaccagtatttctaaacatgtcgcactttctccacaggcatgtggttttgacctttttttcaatcttctagaaagggaacggaagcagaagtgggacatcgagggctctgctgtcctctgcgctgggtgtggaatgctgctgcacctgtcccttctgctggctcagggaagtgtcttcttgcccacatttctgtggggaaaggtttttaatcctctgatgcttccatcttcctgtttaggccatgtgcccagaaacctggactgatctttctttaatagtgaacccctgggccactgaagagtaacatgrctccactggacacaaaagagggatggaatcaayaggcaggggsccttttataagccttaggaaaagaaaatgaaactatttcatctttggacttttcaatactattggagtgattttttttctttctaaacagggaaaataatgttacaaaagcatcttttttgttatttgtttgcatcccycccccacaccctggtgttttaaaatgaagaaaaaaaaccatcacyttttgtacaaaaactcttaatgattaaamaacaaacaaaacatattggccttgtcatttgtgtgaaagtgggcaaagactggaatagagtaagacaactgaaaccaattttcatccttttactgaggaaaaaaatatttaatatttttgttatataaggaatagtgcctaaggcaggtacttatactcctgacctcagccccacacactctggttttataaagctayaggacagagcagagatggaactgaaaaacagggtagaaaataacataaattggaggggaacagtgggatgcagaaagaatgacaacagccacatgtgccccagtcaaatacttttagtccctgcagcagaagatgccaaccaagtctctataytggctggggatcctgccatggatgcaggagaaaaaattcaatcacaagggagtaagtgacaacaaaaaraaaaaactctgagccacagctacactgggagggggraggaccagattttgctacttctgtcacacaagctagaaaaaccctacctctcccattgggcaggcaacctgacattccacccagttccttgccttaccatactatgtattcctcctcttggagaattaagacctgggctaaatgctccactccrggataaggctgagcagtcctagttctctagactgcctcttttataaagattggattaaggtacgtgaaatggtgagaactgtaaagattttaaaaaataaagtagaacccagagaaaatgtcaaagctgccgccatgtagcaccagcaaccaattcttgcacttctcttccctgtctcagtaatcccctacagaaggttacatgattggaacaactctttcttccctgcaaagtctgctggtaccaggttataacctggacagtggagagtgtctgccttaggctggtttgtgcaagagggccaccttaggtctccttgaggacatttatcttggcgcagatcttgagggcagggcccagcttgatgttcatggcactcataagatgttcttctttaagtaataaaagggcctgtccatcaatctcctgtgagcgaaattcctctgcaatctcttggcagcctagaagaaatggtgagaacatgtaggtaatgccagatgataggagaagggaagctaaatgaaactgaggtctagcaatgattaattccaaagtacctgtcctaaattcagtaatatgaagtcagatggcaagctttaaaagcaaaatgaaattagaaagcaactggtatttaaaaaatggccaggtgcagaggctcacgcctataatcccagcattttaggagaccagggcaggcagatcacttgagctcaggagttcaagaccatcctgggcaacatggcaaaaccttgactctacaaaacatacaaaaatcagctgggcatggtgatgcatgcctatagtcccagctactcgggaagctgaggcaggaggatcatttgagcccaggatgcggaggttgcagtgtgccaaaattcatgccacagcactccagcctgggcaacagagtaagactctgtctcaaaacaacaacaacaacaaaaccaaagtccaagaccaagaaaggaaaagcaactaaattgttcaaccacagaaataacttcattcaaatagcttagagacaggggaaagggagagaacagaaataaaagcatgttttcttttatactggcaaaaagattctttgtgatatttttgtttaagggcccagaattcagacaaatagcaagaagggtagggtgattttcatttccgaaaaaaactctgtcaaaattgcatataggctgagtgcagtggctcacacctataatcccagcactttgggaagccaaggcagaaggatatcttgagcccaggactccaagaccagcctgggcaacatagggaatccctgtctctgtttaaaaaaaaaaaaaaaagaagactagcaaacaagccctctttgaagagtggggcaacaatggccacttagtttctaataccctgctccactgaaaaaaaaaattttttccccatgggaggtatcatagttaattacacaaaaacattttatccaaaaatttagtgaraaatgcagctacatcataagatgagaatcaaayactgtaaaattgctgacattacagaagataatgtcaacccagaaaaaaattaggaagtcaacttgaatattaggagtagagcctctatattagcattcaagctcctactgcttaaaagtcaattactttccctcttatcaaggcccctgtgggatgatgttaaggaaaacaacctgggttctgttgaagaragggtcagtaccttggagagaagcaataaactcgtacacctcctctacactccaacggctgggattactggacaggaacacagggttgatgccatgtaattccggtgtaggtggagctgtattgggattccccaggtcaygttctccatgcccagctcttactgataaaggcccaggagatgttggagagagtgcttcatcataactggaattatctgaaccccggctagagtcttcttgaccctataggggaaaagagcaaaccaatgaggtcagtgtcaaaggtttattcctctctctttcttcccaaaccaccctgggttgggcgtagaagaaaaactcatcttatcatatgtgaaataagcagcaytttatttgcaaattcccaaaatctactctcaaagtctttcaaatagaaactgtatcacttccttgattctccccatgacctaacaattgatctagattttctctcaagtacaattgagagaaattgagtacaattgagtacaattaacaattgtactcaagtacagtgtaaggattaatggaaacatgaaccagtagttgggtaagaggtcyggagacaaagggggtcaggatctcttggaatttgtagtaatgcaatcaatgtgaaaccagagttctcatctcacaccctcttacctgggcaaatgaattgccctgcagggaaagaaaaaaagacccagtttaaaggcatctggctctacaacaagcagctcacccggtggcacttgccctgaatcttggcacgggcaatgtcagaggagctgcggcggggtccacgcctgcgaacgcgagcatagttggcttcttgaaactctttcatttttttcctcttcagccggaactgatggctacagctcacattgtacctacaggacagggcatatataggatgtcaatagygccacagargaccaccctgctctaaatgtgaatttctgcttatgagctgatttggggaagggaataaaagcaaggagggagacataaaatatcagctakgagacgatcctggggaaggggtgtaacattagatggagataccagtgctgagggcaaggaggagggtgcccagagtacctcttagcgcaagtcatggagcagaacctcttagagccacgaaactgctctgcgggggcgtacttcccacagtactcgcacttcaggagattcgccttcttatctaactctaaaaaacaaggtattgctggacagtcaccatgggtttctgctgcccctcaggcaatcattaggctcagagctggattctaaaattattctcagggttcacccccaaaaacctacacaacctagttgagaatccctaaaacgcaaagttcaaaacctaaaatcacgaagacttgtcccktgagaactttatgacgtcttcctaaccttaagccgaactctctccattttagatgtcttactaattttatcctaattcatactcttagatttcagatatgattcaatttctgaggagagaggaactactaatgcctagaaagatataagatccttctaccacaaagatttccaaaagcagtgggaaaatcagtaagagtccttaagatagattataaaatctagaataaggagaactggaaattaaagatayaaatgtcctattttagatcatcttttggaaaaaaaaatttttttgagacagtctcactctgtcacccgggctggagtgccgtggtgctatcttggatcgctgcaacctccacctcccgggctcaagcgatcctcccactttggcctcccaagtagctgggactacaggcatgtgccacaatgcccagttaatttttatatttttttgtagagacaaggtttcactatgttgctcaggctggtctcaaactcctgagctcaagaaatccaccggccttggcctcccaaagtactggaattataggtgagagtcatcacactcggccaaaaaatacatctatagagtaaagaataattcaagggccaggcgtggtggctcacgcctgtaatcccagcactttgggaggccaaggcgggcggatcacctgaggtcgggagttggcgactactagcctgaccaacatgcagaaaccccgtctctactaaaaatacaaaaattagccaggcgtggtggcgcatgcctgtaatcccagttactcgggaggctgaggcaggagaatcgcttgaacccaggaggcactggttgcggtgagccaagatcccaccattgcactccagcctgggcaacaagagcgaaactccgtctcaaaaaaaaataataataataattcaaaagattactttagctggataaattcccctcaccttatgtaattccttttccgtgattctacatactctgatatataatatggtttctatatgtagacagacttcattttattcctacttttttttgagacagagtctcgctctgtcgcccaggctggagtgcggtggcgtgcagctcacttcactgcaacctccgcctcccaggttcaagtggttctcccgcctcagcctcccgagtagctgggactatagacgcatgctgccacaccaggctaatttttgtatttgtagtagagacagggtttcactatgttggccagactggtctcaaactcctgacctcaggtgatatgcctgccttggcctcccaaagtgctgggattacaggcatgagccactgtgccaggcctcatttctactttaaataaataggtaactactattttacaccgagtcctcaaacacatctccacgagtctccttcccccaaatgagtctctaaataaatgctcaccagcagatgggctgtccactcccaaagggccacctgactgattctcagtcagccctgtcggaaggccagtctgtagtggcttctcagactccttcagtaactgagaacaacccacctgtcccagaaaacattgagagttaagttagcctgatccccttctgcttctctatagctttccccaacatttccccatcaattatgyctctgcttggatctctgagttaatgaccaagtctggttcagagagaatcactttcaatacggtaatcaagagtagtaactggtctctatacaatgtttggaaatgagaaaaaaaaaatagtaactggctttttttccagataagccattggagaacaggttcctacgctggctccctattttgtcctcttccttcctatggtgctgagaatgcactaggagtcaagacacctcagttctagtcctggttctgcaaaccctaggaaagctccttaacttcattactataattttattcattataaaacaaactagtttatctaactaaacattacagttttaaaggttactttcttcctttttttctcctcttcctaacattttcattttatggtccacacactcttttccctttccttctttataattaaataaatagcgtaattgaaccattctttcattaaatagttctgtgccttttacttttactggagtttgaaaagacaacaatcagaccaagtccccacttcaaagtcccaccttatggccctgycctcaccgggaaaggttctgctccttcctggataacaaagccttcaatgatgtgggtgagaatctggggcttcacgatggcctgtgggggttttgagtcacccatttgtctagacaccatggctagtgtaggaggcggtactgaaggggcgggggtcaaggctactagttcactgcttggagyattagcattcacattagccactgattcagctttttctggaaaacaaacacagattaagcaacagacatgagatgacatattgatccatctattagttgagccagcatgatcttccataataatctatgtccacccttgacaattcacctggattccctgtttttggatctattcatttgtccaccaacttctggcccattttctactcaaccagwtttatcttttagctcactcagaacattcctctactctgtgtgctctccaacagcattagaagtcagttactcacctccaagactgctcttctcgtccatgacttttgggctttctgctactggagatgcyttggcaggaagcattgaacccaatgtggagacatcatctctctcctcctcagagtcagccttgcgtttgacagccaatgtctggggtttaccctataccgtaaagaataggaaagaaacaaagatgtacaaatgaaggataataaggaaccacaattattaccatatgttcaaagaaaattttcttagttccagatttcccaatttatctacttcccatggtacactaaaattcctggtcattcctagtaactttccatcaggacaaaagaaaatgtaacatgatttagtcctgacctaggtcttgagaccctgtattcacgtagaccaaccaagaactgttgttttttcaaagactgatttggttaaggctatcttgatctaacttattacatacccaaaaacccagaatagtatcagcaacaaatttaggartataaagttcagatattatataatgtgtcactctcttacagaagaagcagataaataccaatattaaccctcttaactctttattcccctattcaattaagctctatttccacttagcccaggtccactctcatgcataatagtgccctcaaaaccatcagacatcactcaccggcaagtgcacagactgcatatagaaggcagcagggacctgggctacaacaggtgaggaggtggtagccccaccctttaccacatgtgctgtcccctgcacaggagcaagggtcatcccaggggccaatgtgggagggcactcctgcagtgcaccaggagcctgggatgaaggtggcgaggaggccaaatgggcctgaccagactgcactgtacctggcatcccccgggaagtaggtacagcagctgccagctgtgccaaccccaaagcctgtgcctgggctgtacctggctgtcgagtgcctacaacttgcacagggatatggggtggtggttgctgggcagctgacatcttagcrgcccctaactgaggcggcttgataggtgctacaggtggtttggattggatgggaattggtggcttaggggctgcatcaggtggaagagacaagggtgaagactgaagcatgggctgaacgaccagggtttgggcttkctgctgggactgggaaggtgggacctgctgagtaggtgggacctgtggtggctgaggggcagtgagggtggtggcttgcggctgctgctgttgctgctgttgctgttgttgctgctgctgctgctgcgccaactggaggtgtgtagctgtgtgaaggagctgggactgccggtgctggaactgctgctggtggtggatggcaatctgctgctggatcaccacctgtttctgctggaggtggatctgttgctgttgctgaatcagtgaatggggctggatctgtgtgtaggtggctataggaacaatcccagaatacaacagagagaaaaaagagcagagaataataatcattytaaattaaaagtaaattcatttttccaaggtataacctagttttggaattatgcggtgaaaagaaatctagtcagtatgaaacttggacatcacttcgtccatactcttcccactcaatcagacattaccaactactactagtcttaaagatctcagagaaagaactyccttgctcagtcatttcagatcctgagtaatttcttgtgtctcttatctttgccatacttaaatattgtattcttttactctgtactcagcaaagaagaatggttagcccctcctccattagacttggagtttctcaaaggctgaatccatgttttattcattttcacatccctaaaacacagcccagggcctgacactgcagaagcacttaatattcactgaaagaagagatacccacagagttaaagatgycaacgtcwtcccacaaatgacttggattttacaaatcatcagcttagaccaccatctgagtcttgagagtcagcacctgtcagctctgacctaactcagtttcctccactgtaaactgggagtgacaaactctacttctccatrttgtaccagattgtccagagatcaaagcatgtgatgataaagcaatttagaaatagaactgctagagtatataaataccaagtatagtaataactaactcttaatttttttgtgagtaaattatctaaatacatcaacaactaaggtactagaaacaaraaaaggcaaaaatcaacatgaccaaataagatacacacatctaactacatcttacccgcagtctgaaagcaagtataaactatcagagtcttgccctgtcacccaggctggagtgcagtggtgtgatcccagctcactgcaacctctgccaaccgggttcaagctactctcctgcttcagcctcccgagcagctgggactacaggtgtaaaccactacgcccggctaatttttgtatttttagtagagacggggtttcaccatgatggccaggctagtctcaaactctgacctcaagtgatccacctgccttggccttccaaagtgctgggattacaggactgagccaccgcaccccgcctctccattagtcttaagtgctctaaggcattgtactgtatctgctatacactggatcaagtaaccacattaaacagtgaggtgagaattcatcccttatagtaaatgctaagttacatgaagacagggaatctacttttcaaaaatgtatccccagtaattcctagaaaacagtaagcaattcagtaagatgtgatgaatgaatagacagagtgataaaactgaagaactcacagcctaagaaagcggacaggggaacttgtaagctgactactgcctggtagaaacagataaaatctgtatctgtcacttgtcctcctgaccctgaactaatatgttcaaggctgatattattcccattccttccactattcaaggaccaacagaagcggggaaaaaacaaaaaggcaaagaaaaaaaggcaaaaaaagaaaaaaaggaaaatttcacatgaattctgagagaataatgacatgaggaatgacaatttacctgagctaataagtgtctggctgggcgcaggtgtggctgtccgtgtcaggttcatgcccacattctgctggccactcccatctgcttctgccttcttggcwkctgcactttctgcctctgtctggctgccctggctcacagtcactgtttgggctgcaggcaagggctgcaccactcctgtacccttcctgggacagctcccaccacccattcctgaggaaggcaactgacccaaaccaccatgtgcctgcccacctccacctggacccatggaccctgggatgctattcccactgcctccaccagcttgactaaggttgagggactggtttgtggccccagaggaagcctgtgccaccgctagggcctggctagaggcctgggagaggctagagacaggggaggctcctggaggaatggccttctgagtggagccttgcatctgaggtccttgagctgaggcctgttgattccttactgccaagttctgaacctgaaagatacgaaaaaacagattgagaaaaggaggactggaggcattaaggttaaagattcaaaagcagccaggactgctattgtgtcgtattccacagaatacctcagctcgtatctctgcctttaccatatactttaaggccttcctacctcctaaggaggaactctggctccgtatctgattcttcagccatcttcactcactagcaagtttatcatcaagtgtggtcttttattccttcaaaatatctcttcaattatccctttcctcgccattcaatcattcagcacctcccaaaaacctactatgcttcaggtactacactggatactggaaatgcagaggaaagacacagtctctgctcttaatgattactttctactacagaagacaagaaaattatcacttatgacataataagatgtatagatatgcacccagtaccataggagtacagagaaggaatatcaactaagactagggagatcaaggaagggcttcctaaaacaagtgatactgatgtgacactcagtaggtaatggtgaaggtgggggtttaaagatattgataacagcatttgcaaggccagaaccaaaaaaggattattatttaggctgggcgctatgactcatgcctgtaatcccaacactttgggaggccaagacggacagactgcttgagttcaggagttcgagaacagcctgggcaacactgcctctacaaaaaaatacagaaaattagccaggtatggtggcaaacacctgtagtcccagctactcaggaggccaaggtgaaaggatcacttgagcctgggaggcagagactgcagtgagctgagatcacgccactgcactccagcctgggtaacagagtgagaccctgtccagaaaaaaaaaaaaagacattattttaaaatattattaaaaaaaatgtataatttctaaaaagactgtatttttagaaattataaatatttcattatgtttggggagagttacaaggaatggaaagaaataaagcaaggaaggcaggctgtggataaggaggtaggaaggtgctgggccagtaagggcctggtgtattgaaacaaggaatctgaactttagtttgggaacagcaagtttatctgtcttattcattgttatattcctagcaccttcacagttccggcacatagtcagtactccaaaatatggataaagggaaagaatgatgtctgcttaactgattataggaagccaataaagcttattaatcaaaataaacattcacttatacatttatacatttctgattgaagtataaatcaatacacttcctattttagaaaatatttgttatcatatcctaaagttgaacattcacacaccctctaacccaggaattccacaagacaaactcttgccatgtaccacaggaggcatgtgtaggaatgttcatggtggcattattcattagcaaccacgacctggaatcaactcaaagggccatctacagaagagaagatgaataaactatagtatattcatacaatggaatagtatatagaaactacaattaataaactccaatgactgcaacaaaacaaatggatcgtgacaatgttattaagaaagcactctccaaaagtgtacatacagcacgagtaccttacacatttcaatacaattaaaatatatacatggtgtctggggtttgcttcaaaatattccacaggcagagaagggcctgaatgcattggtcatgtgtcgataattgttgaagctggatggtaagtacacaggaattcatactttttctgtttttgtgtacctttaaaattttctataataaaaagggcattttagaaacatagagagatgcaataaaaccatataaaaaaggacccgagggaagaatggacttagaaatcagaaggctcgttactgtgggtaatggaaggcagtagacggaactgcacactgcttattacattattaaaaattacagagtaaataaattttaacagttatgacgagaccaacagtgagagagtgtcatgatccaaggattacaattttatcaaattctgtgtaccagaagtacgattaaaaaattagtagtaacaacatatattttcttatttaaaaaaacatagtaaaagtttcctgatagtaatgtggaaaagaactacaagtaggttaagactgaagtgaagaagaccatgtagaaatctagtacaataggccggtgcagtggctcacgcctataatcctagcactttgggagaccaaggtgggcagactgcctgagctcaggagttccagaccagcaggagcaacatggagaaaccccgtcttctactaaaaatacaaaacattagctgggcatagtggcacgcgcctgtaatcaagctactcaggaggctgaggtacaagaatcgcttgaacccagaaggcagaagttgcagtgagccgagatcacaccacagcactccagcctgagcaacagagactctgtctcaaaaaaaaaaaaaaagaaagaaagaaagaaagaaagaaagaaagaaagaaagaaagaaagaaagaaagaaagaaaactagtacagtacaggttaaaataataaaaacctgaattcaggcaggagcagtaaagagttgatggcttttgagagatattgacaagaatcatcaggattgggtgctagagcacataatattatctggcaattattaatatacagtttttccaatcagcttcatttccataatggctatttcaaactttcccactctctccctatacctcagactaccttctctttctcctcctactcttcacctcttcagagaaaacaaaaaccattatatgagcattgcttcatcagttccaccaccgaatctatacatttatctgcatacacacccatcatttcccccttctctcctcttcctatcaaaaggcaatcagtccttctctgcactctatattccacctcctcctgccatctcaagcagcatataatatccactgcctcctcttccacttcttctccactggctccctcatcaccatgtaggaactgcacattcccctccccagttccaccttcctttcctggtgctgctaaactcttaatagctgtttacagtcactgtattcattcccaccagccattcacacccctcaaactcatactactttggattcaccaccccccaaacaactgaaacaactctccctccctgttaataaaaccatctttctttctctctctacattagaaagagatgccccctgcccacgcatgcgcgcatgcacacatgcacatcttgtaacatttggttcccttgccttcgtgacactacagtccagattttcctatctgctgctctttcccattcgcctctgtcagcccacgatcctctgtcgaccttgaactgcttttccaaagtgggggttcatcctacctcagggccccatattaaacgttcctctcctcaacctgtactatctccccaaacatttttttttttaagatggagtttcgccctcgttgcccaggctggagtacaacggcgcgatctcggctcactgcaacctccgcctcccaggttcaagtgattctcctgcctcagcctcccaagtaactgggattacagggatgtgccaccacgcccagctaatgtttgttatttttagtagagacggggtttcaccatgttgatcaggctggatggtctcgaactcctgacctcgggtgatccacccgcctcagcctcccaaagtgctgggattacaggcatgagccacagcgctggcctttttttttaagatggagtctcctctgttgaccaggctggagtgcagtggcacgatcttggctcactgcaacctccacctcccaggttcaagtgattctccttcctcagcctcccaagttaactggggctatgggcatgcaccaccacacccggctaattttttttctatgtttagtagagacagagtttgactacgctgcccaggttggtctcaaactcctgatctcaggtgatccgcccgcctcggcctcccaaagtgctgggattataggcatgagccactgtgcccggcctccccaggcaattttaaagactgaggagagtaaactaatttagtagatgggggacttcaattatcatctatatgcctactactctcaaatgtttatctccaacccagacctctcctctgagctcaagaaccacataataaaactgcagtctcagtatctcctcatggatggctcacaaacacttctaattaggtctgcatgtccaaaactgaacgtcactctaaatacactcctacattcttcgtctcataaacagcaccaccagccaccccacagatttcctatctggcatctcctttaattcccccatctactaaattagttcaccctcttcaatgattcttctaagttatcctcaaatctatgcatttctgtccatctccattgctacccccagtatgaacatcgtctgtcccttaaactgttagaacagttattctccctacagtcacactcacaccatatccgtttagtctccaaagaggaaatcaacatggtatttaaaaagcaaaacaaaacaaaaatacatccaaatctctctatgacacttccatatttaaaatccttctatagcttccaattgctttttataaaaagcccaaaatcctaaacacagcccccaaagccctgaaagataaggttcctcctacccgtctagccccactatgccaaactccaagaatacaagacttttaattcctctaacaaatcaagttcctgccctcctcaggacctttggacacactgttctcctgcctccaacactctccttccacattcttatctggctaacttctacacaccccaagttaaatgtcacctccttgacttttacaccccatgccaaagctaagttaggtccctttctaaattctcagaacactcggtactttctcaattatttccccattcaggtgactatcagtttaatgtctggtgtttcaatggtctgtgagctccacaaatgcagtgatcgtgactttcttgggcatccaacgctaaggaatgtttgatatattaatagcagtagtttctcctaaacactcactacgtccaggcattcttcaagcagtcaaacgcagcaactcacttagtcctcacaacacatcctgaggtaggtatattacaatacctattttacagatgaaaaaaacgataacagaaagatgtcagatcatttgcacagggtcacacagtaagtagtggagctggaatctgacccatcagatgcgtatttttaactactgccctctgttcctccacatattgacactcaaatatctgatgaatgaatgagcggataaatcaaagaactggatatggaaatggaaccaacctcactcgtggctcccattgctatcaccagagtctaaaacaaagacttgccttacagctagatgaccacaagagtttcttagcaagttccctaacttctcttctccaggaactgttagaacagttattctccctatagttcttcctaagtactttcctcatcttgttaatctgct

SEQ ID NO: 7041 - DNA, 33174 bp, Homo sapiens
agctaatttttgtatttttagtagagacggggtttcaccatgttggccaggctggtctcgaactggtgagctcaggtgatccatgtgccttggtctcctaaagtgatgggattacagccgtgaaccgccgtgcctggcccattttaccattttaaagatgacatctcattgcttttctccttttttgtttctgatgagaatttagctatcattcatgtgttgtttcccattattaatgtgttatttattttcctctggctgttttcagtattttctttttatctttggtttttattagttttagattatgttcttaggagtgattttccttctgtttatcttgatgcggattcagtgagtttcttatacctgtaggttgtatcccaaatttggggaatatttgatcattactttttcaaattcctttccgatttcattatatgtcccctttattttgggggacttcagtttcacttttgttatactatttggcattgttcataggtcactgaggttctgttcatttttttctcccattttttccctctattcttcatattggattatttttagcaatctgtcttcatgtttactgacctttttatctgccctcttctatttgctattaatctcattcagctattattattattattattgagatggagtctcgctctgtcacctaggctggagtgccgtagtgcaatctcagttcactgcaacctctgcctcctgggttcaagtgattctcctgcctcagcctcctgagcagctgggactataggcatgtgccgccaggccaggctaatgttttatatttttagtagagacagggtttcaccatgttggccaggctaatattttatgtttttagtagagacagggtttcaccatgttggccaggctggtcttgaactcctgacctcaaattatccacctgcccccgcctcccaaaatgctggattacagctgtgagccaccgtgcctggccctcattcagttatttttaaaaattatgaatgctgttctgttctggaatagtcacttgattctttttggtagtttctacttctctgagattcttcaaatttttattcattatgactatattttcttctaagtctttgaacgtatttatgcagatattaaagtccttgtttgctagttccagcatctatgttacataagtttcttttctacttactgacttttctttgatccatggcccatatattcttatttctttggattctaataatattttattgtatgctagatattaaatgtgatgcattatggctaatctgtgttatgtatcctcttttttgaagaaaagttttattggggaataatttcagatttacagaaatgtttttaagatagcacagaacatttctttatacctttcaccccatttcccctaatgttagcatcttaaaaaatcatggcacatttctcaaatgtaagaaatgaatattgctacattgtttgaattttaccagttttccactaatgctctttttgctgttccaagatccaatccaggataccacattacatctagttgttatatttattgttttcctctggtctatgacagtttctcagtgttttttttttttcgtgaacttgatatattttaagagtattggtcagatatttagtagagtaccactcaatttagaattatctgattttttttttgcatgtttacattggatgtgtaggggaaaactttcttcagctgtgtttttcttctgctttcacaccagcactaccacaattatcaacacagaagaagacttgtgtgaccaaatgtggtaggggtgttccccacataccaattagcagacaccaactgggtatcctctaattcaattccgacattatctacctggagatagtgttagatcttacatttcagggattcaatatgcaagatcaccccctacacccacagacaccagtcacaagtctgggcctctggaacatctgaccaataagcttcaagttgggatttccacagcttcccctttgagttcagttaatttgctggagcagctcacagaactcagggaaacccttatgtttatcagtttattataaagtatattacaaaagatacagatgaagagaactgtagggcagggtatggggaaaggggtgtggagcttccatgccctttctgggaaggctgctctccaggaatctccacaggttcagtcatctggaagcattctgacacagttctcttgggtttttatggaagcttcaggacatcagcattcttgctgctgaccccctccccttgtcaccccagtaaagggcaggaccctctctggggaaggttttaagacccacaatcagaaaggcaggggaaaattagagtcctgccttgaggcagatgaaaggagggcagaagaaggccagaggccttccccttggggcctgacacactcaacattataagaaaggactgtaacagggaccataggagttaggagccagaaactgtggatgaaaaccaatatatacatatgtataataccaccctggggttatggattttggggaacaaaccttactggttaggtgcttttatcattgcatcatattagggggtacatgatatcaacaagactcatcactggtggttcacgcagtgaaccctgttcatgtggttgaggtggtatttgccaagattctttaatgaatagttactatttccttttatccatagtgtactctttggaagtgagtctcttatccctgactaccctcaaagggaggagagttaaattccacatcctgaatggggagtatctacatatattatttggtattttctgtaagcaagatttgtcacttctcacctatttatttatttaaatcagtatggatttatatagtttttccccttgtgttataattcaacactgtcatttattttgttgttcatattgttccattgggagcttttccaggttggtttctgtgtcctgatatgctcccatctttttttttttaacttgcttattttttaacattaaaagactggaagatcctccaagcttattttgtactttccctgtcctggccctagaattagccatttcttcaaagagcccctgattcctatgttgccttctgatgtggtttggatctgcatccccacccaaatctgacgttgaattgtaatctccagtgttggagatggggcctggtgggaggtgattggatcacgcggatggtttttcatgaatggtttagtaccatacccctagagctgttctcctgatagagttcctcacaagacctggttgtttaaaagtgtgtaacacctccccgcgtctctcttgctcctgctctggccatgtaagacatttccctttgccttccaccatgactaagtttcctgaggcctgcccagaagcagatgccactatgcttcctgtacatcttgcagaactgtgagccaattaaacctcttttctttatcaattatttggcctcaggtatttctttatagcagtgcaagaatggactaatacaccttcctttttttaaaaaatgatcttaattattttaaagcatacaattcagtagtgttaagtattattatggactgaatgtttgtctcccccagattcacatattgaagccctaatcctcagtgtgactgtatttggagatggagtgtttaaggaagtaattaaggttaaatcaggttacaagggtggggccctgatctgataggattaatgttcttgtaagaagagagaccagagccctctctctttcttcccttgtgcacacactgaggaaaagccacttgaggatatagtgagaagtctgcaacccacaggggaagcactctccaaacaccaactctgctggcatcttgatcttagactttcagtctgtggaatgatgaaaatataaataaatttctgttgtttaagtcacctagtctatggtattttgttgtgatagtccaagcaagtgaatacaagaatattcacattgttgtgtaccgtatctccagaacttaatcacactgcaaaactgaaaccctgtacccattaagcaacttccttttctttttccctccaaacttctttcagtaaccattcttctttctttgtctatgggtttgactactttagattcctcatataagtggaatcacacagtatttgtcattttgtgatcagttcatttcacttagtataatgttttcaaggttcatcagtgttataaagtatgacaggatttcctttctaagactaatattccattgtatgtgtagaccacattttgtttgttttgccttcatattaagggcgtgaaaatttgttctcagaggcagctaaactattgatgactctttttggcaatgttaagttttgctctgtttttggttggtgctactaagcaatgcatcacctctgtcctttctgttcagctcttggccctgcaggaactatctcagcttggacttgcagagttttgtcctatgtctgcgcagcctagaacttggccacagacatacagtgaattcctacagtcttaagggtgcctctctcttgtgaattatcctgccctgcaaattccagccatttaagcagctcaaaactccaatatctgcctcctcattttagtaagactgctgttctgtttaggattcatttttgtgctctgtactagaaagtggtcctagatagaaagctagggtgatcattgcactcacctttgtattctctcaaggatcacaatgctgcctgtgtgttcctgaaaatagctgccttgtgtgtcttgccatgtgttgtattttgattggagagtaagtctaatgccattctgtcatggctggaagcagaaatatatttgtttttattaatataaaacaaattaatataaagcactccctgtttctcttcttttatccttatgcagtctatcttgatgatcttatccactcttaagagtttcaatactctttctgtttccttactttaacttttgttttttttagacggagtttcactcttgttgcccaggctagatagagtacaatggtgcagtctcggctcgctgcaacctccgcctcccggtttcaagccattctcctgcctcagcctcctgagcagctgagattacagcccccaccaccacacccagctaatttttttgtatttttagtagagacggggtttcaccatgttggccaggctggtcttgaattcctgacctcaggtgatccaccctccttggcctcccaaagtgctgggattacaggcgtgagccaccacacctggcctactctaactttttattaacttttcacctactaaaaacaaattactaagatgttagaatgtatttgtttactttgctcttctttttagttatctttgcatgaagtataataataaaaaaaataagacaacaaagagaaaaaatataatggaatttctgatactgtgaagggtaaagaccatcacacaatttggacaaggttttggggaagatgtggtcatgtcatattcacaaaatatatctgggtaatagtctatttctcccgtgattccaggcatatgcacccaacagtccatttcgttattgcttatcactgcccaaaagttccaagaaatgatgaagtcagtctcatttggcatacatctactttttcagaaggaaacaaagcagagaaaaaattccgagagaaattcatagctagtaaccactctcacttttattttagtttccataactgaaattgctggacttgagagcaatttttccttgctcaacagaattaggtgagatggggaatcaatttaatatatatttagtgagcatctacagtgtcatggggcaaaaaaatagcaacttacaatattaatttctataggcagcccccaaatttgaatcatttcctgaaaaattacttctgcttttgtgaagtttcctgctagcagtttagagattgggctgtttcctcactgatacatatcccttcacacttctataatttaactctctcaactgcatgtgaaagatcttagctgaagatgactgacagtgttatttattccatgttagagttgcctacrgcaacccaagcccagaatgactayggaccacagcaaaaatgtgagttaaccaaggtagcatggaagacgatgcatagcarcagtaggctatggatgaatggggagtagaataagtttaaagcagagggtgcagaagaattgaggataatttgaggaaatacttttggttcagtttaaagtccagagttggaatatgaaaagttggtgtatggtacaggatctgatcttaggtctcaggtaaactcttttctaactgttcacttctttgatcgcatcttagaaacccaacttagggcattgccgttattccttcttgctcttagctaaagcgggaactttgttgggagaattttatctctttagttatattcggagtaaccttggaccagctgtttaaattctaggtatggctgtttttctgactatggaatgaggaggacaccaatagttttgctggtggatacgagtaagatttttgtcaggaaagaaactgatttacatatctagttttgttttttttttttaacttcacagtgttgcactagaatggtgacagggaagaaaaagtatcaagaaactacagataatagtctctgtgactgaggatttgaaggcaaaagagccatttttacatagagccctgagagaatattatctgagacagacaggtaatagtgtaaatgccaaaattaatccttgattttgtatcgtaggcagtgaactcccacaaggtgtattctttagggtagttccctaagctttctctctttttactacatagttttactattataatttttaatgtcttttgagagtgttgccttaatttgctaaatcattctagtatacttgggatatttagacctatttctattaccataaattatatagcattggatatctttatttgtgtaaccttttcctatttttgaattgtatctatgttaatttctaaggaatagaaatattacgttagaagtaatgcatatctcaaagtatatgttcaaggtcacacacacaactggtgataaattggaacctagttggaactatttagaggctttcaatatatacttaaagtaaattttaaaaatttactttacttcttgaattggcttgtggttacacaaattcaattatggtttgatacctttttaaaatttagcataacataaaaatgaacatttgtgtatttcattaaatgttctcctgtgatgcaaatgtatttttaaaagtttttctagaaatcttaatgcttttggattcatcagtccaaatatttattatgcagaattctctatttatgaaggcatctctcattatgaatttttttctttaagaagttcagaatactccatagatacacacatatatagaataatttatctaaaatttaatcagaaaattgaagcccaaataggcaagtttaatttcctaattaaatgttattaagcaaaggaatcaaaattagaagttaaatatcatcttacttcacagagttttgctcgttacacgtaatttctacactattgcactatgagatacctttgattttaaaataaagatttgctgaaaatacttccatttttcaaatttaaaatttagatttcggttgtatgcaacagctaacatgaagtagtgtcctattcttaaacttggcatcaacttaaacttactgctcttttaataacgacagtttacaaagcacttctgaaatgtagattatttttatttaaattttatgtatttcaatttcgagtagataatrtgtttacatggttcaaaattcaaaaggtacaaaagaaaatagggtaaaaagtctttttcctattttgtctccagtgactgttttttccattccagaggcaaacaatgttatcagattcttgagtgtgcttgcagagatatttgtatatcctgttctgcagaatgtttctttgtcttgactatatatcttacaaaatattccatatcagttaaaaaaaaaagccagtttttattagaagctatatattcactttatggatatatcaaaaatgtatttgactggccttttactgatagaatgtagattgtattcagtcttctcctcctacaaatattgctgccacgaataaatatgacattttgcacccgcgagtatctgtaggagaaatttctaggtcaaagggtacatgcctttgccgttttggtagatattgcccaattgtcctccaaagaggtaccaatttgtattctcaccacctaagtatgagacagtgtaagtcacagtttcaaaggaaaaaagcattctttatcttgataaatatagtaagttctttgatacaggtgttggtggttaccttagactttagagcaagttcctgacacatctagaaaaggaatctttatggcctggatctcagttcccactaggccaaattrctttaagatgcgatatccttccctgactttctcttttctttcaacctgtcatctgactcaggattgtgctttgactctgttgttgcagcttcctcttccaggccttcttgttcttgccttgtggcaatagctttggggcttctgactgcagttcttctgagtgtgctgctataccagtggatcctgtgccagggtaagtgcaaacttaaaccaaaattaatctttcattttatattataaaagcaatataacatagcagaagctttgaaaaatcaaaaaataattcaaacaaaataactctccatctgtatacagctatttcctgggtatagcctttgaccaygtgcacttgtgtaagcttgtattttcttttttctttttgttttttgagacagggtctccctcaatcagccaggctgtaggtgatagatttgtgtgctgctataccagcggatcctgtgccactgtacagtcacagctcactgcagccttgacctccttaggctcaagtgatccacctcagcctctcgagtagctgggaccacaggcacataccaccatgcctggctaatttttgtattattattattattwttttttttttgtaaagacatttcaccatgttgcccaggctgatctcaaactcctgggctcaagccatttgcccttcttggcctcccaaagtgctgggattataggtgtgagccactgcacctgaccatattttcttaatagaactgcagtcaagtcctcttaaaatttctcccacctttctttcttttaatgcaaggctgagaatagttcttatcgtagtatgctcataattttgtatattgctttttaattttatgttgccagaaacatttccttactgccatatttattgggatgattgaattataatattaatgatgtttaacttttcacataatagatatatcataatgtaatgaaacattctgaatttttttttttttttttgccattcaggtgctttcacattttctaaaactaatttttaagtttagttcttctaggaccttaaatctggtgatctagaggactctcagtttgttgttttacagtctagagtcctagcttaggtttatatttttaggggatgatagtgaccgattacacagaagtgatttattagggttcttttttaaatttttttaaaaattttgagacagaatctcgcaatgttgtttgggctggagtgcaatggcgtgatctcggctcactgcaacctctgcctcccaggttcaagcgattctcatgcctcagcctcccgagtagctgggattacaggcacctgccaccacgcccagctaattttttgtatttttattagagacggggtttcactatgttggccaggctggtctcgaactcctgaccttgtgatctgcccgccttggcctccccaagtgctgggattacaggtgtgagccattgcgctctgccgatttattaggattctaagagttcagctccagggcttctacctcagagccaagtccgacctttgacaaaaaggaactcctagggaagttgggaatttctaatccaggctgagtaatgtcacagttgtatggaaaaagcaaaatctataaggtgccaatttaacagcttgatctccagaacttatattggttgtatgccagtacttcctagagaacaattatctaatatttatatgaaaaatactactttccccactttgtaactcccaaatctagagtagatatatactctattctgcaattatatatctacacatgtgctcatggagtataatggctcatacttgctcactgtagaattgtgcttatggcgagtttatgcacatatgtttaagtattgaaactgaagtagaaaaatcaatagaattttggaatcttggttggaattaccttgaaagcatattcagttccctttcatctttgattgtttgtttttgagacagtgtcttgctctgtcgcccaggcaggagtgcagtggtgtgatcttggctcactgcaacctctgcctcctgggttcaagtgattctcatgcctcagctcctaagtagctgggattacaggcgggtgccaccatgcccagctgatttttttgtatttttagtagagatgaggtttcaccatgttggctagactgatcttgaactcctggcctcatgtgagccacctgcctcggcctcccaaagtgctgggattacaagagtgagccaccatgcctggtcagttccctttcatcttgacagaactatgaaccaaccattttaaaggaatgtggatcttccgtatttaaaagagctcggttagggcattctatcacttttcactttagcacctgttatgcttctctgccagaaaacccttttgaaaaatatcaaagtaagttctttttgctgaggtataagggtttttttccagttttcaatggtgagggacagttacatctgtgataataaaaaagcaaaacctttcattctagttaagtttgcttttcctaatttctttttggcattttcagttgggcattctgaatgattctgcctgatttaagcaatatacattatgcaattatgcaatatatacacagagcaaagacagtacacagatgcatatcatatgaattcacagttatctggtgtgtgtatattacatgtgcacagagatctctagcacaagtcaagtacttgctccagagttttcaggcagattgttgtatgctttcttctttgttccttcagttatagtcatattcttgtgtagtggaatatatacttagtagatgatggagttggacattatgaggacattatgaggtattcaaattgacaccacrcattgttacacatttctctaacccttaatctgaaaagtggtggagcagggaagacccagggctgccatattccattttatctcccatttcatttccaagactgagtggtccataaagatgtgaaccaggtcctcttctctcctaggctccaactactccacttgtgccagctgtcctagctgcccagaccgctggatgaaatatggtaaccattgttattatttctcagtggaggaaaaggactggaattctagtctggaattctgcctagccagagactcacacctccttgtgataacggacaatcaggaaatggtaaatgcaaacatttagaaaatgtagggtttttgttttgtttttgtttttgtttttaaactgctatttaaatgtatcatgtatcctcttttaaggaacagaaggaatctgtgatttgggggggatactatattcttccccttccctcttcttctctttcctcttctacttctgccttcttccctctccctccccactctttacccttatgctgtctgacccaacaaacctcagttacagcaacccagatgcttgtatagcatgtaagtgtgtatgtggggcaaggaggcagaaggatggtgagtgttttggagaggaatgagacctgaaatacaggtctagttaaaagaagtcttaggtccggaaacctacaggtccaacaacaaggcagcagattctttttttttttttttgacagagtctccctctgtcatccaggctggagcacagtggtgtgatcttggctcactccaacctccgcctcccaggttcaagcgcttctcctgcctcagcctcccaagtagctggaactacaggcgtgtgccaccatgcctggctaattttttgtatttttagtagagatgggatttcaccatgttagccaggatggccttgatctcctgaccttgtgatctgcccgcctcggcctcccaaagtgctgggattacaggcatgagccaccgtgccagtccttatatagtggaacttgggagggagggaaagatagagatcacggggacagagtgattgtggcaagggcttaaatgccttcttttaaaaagttttcccttaattcactggaatccaataagttccagactgcaatgttgagaaagttgggatataaggaagaaaacaygcgtgcacgtgcatgtgtgtgtgtgtgtggtggcctccacttccttcaggcccctcagatccttcctatccacccagcaatctcttggaaaagagcttgctattggtcctagaccatctcaaggcaatacaaggaactgacatcctgaggttgcctagtataaaaatcaatcaaattctaatttgtcaacataaataacatctataaggaaaacaagaaatcttagttttgtgttagtgctaatttgatactgatttttgtgttttgctattgttttctgttttcttttattgggtaggatctagtcacagagaacaatttattgagaattaaactatattaacttaccttgggaaaaatccagaggttactctaaagcagtgggggagaacatatagttcctaaattttatagctacctatataactacctatataaagcatacagattcttgttttctgccaaaggaacacttactcctttggaattccacatagaatctaaactctaaatcattccacatttgtgactaacttttttttttaaagccttctctaagtgaggtggcagaatgcattgagttgtattaattaaacatgagttcttagttttatggcctccagcaatatagccttgctttctggaccttgttgtagcaactcctattctcattctgatatagtgactctcaggatttgagctgactaaagtcagtagcagaagtgagccatgaacttgaaacattgagggcaaaactgataaacaggagtygtgagtcatagcacaagacactgccacagaaaattgtggtgtagcagctgctataaatttcacagtgtgatcatgagaggtgaggagggaaaggatgaagggcacagaatatctgggaaaatggcaatatttctgtttctctgaggaacccagaggaagggcaggatcattagagggattttgtccttcctctgcttcctgacatgcccccattccttagactattgttgagtaaaaccagcagagttacattcactgcatttccaaattgagtttattttctcctaaggctccttggggccaagtcagtgctggagagggcggaatgtccctgctagatgtcataagttttacttttaacattcctgtggaatcttacttgattctctggtttaattctttttcttgctccggcttttgtcagattctgtagaaccaaattgattttacgtgccctgctgcgtctgttgttctagtgttattattcttttgttctcagggcaagatttacatactattttgaggtatgtacaatgtttctagtatcatactggggtctgagccactaccaaaaaagcaagaagtaaaaataaaaaagagagctctatggatctattaaaactgaagtttttcaaactgacattccattggtggagagtgctgctagagaattttgttgctatatgtagaatctacaggcctatggaaaatatccctcttatgctgttaaacggtcatctttcagtgagatgcttacgtagagttcacctcctatcttagatcacttacggcaaagtgtacaataataacagaggctaccatggattgagcacttgctttttgccagatgttttatgtatagtattctttttttttttctttttgagatggagttttgctcttgttgcccaggctgaagtgcagtggcacaatctcggctcactgcaacctctgcctccagggttccagcaattctcctgccttagcctcccaagtaactggggttacaggcgcctgcctccacgcccgacctttatgtatagtattcttaatcgtcacagcaattctaaaaagtagagttcaacatccccattttgttggtgaatgaataaaattcagaggaattggctgggcatagtggctcctgcctgtaatcccagcacttttgagaggctgaggtgggtggatcacttgaggtcaggcgttcgagaccagcctggctaacatggtgaaaccccatctctgctaaaaatacaaaaattagctaggcgtgctgttatgcacctgtaatcccagcttcttgggaggctaaggcacccgaatcgtttgaacccaggaggtggaggctgcagtgagctgagactgcaccactgcactctagcttaggcagcagagtgagacactgtctcaaaaaaaaaaattcggagaattaatgagtgtaagtctaaggctacaaatctggcagagccaaattttaaattctactccagtgggcatggtggctcacacctgtaatcctagcactttgcgaggccatggcaggtggattgcttgaacccagaattcaagaccagcctgggcaacatggcaagaccctgcctctacaaaaaaatacagaaattagctgggtgtggtggcgcacacctgtggtcccagctactcgggaggctgaggtgagagaatcccctgaacccaggaagtagaggctgcagttagccgtgatcacaccactgcactccagcctgggcaacagagcgagactctgtctcaaaaaaaaaaaaaaatccacatcaactcaccttcaaagtcacttatagaaatatcgtatttgacagcttccagaatccattttgcatatgttcaacaagacaactttttctactaattgtcttctggtttcttttctatacatatttaaaaatttttttgaattgacatacagaatgtacrttgtatgaccgtggatatttaaatttatttattgtgatgaggtctcactatgttgcccaggctggtcttgaactcctgggctcaagtgatcctctcgccttggtctcccaaagtgctgggattataggcttaaatatatttaaaatagtgagatgctttcttattatctcttttttttttctatctgggacttcaagattattcttgatagagaaaataaaatggaaattaaatttctctgttattttctcatttttgtgttaacattatggcatcagcccttgcttcttcttgccctatgagtatatctttagatgtttggatatattcaaattcttgatttttcttgccatttttcccccaccaagctcagttcatcctggatgttgttagcctggttccttatagttattggtatgttattttaaagtatgcattcgttagtgagttcccagtgaaactgctttgatttctttaaatctattctgatgctccttgccctataatatctctcttcctcattatcataatttggaattatatgatccaactttactcttgcaacaacctctcattcaactttacctatcttcctgaccttgggattccccgagcttttgatgtcggcttctcacatatttaggatttacatctaataatatccaaagtttccttctttgggtgcagcaawgcaaacactatggtaacatggtcacttttctgtatatttttaatcaggtaatgaaaacagcttggtttctttcagacagtcatgagtgtgcttttactatatttcttactagctatgcgaacttcaacaactttcttaacctttttgactctcagtttcctcatgtacaaagtgaagataaaactttctagactgtccgggcgtggtggctcacgcctgtaatcccagcactttgggaggccgagatgggtgaatgatttgaggtcagaagttcaagacctggccaacatagtgaaacctcatctatactaaaaatacaaaaattagctgggtgtggtggcacgtttctgtaatcccagctactcaggaggctgaggcaggagaatcacttgagccccggaggcagaggtcgcagtgagccgagatcaggccactgcactccagcctgagagacagagtgatactctgtctcaaaaacacaaaaaactcaaaaaacaatataaagcccagagccaaaaataacttttactttgctcttctgtgtcccaagacatacaatttcagtaaaatatgcatcacagagtaaattatgacttgttgaattgagtatattgtttatgaggaaatctgagatgacatgtcagaagattcaaagaaatggctggaaacacagcatagatggtaggggaattgctttactctggaggtcttcacagtctggtaatgtgcatcttttgtcacgcttctttataatcagattaagcagctagtgtcaactgcataacaagggatgggcatgataagctaggatatttccactattttttaacttaaaaaattgtgggaaaatatgcatagcataaaatgtactattttaaccattttcaagtgtacaattgagtggcattaagtacattcacattgttgtacaaccatcactaccatcatctccagaactttttcatcatycccarttgaagctctgtacctcttaaacaataactcccctccctctagcccctggtaatcactattctacttaccatatctatgtatttgcctattctgtcctttagtgtctcacttattcacttagaayactgttttcaaggttcttccgtgttgtagcatgtatcaaagttatggctgaataacattctattatatggatatactacattttgtttgtccatttattcatcagtggatacctgggatgcttcaaccttttgactgttgagagtaaggctgctgtgaayttggatatccatctattgacagacactgtttccacaagcttttaaaaagtggagcaaatgatggtttacggagcagggcttactgacttttagcattgtgtacttacacaaaattatagggaaaattcttattgatattaasctctagtaatttgtaacctgtcagattttcctttgaaatttcttaacgttatttgcatgtttttagatgatggtaattaatgtgttcatattataggatatctgaaaagtctggaaacaggctaaacttatttttaaacagtatgttggttacattttcaagtaatatgctctatatttttactcaatcttgagacatgttttcaagtgaaacatctctaaatttaaagcaatagatataattatttttagaccttatgagtactctgtattgtaaatttttttcaaattagtaattacatcctttgctttaaatacttcacctgaaaaagtgtctgaagaaaaacatattaatgatattattttaaaatatragactgtagggttccccagtgcctggctttctttctgtgtattggctgaaaatcgcagagggccttgaccgctctgtgacccgcccagctacaggtttttcccctgcaggctctacccaaaccccagccttgaacatttccagtcactgataaaggtatctaggttgctgctcaaaacactgaaataaactagccccagccctaagtcagattccttaaaccctcataaaatctccatctctgaccccctggccgtggacatatgtaggtcaaatgctccttttctctggctgtccatcgtgagtgttgctgcagccctctgtaacttcccctaatagatgctttgcacagatcaccttgacatttagtgctttattctatggtatcccaaccaaccccatctcatgatgatttggggtcctcccttgtgggaattcccctgtcgctgcttttgggatgatttcagccatgggtttggtgggacaaaacagagatatactgcctaaaaatacatttatcctatgtttttaggtgttttggaacccattattttgtattctgcttttatcaaatagcattatttcattcttggtttttgctaagcattaaattattccaggtaataaaaagttgcaaccagattttattttattttttatttagttttaaatattatttttatacgtcttgcatcattccactattgcttaaatcttttcatattcttagataaaattctccttgttttcaattgtcatgagctgtgagcatatttatagaaatcattttgcttgcagttatttatttacattatattccctaaaattaagttggctaatcaaaagataagattttatagttttgatgtattattagtttttcttaatatgggttgaaataacttacatacattctgtaaaccattttaatttggaagtttaaggggtatgctttgtgccttaatgatattttaatttcaattaaaaatactacatacagaagtgtatgtggaaggtataaatgttgaactaaaaaagcaaaaaaggaaaagaaaagaaaaagtgcccttgattttatttgtttgggttttatcttcactttgcttttagggtttgcattttttctaaaatataagcaaacattacaaactctaagtgacataacacctaagtgttctagctcacaccctctctgggtgacaagagttctcagttaccacctttacctatacttttgttgttgttgttgttgttgttgtttgagactctcacccaggctggagtgcaatggcacaatctcatctcactgcaacctccacctcctaggctcaaatgaccctcctgtctcagcctcctaagtagctgggactacaggcatgtgccaccatgcccagctaattttcatattttttgtattaatggagttttgccatgttgcccaggctggtctcgaactcctgggctcaagagattttcctgccttggcctctcaaagtgctggaagtacagatgtgagccactgcaccagaccgatttgtactttcatgctgcttctatattctctctctttctaatacacacacacacacacacacacacacacacacacattatccatgagtacatagaatataaggttattgtactatggttttgaaggcctcttccaagtgggaagattttcgagtgaaagtgccataataaacattttcaatatccagcctcaccaatgagaagttgtaagaggactgactgatcaagtgatttagaattatatgggtcttgagggtagtaaatgagcacaggattggggtttgtacgtgggcattacctaatcctagctctgcagattctaactgaaatttctgagcaaatctttatcaatttctgtgcttcattagctgccgttcctcctcttgaaatgaaagaaaaagaaatggactgtttttctcattatcagtggagaaatggggaatcactctttttttccttttgttaattttatttattttttcaaatatttagcttacaatttttgatttgaatatactcaaattttatatactttgaatgcagtaacatttatttttgaatcttttagatcatggctatcattcacaccaattttgtgaaaatattaaaaaaaatccattctttttttcctaatttaaataattctttaaacaagttggttaagaaatgcaaaaattttaagctatcttgaaaattacagtgtcatttcatctgtcgtatacttcattcactctccggtctaccttcttacccccagcatgcacagttaagtgctccacagagagaaagtaaaaaatacagagtttgtgttcagagggttttttttttctttttcttttttattattattatactttaagttttagggtacatgttcacaatgtgcaggttagttacatatgtatacatgtgccatgctggcgtgctgcacccattaactcgttatttagcattaggtatatctcctaatgctatccctccccccttcccccaccccacaactgtccccagagtgtgatgttccccttcctgtgtccatgtgttctcattgttcaattcccatctatgagtgagaacatgcggtgtttggttttttgtccttgcgatagtttactgagaatgatgatttccaatttcatccatgtccctacaaaggacatgaactcatcattttttatggctgcatagtattccatggtgtatatgtgccacattttcttaatccagtctatcattgttggacatttgggttggttccaagtctttgctattgtgaatagtgccacaataaacacacgtgtgcatgtgtctttatagcagcatgatttatagtcctttgggaatatacccagtaatgggatggcagggtcaaatggtatttctagttctagatccctgaggaatggccacactgacttccacaatggttgaactagtttacagtcccaccaacagtgtaaaagtgttcctatttctccacatcctctccagcacctgttgtttcctgactttttaatgattgccatgtgttcagagagttttaacttcttgcagcataatacctaattgtgtgttctttatttctatagatacttattaaacataattttttaaaaaagagatgggatcttgctctgttacccaggctggagagcaatggcatgatcacagctcactttagcctcaaactcctgggctcaaatgatcctcctccctgcctctgcctcccaagtacatgtcaccaagtacaagcacatgccaccatgcctggttggctacattttttacttttcgtaaagatagagtgttactatgttgtccaggctggtcctgaactcctggcctcaagtaatcctctcaccttggcctcccaaattgctgatattacaggcaggagccactgtgcctggtctgcatttattgagtataattttatatatttttctaggtgctagggatatggtagtcgagttgttgctattataatgtttacattttatttattatttttaaggaaaatgatattttaaatttagttttgttattaacatttttttaaattggcacataataattatatatatagggtatttatccgaaggaaataaaatcagtatgttgaagagatatgttcactctcatatgtattgtagcaatattgacaatagccaagatatgaaatcaaccaaaatgttcaacaacaaataaatggataaatgaaactaacacaagaacagaaaaccaaacaccgcatgttctcacttataagtaggagttgaacaatgagaacacatggacacagggaggggaacatcacacaccgggcctgtcggggggtggggggcaaggggagggatagcactaagagaaatacctaatgtaggtgactagttgatgggtgcagtaatccaccatggcacgtgtatacctatgtaacaaaactgcacattctgcacatgtgccccagaacttaaagtataataataaaaaatgaaataaagaaaatgtgtatgtatacaccatagaatactaatcagccatggaaaataaagaaatcctgtcattcatagcagaatggatggaactagaggacactgtgttaagtgaaataaaccaggaacagaaagttaaacactgcatgttctcgcttatgtgaaaactaaaaaaaatgttgacctcagaacagacgatacaagaagctgagaatggctggggatggggaggttagggagagttatgttaaaggatacaaaattacagctagataggcagaataagttctaatgttctatagcaatggtctccaagatgtttagcaccaggcaccagtttcgtggaagacaatttttcyatggaccgttgctgggggctggtttcaggatgaaactgttccacctcagatcatcaggcattagttagattttcttaaggagcaggcaacctagatccctcacatgtgcagttcacgatagtgtttgtactcctatgagaatccaatgccaccgctgatctgctgatctgacaggggtcagaactcaggcggtaatgctggcccgcctagccgctcacctcctgctgtgcagcccagttcctaataggccacagaccagcaccttgcatggcctgagggttggggacccttgttctatagcactgcagggtaatctatagttaacaaccatttattgtatattttcaaatagctagaagagaggattttgaatgttcccaacacaaagaaatagtaaatgtttgaagtgataggctaattatcctgctctgatcattacacattgcatacatgttacgtgtgctttcattttcttcggaagagacagactaaataaatgaatatggtgatatgtgctttaaagaaaatgaaacagtatgatataatagtaaatgtgaatactattttagattggttagttaaggaaggcctctttggggagggaacatttgagttgatatctagacctgattgacagccatgtagaaatctcgggtaagatattccaggcagagggaaaagctatgcaaagaccttaaagcaagaatgaccttggcatgttaaaggaaaagaaagaaggctcatgtggctggaacctaggaagtgagtaaatggttagtaggggctagattgtgtaggactgtgcgtacatagtaaggattttagattttattctatgtgaaaagtgagactactggagaacattaatcaggggcacagagtgattaaaagtttagcactgggagagaaaagttggatgattatttgaaaaggagacttggatgaattctttcacccacatgaccttgtcttctcatctctaaaggtgaggataataatagttgcctaccttccaagattgtcaagaatttcataactggaaagaatcctagaaaatatctaacctaaatcctcataaagaagttgacgctcagccagattaaaccacctgcttatcttcagataggaggacagagctaggaggctccagaattttgtttctgctttgttttcctaaatgccatactgtatattcagtatttcaaatgatactgggaatgaacgcaaagggattttgcaaaccttagagtacaatacaaatgtaagagataattgttttcaggatactgggctctgagagaacaaagttatcataaggaatagattatttgggaagaaaagcactgataaacaagttgtactgatttttcaaatgctttgtctaggagccaccacagtcatgtcctgaatggaaacaggactgaaacccagtgaagagaaaatagaggttattctgaccatgagaaatagcacaaaagactccttttctctcctgtagtgtctccactagaagtgcaaagaggctttttgcctctctttattttattttgtttttttgagacagagcctcactccgtcacccaggctggagtgcagtgatgccatctcggctcactgcaatctctgcctcctgggttcaagcgattctcatgcctcagtctcccaagtagctgggattacaggtgccmgccaccatgcctaattttttatttttatttttgtttttagtagagacaggctttttgtaccacattcaccaggctggtctcaaacttctgacctcaagtgatccactagcctcggcctccctaagtgctgggatcacaggtgtgagccactgtgcctggccctcccttaactttagaagagcaactctttatttgtgctgatgcagggtccaagtaggcaaagagacarttaagagcagagcccataaatgtttactcttcagcaaccatctttcaggagtggaataaaaacaacatcaaaatgggacatctggtggtatcataatcaccataggcagttgaaattgtattgctttcttagtagtttctagataaaaaagaatattttattccaaaggtatttaaccaattaagctgtcwttagaaaatattgaaagtgtaattgttaattacaccaacactaaatcctacaacaaaattaccttggattatctttctaaccttttattttaatctattttaatctttaacattttattttatttcatttatagaggcaattctctttggatataaacttcttcatttgaatgtcagactttgcagatcaaagtcttttatctctgttctgttgggtaacgtggcacacataagtggtgtagccaatttacctttaccttaaacttgttcccttaagaactgtttttttcttgccacatacaagattgatgaggatgcggaaaatgagacctcagtggggaaaaaaacaagaatattgctataggcttaatcrtaatttatatatttaaggatgatgggaaagatgaccacttctgcagcaaaygtttagcttctttcttttgaaataatctgaatacctatcaggtgctccctttaattaaggagaaaattgcaatggaaggtagagatgtaatattatcttatttgctacattataagaatccagttattgacagaaaggtcaattcyaggatgctgctcctctctacagctaacacatctttagaattagatgttaaatgagaaattagttatttagagtgaataattgtcttagcttgggctgctctaacaaaataccatagactggatcgcttgaacaacagatgtttctctctctcagttctgaaggctggaaaatccaacatcaaggttctctggctcctggtgaggacctacttctggcttgcacatggctgcctttttgttgtatcctcacttggcaaagagagtgctttgatctcttcctcctcttataaggacactaattgcatcatggaggccccaccctcatggcctcatctacacctaattacttgctaaaggcttcaccagcagatttcatcacattaggggttaggggttcaacatattgattttaggacgcattcagtccttaagagtggtgatgatggaggctgtaaggaatgctagtttgtcttttaattaattacttaacttagtattaggaatccaatgtggaaaggaataattgtttgactgtgacactaggtcccttttttggttttcaacctctcccttagagcctgctccaagttttcctcagtgaggccttttgctggattggtctgaggaacaattctggctggaggtgggaagayggatcacctctaaacttctcaaggtaaggggcttcaaaggaatgcaaaaaaagagagagaggaaaaaggaaagccaaattatgatacttggggaatagataaagaagagcagatggagaggagaggaaagaatgaaaaggagaggaaatagggaamaaggaagggaatgaacaatgggtaagggcaaaaaaaaaaaaaaaaaggataacattttaaagagaggctgatgaacaattttaattcttctgctgtttgggggaattaggggcctgaatagggagacagaatttgcttcatttttatcccttcatgcctttcaactccttttctgtgcatgyggccttaagtgattgacttttctgatttcttacaggatttcttctaatagctttgtgcagacatgcggtgccatcaacaaaaatggtcttcaagcctcaagctgtgaagttcctttacactgggtgtgtaagaaggtcagactttgatagatgaccactctgtcctgaccctcagatctgtcatgtatccctaaaaggagggagctggccactggctgttgggaaagccatgagtatatagttagcaaatactgaactttctcagatatggcattagatgcaagacaacctcctagggattgatgcctaactgatggattctctttgagactatttagatattatgtgagcaatttaaagaccagatytaagcaaattttgaaatagatgtttgttttttgtatttctcagtatggaaactaatgctgccactctcatccccgtcccaaccatctctgtcaaaaatatacctttttcatatgatattctgagctaatctgataaaatctatgccaatatatactattgcttgtgtactagagaagtacattattgctgtactcctctgtacattactgatccctgatggtatatttctatcctaacagtgtccctttgcagatcaagctttattctgaagaataaacctagctggcatgctggtgtgtacctgtagtcctagctatttgggaagctgaggtgggagggtcgcttgagcccrggagtttgaggctgcagtgagctatgattgtgccactgtactccagcctgggagatagagcaagactccatctctaaaaaaaaaaaaaaatgctaatgtgagaatataaattgtgggaaatgagtgagggcaaggtggtacttcctcyttctgagctcttcacacgtaatgcaaaaacccggtcttaaytgattttgttttttttctgagtatgcatatatgtggttgaatgaaccaatgtgtgattgtatcttttccattatgtgactgtttgacctgcatattaatttcaagatagcagtcaattcgataaggcattttcatagaggaaagtttacagaaacagtttatrtggttggatcaccaaattatcttaggtactaaggcctcaaaaataagaaaaactttattatttctcctcagtagagtttggacatacataaggagagaaggtacagtgatgaaggagrccataattctgtagtgttgatgatcctggattataatctttttctctttatctttcatagtttttttaaaaacatggactgtatcttatctaccactatatcccaaatacctaagatagtgcttaygttcagtgactattaaataaataaatggatgaattaaaaagtaagaatgaaaactgttcattctagttatttctgttagcccataaattagaggaattgaagatgagaaaaacagtatatcctaatcctccctaactcaccaatatgagtcttcagtagctaactctacaaaggcaaagggccagttaatctggatacaatgctcatagaaggaagtcgtggaaacaagctcccatcccctagtgatctcttccctttggttctggtgcaggaagtatcccttagttatgaatattttggtagtgactctcaattaaggatgtaatgatagcgattccatgtgggccatggcttggctactacagggtgcacaatttcatttacttattgaaagataagaaaaggagaactacagtcgggtcttaaattctcatctgagcaggcaggatgtgtgcagacctcctctgtgactagggttcaggccttttataaggattcatccacctattgtcagaattgggtgtagttcttcactgctttgtctcccttaaggttgttacaagagaagtaacagtttacttcctggttgcttatttattccttagacttatttatgaagggctggggtcagttagtaactcaattcttgcaccttacctagtgaaataaagtttggtaaaactagaaactaacattttttgattagcacttacattgcacagtggacttctttgatgaacattatacattaaacatatctgggacattcagtgtttggaataggacatttattaaagataataacagagcagtcacaaaattaaaatgaagaaaatccaggaacacacaggaggaggtggagcaagaacaagaagcctccactgatttttcccccgcaggaatacaaatggaacaattatccgcaaaagaaagcaccttcataagaaccaaaaatcagatgagcagtcacagtacctggttttaacatcatatcaacaaaagaggcactgacgaggacaggagagacagtcttgatttgccaatgccaccccttccccatctcccagcagcacagtgtggtgtggagagagagtctgtgctttggggaggaagagtgctgtgattatgggactttgcagtggaactcggtgcagctctgtcaaagcagatagcgacatgggacagaaatcagccagtgcccacagagggagcatttagaccagccctagccacaggggaatggcccatcccagtggtcggaacctgagtttctgctagtcccaccactgcggctaaaacactctgggatcctaaataaacttgaaaggcaatctaggctacaaggaccacagttcctgggcaagtcctggtgctatgctaggctcagagccagtggacttggagggaatgtgacctagtgaaacaccagctgggtggccaagggagtgcttgtgtaacccctcctccgaccccaggcagtggagcttgcagctctgggagagactccttccttccacctgaggagaggagatggaagagtaaagaggactttgtcctgcaatttggatacagctcagctacagaaggatagggcaccaccacgcagagtcctaaggtccctattctgggacctagtttctggatgatattttaagacccactctggaccagaaaggaatgtgctgccttgaaaggaaggacccagtccaggcaggattcatcacctgctgactaaagagccctttggccctgaataatcagcagcagtacccaggcagtgtttgccataggtattgggtgagatccagtgccatgcggcttccagtgtgacccagcacattgttagctatggtagccatggggagagacttcttctgcttgaggaaattagagggagtttggacatagataaggagagatttaacccaagactaatggggactctgtcttgcagcttaggtattagcttggctacagtggggtagagcaccaagtaagcacctggggtccttgattccaggctcctggacagcatttctggacctgccctgagtcagaggggagggagcccattgccctgaaggtagagacccaggcctggcagcattcaccataagcttactgaagagtccttgggccttgagggaacattagtgatagccaggtagtggttaccacaagccttgggcgagacccagtgctatgctggcttcaggtctgacctagtgcactccaagttgtggtggccactagggtacttgtgtcactattccccaagctccagatagctcagtatggagagagagactccatttctttggggaaaagtaacagaagataacaagaggctctgcctggtaatctagtaaattctcctgtatcatacccaagaccaccaaggtggtacttctataagtctgcaagagtcacagtgttactgggtttgtggtgcttcctaatgcagatatagctgcagtggccaaagacttagatcataacactcaattccctttgaatgcttggagagttttcccaagaaggatgggtacaaacaaacccagactgcaaagactataataaaaacctaactctttaatgaccagacacaaataaacatccacaagcatcaagaccatcgaggaaaacatgacctcaccaaatgaactaaataaggcaccaatgaccaatgccagaatgcagagatatgaccattcagacagagaatgtgaaatagctgtttagaggaagctcaatgaaattcaaggtaactgtgttagtccgttttcatccttctgataaagacatacctgagactgggcaatttactaaaaaaaaagaggtttagtggactcacagttccatgtggccggagaggcctcacaattatggtagaaggtgaaaggcacatctcacgtggcagcagacaagagaagagaacttgtgcagggaaactccccttcataagaccatcagatctcatgagacttattcactataatgagaatagcatgggaaagacccacccccatgattcaattacctcccaccaggtacctcccaccaggtccctcccacaacatgtgggaattgtgggagctataattcaagatgagatttgggtggggcatagccaaaccacatcaataacatagagaaggaattcagaatcctatcagaaaaacttaacaaagagaacaaaaatttaacaaaaataagtttgaaaaatcaagcagaaattctaaagctgaaaaattcagttgacttactgaagaatgcatcagagtctctcaacagcagaactgatcagttagaagaaggaagctcaaagacaggttgtttgaaaatatacaggcagaggagacaacagaaaaaagaatagaaaagaatgaagcatgcctacaagatggagaaaatagcctcaaaaggccaaatctaattgttttgaccttaaagaggaggtagagacagagactggggtagaaagtttattcaaagggataacaacagggaactctccaaacctagagaagaatatcactattcaagcacaagaaggttatagaacaccaagtagacttaactcaaataagactacatttaataattgaacttccaaaggtcaaggataaagaaaggatcctaaaagcagcaagaaaaaagaaacaaataacatacaaaggagctccaatatgtctgacagcagacttctcagtggaaaccttacaggtcaggagagagtggcatgatatatttaaagtgctgaaggaaaaaaacttttaccctagagtaatgtatccagtgaaaatatccttcaaacatgagggagaaataatgactttcccaaacaaacaaaagcagaaggatttagtcaacactagatctgttgtataagaaatgctaaagggggttcttcaatctgaaagaaaagaacataagatgcaataagaaatcatctgaaggtacaaaactcactggtaatagtaagtacacagacaaacagaatattataacactgtaattgtggtgcataaactactcatatcttgagtagaaagactaaaagattaaccaaaaaaaaaaaactaccacaactttttaagacatggacagtacaataacataaatagaaacaacaaaaagttaaaaagtggtggcatgaagttaaagtgtagagtttttatttgttttctctttgcttctttgtttattcaatcagtgttaagttgtcatcagtttaaaataatgggttataagatattatttgcaagccttatggtaacctcaaataaaaaaacatacaacagatacacaaaaaataaaaagcaagaaattaaaacataccgccagaggaaatcaccttcactaagaggaaaacaggaaggaaggaaagaaggaagagaagaccgcaaaacagcaagaagacatataacaaaatggcaggagtatgttttatcaataacaatattgaatgtaagtgaactaaattctccaatcaaaagacagagtggctgaatggataaaaacacaagacccaacaatctgtcacctacaagaaacacatttcacttataaaaacacaagtagactgaaaataaagggagggaaaaagatgttccatgccaatggagaccaaaaagagcaggactggctctatttacatcagacaaaatagatttcaagacaaaaattataaaaagagacaaggtctctttgaccttatgataaagatgtcaattcagcaagaggatataataattaattgtaaataaatatgcacctgacactggagcacccagatatataaagcaaatatcagagctaaagaaagagatagaccccaatgcaataatagctgaagatttcaacaccccactctcagcattagacatatcatccagacagaacatcaacaaagaaacatcagacttaatctgtcctatagaccaagtggacctaatagatatttacagaacattttatctaatggctgcagaatatgcgttcttctcctcagcatatggatcattctcaaggatagatcatatgtttggtcacaaaacaagtctttaaaagttcaaaaaaattgaaatcatgtcagttatcttctctgactataatggaaaaaaactagaagtcagtaacaagaggaactttgaaaactatataaacacatggaaattaaacagtatgttactgaatgacaggtgagccaatgaagaaattaagaaggaagttaaaaaacttctgaaaataaatgataatggaaacataataccaaaatctatgggatacaatgaaagcagtactaacagcaaagtttatacctaaaaccacctacataaaaaagtaaaaatgcctcaaatatacaacttaacaatgcgtcttaaagaactagaaaagcaagagcaaatcaaacccaaaattagtagaagaaaagaaataataaagatcagaggagaagtaaatgaaattgacatgaaaaaagatacaaaaggtcaatgaaaccacaagttggtttttttgaaaagataaaatcagcaaacctttagccatactacgtaagaaaaaaaagagagacgatccaaatgagtaaaatcagagataaaaaaaggagacattacaacaaatacagcagaaattcaaaggatgattagaggctactgcaagcaactatatgccaataaattgaaaaacctagaagaaatggataaattcctagacagataaaacctaccaagattgaaccgtgaagaaattcaaaacttgagcagaccaataacaggtaatgaggttgaagctgtaacaaaatgtctcccaggaaaataaagcccaggacccagtggcttcactgctgaaatttcccaaacatttagagaataactaataccaatcctactcaaattattatattttattttattttgagacagtgtcttgctttgttgcccaggctggagtgcagtggcacgatctcggcccactacaacctctgcctcctgggttcaagtgattcctcatgcctcagcctcctgtgtagctcagattacaggtg

SEQ ID NO: 7042 - DNA, 81428 bp, Homo sapiens
atggtaaagcctattaccagccaatgttgttagcatctttgtatgcacatcactgtttgtgcaatatatgaatattttgttgcattgtattcttatataaaaataagtagaaaacataaaattgaaattgctgatgagaagccttgtctcgtgaatgtgatacacttgagacacggatggaactgatcaggagtgccaagtcaaaagcagcagatcttaagccctcactggttgttcctttaacatccaaaatggttggttatatgtaaaagaagaaaatgaaataatctggatgaaacactgggactgtgttatcaaagaatgtctgtagtgatgaggtgaaaattttcattttccagaaacagaactgctcatttataacataaatatattcaacttccacatactcaacacatgtgtatacatttttaggagtacattatgtaacaaaaccatggatttccaatacaatgagaagcagaaatgacactgcaagctagggtccaaagaaaccattaaaaaattttctacatgatgcttaggcagacagctctgctgccaccatccttgcccaagattttacaagctggctccatagaaagtgaagctgttgggtatattcaccaccattgcctttgcccctaaggtaaattggcctccaattcctaggccagcacttttatttcatcttatattaaaacctaggagcagataatccaactaagcaacaaagtatgaagactgagagactattttttttttttttttttttgagacaagagttttgctcttgtcacccaggctggagtgcagtggtgccatcttggcttactgcaatttccacctcttgggttccagtgattctcccgcctcagcctcccgagtggctgggattataggcacctgccaccacgcctagctaatttttgtatttttagtagagacggggtttcaccatgttgcccaggttggtctcaaactcctgacctcaagtgatccgcccgtctcggcatcccaaagtggtggcattacaggcgtgagcccccgtgcccagctgaagactgagagactatgaacaagaggttggtgttgtaatctaataatttaactggacatatttaatgatgtgaataatctctaatgctctgccttagttacacaaagtggtaaaatatagatgacttctacgaatatttttacaagtcaagctaagttacacatccccttttagctttgttgttacaaaaaaaaaaaaggttctagtcattgccatatcactaggatttttagattcctctcccaaatgccccaggaagtaagttggttttctgtgttcctccttcaaagaatagtgtgtggttttgcagctggttggtggaggaagcatcagtaacagatttatttctgagaaagacaagtggttaatttggaaaattctaaaaaattcttcctaagcattaatcctcaattttaagggatctgcctgtataaatatttgctttggtttgataaattgtgctctgttcatttccaagcaagttattaagaacataaaatagtcttcttcattcattcctgctggccagacactgtgttcaccagggtggtgaggggatgagtaggaggttgaaagatatattctgaattctgaggcacaacttggaattcatttctcgtaaaaatcataaaaaataggttcttaggtgttctgtgtgggaaatgcgcgcggggaggagacacacacacaatacctttaagggtaaacaagctttatcccaaatggcagtgcagatataagcaaatgatataataagcaaattgcaatgggaagggagaagggaaaagatatatatatgtatttacactcaccagactatggaggattcaccaccagactgggaagcaacagcctgggctccagagttggccactcgtccatgcagacaaggagaggtctcatgaagcttcggcgcagtctggaaccctagctctttttgtaacgagttgtttggcatgaggtccagtcacgagggccctttgtgaccaggatcaaggaacacaaaaaggtcaacttgtttttgcggttgtctattgtttttcaataactaatgtataggaatagattgaaatagagatttctccgaaacaacgctggatgaacgcctcaaagagctcacacaatccgttctgggacttggtgaccatcgtttgtgtccatgttcaattgagttcaaatttaatatttaggctagtcgccaaagcccatttaggataaaatgtctttgctatctctgcagtaagagttagcatggtatagggaagagattgtttcggaagccaggaaacctggtcttttattttggtgtgctacttacttgacgagttcacataacttgactaccttgttctatgtttcatcacctacgaagtggagagttgtgtctttggtaacagtctaggtctcttcaactctgttaagtctaagtctcagaaagagggtgtggaatcgctttgtcggaagaagcagggagacagccttagtggcatcaccacctaattggcaaggctctttttattatgtggcacctgctgttccttgctctgtctcactgttatatcagttaaaaaactgagagacagtgaaagaggaaccacacaaagaaactaatggccttagttgctcttcagtccaagaactaaatgttctcagtaatggcttcctaaagaaagaactcagagcaatcatgaagatctgtgtctagaacattacagccagaacagaaacggtggaggtggaaaatggcaaatagcaatacatgaactgtcgcccaccctgctgaagtacataactggcaagacaaacataacaaagtagaaggaagaaatagaatttcaaagaaaaagtagctgatgatagaaatcagaagatatgtggtcaatccataccctaatactttttttttttttttttttttgagacagggtctggctctgtaacccaggctggagtgcagtggcacaatcagctcactgcaacctccacctcccaggttcaagccatcttcctacctcagcctcctgaggagctgggaccacaggcacgtgccagcatgcccagatacttttttttttttgtattttttgaagagacagaggtgtcactctgttgtccaggttggtcttgaactcctgagctcaagcagtctgcccacctcggcctcccaaagtactgggattacaggggtgagccactgtgcctagcccccatacctaatagttttgatgatcatgtttacccagaatgaaaataaaagactgacattttggttttctggattgcttgctggtcataagctctttaaccaaaatggagtcttattagagctaccatagaaaagaggctgtatagccactgggggaggtgggaaatgcctttcaccggcattttctccccaccgctgccatcctttttggtgtcagggaatgaggtcattcacccagatgaaataagtggtgaaataaggtatgttaatgtttttcactccccagtttagtgaaacaaccctaattttgatggtgacctgagccctgttttgtcctgttgaggtcatcaggcacctaggatctttgaagccacacttcttttactctaatcagttactttatctccctttccttctttccacacctactgctgtcagacttgtatcacctaatgccatttatcagcataattcccctagtacctaccagagtgcctggtacatagtagaggcttaataaataatcgttgaattaatggctctacctgctcttccatccattaaattttcccaaatactcctctgaaatagggtttctttccacttctctcattgcccattgcttttactgcctgttgaccatttgcacagttggccagcttttgtgttcctttttaaaagtacactgtcatgcctgttctttgttgtgtgtgtagtttcctggttttaatctatcctccctaaatgaatatactttttcttgtgtcctccctacctccaagcatttgccaacccagtcctccccaaaacacccgccacatgcatactacctcaaatctgtggagggtggtgatggatacttaagaaactacacatccatcttaatgtagcacttacacggcttgttcttcaattgcacatcatcacttcattcaagagcagtgattattcattcacagaattgactgagctttcactatgagcaagtcaccctgctaggtgctcgggaggatatacaaagatgtataagatgcctcctctgatttctacagcaattactggtgtatgattcattcagcaattaatcatgtactgctttgtgatgtttcttacactatctagaaagcattcttcaaatcttgctatgctatttgacttttcacttgttaatgtcttcattcattcagcaaagagttgaatacctatgatgtgacaagcactatctcagcagctgggacagatataaagacaaacaaatcatagtccctgcaatcaaaaaggtccgaatgcagtgtagaagaggaaatgtgaatagataattacaacacaacacgccaaatgctattgaaatcccaaagaaggaatgctccatttcccaagggatcatgcaaggtttcactgaggaggtgatcatcagctaggtctgaaaggataatatctaaggcacaaggtgaagcagagcatgccagataaagggagtataaagagcaaaggcacagaggtgtaaaaatatatacgggtgaatgcagagcatagaaattggtggaaggtaaagttagggaaataaattagggataaaataggcaaaaatttggactttatcctttagcagggaactttttttctgattacatagttagcacatgctcactgtaaaaaataaccaaacatttataggcatgtacaaagtagaaagttaaccactgataatagtttgttataatctttcagattgttttctatgggcagactaacatattgccatataaaatgaagttaaactcttattttcttcaacttgaaaatttaacagaacctcttggttatcattccatgccagtacttacctatttcctttttttaaagtggctgtatagttggtaaatcattaccagcaaaaagacctattatggagccagactgagtgggtctggtgtttcagcaagccactcaagctctctgtgcttcagttacctcatctgtaacaggaacattttcaccgtacctgctgcatagggtttctgtgagaatttaatgagccaatatcgttcagaatagtgcctggcagatgaacgccctcgtggtgactccatgatttatttacctaacattgaagaactgttttaagcaagggagtgagcgatataatctggtttctttttagaataaaaaaaacatcaccctggcacctgttggggatgttaaacgggaggaagatcagtcagtgatggatatcttcttgtgagactcttgcaatacatagtgatacggaagactggttggtactggcagaggaaggagaggaaaaataaactcttgaaccacttttaagagaccaaatgctagaacttgttgactgctgatggctgagaagagacaatctgacaagttcgagatttttggcttagtggcctgtgtaaatggtggtgccacattcgtatatatttttttttttaaagattttttgtttcagtgtctactacggatctggcactgttctaggtacaggaaatacggaaacaggatctctgctccgaggagcttacactccaagagatatttatgactgggaagaggagacccagaaatagttaagtaaacacataaatgaacaagaatggcaagctaacttagcatgtcttgattgaacagtaggggtccagtaaatattcagtaactttaaaacatccaaccctgtacgagtttaacaatctctcctaacggtgattacaggagcccgtgattcattcacagcggcagacgagcgccaggaaagggttatttgatctgatccctcaagttccggaggcagcaggtcagacgatcggccccatttggcagccaggaaaaaagcttaagcattttggccaaggttacacaacccgaaacaccgggacgcggcccggaggcggcttcggccttgcggtccaggctaggccactgcgccggggcccagcctgctcggcgcccgcccgagtgctcggcaggcccgtagcgccgcggctcccaggagccgaggggcagccggcgcgcaggcggcggttgccgggccctccctcggcccggcggcggtggcggccccgcgtcgcgaggcacttccggcgcgtgccggggtggccggatgacgtggctgagtcagaggaagaggctgaggaggcgcggggggcgggggaggctcaggagcgggcggtgacggcgacggcggcggcagaggaggcagcggctgggccgggccccgtgcgtctgtccgcgccccgtggatgcgaatcggccgcggcggaggcggcggcggcggaggmggcggcggcgggaggaggagtcggtgagccggctccgggccggaggggcgcggaggatgaggccgctgcctggcgctcttggcgtggcggcggccgccgcgctgtggctgctgctgctgctgctgccccggacccgggcggacgagcacgaacacacggtgaggcgccccggccggcgcggccgccccgggctagctccccagttgcccactgaggcaggccccacgcagcctggagggcccggcggcccggtggtgccccactgcggcccgaggactccttccggttgggcctggcggagcaggaaccttgggagcgtggaggaggcatttccgtgcgctcccgggacagggctccgctcccgagtgacagggtctccttcccccggtctgggcctcagtggcgccgcaccccagggtctcggggktcctgggaccctggggccaggaaggagcctgggaagggttgaggttcatccaccgcgggagcggggcaacgggcaggctgggctcggggcttttgccccccagggaaggagactgccttctggctactgagggctgcgacgccgaggaagatggatgcatcgtgattacccggcagccactaaccaggaaatatcctacactttatggtctcctttggcttttatcgcccgcttctgcccagaccggattaaaaccctggggtggggcagcattaataaacttgaattgaagagcagtttatacttacttgtaagtgcacccaacctacacgcgttcaattyctaggcctttcttgtaactttctcctcaccttccagcccctaagtgagacccccatcccgatagtctctaactaaggcagcttctgacagtaaagggtcttgacgtttcccagtcttcaggtcagggccagaaacagtcccttttgcatttggcctaaaggtgattggcagtttgtttaattggtatkctcacatcaaaacgtgcatgtgaacgactcttcaaatggctttcacttagggctgtaactgtggttttcagagtggtagacttgagcaaggcaggaaggtcaggtaaattgagagtttgcttgacgagtaattgttttttatacctttaccattaatgataggagtttctatgagagactgtgtttgtactaaatcagaacgatctgagggagtcttatgtcatttctggtaagtgaggaaatgaagcagtcgtccttacctatttaatggatccgattttatttgtaatcaacaaaacttttcgctggatccttggctagctgggatcttattttagctaataaaagctctaaacttttgactgttctaccttcggtcacagccagaaacttcttacctgtgtaggtatgtatttctttagagacacaaatctcgaattggtgacatgtttttgtactgtacttgtggtgtttcacctaagataattttgttgggaggttaaacagcttaaaacgatttccttttgtgttctttcatcagataagctgtctcaaagtttaagaactgctattgtttcacatagtatacagggaccatgtatagatttgggtctttgagtatttttaaattttcartgggcatccatccttctgtttaatgatattattactaatatatttccaattaaaaaaacacttaggaaaagttaccatatgaaactcagaactctcaatgtgtagttccgtgatacaggcatataagctcaaaagtgtactgtattctactttttaatcttgtaatcttgtgacttacactgctgtgattagggaaaccattaarattttacaaattgggtgtatataaaggctttagaataatttacaaattaaaagtgtaatttcaatgcagttttattgctaggactatttcagttttttattctagtaattgcatataagatatttgataaaaggtttttgttgactgccacgaaagataatatggtatatatgagatggttgctagacaaaaaatttagaatccatattacttcatgtctatattgaactgctcttacttggtcacccattattaaatacctattatttatttatttatttttgagacagagtcccactctgttgcccaggctggagtgcagtggtgctgtctcacatcactgcaacctcagccttgcgggctcaagcgattctcgtgccttagccaagtagctgggattacaggtgtgcgccaccacacttagctaatttttgtatttttagtagaaaggggatttcgccatgttggcccggctggtcttgaactcaaaacgactggcctcaagtgatctgcctgccttggccccacaaagtgctgggattacaggcatgagccaccacgcctggccraatatgtattgtaaaaagcaaaacaaaaacaaaaacagttatgggaagaatagcatctaaaaataagcataaaattcaaatgtcatttatattattttttcactgttagccaaaatcttttgctttttctaaatttcttgaaaatatttctcaaaaactaggcattcctattcctcttagccagatagtagtaccgaaaaggctaatgtcaagtgagttttatttatttttttctgtcaaagaagcagaagtagctagtaaagagagaataatactaaaggaagaggagacattggtgtggggaagttgctgagtaggtgtttagtaaatacatgtagaattgaattatcaaacaataacttttagaagctgaagctggccttttaggttaattgcctgtgaagattgtttccagataatacctagtatgtcttttgtagtaaaatgggctatgcactgtttttttttgtttgttttgttttgtttttttgaggcatagttttgctcttgtcacccaggctggagtacagtggcacaatgtccactcactgcaatctctgcctcctgggttcaagcaattctcctgcctcagcctccctagtagctgtgattacaggtgcttgccaccatgcctggctaatttgtgtatttttagtagagacgaggtttcaccatgttggccaggctggtcttgaactcctgacctcaggtgatctgcctgcctcggcctcccaaagtgctgggattacaggtgtgagccaccatgccctgctggctatgcactgttctaagtattttacacatattaactcatctattaataacctacgaggtgagtaatatgcccattttgtagatgaggaaagtgaatctagagaggtgaggtcacctgcagataacacacatctggtaggggtagaggtgggatttgaacttaggcattctgagttgatagtcttctgcactgtgagccgccatatgctctattcccctttatcctaaaaataagacagtaaagcactaggtattgagtggttctctatattgatttttaagtgcttaaatgcttaaatgctcgaatgagtgtggctccatgatgagttgtttctgagatctttgggttagcattaaggagcaatagtgttgacttcatgggcacgtgccctgaatagtcacaaaagactgtgtgagagcttgttttcatgctatcctgtaacatcttgaagttttaaattttttaacaaggggctctgtatttttctgtactgggtcgcacaaattatatagcttgtcctaagaagggacaataccttatgcccattccccaaagcccctgatatctcttactgtacctactgaattaggattcaggtggccatctgacccatatggtatttttttttctttttctttctttctttcttttttttctttttttttttttgagactatgtttcactcttgttgcccaggctggagtgcaatggcgtgatctcggctcactgcaacttccgcctcccgggttcaaacgattctcctgtctcagcctcctgagtagctgggattacaggcatgtgctaccgtgcctggctaattttgtatttttttagttgagacagggtttctccatgttggtcagctggtcttgaactcctgatatcaggtgatccgcctgcctcggcctcccaaagtgctgggattataggtgtgagccactgcgcctgaccctatggtatatatgtatatattttatgtgcttatttgtccaaagttattttaatattctctgaagagtgttgaaaaggaaatgtgctattgactgtatgtacatatctagaatatgtaaaaatgtgttccttttaatttttaaaagttgaatcatatgcattacagacatgttgtttgaaatgaaaattaacacttttgtggaagacaggcttttaataactgattgaagggacataggcttctttatagtcagtgaaaggtatgtttatgcttatttggttttctaaaactcaaagcacttggaagcatctagagttagattactatgtctcctaagatkccgaaggactccattaaaaacaatttcagattgagaatcatagaattttagaactagaaagactcaataatttaatccaaaactcttcattttcctaatggcctgtacaggttcagagacttgctcaaggccacagaaagaatcagagcttcctgatcgccagtcttgtcttttctacctgtcttttacatgtaattccatagttataatatgtaaagatgttagcagcaaaaacccagtacttaggggcacaggaatcttagagcattttatagtttgcactgtagccttgaatttttatgggttctgtttccttaacaagatcacaaagtcagatttttttttttttggtctgttatatacgcaagcactgtgcttggcacaaatagtacttgatgagtgcttgttgaatgacttgaataattagggagctactagtgacaaggatatgcagtgtggaagcacaatgaacaaactgaggccgttattcctttaagatgcatagtcttctgttttgatttgggggtcctacctaggctaaaattccctatttctctgtggcccagtgtacttctggtaatcttgagacttctaatgttggacagactggatgcctactagaatcgtttastcagcctctgcctcataaataatttgtrttatatcacggagtgatttcagaaatgttttgtttgatttactttggcaaatggaaaccttttgtctttgtctctgttgggagtataggaactcttaaaacttactgaaaacttataaagagtataagctgtttactataagtgaatttgtgagttatctaatgtagattgttaaatgccgtaattcgttgtcctattttcagctctactcaatgatagactgaaagtttatttaggtacaaagctatttttgagagagagtagttatctcaagagactattcaaaattacatttctaatttatttgtattagaattctgatgtgtgttttaataatttaaaggttttgaaattatgatttctggaacattattttgaagtaaacacatatatttttccccctttgtatgaaaatgaaggatagcatttgggtgcttgttctgaaccctcagtcctttgctcatctatgtaaattgtgatttcttattcagatttcacatgaccacgtcagcatattatcttctaaagcgtttctcctgataataattaattcattacctctgtcaaggaggaaaactttggtacccccccaacacataaacagtatttaaataagaggggcccaacattggtgacttcttgagaataaaggtcattccttttgagattagagtgcaaatagcttcttagaaggttttttttctttcrggcagattaaaggctcacatagaaaagttattcagtgttcaggactgtctttagttgctttgtacacctggcactgttttcatatttccttgatttagttttttgctctttaatgaatgaagctgactagggattagcaaaaatactaaccttttaaacttgatgctgattgatttggacaaattacttaacatctctgttctttagttttgtttttgtttttagtctgtaaaatggggaagtaataggacctattttatagaattttgagatgattatttaagtgttcatataaagaccttagaactatacctagctcatagtatgtatttattgttagctactgatgttattattacaaaaatggtgagatcatgtcatgttagggtttggtgagttaaggctttacttgaggatttgaaaaaggaggatttgagcatttcggaaggattattagagtttggctaagtggagaaaaggagggcattctaaatttggtggaatgacgaaagaagatgaagtggggccaggcgcagtggctcacgtctgtaatcccagcactttgggaggccgaggcgggtggatcacgaggtcaggagatcgagaccgtcctggctaacatggtgaaaccccgtctctactaaaaaatacaaaaaattagccgggtgtggtggtgggcgcctgtagtcctagttactcaggaggctgaggcgggagaatggcgtgaacctgggaggcggagctttcagtgagccgagattgcaccactgcactgcagcctgggcgacagagcaagactccgtctcacacacacacacacacacaaagatgaagcagaaaaggggaggaagacaatatcataaaccgttttggccagcgtggatgacgtaagtgtagcagtgagattcttctgagagctggaaaataagtaggtgaagaatgccggtagcctgaattggcctcctctcacttggccgtttcccagggaagcctcagatgaaagggattattatcgtgcttagggatcccctgatacactgctgtgcttctgtgactccaccccaccttcttctgggcctagcactctcttcccacagactgtggagctcaggggctttatcaaagctttagggaaaggaaagatttttgtttgttttgttttctccttcagaagttgtgtgaagtcttttggtattttttaatttcaaaatattttaaaacattttcttttgagagagaactcttgatcttgtcttggaagcacttattctcagggacaatcaaggtctgcaatgaaaagtaaacattttaagttaattgtattaaaccacagtctgcatagtaaggagcaaaacaaaagaaaaaagcattatttttgccttgctattcaccctaaactctcagtatgtgtatttctaattactgtttcagtcctcttcccagaaagaatcttagactacaaaatgatataaattttattacagtacgggcatcacatcacaactctaccactctgttaaggattcctgaatgtttaaaatgagtaacttcggaatatgtggtttaacatcgactgggacccttaaattattttagtccttatgttttaatttgtataaaataaatggatgccctatttttaaaggtatttattttcaaaaatgttgtctatttttaaaggaaaagtattggaatttatagaaaaagtatttttgtgcttattttcacaagttacatttataacatttctgcagactcagcagggttaatggcaaggtgctctttaataggtcgtctcattcaacattctgctcttaaatagatgaattatgttacctccccttatttttctgaaaaggtactcttacagtcagggtacatagcagtcatttcacatacttcaaacttcttttaccaagttgccaatgaactttacatttcagcatttcttcagtgttttcccatcatatttattaaatatctatttgccttggtgaataggttcttcttgtgagactgagtctcgccctgttacccagactggagtgcagtggcgcaatctcaggctcactgcaacctccacctcccaggttcaagtgattctcttgcctcagcctcccaagtagctgggattacaaggtgtgtgccacgacaccctgctaatatttgtattttaagtagagacagggtttcaccatgttggccaggctgatttcaaactcctaaccttaagtgatccgcctgctttggcgtcccaaggtcttgggattacaggtgtgagtcaccgtacccggccatgaacaagttttaattctaataccaactctcatcagttggtaatgattggtttagagcactgttttgagaactctgaggcaatatctatgttcagcagaaaggagtaacttggttgattagtattgtgtggcccatgagcattggatggaagagtgggggcatacatatatttgtcagtctccccaaataaaaagaatagtaatgaatggggatatactgctacattaacatttagacctttgattcattacttcctatgtgaagattatctacagttgtttttctgaactcccttgaaacagcttatgattttccaaattgttattcgtcctgaccttctctgccaaagtgaatttaatcattcctttattgttgctacaatagccctttattaccttaattataatacttattttttctttgttaatcatttacttgtctgattccactgtggattatgaacttcttaaggaaacgacagtattttacttacttttatattcttaatacctaacgcgatacttggtacctgtcacatgtgttcaaaaggtgagatcatttgttatttccttaatgacctggctgttgtcttatatgaacagtgaggcatttatgtttgaaaatgaaatgactgggtctaagtcttagggtgataatcgtgtgaatcaaaagaaaaaggcagatgtttttggtaagaacatacaagttaatgtttttgggttccctagagtgcagagagatttggggtttgagtctccatggctgagagaatggtagtaccattagaaaaatgaagctgggggaagtggatttgggtagatgagtttggttttggagatgttaggttttgattgaaaatatttatttattaactagttttagatggaggactggagataaggatttcatagtgggccagttggatcacttcttctattatgtgccccatagcaacctaccttattattattgcttgtttaatgcccatccttcccccagtaggacagggaacacatcttgttcaaagctgtatcctcagttataaacacagttgtttcacatgctaagcacttagtaaataattgttcagtgaattaatgtctgcactattagttgatttaaatgcatccaatgttgtctttaatttatactgctacttagaattattagttttaaaattaccatggtaatcagtttccatagaatcattggaactttaaacttgtcgagatcttagaaatctttgacaggcctcccacttgtaccttggaactactcaaagtcattactgaccacacttcagatttagccatgtataatattcactgatatgtagttccataattacttattcaaagaaatatgcatatagtgcatgtctttcaggctgctaacaagatagaatgttggcttgaatggacttgtggaggttctatagcagtcttcttccttgtcctctgtagtactttgaccagtggctgtgtgaaagtctcgcaaggagatgaaattttatttatgcttgctggcaacattaggttttttttttttttttaattgattaacatgaggttctggataaacttgattttgtttcctccttccttgtccatgttagcatggtgaatcatgctggttgcaggtttgccactatttgatagtgtaaatgtaaataatagacacactcttatgagctattgggcttagttcaaacactgtcttctataaaacaagtttggaaaaggtgtatctgcctgagactacaatcagaggatataattttaaaattcacaaagtttcatttttaagatgtggacattcatcatcagattaagcttccagtatttattttatagcttcctgaacagagatgatgcacttttgtttagaacacacaacaaatattcccttaatttgaattagtgtgttttttttttttaattcttgtttgcttttcttgtttcagtatcaagataaagaggaagttgtcttatggatgaatactgttgggccctaccataatcgtcaagaaacatataagtacttttcacttccattctgtgtggggtcaaaaaaaagtatcagtcattaccatgaaactctgggagaagcacttcaaggggttgaattggaatttagtggtctggatattaaatttaaaggtaagtaaaccttaatagtccttacaatgcaatttggattgtagacaagggtttcatattttggcactattgacactggtgttggataattctttgttgtatggagctgttatgtacatgttaggatgtctagcagagtccctggcctgtaccccccagatgccagtagcaccttccagttgtgaaaaccaaaaaagtcaccagacattgctaattgctgtcagttgagaaccactactttagactctaaaatgtgttttagtctgtaaatgaggtgtattgcatttaggaaagtatattagtaattaacaaagatttcctttgaatatttataagataataaaatagataattgttaataaaattgtatttccttaacatatttccttctgaaaagtgttgtctagtaaaccccctattgattagacacatgtggcccgggaagaccttcatggatatttaacaaagtaatttctggaggtctgaggctgtaatgggatgcgtggatacttaaaattcttgtgtgacgcctcaaattcaaacttgtaccataggcttaacatgtattatttatcagtgttgtattaatttatcctgttaatacctataggatatttaaattttaagtcaaagacttgttaaatttggggaaaatacttcatcgtatctagttattatgcaggtatccatttatcaggtcctttgagtgtgtttatacttttcatttttctctgtgaagtttgtcagagagtgtatttcctgcacaggcatttttagcatggtgaacagaagcttgagtaattgaatttttgcaggatctttgattaggtgtcttggtttttgaatacatcatggatcctgtaaacaggagctttggattttaatcctccttttttttttttttggtactgtattcattttagtaaaattgtttactgcagttttgacttcattgtctccatgtgtaagatgaatagtaactgacttctggtatttttagtactaaagatgttattatttagtactttgaggagaagaatgtcagtgagattttaaagataatgttactttaatttcgatttgttaaattttattcttgtttttaaaattgctcagttattgttgaaaataggtataccgtatctatttacattctcccccctccccatccccccgtttatagtctttggggcttaattataaaattaagttgtaaatttaaaccacagtggcatggcctgtaattttatgaatcactgtaaacatacctttgaggcttgtgttttaatttaattaggtaatttaagtatttagtcacaaataacaagaaaacttaaactagaaaatgtgatctttgagatttggtactatatgtaatcgtctgctttctctttttccgtatttggtgtgcatttctagtttattaaagaggaaccaacaagagagaataggcagaactcctgagtcctactttgctactgtgtacagatttcattagtttttgagatcctcacccatatttactaaagaagagtacttaattcagcaatcttttttttttttaatactttaagatctggggtacttgtgcagaacgtgcagttttgatacataggaatacacatgccatggtggtttgctgcacccatcaacccgtcacctacgtttggtatttctcctaatgctatcccttccctagccccccaccccctgacagggccgggtgtgtgatgttcccttccctgtgtccatgtgttctcattgttcaattcccacttacgagtgagaacatgaggtgtttggttttctgttcttgtgttagtttgctgagaatgatggtttccagcttcatccatgtccctgcaaagaatgttaactcatccttttctgtggctgcatagtattccatggtatatatgtgccacattttctttatccattctatcattgatggacatttgggttggttccaagtctttgctgttgtgaatagtgccacagtaaacatacatgtgtatgtatctttatagtagaatgatttataatttttggggtatatgcccagtaatgggattgctgggtcaaatggtatttctagttctagatccttgaggaattgccacactgtcttccacaatggttgaactaatttacactcccaccaacagtgtaaaagcattcctgtttctcccatcctctccagcatctrttgtttcctgattttttaatgatcgccattctaactggtataaggtagtagctcattgtagttttgattcgcatttctctagtgaccggtgatgatgagcttttttttgtatgttcgttggctgcataaatgtcttcttttgagaagcgtctgttcatattctttgcccactttttgatggggttgtttggttttttcttgtaaatttgtttaagttctttgtagattctggatattagccctttgtcagatggattgattgcaaaaattttctcccattctgtaggttgcctgttcactttgatggtagtttcttttgctatgcagaagctctttagtttaattagatcctgtttgtctattttggcttttattgccattgcttttggtgttttagacatgaagtctgcccatgcctatgtccttaatggtattgcctaggttttcttctaggatttttatggttttaggtcttacgtttaagtctttaatccatctcgagttaatttttgcttaaggtgtaaggaaggggtccagcttcagttttctgcatatggctagccagttttcccaacaccacctattaaatagggaatcctttcgtcattgcttgtttttgtcaggtttgtcaaagatcacatggttgtagatgtgtggtgttatttctgagggctctgttctgttctgttggtctatatatctgttttggtaccagtaccttatttggcaatcttaaacccccttttattagttcctagaggctgagatggagagattatttaaatagaggaatatggttttcatgggtaaagaagtgggatttattttcttttcagactaagctaagcactttcagattaaaaaaagaagagctagccaagtgttattccctgagagttgctgattcctaggggtcttaccaagtttccacctccagcatggatatgctgctaaagaagctgctaaattaagtggtccagatgaaatagtagatgctgattagatttatcttygccctctactgtagctctttgcttgctgtgttcaaagataaagtcgatcatgctttgaaaagtgttgtaggttgtcacttagccaaacattaaaaaaataggatgcaccttagagattgtgtcatccaattccctctcccagaagcccagagataaagtgatttatccatggtgtatcgtagcatactaataatagaaactggaacattatgtctcttgtgaactataggaatatttaccgtgtgttcttaatctttcatctcttgaatatttgacttttaaagattcttctgaaggcatattcaaataaaattttggaaatgtgaaaccagagaaaactatacgyacacatacatacatgtttacatatgcatacacacacatctttttttaacctattagactgtgtcaggctccatggattggtatcgttttgtaaaatgatgattactaaagagactatttaaaggaactaatgatagtctaactctaatacaggatgcctctcaagattttatacacaactttttcttgctaataatcttatattctagcactagacaaaaatgctaaattgagaccattttaagaaaatgggccaggcgcggtggctcacccctgtaatcccagcactttgggaggctgaggcgggtggatcacgaggtcagggggtcgagaccacggtgaaaccccatctctactaaaaatacaaaaaaaattcgccgggcacggtggtgggcgcttgtggtcccagctactcgggaggctgaggcaggagaatggcgtgaacccaggaggcggagcttgcagtgagctgagattgcgccattgcactccagcctgggcgacagagcaagactctgtcttaaaaaaaaaaaaaaaaaaagaaaatgcgttaaatatagaagggctgacttagattaggcatccttgagcctggtttgaattcagtaccctccagttttagagggtacctcttcgaaccttgccatcatagtgtggaatagaagatgtgctttagggtcagagagacttgatgcatccagctttgcctctgcttacctgtgtggtcatgggcaaattgttcaacctctttgatctcgtattgcttatctgtgaagtgtgggaaataatatttatttgatcgaagtgtcaggtttaaatgagaatgcatgtagagcatttatcaaagttcctggtatatagtttatattcgaaaagtggtaattaggaatactaatagcacatagcatgggtctgtagctccaccttgattttgtatttacgattatgaaatgttagtttattgattacagactttgatttatccccaagctgctgtactagcctgttatagtagcactcttattcaccaytgcacccttagctgttaagacatagtatgcttttaataaattgtctagcatccagacggtttgtgcctacttgttgttacgataattggttcattatggacattagatgatctggaatagtaattcttaaccagaagagatcaccacccatccgtccttccccttcccccatttgagaattcttgcagtataatgaagtgtgttaattgtggaaaaatcagtgacttctacaggactccttccttctgtttattttatcgatcttcccttgaatttttttcttccttgaatttcgcaacttaacagagggctgaaattattttacaagtatttttttctttagagttaattgttaagttgagagtactgcaggtaggaagagatgccaagggctgtttagagccttatatatttttagtttagtgattctcaatcttggctgttcttatcttcaccatgcggtatttccctccagatatctgcctggggaatataggcctgattgccaaaaggtgaggaaaagggactggggggatggtaggtttacttattcagccggaagatgtttacttcaggtaatcccccatgctgttttcagtccctagcttctgctattcctgctgtccctgattctggagcccctctggtttaagttctctagagraaggtgccactggtctactacagggataagttgagggtacagtatgtgtctagctgtatgaagggtagaggaggggacctggccatctaacccatttatgtacatatttaatattttaatacagttccctttgtgtttagtcctacatctgtccccctagcttttgaggtctgtagtgcctccaagtcstgagtgtctcttgggttctgtgacaccagttccctcccttacaggcatcactctcctgttatgttttctcctgctttattagtagtttgtcatcttacaaccgttttccatttcctaaaaatttgttaaaatctttttcccatggccgggggtggtggctcatggcctgtaatcccagcactttgggaagccgaggcgggtggatcacttgaggtcaggagttcgagaccagcttggccaacatggtgaaaccstgtctctaccaaaaaaatacaaaaattagccggggacctgtaataatcccagctacccgggaagccgaggcaggagaattgcttgaatccaggaggcagaggttgcagtgagccaagattgtaccactgcactccagcctgcgtgacaagagcaaaactccatctcaattttttttgtttttttcccaccgttgtctcttctctttgtctctgtggacttaacatactttttattccttcactgacattttaatgggttttaagagagagaagaaatatacttgtggttaaatctgccttgtttgtaagtggaagtctgggaacttggtacaatatgttgtcctgttggtttcaaccaaagtgttttagccagaccaaataatttgaatctgaaatttgtcaattcttattaccgatttcttataccttgtactaacagcagatttgataaatatgggcatctcttttttgttttttaaaggaatatatatgcatatatatttttctgattgtaacagtgatagaagttcaaatacacaatttagtaactacaggaaaatataaacctggatataattaccattaacattttgttgtattttcttcagtccttctgtgtttgtgtttatccacattgttttaaatatgtgaaagttgagttcattctacatatatttattaaagtttatttaacaaatccttatatagtgcatattatgtgccggacactgttttaagcacattctaacacatttagtaagttatatatagtttttgttctgcttttgttctcttgacattttatgagcttgtccccatactgttaattactcttttaaatgtggcaacatactattctgtaacttggatactgtggtttttttcccccattttctttcttttttttgagacggagtctcgctctgttgctaggctggattgcggtgcagtggtgtgatcttggctcactgcaacctcacgcgattctcctgcctcagcctcccaggtagctgggattacgggcacacgccaccacgccaagctgatttttgtatttttagtagagacggggtttcaccatgttggccaggatggtcttgatctcctgacctcgtgatctgcctgcctcggcctcccaaaatgctgggattacaggtgtgagccattgcgcccggcctttctcccattttctagttgtttgatattttgatccttccttccatccttctttggttttctttttctgctattgcacataagtatttcagtacatctctgaatctgttattaggatgaattcttggaagtagaattactgaatcaaagggtataaacatatttaaggcagttgttgacacatgttgccaaattgtcgtttagaaaaaattacactgtttatactgctagtcaggttggtcagttaatcagtactctttatatagttatttaattaactgtgaatatatcagtttttccagttcttgttttcctctagttaattcagcagttattgagtatcttactgcattccagcacgatggtaggctctgggtatgcatagttcaaccaagagctctggcttctggggtcttcaggccctctgaaattctacgttaattttatgtgaatgtgcattttcagggggtgggcaagggaaagatcactttcattggattctcaaaggggtgtgaggcccaaggaaacttaagaacactttctgtgaatatattggcactttcaatcctttttttctttttttggagacagggtcttactgtcacccaggctggagtgcagtggtcccatcacagcttactgcagcctcgacctccccggcctcagccttctgagtagctggaactataggcacacaccaccatgcctggctaatttttctggtttttgtaaagatgaggttttgacatgttgctcaggctggtctcgaactcctgggctcaggggatcagtctgccttgggcctcctaaagtgctgagattccaggtgtgagccagcacgcttggcctgatgcttttaattcttaactctgggaaggagatagcatagatgctgtctctgttaagggaactgagaggttcatggaagttaaataacttgctttttattcacatagctactagatactagagctcagaataaacctcacctttctgcycatttctctataactttttatatattgatttctttgaagagagactttgccaagtgctgctgaattagaggtagactgtttctcattttccaaatgtaatgttatcaaaagagaaagtaaacaaagtatggcatactgtgttcktagagaactcatgaataattaccactttcttttctcagtgctttcactgcctattcaattgttagcctggagttttattgggaactgatggtagattattggggtgcatagtgtccagaatctacctaaccttgctttctgtttgaaaaataaggttaacatttgccactttactactttgtttttttccctcgtaagaactatttacattagtaaaatcttaattgcatctttttcagaattcatggatgtgtgtttcaccttcgaaagatatagcctattataattttaaagcactgatttatgctggtagatttttcagattgttttccagatatatagagtgctgaataatgatttggcatattcatacacattgcattagttattttcaaattggctccctcctgagggaaatgctgtttcagttgggcagccagagactcttcagttatttgtgatgtttgtatttgtctacctgcctggaagatgaatttcattaagatatgaccaaccaacaccctttttatatagcctgtcataataatagattttcccttttaacatgcttcgtttctagactttacatgagttaaagttattcttcaagacctctttgtcaatccttctgagagacactgttcaaaaatttcatttgtttataaattggcattttctccttctgtacaaacatacacactattcatacacagatgcatgtataggtacataccctaatatgtgtagtgatttcctttgccaaataagaaaattatgctcttaaaattttttgtttatttgtttagtgcctagtctgtgcagggtactgaagcaggcatggctggagataaaaaggatataatcagttatggacaaagcgctcaagacctaatggtgtttttgaggagcaagatactggtatgaggtagaaaatggtacaggcctacatgccataagggaggtatgggagtgggtataagaagtgtggggagtggggagtcagggattcctttgtggaggaaagggctgggggatggtgaggattttagactggacattttaggtagagttaacagcatgagcaaaaaagttcagaggccaagagagcacagggtgtgtgggaattgagtttggcttgagcgtagaggcagatatatcagttgggaaacaaagagttggactaaaatccagactctgaggaatcttttaaaagctttatacagattggccgggtgcggtggctcacgcctgtaatcccagcactttgggaggctgaggcgggcggttcacctgagatcaggagttcaagaccagcctgctaacatggtgaaaccctgtttctactaaaaatacaaaaaattagtcgggcctggtggcatatgcttgtaatcccagctactcgggaggctgaggcaggagaatcgcttgaacctgggaggtggaagttgcagtgagccgagatctcaccattgcactccagcttggacaacaagagtgaaactccgtctcaaaaaaaaaaaaaaaaaaggctttatacagataaatgccatactgtatatatcttagagcttcctacttaaatctaccayattgttaatgaccattatcaatgaatatttgtttctaacggcaaggaattcaatggctttgcagaggtagctgtgaggtaccctactgccactgtggccatttgttgtcccttaagcctggaccttcctttggttctgaatatcccttccgtagctgcagttgcctgctaccttttgttcattatcacactccttggagaccccatttggggatctcttgctgtcagtttttctagctcctgctgtagaaaccctttggagcaatctcattttttaaccctccgttgcttcactgctcagcctcagggttttttttgttgttgtttgtttgtttgtttttgccatcatgaaaatcctaaattccttactgcctaggagggcttgggcagaaagaaaatctatgtgggagtcgctgttggagacaaattaattttcttcccatactttgagggtaagaaggtatttccctgacattcttccatgggactttaatgtttactgccatctttggtgttgtagttttggggtacccactttaggttggtctataatatgggaagctactctctctcttaaggattggggagacatactgctgggtatcttgagttataaattagattgctatttctttgagccactaaatgatgtagctacaatttatgtttaagaacttttgatcaataaaaagtttaataatgtatctttagagaaattgcatttcatgtttcaaataaccaatattatagtacaaatatagtatagaacttaaaaacaaacttgtgcttgcttttttgttcttgttcagaatgatttcttaatttttttctaattgcttaatataccaaaacaacttcttttgattgacatgtttagtatttgtaggttttttggattttcttttgttttattagaaacaggtacatttttgaaatactaggtttattaagttagaaaccatctgaatagaattatagtagcagtatctttgaaagcagtcggggtggaaaatgactcatcttgaggggactttaaggcaatttataaacagtgatgtttgctgaatagaggtttgccttttaatcttcctgcttatgaatagtcactgggtgttttcatagaatctgtggcttccagtaacttgtctttccaagaatgttaaaatcartgtttatctcagagagatcttatagctacaaatggttatctctgtttatgaccatattcttgagcttttgtatatattaaataaaaactttgttatgtgtttaagctttttttgtttttaaaatcaatttattttgaagttactttataaattttcttgtataatttgctttgtataagggatgatttcacttargtaatgtttgaaaataaagatgattaaaattttttcattataaaaagtcttaaagatacacaaaaaaagggaggaatagtacactgaacccacacttatttatcactcagattcagctattgtgaatagaaattttaactgtaggaaatgttggcttttttcttgtcttttttttttttaatgtaactattttgcaaactagtgggctaatttgcaatttttattttgtgcagatgatgtgatgccagccacttactgtgaaattgatttagataaagaaaagagagatgcatttgtatatgccataaaaaatcattactggtaccagatgtacatagatgatttaccaatatggggtaagtattgtatgttgtatttaagatttgggaaaatttgcataatcagaatttataaaatgactctgttaaggtgattgtgtactggatcatggtrtaaatgtgttttcactgttttttacagaatgattttaataccagttttatggtcacctgttgcttgaagaatttttgacattgccatgccttacatgaaacttgcctaaaatataacttttttatagtataacttttcagattcaagaatgagaaggtgcttagaacaatctaaaaatttcttctgcttccattttttttcatatcttaatttgttcttttaaatacagttaaagggactaataggattttgaagtttcattctgtctttttctcatgttggtactgtggtagtatggtttcttggtatgatagtttcttgaatggcttattttgctaaaaaatgtttatgtttttgcccttatttatccatattaatggagaagagctatggaatagttaatgccaatttatgaataatccaaaatcatttatgttggacttgattaaattatttataatgcaaagcacagccrgctgtcatggccaatatgtttgatcacatttttctctaattgtttctttcttttgtctctggaaatctgctgttatgtataatgaatgtttcttctaatgcttaaaattgttagcagattactgtcatcatgagcagtaaactatcaaagtctgaacatatcagatcagcatttaatatcatactaagatgaaatttagaaagttaatatcaagagataattatatgcatcatcattactgtgttgcatgttaattaggtatatgtagttagtatatcatataaatgactgcagttaccattatggtaacacagacatttctctgatccgctctgacagtggtaggaagatgtgctgaatattcactgaagatttttctgagcctgtagttcagggaaacccattggtttgggcctccttcatatttgagagaacaggtttcttccctattgttttcccttgcttacaggtttgtgcagtgatgccatgatagctcattgtagcctcagactcctgggcttaagtgatccttctcccttggtctcctgagcagctgggactaccggtgcaccccaccatgcctggctctttttttttttttttggtgtgtttgtagagacaagatgtcttgctttatttaaactaatctcaaacttctggcttcaagcaatcctcttgcctcagcctcccaaatttctgggattatatagggataagccatcatgctttaggttttttcattcacagctgtgggctcgttagcaacagtggcaactgtgctttcctgtgttaaatttattatagccctgggattttagaatatgccctgtttggggaaatacttttggatgtccttgaatgtctgaaccatggagaatccttgtcagaaaaaaaaaaaaaacaactttgtacctgacttttcgtggggtaaaggtttcagagtcttttaacgccttttagagagtagcttcttacttgatataattatgtctttacccccaaagtctggttttcagagtagataggtaaataaaccttaatgaaattaattattggctgggcgcggtggctcacgcctgtaatcccagcactttgggtggccaaggtgggcggatcacttggggccaggagttcgagaccaccatggccagcatggcgaaaccctgtctctactaaaaatacaaaaaatttagctgtgcatggtggtgcacacctatagtcccagctacttgggaggctgaggcataagaattgcttgaacccagcgggtggaggttgcagtgagccaagactgcacctttgcactctatccagcctgagcaacagagcgagactctgtctcaaaaaaaaaaaaattaattattagaaggatttcatgctagtgtggtggctcacgcctgtaatacagcactttgagaagctaaggccaggagtttgagaacagactgggcaacataacgagattcatctctacaaaaaaataaaacatttacccaggcgtggtggcacttgcctgtagtcctaactactctagaggctgaggtaggaggattgtttgagcccaggagtttgagactgcagtgagctatgattgtgtcactacactccagcctgggtgacagagtgtgagaccttgtttcaataacaaataaagataaaagaaggatttcattatcccctacaatcccaagcaaaacaaaactatactccttgaatttgtaccaattagaatcactttggttaataaataatattttataaatatgattatatttttccctaatacttactaamgcgtagggggaaggccctaaggagtaacttacagagcataaagctattgggaactgtttaggcttgggtggggaacattggacaaatagctggcagtctgagggcatgagagatgtatcctcagctaccacctataatatttccctaacattgtggatcttttttttccaatatcccaaattatgattgaagtgataattttaaactgtatccttattaccatttatcttcaccactccttttattttgctgatttcccagggacagatccagcagttgaggtataaaaaggagacatgttaagttttggtgcccatatatacatgtgtacatcttactgggaatgggtagatcataggttattagagaaagtactagactagggatctggaaaccttgattttaattttggtttgaccactaatagctgggtaaccttggcagatggtgatgtaagcacttctctgaaattttgagatgttagggagtggtattagtccattctaacaccactataaagaagtacctaagactrtgtaatttaaaaagaaaagaggtttaattggctcayggttctgcaggctatattggaagcatagcggcatctgcttggcttctggggagacctcaggaaacttacaatcatggcagaaggtgaagggagagtcaagagtggccagggagggagagagggcggaggtaaaaaaaaaaaaaaaaaaaacttaatgagcatttagcttgtaggatattttaaatattaagtggtwttaccttgtataaagtgttttttcttttgtaggtattgttggtgaggctgatgaaaatggagaagattactatctttggacctataaaaaacttgaaataggttttaatggaaatcgaattgttgatgttaatctaactagtgaaggaaaggtgaaactggttccaaatactaaaatccagatgtcatattcagtaagtattcaaatagtttaatgtaggaagtagtgtttgtgacccgatgtcaacaatttgtggctttgaactttagtaaatgaaaatgtagcttgaaatgggatgcaacagaatattattaaaactatattttctcagtgtacgtaagtaagcctcctgaaagcaaagagaggatttgcttcaggtctgtagtattagataccagttatgcctttgcaggagctaaaccatttggtacagccaagtttactgttgtagctgggtaattagactaacccagtcatgtatttttatggttacatttttagattgcagtacttcatgttgtttccctttcctttttaatgttgcagatagaagtgatgctgtattgaaagttgctggatagatgtagtttatcatggattgctctgtcagttggaataatatactcctgcacagtgagagcttgtcagagccttttagcaactgtcaagctatttctgttgtcttaggcttaaaaatagtaaaaatgagagagaaattcagtgtaggtagcctctgccagttattgcctcatagctggaatgagtccattgctagtagtcaattttgaaagtttttcaagccttgtgcatatgtacctgatgcaaataatccttatataactaaacttaatgaaaaaattttatagttgtaataaaagtaatgcagtctaaaaataaagatttacagattttttttattattcattcaaatatttattgagcagctaaggagatacgaaggtgattcagaacatggtcagaggagaggcgaatgygcaagtaatagaaagcaaagggcaaggttcactgaatcacagcaatcagaagaaactgctttagggaaccaagagtgagattgtttccagcctaaagaggcatccatggcagatcagaaaaggagattgagattaaaatagaagacttcagtctggattgttgatgatactcagtatggactatatttgtctctccttttcttttctccccatctttgggcttaatttaccagtagtgscctgaactgttcaatgcactttttgtatacttgcttgcatttttgctttaatgttttctacagaactaggtccttttggtgttttaggaattttttttcctgtttttgaaggatttttgtccttttgatcttagtgttgatagttttgagtcttttccattctgatttgacttttgtgcatttttggctggattatctcatgtagatttcttcactggtggtttttctttagtttcctcatcaaaatcgtcrtcatcatcatcatcatcttcatcagcagcaagttttacttttttctgtggaaccttgctaccacctccagggacagatcactttccagatatccttaagaatttcgcctcctcctgttcatcttctgattctgcatcttcctccacagctactaaatgctgtccactaatatgcactggccctgaaccacacttcaaccataaaagcactggtggtgtgatttcaaagcccccaagggaaaccgttggctgtgcagacattttcaaaggtgccagtgttatttaattggactgccttcataattcattgcctctgcttcaacaatatgcaattcatcctttgcaccagcccctaaactgaccgttcttaaagataattggtgctcattttcatcattatccaccttaaagtgatcatctttgttggcctttagttcacaactgaaaagatagttctggggcctcagggggctcatgtccatgtccatcgaatcttccatggggtggcagcacgcatttaggtgggaaagaaggcagacggagataaatgacttctgctcaagagaacagccacgcaggacagaatyacaccaggcagatgtacagattcttattttaattgatttagacacttgtgatatgagcttatactaattcagttcatatcacatttatcaggtcataatatgtaagtcaacaaaagtaaacagtccttgagaactgaaatcacccctctgaggaaagttgttaagttttgtcaataaacagaaaagttgattagttttatcataatcgtttccacttctcatgttgtaagtaactttcctccatttctctagtgaattttaattctaagtgtgtgtaaatctatattttgctcagagttttgtcatcagattattaatttgtttactggcctttattttcaaatgaaaaaawtttttttaggtaaaatggaaaaagtcagatgtgaaatttgaagatcgatttgacaaatatcttgatccgtccttttttcaacatcgggtaggtaaatagtgtattttaagacattgattatgtgcaccaattcgtwcaasaaacattgagtatctgtcatttgcagggcactgtgttgaggactgtggattaaaagatttagctaatggtgatttaaagtatgagcttgaaatcataagggtgatggggagttttagaggagcaatcaaaaacttccttctttgtgcttgtggtttaaaccaattaagagataaacaaagaagaatataacatacgggaagccaaaatatcactaataaggtgaatattagatggctgcgttgcacaatgaatagcgcattggccttctaatgaggtgaatattggagaatgtggcttatatctatctgtgatcaagtgggcttcttactactgaaactcagaattagasttaacacactcagagagtatattataggcttccctacatgggcacttgcccttatacaacttacggtgtgagaaagaacagaatgtatgcatcagaaggaggtaatgagagaacggattgagatcaggaatttctgcttgtggaaatccttccatgtagaaagaaacatcaagaatgggaagaaatggcctcccagttccccagcccccaccgacagatacttgctgaattttagttcataaagccggtagcattagtgttggttttgtacaggtagttttgattctttatagcaaaaatcacactttgttttggtggtttcctcctcaaggatggagataaaaagacaaggcataagggtatcccttcttctgaatttcttcctgaattgttgcttctttcttttgatctaatcttttggactagaattttaaagtttattaatcacctatttttgagatggcccgtaagtttttgttgtctcagatttacatattactgttaggttccattcttagactctaccggaacctatcactacttctgatcttactcaggggtcagagattttaacaattaagctatttggaatttagtctttttttttttttttgagacagagccttgctctgtcccctgggctggagtgcagtggcatgatcttggctcactgcaacctccgcctccttggttcaagcgattctcctgcctcagcctcccgagtagctgggattacaggcacacaccatcatgcccggctaatttttgtattttttttagtaggggtggggtttcaccatgttggtcaggctggtcttgagctcctgacctcaagtgatccacctgcccttagcctcccaaagtgctgagattacaggcgtgagccaccgcgccctgcctggattgtctttactgaaggatttagcatactactcttggagctaaaatttttcccctacctcaatccccacctcaaccccacctgctgtgtgttctcctcgagtataatgctcaggcaatcttcaatagggtatggacacagataatttcaagatttagataacatttgagaatatgaaggctcttaactggcactcactactggaactcttaggtctgccttgattctagccccactggacattgacaacttaggggaaagactgccttttagtattttcactatggaatggtatactgtatttattacttcaacacatattaattgagcacctgctatctgccaagcactgtattaggtaagtaggatacattagaaaataaaggcaaagatctataccctctaggaacttacgttctagtcaaggagacgtgaaataaacacaataagtaaaacacactttattcaaagagaagtgtgtcaaaaaagaaaaagtagacagcagaacaagagtaccaggggtcgggtaagttgcagttttatattatgtagtcaaggtaagcctctgaaatggattgttgagcaaaagcttgaaggagttgaaggaaataaagaatgtggatatttaggggaaagagtattccaggtggaggcaacaccattgaaaagcctattaaagtgaggatatgcttactgtggtttgaggactagcaagaagatgaagtcagagaggtagcaggagccagattatccatggtcattttaaggactgcagattttactcttaaatgcaaagggggcaggggagcactgtagtgttttcagcaggggggtaacaaatctgacttttgtttttaaaggatcaaattattatgtgggttcaggaagtcaagggtagaagcagggagaccagtggagaggctgatgtagcaatccaggtaagaggtaagataactcaggtggtagcagggtaggtgatgaaaagatgttagattgtgagtatattttgaagttaaagctggcggcatttcgtgattgataggaaggtgaagaagggttgagacaaactctagggttttcagtctgagtggagctgacatcactggggctgtatttggaggagatttagaggggaagattagggtacagtttgggacatgttcgttttggtgtgtctgtacgatatccaaatggagatattgaccggcaaattggatatatcagttctggagttcaggagagaggtctgggctagagatacaaattttgcagcaattggcatatagatcatatttgtggctatgagactggatgtaataattgctaaggaagggagatgtagagagagaagaggaccaaggactaagccctgggtgcagtagtaagagtttaggaagaacaggggagttcagttaagggctttgcgggggaggggaaagtatggtgttctgaatgccaagagaagaaagtgtatcatggaggatagagagattagctctgaatttttgctgatgggtcaagtaagatgagcactgaaaagtgactattggattaacctgaagtcattggtgaacttgacaacgattttggtataatggtggggcattcagaacctgaacagagctgctgtaagagagaatgggaaaagaggaattggagacggcaattatggacttgtgaggagcttggctgctaaagggagcaaagaaatggtgcagtagccagtgtggaaaatggaattaggagatttttctttcttttttttttaaatgtaagaaaaacattaactttatatgctgatggggttcagtggagattgcaaaactggcaatgcaggagaaaaaggagagaaatactgcatcgttttccttaagtagaaggaagggatatgatgtactgtacaagtataagaattgcttctaatacagtgactaatagcacaggcaaaggagctaaagctgaattcaaactgatgctttgccgcttactatgaccttggttaaatgattcagttcttcagcttctgttcccttaatagtgaagcaaggattatagtaccttgcagagctgttggggaatttcacgttgatataaagcacctagttcagtgtttggcacatagcaggtaagaggcagtattgttggtatagttatttatctccagttgcattctaaaatttatgacaaattgagggtgcagcttcaggattagtgacactagagggtgctggcatgcagcattagtagggttagtaaasccctttgtgacaccaggtttctttatttttaagaagtattttccctggtataataatttcacaattatacaacatctcataatttttagaataaaggaatattacaaaatttcaggttattactacattataatagtgtatatcttagattagaaaatagcagagccttgttagaaattacaacattttatgtgtgtctaattagtatagttactagtaactatataaaacttcttttattttaaaaaatttgataaattgactaaaagatggtatgtgtcatttttctttccctcttgagcttttctgggttaacatctcagggtgggaacaaaatcaaatctttggaaaatcatagactgcttttatgaaccttaaatgatacttttacaataaactcagatttatataaccttttttgagcaaacatttcaaaaaacaatgcatttcttggttcctttataattttactggatgctcaataaataaattgttgaatgaagtaaggaatagtcttctgaagaggctgtctcctgtttttcaagaagatccatagagtttatctcgttcctgaaacctcagggtggataacagagcctggactgcccttcagtttcatgcacatattcagcacgttagcccaagttaacatatgtcctaatcatacacagcaatgcatatgtatgtacctgtagaattttagagcaggaggatatctatgaagaaccggaatatgtagataagaggtttcatggaggggaaggtacttgtgttggaatatgaagactgggtagaatttgctaaggggagtagaagtagatctatgtgagaagaaattataagaaaaatacagaggtggaagtgagtatgctgtgcttgtggattcttgaagagggataagscttattggaatatagaatataatggaaagaaaagttgactagataaggtgagatggccatattacaggaagtatagaatattggagaaaatagtttagatttgatatgagagaaatagggtgtacaactgtaaattttagaatagaggagtgatatatgaacctgctttggaaagatttccttgatagctttttacaggataaattgaaaggaaggggagagaccaaaaaaaaaaaaggccaaccaggaggccattagtgctatcaaggtatgaggtgatggcatgggaatgaagcagaatggatagatacaagtcattttgaagaaaaatacatgcttaatattacctatgaagaattaaggagaaggaagagccagagataattgtaaaatttsaaagccacatgttagtaccattagcagaagttagagaatcagaaacaagtgttatatatgaggtggaagattatgagtgtactttagggcagtctgagtctgcaattccagaaacattcaagtggaaattattgtagttagcaaaagcctgaaacatgagtgagaaagaagactagcaatttggggtgggatgggaggtgggggcgagggtgttatcatcatcattggaatgctggttaaaagttctgagagcctaaagaagtcacagcagagtactaagactggagcttttggagaagttcacaaaggatgggaggagccagcatggaagatgaaagaggagaagcagcggtcagtgaagtaggatgctgtagtgtcaggaaaggtcagatgtggcagagagatcaaggagagtgaggcagataattggctgctgaatcggtttagaagttcattgcaggcctttgagagaaattttgtggggcaaaagtgagattgtattgtgttttggaggaagtgagggaagaactggaacatgtcttctttgaaaagtattgacattgaaaggatcgggaggtgagaagatgaaaagaatgagggacaaaagatgaagcaaacacttcaaaagagaataatagcaataacaataacttttaggttttatttagtgtttatgatgtgccaggcactatactatttgctttacctttattgtttaaactctatgacaaccccagggagtagacatcattgtagataaggacctttggagattgctgatggctggtgaaaggtggaggggttgggatgcaaaatgagaggagaaaaaacacctcaaaactggatgtggaaaggttgtgtcatagaagacaggatttgcttcaagggaaggcagcagaaaggatggcattggggccttgaagagaggagagaaatttggggactatccctaaagatcttttgggaattaaaatgtaaataaagaaataactgggcagtgccacagacytagttcaaatcagatatgctacattttgagtagtaccttgtgattatgaatcagaatctagatgtaatattgaaacaaatatgtggataaaatcaaagccaagagcttcaagaacattgaggaactaaaggatacctcaatatgctatggaaaatggatttggaaagggctgaattatgatggtgacagggtgaggatgaactaatctggagcaagtgaagcaaatcattcaggatggtgacctaagtccatggcagccagctataatagtttagtcttagtattttaaggaggttttcagattgttcaattagggggaagggaactaacatttactgagtatctaaggtgccatactttatatatacattattaagccctacaaatcacttacaagataagtattagctcctccattttccagatgagaaaaccgcggtcacatagtcagaaactggcaatgtttgactccagagcccatgttttttccatgtaatgctgaatagcataggttatatggccaaattgtactttttgtttttaacaataaatktgattttgaaaatttatataaatgrtagcatgttttcaacatatgggtgcttattgtaaagaaagccaatccccttggcataatgaatactcatcctcaaagtgtctgaaatttggatttttgtctaaaggatttaattaaagacttttttttttctttgcattaacatccrgttgtcctcatggaacctatgaattttgtggctgatattgcaggttggtaacattttattttctgttattttagattcattggttttcaattttcaactccttcatgatggtgatcttcttggtgggcttagtttcaatgattttaatgagaacattaagaaaagattatgctcggtacagtaaagaggaagaaatggatgatatggtgagtaaacatttacattatatttgtagaaacattttaactgagtgttaagttttaaatgttgggaggtaggtcataatttcttaccggaagtctttgagtttccacaattcaggatttttagagttaagaaagatgtaaaatgcccagtgtggtctgtaaccatgccctgtaatcaaataatattaattttttttcaggaaaacataagaacattcacccgaagtgggataaataaatagtgtaacctcttgttagttcaagccaagttttgccaccaagtaagaatatgtctaatactgttaaatactgcttaaaattcagggaatgggtagaaggattaatttatgttcagtttagtgggttcagaggaaagatttgttttctaagttcttttactaagttagagaacaaaaagtgtgttacatagagtgctagctaatggatattcggtataggtatactgtatcattaaataaatttaggaaatttgttttaagagacaggctggagtgtagtggtgcgatcatagctcactgtaacttcaaactcaagagctcaagtgatcgtgccacctcagcctcctgagtagctaggaatacaggaacaagcccccacccctggctatttttttatttattgtagagataatttcactatgctgcccaggctggtcttgagctcctggcctcaaacgatcttcctgccttggcctcccaaagtgctgttattataggtgtgagccaccgtgcctggcttgggaartagtttcaaattttaaattttaatatactagggtatattgtgaagtatcagagggtggataaagcatttggtacctcttaactgtatctgattaggattctccccaccaaaacagattaccttgagggacttctattccttaggaaatattgttttagaaacaagctgtgttagaaactgtttaaggagcacttgcttactaaggttgcaaagtaaaaattgaattctttttaaaaaaatgcatatagactgttaaataaaaacattcatattgaatatttcccccatatgttttcttagattctaggcgctaaaggacatttctgcattcttaggggatctagtactggttttgatactcttctctttcatttctccacctagcccctgattgtatatgagctacagctatgatgtgaatagcaagaatagtgtctgaaagtggcattaagagagtcagtgcactgttctcccaatttgaccatttctttttgttactaaaccttttctttttccgttatttgagattctctgagcacaaccagaagtcaacttcctgaacctcagcattttaacattgttattaaggcagtgatcattctaagtttggaatatactttctcaatattttgtatttctttagctataaatttggagggaggaaacttacaactgtaatttttacatactatgttttagtttgattctgaatgatttgcttttctctctmtmtatatatatttgtatataggatagagacctaggagatgaatatggatggaaacaggtgcatggagatgtatttagaccatcaagtcacccactgatattttcctctctgattggttctggatgtcagatatttgctgtgtctctcatcgttattattgttgcaatgatagaagatttatatactgagtaagtgcctacacttaactgtattatgtctttattgttcttaaatagttttaatcactggaatcttttaagtcaatcataattaaatcgttacttatttcctttatcttacagtttatgataaatatcataaatgcagacagacaaattaaataatgaacagtaatctgtatttttctgttacatgccaaaacttagtagcattactgaacattgtggttagttataaaggttatatgttccattaaagatatgaacagaggttactttcaatccagagctgtttgacaaagtaaatagccttttttttcctaaagttgaagatccaattagagcttcatcagaagttcaagaatttcagttactaagttacttcatatttaccttcagatctggaaaacatcagagtagaagaaaacattgtaaataatagtaaaaagagtgatgaaatagtcacataaggttagaaaaataattgatgacttctttgaaaaaaaaactcctaggtcagtatgcatcctatcttgacacaagttttgtaattctttctttgcaaacaaaaccatttgtaagaaattcttaatttgaggtctttgaattatgtgaaaaagttacacattcacagaagatctcaggtccctattcagtgctcaagaaagccacaacctctgtgaagcaaacacactctggtgcctgggtggtagcgattataattcaggcatttcaggtgcggccatatgaagtcctccttcagaatgacacttttctctagttatatttcatgcctctgttttagttcataatgcactctttcctctatatgcctggcgtttgatgggcaagcaatacatccttgctgaaagaatggctctttagttgcatattaaatatttaactgtatactaaatatttgtttcctctgctagatagtaagttccttgagagtaaggatcaggtcataacttacctttgaattctcaaagtacctacataaggagctttgcatgtggaaggtattcagtcaatgcttgttgaactgaagtgaatatgtattaaccaacaaagctatttctctgtagcattggttgtatttctttaatataacctttctaattcatttaccrcatgagctttaaaataacccaaatctaaacttcagagttctggcgagtagttcatattttcgggcataatgtatttcagataagctggaccctaaatataagaaaacatttcamatctaccaagaagttgtgctttacattaaacactggattaagttaatcactatcgaattgacactagctgtactgtcacagtcttaagagccactagaagataatctcttctagaatccaagtttttgctgcttccttttcaaaatgttagtgttacaattcggcagctctttttttttttttttttttwaaatgcagaagctcttctacttaaagaccttcaacttttataaataagaaaccactcactaatgtataatattagcaggcaagtcatgcattgttattttagcctataattactgtaagtggtttttctgtgttgtgtttatttgaagtgaatgtaattcattacttatgtaagtactaaagcattaaggatttattattatataaaagtggccaacttattgagatttcactttaggtgtttcatgcacatttgatcccttaatcttcacatcaaccctatgaaggaaatattctatttccattctacagaccaggacactaaagctcagagaaataatctgactgagatcaatgagcaccctttactagtaaagagtgttagtgagctgggattggaacctaggcaatcttattccagaactcttttcttaatttgctatgttacggaaatgaaaatagagaaaataataatacaaagtggtgagaaaatgaaaaatttgcacacaaaattgggataagtcacttgaataggaatgattctaaaggataaagagcagataatgtaaagtaaaaattactttgcctctgtggtcactatagcaatcagaggaaaagtattttgagggtataaggtagaggatcagtatcagtgtgggtgcctgttatagtgtgatattgagaaggcatagagtttgagaaggtgaggagtaagcttgttagtgctgctgctgctactctgaaagttttcactggagagtggtaaggctgtggcaggtgtaggctaaatacctcttcagatgttccccacatcccatcttggagagatgaataaggaggactgttgcctccctcagcagatttttcaatgtagataaaaatggtttacttgagggacatggggagggaatgcccatagaatatttgtgaacaaagaagtgaaggacctatagacttttttaaaatcgtatgtctgattttaatttttacatttttacttttttttttttttttttttttgagatggagtcttgctttgacatccaggctggagtgcagtgacgcgttcttggctcactgccacctctgcctcccaggttcaagtagttctcctgcctcagcctctcgagtaattggaattataggcacctgccatcacacatggctaatttttgtatttttagtagaggcggggttttgccatgttggccaggctggtttcaaactcctgacctcacgtgatctgcccaccttggctttccaaagtgctcggattacaggtgtgagccactgtgcgcggcctaaaaatcattttcagcagcatgagggaaacagggaaagcctcagtgttattccatctaaaataatagtatttaatatagattatactactgttttatttctgtttgcaggcaagattcataagcagttgaatcaagttatgaaacagactattccagtcatttttcttaacagatgaacatcttgttccatattatgggattggtttacagggtcacaaaacagttttagtgtcagcttctagtatttttgccaaataaatatgaaatacttgcttagaatatatcataacatttaactgcaggataaaaaaattaggatcagccaggtatcatgtaaatgcagttttaactacaaattcattcactatagagaatcttttgagttttatttgtagtccaggttgtgatatttttgtatttctgttaaagttatctttgaaattaaactaatgctaatataatagactatgatgttttctttaaattgttggttttaattttttttttcttttttgcctttttaggaggggatcaatgctcagtacagccatatttgtctatgctgctacgtctccagtgaatggttattttggaggaagtctgtatgctagacaaggaggtaacttacgaattctcacttcatgttgttaattatagatgctaatattttactatgagattttttttgtttgttttgagagagtctcactccatcacccaggctggagtgcagtggtgcaatctctgctcactgcagtctccacctcctgggttcaagcgattctcgtgcctcagcctcctgagtagcttggaattacaggtgtgtgccaccatgcccagctaattttgtgtttttagtagagatgagatttcaccatgttagccaggctgctgtggaactcctgacctcaagtgattcggcctcccaaagtgtctggcctactgtgagatatttggaatttaaaatgtgcagaacagccattgtaaaattctttgttatctcatttcacataatttctaccaaacctattgtgtgttctgtcttgcttttgtggaattctcgcgttttatttcctaaaattatgaataattagtagataatctcctttgtgcaccatgtaatttgccctgaggaacatgtaggagagtgcatttaagttattgatactatttgctttgaggtgcctggctctagatgtgctccatgtgatgcatccacacagaaaaaaagctttatagatgaatataaaggcatgtgtaatggtctgtgggtaaagtttctggacaatggaaagagaataggaaggaaagttatgtatttctgttgactgttagttttatcaaaggacccttcgcaaagatttctgctattctttgtcactgtcacagtctcttgctaagagcactttgtcttaaatatcctgttgctcctttactactattacctgaaattgatggaactaataacacgataatacaaggatactgctccttggtgtttttttctgcagtggcattcagaaatgccttgtattccctgcagtagtctgaggtcagaaaagtacaaaaattggtagatttgcattttagtttatgaatgaagtgttgttgaaataccttaaaattatatttccaaggatggagttgtgattttccacagcccatcttaagcagtgtcagcattaggggatcctgccttcttttagtagactgggcacacttataggttataggaaatcggagcgtaggattatatcttggtttaccattgcttttttattaatcttcctagacttaatgtgacctgtaccttcagtatagataattatttggattgactgagggagtgtcactatgggttcctgactattttaggtagatgttcagtctctaaattcgactcgcaggtgtgggaaattagtcctatcatataggactacatcctaaggaaataaggacacatgaggcaacttctactttgaatttgacctggaaattaattaggctaaaattttagtttatgactctcaaaatagtctccacagcagaaacagatttatttaaaacaggaaatttatttaaagttggacataaatttgtttttagtctgactgcaagttaagaacacccagcccaactttcctttactacacttattcttgaaagctgacagagttcaggctcaggtctaggaatatcaagtcttacaaaatgtaatgtaaagattatgttctgattggtagtgtcctgaggagatctgatagtgtcctgatattttgtccgatcaagcctcaaaaaccaggttaatgtagaagtcaacccaggggatcaataatttttcagacttatctcaggatttgaactacagtgaagctcaaggtcttcacactgtcctcagtgcactataatgctatagatctagtttgaagccagtggtatccaggaccttagccagagacttcaagggtttgaagagcagtagaaaacacagcaatgcagatacttgggttactggttgtacccagtggaatgtgtacaggattctttttgactgttagaaggaaagggagaaatagagagttggataaggagattgattgattgattgattgattgattttgagatggagtttcgctcttgtctcccaggctggagtgcaatggcacgatctcagcttactgcaacctccacctcctgggttcaagcgattctcctacctcagcctgctcaatagctaggattacaggcgcgtgtcaccatgcccggctaattttttatttttagtagagatggagtttcaccacgttggccaggctggtcttgaactcctgacttcaggtgatctgctcgcctcagcttcccaaagtgctgggattacaggcatgagccaccacgcccggccacagttttgttgatacatgtctgaatctgagaagatagtggaaaatgcaggaaaagaaaatgctagaaaggtgttggaattaaatagaagtaatactttaattaatcaccacctttttgtattgttccaatgctggctatcagttagaaaggagaggttcttgaaacttagctggaaaagaaatgaaacaggagagaaaactcaggattaaggagtttttckggaggaacgttatgattttaggtaataattctgtaacagatgttttaaaagaactttatatagcagaaagcaaaaattagagtattgcttatttttctatggtactttctgtttgggtccctgttgcttatgattgtggaattgaattttgatagtgattcagtgtttctaagctgtttgaagatattttctgccagctttaccctctgctgtattagaaagacagctctctgttgctcttctggtctgtatgagcaaaattgaagatttttttattacatagttaaaaaatttgttcccttgattatttgaataatagaagctcaatgtatagaattttggcaatacacagaggtacagagaaatagtaaaacttataaatctgtagttctgattgctgagagagagcttatgaaacacattggttttttttcttttcaaacgtagaaatgctcttaaatacatatttataattataattttagagctaaggacaaacttagaggctgtctaactcagggttttttgttttttattatttcacgtttaattttttttttgccctgtcttagggtgctgaaaaatcacaagtgggtttcttgcgaggttctttttttaaaaactcactggtttttagacttttttcttctttttaaagtagtataacctgcttttcaaatgaaaacttacatgaaactccaatgtgtaactgttgaaaatgtaattgttctggttgaagcaggggtaagggcacctgggatttttcttcaccagtgacttcatgggcatgccaagaagctccagaactccaaggaatagttttaaaacccctttctcttttttttgatcagttaatttaaaccagtaataaaaacccctttctaggccaacttgtagcctagagagagagagtggcttatgaaagttcacagcagttcagtggcagagtcaagacaaaatgtcagaatattttattacaggtcattgctcttttccagtgcacccacttcagaagctgtgatttcactatacgtacttggaaatctttggtatttgttagctattattttgaagaaattattaagatgttaaatttcatgatctttatattaaaatttcaaacaaataatttcgtactaaataattatattaaactttcatagtttcctttcttttcaggaaggagatggataaagcagatgtttattggggcattccttatcccagctatggtgtgtggcactgccttcttcatcaatttcatagccatttattaccatgcttcaagagccattccttttggaacaatggtgagttgcttgaatcttacttttaaactgaaaaagtatacacattctaactgagacctactcaccctccaaaatacttcttattagmtgttttgatggtttcagtcagttcatactcagtcctggaaagttagatgaggagaatactactgttgttagcctccataaaattttggttaagtttaaacctatagttggctttttattttttcttgattctgtaagccagtaaagtgaaaggctgactttaaaagagagcactatagctttttatcagagatgggaagaactggtgaatatattttagagaaagaatcatgacaatcacaaaacatgggtgttttaagatgataggtgagtgcagtggtagaaagtaaagcttttccatgacacatttttttgtattaacatacttttcttagaaagtcactaagcaytggccaggcgcggtggctcacacctttaatcccagcactttgggaggctgaggtgggtggatcacgaggtcaggagattgagaccatcctggctaacacggtgaaaccctgtctctactaaaaataaaaaaaaaaaattagccaggtgtggtggtgggcgcctgtggtcccagctattcaggaggctgaggcaggagaatggcatgaacctgggaggtggaggttgcagtgagccgagatcacgccactgcactccagcctgggcgacagagccagactccatctcaaaaaaaaaaaaaaaaagaatctcactaagcatttttgtaaataatatacgttgctatagatgttaaaatgtgtttgcatatcttacctgtaatcacagtcttggaaatgctttgaattatttaaatatattaaaactagaacacataaaatgagttaacccacggtctcccaattcttcttggtattacctttttactagaaacagaattttaggcctagactagagtgaaggcttaatgtacgcttgtgcatacatgttcatacgtatatatgccaatgcaagttgcagggtggttactgcttttaacagagcctcaataacttagtcacaatcgtacaggcagttaatggtagaactgccattagagcccacaatatctgttttaatcttgtttgggttttctttctattatatgggagttaacaaatagtttcccaaaaattccaggtgactttgttttatagtccaatttttttcaaagacacattgaatattatacatttttattaaatatttaataccttttagttaggaatattttgaaacttgtttcagaatggaaatttttttttttcaagccaaagtaagtgataatgcttagaaaagggaaaggtaaytaattacaccagacagggaaataatttgctttgtaatagttccaggccatcagaaagtacatagagtgagtcaggttacttctcaaagaacatctgctgaattgattattttcatagtgctttaaaaattaaaattytgattctgttaaaatttttctcagaaagttttgaatttgatattggtaaaaatggtatttcaaagttgctttgtctcgctaaaattgtaaatttttaccaatttgtaaatggagttttaaatgttaatattcagtgtaatttgcctttagataatttaataattacaaattattagaatataatatttaaagtctgtgctgagccagagaaggtttataaaattgttctttagtgagtaaaagactaactgttggtacttggcaggctcctacaatattatgttcttaatttgcattagtctaatgaaggaatactgggggaagggtattcccctggcctcatgttttaattaggtgtgtactttaccgtctccttttctccgtttaagagtatgaaaacttgtttagaacatgaacttgaagaacttgaagtgaatgtttcacccagctcttcattaagtacttgaactacttaagtttgtggttttagttgtttgacttcttgacattctgaaggaaatggttacatagtctcataaactcagtgattctcaaccctgggcacacattagaatcacttggggatttaaaaaattttaatgctcagggctttctttcaagctaattagtctgtcctgctttaaacccaatctgtagtgtttacctgattccagttcctgggatctggggatggatctgtgagccgaaaggctcccagaccataggtgccatgtgtctgagaagccaggtaccactactaactgaataccttaatttgagaatcagagtcttcagatcctcctaagtgctcttccccaggtcttatctctttctgtcccccattcctttgatctcttggttattgaggcctttttctgggtgatcttcactctagttctctgttctatgaaagtttccacatctggctgggcatgatggctcacgcctgtaattccagcatgggaggctgaggtgggyggatcacttgaggtcaggagtttgagatcagcatggccaacatggtgaaaccctatctctactgaaaaagcaaaaattagctgggcatggtagtgcaggcctgtaatcccagctactcgggaggctgaggcaggagaatcgcttgatcacttgaacccaggaggcggaggttgcagtgagctgagatcacgccattgcactccagcctgggtggcagagtgagactctgtctcaaaaaaagaaaaaaaaaattagattgattctggaaagctaaaaactttttattttgggaatttatccaagaatgatttagatgctctacccaaaggttttggtcctgtaagagttccttgggaatgagaaaggattcgccaagatgttctggaaaagggttttagacacaaagtctttctttcgtgggctgtaaatctcagatcctaagttttcatcttattgtaggattccaaaggacaaagaaccaaattacagagttttaaaactcacagaggcaggttagcatgggaactaatcacctttcttttctagaaagatttgtaaaactggccgggcgcagtggctcctgcctgtaatcccagcacttcgggaggctgaggtgggtggatcacctgagatcaccatggccaatgtggtgaaaccccgtctctactaaaaatacaaaaattagccaggtgtggtggtgggcacttgtaattccagctactcgggaggctgaggcaggagaatcgcttgaacccgggaggcagaggttgcagtgagctgagatcgtgccactgcactccagcctgggcaacaagagtgagactccatctcaaaaaaaaaaaaaaaaaaaaaaaaaaaagaaaggtaatataaaaccaatgttagaaaagcttcatcatctaaggtgagctgttcacaaacgctaaagcaagcaaaaggattttataaagatatcaagatcaaagactcattgtgtgggatcagtgatgtaacaaagtaaaaaaaaaaaaagaatggctctatcccattcttcctctttatttttcatcaaataaaatataacccataaacaaaaaaaagtaagaggaaagattccctggtaagagggaagtgaagcctgagatacgcaaggcagttgattgtacaggagtacccagctgccttagcttgaaagtcttgttgctcataaaaatgatcttttagagataccgagagatcacattaagtaatgtttgaataactgtgtgagagcagaggtgctgtaaaactggatgggcaaatttacttttccaggagggaaaggaagaaagtgggttctaccttataagagtatcgaagtattagccatagtatgtacatgctatcctttagtagaaggtgacagatattcttgattctgacctattcaaaagatgattaataacttagagacatggtggtctgctgattcaattgaaaagggatgtgagactagggaagaaactagtaatataaaataatgaactagtaatatgaaataatgaaggcagcatctaaaaagatctcacctgactgaaatgatgtgccaaatctaagaagatgaattataataaggatcaataataatacatttgtgtagcactttgtagtttacaaagcattttcacacgcattatcttgtctggttttcagaagaacgcaaagagataggcagagctagtggtgtggttattcctattttacagaacagaaaaccaagactctcccgtagttagttttctttgttgctgtgctggtggtggtgatgataggtttttgttctttttttttggacatttttcttttcctttctgtcaaaaggaatcctagcctaattctgagagcagtggttatggtttttgcccttttttgtttgtgtgtttttacagatgtactgaggtaaaattaacatatgataagttgcataaatttaaagtgtacaatttgatgaattttgatatacatacacccatagacacacacacacttgtgaaaccattaccgcactcaagataaagatgtttgtcacatccagaagttttgttgtatacctttataattcatcctttcttttcttcttttgtctctcccctattcttaggtaaccaccagcctgctctctcttatcatagtgtaattttcattaccgaatttcctttaaatggtagctcatacagtatatattcttttttgtttcactcatgaaaattattttgagattcattgatgttgcattaaaaaaattttttttttgagactgggtcttgctctgtagcccaggctggagtacagtgatgcagtctcggctcaaacagtttcaccatgttggccaggcaggtcttgaattcctgacctcaggtgatccacccatcttggcctcccaaagtgctgcgattacaggtacgagccaccacacccggcctgatgttgcatttatgaatagtttgttctttgtattgcccartagtattcaattgcatggttataccataatttatccatttgcccagtaatttactagttttttgctattgtaaatcaagttactgtatttatgtgcaagtctttctatggacttatgttttcatttctcttggataaataactaggagtggaatggctgggtcatatggtagtttaagttttcaagaaactgctaaacttttccaaaatagttttgacattttacatttctatcagcattctgtgaaaattccaattgttccacatcactgccagcacttgatatagtaagtctttttaattttagctattctagtgagtatatagtggtgtctttcggttttaattagcacttcctaatgactaatcatgttgaagatctttttatttgcttttttgccatctgtatattttctttaatgaatgttcagatcttttgcctattttaatagattgtcttcttattgagtgataagagttcttatatattgtaaatacaagtcttttgtcttatatgtattttgtaagtatatactcctattttgtgggttgtcttttcataatctaaagagtattttttgaagggcaaaattactaattttaaagtctaatttactggtatattttttcttttatgctttgtgctttttctgttccatttaagaagtcttttgccaaaccagacatcactaagctttccttatatgttgtcttctagaaattttatagttttagctcttaaatttaggtctaggatccatttttggccaattttatatatagtatgagttaagggccagaggggttttgttttgttttatatatgactgttcagttgttccagcaccatttgttgaaaagattatcctttctctgttgagttgccttagcacctttgttgataaccagtttaccatgtatgtgtggatttttattgctggattttctcttgtttcattttgatttgttctatttcaatttgtcttgtttttaatgctaataccacattgtcttgattactatagctttataagtcctgaaatcaattctttttcaaagttgttttggcttttctaatattctttgcatttccatataaagtttagaagcagcttgtcagtttctataaaaagtcttctggggttttgattgtgattacattgaatctatagcacaatttgggaaaaattgacatcttaacattattgagtcttttgattaatgagcagagtatatctctcaacttatttagatacctttaatttttctcagcaacgtttcatagattttagtgttcaggttttgttatcttctgttgaatttattctccagtatttcatattattctgttggtgaatgatattttttaaatttctgttcctccatctcccgggttcaagcgattctcctacctcagcctccccagtagctaggattacaggtgcacgtcaccacgcccagctaatttttgtatttttatagagataggctttcaccatgttggccaggcttgcctcgaactcctgaccttaggtgatccgcctgccttggcctcccaaagtgctgggattacaggcatgagccaccatgcccggccatttttaaatttcaaattctgatcgtttattgctgttacagtcatgcatcatttaatgccagggatatgttctgtgaaatgagttgttacacaattttttcattgtgtgaacatctcagagtgtacttacacaaacctagatggtatagcctcctacaaacctaggctatatgttatagcctaatcttacaaggctacagacctgtacagcatattattgtactgaatactgtaggcaattgtaacacagtggtgtttgtgtatgtaaacatagaaaaggtatagtaaaaatacagtcttataatcttatgggaccaacgtcagatacgtggtccatcattgaccaaaaaaaaattgttatgtggcacatgagagtacagttgacttttgaacaatatgaggtttggggtgctgacccctaccccctgcccgtacaactgaaaatctccccaaaaccttaactacgaataagcctgctgttgactggaagcctcactgatgatcacatattttgtatatgtattatatactgcattcttacaataaagtaagctagggaaaagaaaatgttattaagaaaatcgtaaggttagctgggtgtgcggtttgtgcctgtagtcccagttattcaggaggctgaggcagaaggatcacttaagcccaggagttgaggctgtagtgctctatgatcgtgcctgtgaatagccactgcatttcagcctggataatatagtgagaccctgtctcttcaaaagagaaaatcataaggaagagaaaaatgtatttgctattctttaagtagacgtggatcataataaagattttcattttcatcatcacatcgagtaggctgaggaagaagaaggaggggtgtctcagggatgctgtctcaggggtggcagaggcagaagaaaatccacttgtaagtggacttgaacagtttacaccctatttttgagtgttgactatatgtaggaaaacagttttttaggatattggctttgtatcctacaaccctgccaaattcacttattagttctacaataagtgagctagggttactttattcttacaataaagtaaaaactttagttttttacatagatcaaaagtttttttatttttaatttttgtgggtacatagtgttatttaaaaaaatagattatcaaattatttaaacagtttcacttctcttttttgatctgtatgtctgttatttctttttgttgtctgattgcactggctaaaacctgcagtataatgttgaatagaagtgtcaagagcagacatcctttctttgttcccaatcttggcaggaaggcatttagttttatgccrttaattaaaataatagctattttttttgtagatgcccttcatcagcttgttaaagttcccttctatttgtagttcgctgcaagttttttttcttttaattttgaatgggtgttcgatcttagaacagcattttctgtatcttttgagatctgtgatttttcttttttaattctgaaaatatggtgaaagtattaattttctaatctttaatcagtcttgcattcatttgatgaacttcactttgtcatgatatattatttgttttatatatggttggattacatttgctaaaatttgtttttacatctaagtttatgagagatattggcctgtaggccagtctggaagcaaagatagaataagtaatagccaaattcttggtttatgtctgrgattgagaagatgtgatcagtatgtagatctttggggtattaagcaccaataggcagtacttgattctaacttgttattgttgtagataagggaggccctcaacatggagtaaatctttcttctccccactgcctgctttcattctcctctgaacagtgactagaggaatagaggagagccccatattaatttgagttccagggttttcaccaatatattagaccctcttagctgctaaatttcattccaaaataatgtggaagcccagatagaaaacagatacaaggatgattttattagtatattttgcaaattaagtatttttaacactgaatttaataagagcaataaagttgtgatgaatacaaatctaatatcaaggggtttgaataaagtaagctattacttatcttcagcacccaatttatttagttatcagtattgagaaaaattcttcacaaatgagttcattccatgtgaatttttttttaacagcttgccttgcaatcttagagtatttttcaagtaacttcatccagaacttgaacataaaggagtagggaactggtttcacagcttaatcactatttctaacaaactgctcacattttttatcatatattaaaaagttggacaacaaaagggaaaatattgacaaatgctaagcaattgataatgtctttttgagactgtagattcctttattgactgttatgtgcacagaaggcaagatgtgccctcacttcagctgccactcaattgcctgtcacacacattgtgctgtagtagtacttttgcttatacaatttttagtgaacaaatatgtgcaggccttaattgggatgaggtgaaggagatagaataaaagaccaatatagcattacaagccttcctaatcaatgacaaaattcattcagttcagtatatacacagagataagcaggagaaactttattctgagatttgcatgaaaatgagttaacctggctgtgatatctccagtatactgatatttggtatagaactcctttgagctatatatatcttattacagttgaaagtgttttaaaaagaaactattttcaaaaggatactcaaatcaaatgcttgtggaatcccagaagctcttcagtaggacctgagagttctttggaacagtttgaaaaccattcttctagaccatgtaattcaacataggaatgttttcttcattttctctgtaattcttatttgaaattagagttctggtaaactaagggaaaaatatataggtctttattacaatgtgttaaggtttatgagtcttgtagttattaagaaagtaaaagcaaaaattgagatggaatttatcactccccatatttacgacatatgtatagttcataacataatgcttaaactatcttaaaaacacctgcttatttttcacatttcacgtattttaatatgagcataaattcatattattcataggcctaggcctaaactgaaacgcagataaattgagttcctgagtctgatgtttaaaatggtattatggagctctgtaattctcacatatttatatttgatctgaaaaggagatgacagtaccctttggcttgtttaaaaacacatatacacacacaaaaggatctaatgaagaatttttactaatattggttcaaagagatctttccttcttgtgcaatcactgtggatttcctaccccatacctcttcatttctctcaatcagtgtcttcacatgtttcattcagtttttctctcacttttactttctatttattataacctaaagtgtataatttaaagacatcttagaggtgattcaattctactccattttacagaagttcagagtgaaatgatcttaattagatggttggccggaaaagagctgattttataaagaaaaaaagtcacaaaaataaatgtttctaattggccactttggttctaaaatctccgtatggtcttctctgtaattttagactttgcactactaatgggcaggaaaatatttgtactattttactagtgacacatagatagcgatctccttctattaggattccaaggtagtgtaggatagaaaagagtgtgggctttgaggctggcagatctgagttgaaattttggtctggctctccactagctatgcaattatgggaagttacttatcsttctctgagtctcctttccttcatttgcaaaataagaaaataacacatataaagctcttagtgcattttatgagctcaaaaagcatagccagataagtaagttggttataataatgaaagacaatggataaatatattaaaaaagcatgacagctgagagtgaaagaggagaaaaagggattgtggcagagatagtctggaagaataggaaagaatggaaaaccaaattggataagaactagttcaacttgtattcagtttagttctaatactttaaagcacacctttttgttttcattagtgtacttcttgcacaattttagctcatattgaacttaaacattttcttttgtggtcaaattgtgtttaaattgtgtctcttttatttgtttatattaatgttattgttctctgagtaatcacacatttttatttaatttacaggtggccgtttgttgcatctgtttttttgttattcttcctctaaatcttgttggtacaatacttggccgaaatctgtcaggtcagcccaactttccttgtcgtgtcaatgctgtgcctcgtcctataccggagaaaaaatggtaaagagaatgctaaatcttatgcgattgtttcacacaatatataagttcttaaggctgttgtgtacatgtaactttagaattggtatgtatttatgataatgacaatcttaagtttgagcctaagaagttcattttactatttcctttaacctacattgttaagagtaataataaattatacccttattccactttctgaatatygtgccatttagagttaagtcaaatgcttttctatggtgtagaagtgggtgtgaactaaagctgcagttttactaatctgcaggccaaatctggcctgctgcctgtttttatctataaagttttgttggaactcagccatrcccatttgtttacatattctctgtggctgcttttatagtacagcatcagagctggcagatcagtaatgtcagagatactatcacatgcagaacctgaaatatttactatctttccagatattttagtactgtacaatttagtgtacatttattacattccctatttataggaatagttgtatagtaagtagactgcatttttatgataacggagatatatatatataaagtctctgtccctagatattttaccagattataaatacagcatattcaggtgcttatacaaataggtgataattttgctctgtcccttctagacatggaggcatgtagacatttatagaaatggaggatgaataaaatagcccctatagtttgaattggccatattcttttctttccttagattggtgcttatgagagactttagttagaacttttgtagtttattattttatttatttatttattttattattattattatttttgagatgaggtctcactctgtggcccaggctggagtgcagtggtgtgatctcggctcactgcaagctccacttcctggattcatgccattcttccgcctcagcctcccgagtaactgggactacaggtgcccgccaccacgcctggctaattttttgtatttttagtagagatggggtttcaccgtgttagccaggatggtctcgatctactaacctcgtgatctgcccacctcggtctcccaaagtgctgggattacaggcgtaagccaccacgcccagcctgtagtttattttttaaagtaattttttttttgtaaatcagtatgttaggacccatcartatccttactgggaagggtaagtttaaaggaaaagcatagtcagaagtcacaaaagttcctctaagtcactagggccagtgaaggagaggtctggtgagagcttcctcaccagagatgcattgcaattaggtataggaaggcttgtgtgtgcctctgttttggggagtataatcctgggaacctaaatctgaatactagatctgcctctcattgactgtgtcaccttgggcagatcacttttaacctctgtgtcttggcttcctgtaaagtaaggaaagaagactacattaaatgatttttaagtttttttttcagctctcaaattttaccattttcttctcagttttttagtttgttaatttcatagttattagtttaggatcttttttgtgccaggtattgtgctaggcactggaaatacctagatgaatagcttctgcctgccagggtttataatctagtgaggttttttatatatatgtacacacatgtatttggaattggacagttacagtatagcgtggtaagtactgtggtggaggtattttcaagaggcagtggaagaatgggagaaggacccacctcttcctgggagactcagcaaaggttttaaagggagaatatttgagccaatgctttcaggagagaaatacgagacaagagaaggcatccaggtggggaattaccaattacagtcagtaaatgtttgtggaatgaatgaatgaagtttcaattttattttttatttctttggtgccattataaataagaactcataataccttaattgtataatttgtaggaaaaggaattatagaaccaaggagagagtgagcaaagagatggcaaggccacaatttgggaaacattatttcaaatggaggtctctagactcttcgtttctttccctttggctttttgtgaataaatgcctgtagagttctaagaagttatgggagtctagtagaaccagagggaacacttagagactttttgaagttctgccagtgtcagtaatttgtgttcttcatatacttgtctcagtctttaatgcagaaagaatattgattgtaacctatggctaatttgaagtcccacctatgtattgtgcctctttgggttttggcttttcattttactggtttgtttctatcctttagagatgattttttaagtgtcaagtacctgctttctgttatcagtgtttatataacatggaaatcatactagaagtttactattaattttaatattttccaggttcatggagcctgcggttattgtttgcctgggtggaattttaccttttggttcaatctttattgaaatgtaagttttgataatgtatttatgttttgagggatttgattatagtaagacaatttaggagttagggaacatgtaaagttatcagttgggagaacatctaataatctgttaattccatgattccagaaagggaataggctatataaaggtagctgttggctgtgttcttaaatattcaagtgatgtttatacctttttgtattgtattctagacctccctcacctaagaggaaatcttagaaatcaaaactatgtgttaaagaatggtagaccagcctttgatcatatgcatgatttaaggaattcctggtttttattgtattttaaaaatatttctgaggatctagggaactaggtaaaccaatacctactagtccgtctaggccctgacatcttttgatgcatagtcatttcctaggttccttccatagaggcctgcaggagtgctaggaagtgtgtatgtatttagagataagaggtatgccaccttgtgccacttactgtgctttacatctgcatcctttgtcaccattgcaaaataaaaaagactttcttttcttagtctatgtccccgtgccccctgatgggaatactctggttattttaggcaagaaagttcaccgtatgggactttctcaggtattgcagctgtacacccttggctcctgtccactaaataccagtcattgtgacaacttaaaatagccttacatgtttccagatgccccactgctgattgtctcctgtatggtaggagtctccttaacggacgtaattggatttggtagttggttaattgaaaaagttggctcatgtaagataattattttaaaagatacatacataatattttaagacaagtaaatgtacgtccactgatttttttttttttaaatatagagccatggtcttttttttcattgaaattttttcatttttttcctttgacattggtaatacagatcctgtgttttccagcctttttaaagtgaagcaagaacataaagtcctatctgaagcattctaagtgcagaatccttctagatktgtacatttgtcccccagtctatagccgtctcaatcacatcgaattttataactttttaaaagggactcaccttattgaatctttccaaagcattcaacataatttttatagtaaccacacatcctttttactctgatgtttattggtttatgtaacatttaatttagtcagtttagtctaatggtactaacaggtacaactgacataaatagatatggaccaactcttggttgtcacttaccagctctgcatatgctatgggcattagtaccttaggagttggagtgtgtgtctctgtaactcgtggtttattaaagtcagttcaggaacttctttagttccagtctgacaatgctttgtgcctttattcagacttgacctgtgacttctttttcccttctacccctgtccccagtacttctgaaccacatgtctttgtgcttctccaggcactgtgttccactagataacttctctgctgtttcttcaacttatcttctgttttgtccaccttcaaacccattctcctacccatttggtagccaaagtggtctttttaaggtgtcatgtcatttctttacttaacacttcttattttaattgaggtgaggtcccaacaccataacatggccattaagggtctttataacgtaagaactggccctgttcacttctccaacttcatttcttagttctttccccttcatttaaagtattagccatagtgactaagaaaaagagggtgaaaggctctgttgtaatttagtgatgacttgataatggattagagtgaaagatctttttcttaattaaaaatcttaaagccttttcccttgctgtcctctgaagacagtgtgaatcttcttcaggcctgcttttcctaattttatacattattgctctaacttatttttctacttattattttattttctatttaataaaatacaaactacattgcttgaattgtgttgtatctrcaaaacaatatggatacaaatacggattttttagctattttcatttgttcttttctacattatacttcttgaagcttctgttttattcagtttgtgtagaggtgaatgccctactgaagaatctgtttttcaaagattatccaagaaaatattttttgagagaattctagtggatttaattgatgaagacatggtaagagaarctgttggaagatacttgaaagaaagtcattaagtgagaaaaaaatgagaactaaaatgtgagactcacgaagagcagagtgagctttaagaataaagactggaaacctgtgtctttattgcatttacttaggtatttcatcttcacgtctttctgggcatataagatctattatgtctatggcttcatgatgctggtgctggttatcctgtgcattgtgactgtctgtgtgactattgtgtgcacatattttctactaaatgcagaagattacmggtggtaagtacctatttgtggatagaaatttggggaaccataatattttaaaataagatttcctttgaaatctatcaagtggagtaaagagctgtatagaaatgttgttacttaaaatagcatagggatttttttccagttataaaaatgatacatattttagagaaaaaatatcaaatttttaatgtattaatggagtactgtgttagaaatattttttacaaagtgcttgatatgaaaagagttttatgagaagcattgctccattctaaacacaaggaaacttagatatgaaaaaggaaatggtgtatttatggtcactggtaatagggaatctgacaaaattcaagattgagctttctaattcttagatgttttccttgttgataaatttgaataccatgtctatgcayttgttttttaaataagttttaaaggactttaaaggatgttttattaaattctttgctttaaaatctttgttttagtgccattcattcaaaagagatttatcttctttccccctcccsccaccaggcaatggacaagttttctctctgctgcatcaactgcaatctatgtttacatgtattccttttactactattttttcaaaacaaagtaagtggagacattttttyaccttttatttaggaaactaaatttgtcctttaaatactaatatttaaggccttawgttgaaagtaaaactggatatcctatatatattttgttttatttcaggatgtatggcttatttcaaacatcattttactttggatatatggcggtatttagcacagccttggggataatgtgtggtaagttttgaaattctttgaacatcatgagtaaatctgagtttctctaaatccgaaaaatacagtaattggaaattaagaaattttatctgttgtttgatcagaaacaccaaaataaacccgagtctgatttcagtccttttgactcttccccacaacataatttattaccttattaatttctatttttatagaaattctagtaattctgtatagcacagaatttcatatcacagtttttcattcatgttgagaattggctttttcattttatttattgtttttagagactcagcttcttaactagctgggactacaggcacatgccactgtgcctggcttgagaattggcattttttaaagcttaggttcaatggaagatcatgatgtaggcatgttaaggtgttgcctgaatgattcctgtttggaaacttctcagagtattcttggagaaaccaggagacacctaggagacagcacagtttacttgttatgattgcatacttgggtatctacagactggacttaagttctagctgtaccatatgtatgctttccaccttgatctagttccccaagctctctaagcttctgtaaagtggggataaaaccactatttatggatctrtcataatcatctattaaaaggaagaggtaatagttttcaccatgtgatagaatctctagaatgtgtgaaatagctagaaaataaagaacttttggaaacagtatgataaatgggaaaggcataagcatgagagcytgaaagcactggaataaatgtccatgctgttgctcagctttttttatggccatggaggtcacattaacctttctaagtctcatttttatctgtaaaatgggcatatctttcagagtggttgtgaggaatagtgtcatgtgtgtaaagcaccaagtgtagtgttgggactgttattaggtagtaacgatagccatttacatggtgagatatggaaagagctggccttttggggtcagtctgttctgggtgtgaactscccacttaatagccatgttactctggccaaattatttaacctttcttcctcaactttactcatttgcaaaatagaaataatacctacctcatagggctataaagaggattcagtgattaaatgtggataaacatcacgtggctggtagatgctcagtgaggggtagctgctgctgctattgatgaaggctgaaagtccttgggcttccttctgctctggaattgtgtctgtgtttctgcacagtctctgtgggattctacaccttgtgttttcatctcagaacaactttatgactctaagttctggcagaggtaacttaagggaaactcatacaagtaactcactttttttygggctcagtgttttacttgataaatgagactggtcccttaattactttgtaggaatgatrtgttttacttgataaatgagactgatcccttggttactttgtaggaatgatgtaaggctgcgggactaatcatggtggaaacatttccagagagtggataattttcctcctttttctgttacttgccattggctatttatgtatgtatgtgtgtatttgataattccacctttggctatataagatatatataagatatggtaatcttattaaaagckaagtcttggtatgacatttatggacacctttggggtaccaagattgctttgtttctccatcaaaagagcctgttcagttcatatacactatgtatgtgatcwtgtgtgtgcgcacacacaaatgagattgtccgtaaagtagtgaatgaaacattccacaaggaaagatcattctctatgttatagtcacatgttttatttatagctgctgtgatagccattccctgtgataattagtaaccaactttgagagaaagatgagagggactgaaggttaaaactacattgtgtcaggtggaaacatccctattcttggacagtcagaaggttccttattatttgccatcctttcttcagagtattgttcactggactcctctttattttatctgagatttttcttgattatcaccagcattcagtgagktatagaatcgattatgcagagagttaaaaaaatttttcttgacttgactttttctatatgtgatcttaggaagacccagagaggtaacrtcttgacatttacaaagaaaatggaatgaatctagctaaattttttgagtgcttttcctgctgaaatttcatcttgctgcctgaaaaccttggcacatttacagttccctgctgttctggcaatgtcccagcatttattctttaatgggtttatatgccttcagtacttcatttttcaggggcaggtggggagaaactgtttagactggaagtcattagaatgtcatcataatacaaaaattatatatatccatcaatttatgttgctaaaatgcttgtcagtaattaaaacaaaaatatttgttgattttttttaatgtaggaaaaaatgactacattaaggtgggatattatgagcatagcatttttgttttgaggaattaagtttaaaagtgcacctctattattcctaagatatttacttttctagagggcatattcagtattctctttttataaagtcatgcccttgtaagtttattcttgaggtactcataagattaggaaaaatgattctctaggttgaaactgttttgattttaagcatatttctgctcaaaggggaacaatgttttgtacgtctggaaaattggatttggttattggactagtattataccattaaaatttttgatgctaattaaaattttatacatcttttcgtgtcgtaaggattcaggtatattttcacaaaattgaatgatttttctcttatcctgtaaagaattgtattgtaactrttctaaaatgcattatcaatattttaaaatgtaatattgttatttcctattataaaagaaatgtcattgcaaaaataagtggaaatagtgttgctttgtcactttggttttttgtattttaatatttaataaagggaaactttgaaatacatacaaaaatagggacaatactatatatagtgagtccccatgtactaacacccagtgtcagtaattatcaactcatggcctatcttgttttatttatattctcactttgtatcccccccttttattctgacatgaatcttagaccttatgtcatttcaagtgtaaatatttcagtatatgtctctccctgaaagataaatgtaatttcttaatatgatggaataattcagttaatgttcagatttaccacacttgcaatgacttctttttaaatatagtttgtttgctttgagatcaattaagattcatgaattgcttggctgaaatgtctcttaaggctcttttagtctatagatattctctctctcacttgcagtttatttttaaaacttaaacaatttctgtagaattttccagactctggattttgctgattatattgctgaagtgtcatttaaagtttcttcaagtggtagttagatctgtaggcttgatcatactcaagaatacttgtccaagaatgtttaacaggtggtttgtaagcttttatcaggaaagcacataatttctggttctatttctttgtgaagttagcagccattgatagttattgcctagctcaaataattcattagtggttataatattctaattctrttgttccttttatatttgttagctggaatacttccataaggataaccttcctttcatcaaccagttggtagccttggggtatagttcatacataggagaaacaggagagatgcttgattcttgcctttcattcaccagtttagtgaataaaagattcactaaaagattcgttcaaggatgactaggcatttgtgtgtgcacttaatattactaattaatggaaggttttcttttaagctttcaataatattgggctacatcataaattcctraggccaatggagatttcttctctgacagttcaataaccaactgcattgtcctaaagagcccttagtaggttggtacaaaagtaattgtaaagctgcaaatacttttgcaccaacctatatttgcaataaagaaccatctagttcattcattcattcaacaaatatttaccaagtatcttatatgccaggcactcttttagacacaggagataaatattttacttaacaaaacaaacatccctgatttctggtgttttaagctctggttgaggctaattgttaaaaaacaacatttcaaaacttctgacccacttacctctctgtcctgtctattcccgcaaatatgtcatccctactaccaactacacagcttctacaacttaaaaataaaaaagaagctgtcagaaaatgcctcttctctagagcttcaactgctattgggacatggttccctgtccttccttaagagaattttcagtcacttctaactatttatctattggattttgggaagatatattgatttttactttaatgacctagaatagtatatcttcaaatcaaagaaggcatgttttttgatttaacaaccttttgccattatcaaattattcttgctttataagagatgtattttaattctgtagttactgattatacaagaaataattgctacttgattagacttggcgtatgatggtcagactcagtgtattatggtatcaggtgatttgcaaagcaaatgatacagttttagtaagttcagagagaatactaacataaggatattttctttaaaaaagaataactttccagagcatagagyatttagtgtttttaaatgatggatactgctctgtatgtatttgtttcaaaacatcttattttatctttgcaggagcrattggttacatgggaacaagtgcctttgtccgaaaaatctatactaatgtgaaaattgactagagacccaagaaaacctggaactttggatcaatttctttttcataggggtggaacttgcacagcaaaaacaaacaaacgcaagaagagatttgggctttaacacactgggtactttgtgggtctctctttcgtcggtggcttaaagtaacatctatttccattgatcctaggttcttcctgactgctttctccaactgttcacagcaaatgcttggattttatgcagtaggcattactacagtacatggctaatcttcccaaaaactagctcattaaagatgaaatagaccakctctcttcagtgaagaggacaaatagtttatttaaagcatttgttccaataaaataaatagagggaaacttggatgctaaaattacatgaataggaatcttcctggcacttagtgtttctatgttattgaaaaatgatgttccagaaagattacttttttcctcttatttttactgccattgtcgacctattgtgggacatttttatatattgaatctgggttcttttttgactttttttttttcccaatccaacagcatccttttttttaaaagagagaattagaaaatattaaatcctgcatgtaatatatctgctgtcatcttagttggaccaacttcccatttatttatcttaaaactatacagttacatcttaattccatccaaagaagatacagtttgaagacagaagtgtactctctacaatgcaatttactgtacagttagaaagcaaagtgttaaatggagaagatacttgtttttattaaacattttgagatttagataaactacattttaactgaatgtctaaagtgattatcttttttccccccaagttagtcttaaatcttttgggtttgaatgaaggttttacataagaaattattaaaaacaaggggggtgggtaataaatgtatataacattaaataatgtaacgtaggtgtagattcccaaatgcatttggatgtacagatcgactacagagtacttttttcttatgatgattggtgtagaaatgtgtgatttgggtgggcttttacatcttgcctaccattgcatgaaacattggggtttcttcaaaatgtgtgtgtcatacttcttttgggaggggggttgttttcttctgtttattttctgagactcctacaggagccaaatttgtaatttagagacacttaattttgttaatcctgtctgggacacttaagtaacatctaaagcattattgctttagaatgttcaaataaaatttcctgaccaaattgttttgtggaaatagatgtgtttgcaatttgaagatatctttctgtccagaaggcaaaattaccgaatgccatttttaaaagtatgctataaactatgctactctcatacaggggacccrtattttaaaatctccagasttgcttacatctagattatccagcmcaatcataaagtgaatgacaaaccctttgaatgaaattgtggcmcaaaatctgttcaggttggtgtaccgtgtaaagtggggatggggtaaaagtggttaacgtactgttggatcaacaaataaaggttacagttttgtaagagaagtgatttgaatacatttttctggaactattcataatatgaagttttcctagaaccactgagtttctagtttaatagtttgctatgcaaatgaccacctaaaacaatactttatattgttatttttagaaagactcaaaacacctgtatttaaaccttaatatgaaaatcatgcaattaatagttacacaagatgttttcattacaaaatatgtacctatmtattgatggactctacatcctatattgtgacatgtaagtcctttaaaaggtgaaaagtatgatttcttaccacttaagtatgattgatatgatccaacaaatttgatcagaagctgtaggtaaatcctcttctgaagccaaaatggtatattaaatataatttattggtacttccattttctcttccttcttacttgcctttaagatcttataaaaaagaaactaaaagttaatatttagttgcctatattatgtaaccttttaactatatataaagtacttttttggtttctttctcaccacttttattcaaaagtacttttaamataccaatacatagtctgtctgatgggagtataaattggacagtaaggttttgtcttaataaaatgaaatttgtttctcatgatatgaatcttgcaggtaagatgtagggtttattgaaaatgtgtgggttaaatgctttcaggtacaccaattctttctactaaattgagctctatttgaagttctttggaatctgtggtgaaaaataattttctgatttccaaatacattaagagcattaaatgaatattaatcacctttaaagtcttttagaaaaggacttgtattggtttttggctgcatagaggggttgaataagtgtatgtatgtgtgtgcgtgtgtgtgtgtcttcttaaagaagatgtaattcacaaatagtttagctccctagcgctcagttgtagaatagaaaatagaacattattcaagttaattgaaaggtgaggtttttatacccccactaatgctgtgtatctgtctttcgtttgttaacattatttgcttaatttctttcaactcacactttggataatactatcaaaaactaaggctaaacattccttgtgtatctttaagcatgcttctcctgaaatttaactacattagtagttgacatttgtatacatatatcctaatacaagagtaggataaggtggaaatgtaatggcctgagggatggtgaagcattctttyagtatttttcatcatgttgggctcctagattgtactggggttgcccataaatcaaaccccatactctwagaattcattatattatggtgatatccgaacctagtgaatggtatgcttgggtgttttccattgagagyggatggacctctttataaagttggttgctgcaaaatccagttcttccaaaagccactttatttagggtttattcacaagtcatatccattttggtacagtgtttgtttcctaatatttattaaccaccttataccaaatgtcttgcaaagaaatgttattaaaaccttgaatttttacaaatgtaaaaaacaaaaagtgtattaatgtatttgttcaggaaaagctacayaccgaagggcttttgtatatgaattctgtggtggggagacccatttgtaatctatatggcagttccatctgggttttaagtttagatttcaccgtgtcttagtgcttcattctattggtttattggaacatgtaataaataggagtagtgatgtattaaaacacaagtattcattaatgttttatatcttcactaaaattctatagttatgaaactattttatcaatcaaggtgttatatttcagtcagaagtgaaaatttatgaagagtatttggaagtgtgtacagaaataaactagacttacaggtaggctagatcagamcgttaacatatgaacctgcagaaatctggtaagacttaaattcagtgtgaggaataactctagttctctcctatgagcatttcctaaaagccatctgatttggcattcttactggagctgcagacagaaatctacaaagacaaaagtaaacaaaattaagttattattccactgttaggaatggaaataaacttgtgaagtctgtttattttgaagtattggtgaactaggcttgctaattgataactgcagcagtttgtgtttactccagttcatcagcttaggtcatttgaaagatataagagcttaaggcaagaaagaaataacatggaattctatttgaaggacaacagaacattcttggaaaagcagctccagttggtttttcarctgtcaaacttgaatgtgtaagtccccacagagcatggacagtcggtrcagagttccaaggaaacaattattgcctgatgaccacttccattttgtatacactctttggttcgtataggccatattccaactggctttttagtaatagaaatccagtatataatgtatcaaatacaattgaggttctaacctagtgtgttaatttatctgaatttggatttttaaaaagtaataaaaagttaaatgtacttcctttggattccttatttctttcctttttgaaacatgaaccaagcataagggataacccattattgacaggcaaatgaataacttagtaatagttttccacaattaaagcaggggtctgcagactttttctgtgaaggtctagatagtaaatactttcagctttgagggctatgcagtctctgttgaaactatcgttgtagcaccaaagcagccatagtagactacataaactaatgagcatggctatgttccagtataacttcacaaaaatggcccacaggccatagtccgctaacccctggaatgatgtatttaaaatttaaggtttaaatttgtatttcaaaagtgaactgtaatgtacagtaaagttgagagaatggtccagtgaataagattggtctttcttaagaatgatttttcttttattgccattcttttgacttttttgtatacctattctgactcttacactcagactttaccatctatttgcctgccatcctctgattgatgattctttgcatttgtttagcatttactactttttcaaagcagtttcacttgttccttcacaaccatcctgtgaagctggtagagtagatagctgtgttttatggataagaaaccacagctaaaggtgctcttatgtttagcccagaagtcatcaagattcagggccctgttgtcttgactattgtaactgtaaaatgggggtgtcaccctctctagcctgggaggcaggtaatatatgtagaagtcacattgaaaattagtgttctatacgaatggaagagattatttttattgtgccacattgaaatcagtggttaatttctccatgtctatttgtatgttttgtttttccgtttctgactagtttttaaaaatcctgaccaacctccttggttcttttcccctagttttattaggtgcctcagtcaacacctgtacttggcaattcccgttagccacatcattggtacaaatttggattactttttatttctttaatgaacactttttgtctggttggaaaactaaggacagaagggactcgtatgcagccagcttcttgatttcaagtgaactatttttgtggaactgttactctgcaatataacattagaaaaggggggaataagcctaattgggacatgtggaatcagtgtagtttacaaatgtattttaaattacttgattatttgaaatgattttcaaagtttgcacgattactttgcttgacagcgatttcaaaggaaaaaaatgtgggagatggttgcaggggaaaattgatataagtggggctggccaatgttatggttattcttagtgtctcagtctaagccactaggattacaagacttaatattgaaggtcagtgaagaaaagggagagtctagaaagtgagacatggaaggtgattctaagttggggttggtcagagaggtctgctgcagttatagaccagaaagggcagtcctggataggtaagtgtcacagatagggtagctgcaatgctggcatgaggatgtgggatatgcgattatcagtgtgtcccaggcagagacatggagggtgtgaagcagccttgttaggatgactgcagggtgttttaatgccagaagactggaatgtgggagttgtaaggagccaagactggaaaggtgaaaggaaggcttgatgatggacggaggacctgttatgccaccctgaagaacttgaataaaggttttggagagccaggaagggttttaagcagctgctaaaaattgtagtatctttaattacattctccagaaaactgagtatcttctcagtggtgagcaatgtaaatgaaggaatgagctggcctggaacaaattatcatgtatagtcgcttggaaaggcaaaatgagaaagtggcccaggtggataaaactcagtagacttgaaggggcaagagaacccagttactctgggtgggagatggacatctaagaggagaaaaacacttgttcaggttcacagaggacccagagatatggcagaggaaaccctgaagtaattattaatgtaataatggagctaagttgagcagttttatgtcataaagcctgttactctacctccagttttttcatggtttttaaattaaagaaaaatacattataaaaatcatctaaacccagattagagtttagcttttatagttctatcttatggtgtcccttttcaattattcttttctgatctttctagtgaaccaaatattttgttgccatttattggttgatagccaaagtagcaactaaactggccttctactttaataacataaaactgtgcagcttgttcattcttcaacaccactgtcttcaaaatatttggacaaagggtgttggtgagaagacctggccactactcaccagctgggcattagaggtcataaaagctcacaacctcattgcttgcacaagaggtggcctctcatgtctattttccagaggaattcccttctaataaggaagccagttggtggtttgcctagtgccatctggagacctggaagtgtcacagaagtttgttaggccttttagatgttgactctttggactcgtctactgagaggtgatgaccttcatgggggtgaatgcagagagctatggcgttgggtttgactccttctggctttcaggcagaaatgcatgccattcaaccccctcccactcctttgcctatgcgctggccacttggccttcctgccatttggtggcatttatcctcttcaaattccttccttccacctgccagtttctaaccagatcttgccctgtctggctccattctgtatgttatgtgcccatttgatgaaaacagcatgaggcagggtcaacattgcatttctttctaagaacgaggacaaaatatgagtagcatccttccaatagttaacttttagccctttacttgtgtgaaggacttgttatcccagttgatagatgagaagacagatgaccataagtgcaagaaattcagagtttgatgtgaagcccagctctgggctccctgttgactattttgtcattgatgtatgtgaaaccatgtggaaatccaaaaggaaagttgtccatttttctgcttgcagtttaaattgaaaaaagattctactgggcatgatgcaaaacatttctacacatacacatttgtgtgttatagttgacagggccattttacttgcataaaaagatctttgaaaagcctcacagtaataatactttttatatctctaaatcaaaatggctcagttctgagaatttttacattttaggtacaaaatagaagtgggtttcaaatagctcttgattagtgtcattatttgggcatatgtttttaattggcaaaaaaaaaacagacttcagaaattggtcatttttattccatcaagttaacggtgagtggcttatttaataaaaacatgtctgtaatttaacacaagtagcacgtacagctgttcatttgtgtctttttgactgtgtgaagcatcttagacggttttactgaaagatagggtcaccgagaggggaaatctgtggacttaaatcttttttcattacctatcgccggccactaggttaggttagttgccgccagcaagcgcccttcatggctcgactagggaatgtggagagagctgagagaatcgaaatcctcgatttttttttctttgctgagagggacctgagagacattcactcatccctgcaaagaagcagctgcccgaatgcacatagccagttggtagtgacatgaatcgcgtacacagggctcctggtccagcgctccgagttctaaccactctggccacgtgtgcatcggggagttgtaaagtgagttatggaaataaaacaaggcgagaagcccagtcccgatcttcaggagcagcattctcgggagccagaggccgaggtggcgccccgggcaggcgccttaggctgggtgggtgcggagctggccccggcctttggctccagcatcttcacctcgctcgcctgcctccgaagttgcgaaggtgccgggaagaggaggggcctcgcctcgggcgcccgagtgattggctgcttagggcccctggcgaaggctgtgtggtccagccctggtggagaggggcggagcggccactgctccaaccaccgccgccaccgccacactcgcagccgccgcagcctcggccgccgggcaagtagctccgagcggctgcttcccggttgcctcgacgaagacagggggcgccgcgctccgcttgctccgcgcctgagccatgcccagcagccctgtgtaaccaccgagtcccggccggagccgaccgacccagtgtgcgccgtctttcggccgagctgagctttcgtgcacgcaactccctctgccccagccggccccgcgccaccatgccccgggcgactgcacttggggccctggtgtcactgctgctgctgctgccgctgcctcgcggcgccgggggactcggggagcgcccggacgccaccgcagactactcagagctggacggcgaggagggcacggagcagcagctggagcattaccacgacccttgcaaagccggtaggtgccgccgctggggaagtcccgcagaagtttgcctttgaaatgcaaatgaggtggtgggcaagcctgcactaccgtctatggggcgggtctcccctcccctcccctgagatccccggctcccccggaagacaatgcctccgaggaattgcttaaaaaccactccgaggctgggatgtcccggccccaggtttgcggtgcgcaccggggggcgacagctggcgcgttcccaaagcgaatcagagcgggtgccagaggccgagagggcgcccaggggccggggtgggtgccagggccgcctgacagcgagtgggcagcactggccaccgccagacgctccgggccggagcagaagagctggactgggcgcggcgctccgaggctcagatggagttcctggctccgatttcacagcatttttaagtttcgcgcaaagtttcccaagatctgtggttactcttgggagattttaaaaagaaaagcgtcacagcgggcaaaaggaaaggggtcgccgagggagaatgagcaagactcgaatagccggaaacttccctgtagcggtaccggcctgagggtcgctctgggcgggcggagatggaagccggcaggtgctctaatccctccaggaagcggcgccccaggacgtacgggcctttcgggcgcaatcgccgcccgggcgctgcagctcccgcttcctcggggccactgatcggctcgtgagtcctgaggggagcggcttccgagctggagtcgttgaagcgttagcctccgaagggccaagcgcatgttccagcaagctgatgagtgtggggcagttccagcacggacagaggggtgctcacgctcacgctcccagggagatgctgggctcagaggctcgcacagacgctcctggcccatggccagtgtcccgcgagtagtggtgtttatctccggctttgtggggccccgtttcacttggcggtcggcagagaagaatggggagggaagagcgcgacctccaccctcggcgaggcaggtgctccttcccggggctgtggccggccaggtctctgcggggcctgtgggccagtggttgccccttcacgccctggaaacctctatcagttccaggttactcatctctaaattggtggcagtaattataggaggactcaggtgatttgtgggaaaattctctgcaagtgaaatgatggcattgtcgttattttttattgtttctatcactgcagtggctcgggtctaggctgggggttgggagggtcagaactgggtaaagtctggggaagaccaggttactaggaggcaggaggagtttgtgagacttgagaatcttgtgaaggtttgagatcaaactagtcttgaggggcctggtcttagtaaggggagtttcct

SEQ ID NO: 7043 - DNA, 24923 bp, Homo sapiens
  misc_feature (1)...(24923): n = A,T,C or G, or insertion/deletion polymorphism (see Tables 1-2)
aaacccttcaagtgccacaactgtcatcgggcgtacacggatgcagcctcactagaggtgcacctgtctacgcacacagtgaagcatgccaaggtgtacacctgcactatctgcagtcgggcatacacatcagtgagtgctccgtttcttctctccttcctcatagtcctctaagagtacagtccacttcaccccattttctgggtagagatctgttgcagtgaataccctgcctccctagctccaacttagcagaacaggtaaatattcagaaattaattagacccattctgaggaatttaggggatgcctgatctcctaatcctatagagacgcataagctgtaattcttcattttacttaaacataaggcaaaataaagccacttgaaattttgaggggagctggatttcagttaggcattttcttcttcttttttttttttttttctttttgagacacagtctcgccctgtcacccaggctggagtgcagtggtgtgatctcggctcggctcactgtaacctccacctcctgggttcaagcgattctcctgcctcagcctcccaagtaggtgggattacaggtgcatgttgccatgcccagcaactttttgtatttttagtagacatggggtttcaccatgttgcccaggctggtctcaaactcctgacctcaagtgatccacctacctcagcctcccaaagtactgggattacaggtgtgagccaccgcacctggcccagttagatattttccatgagactccagaaaaggttgtaaagttgtttcattcaggggtctttgaaaaaaatagcagctcattcctttgccagttgaatgttgagtgacttctaaaggttcctctcttttttttctcagtagtgagccactgaaagtgctacttgagttttgctcagtcttggctccagaaaaccagtataaagcttactctgcttacagcagaatcagagcctggggtgctagttacaagtaatctcttttccttcctctttatccctcaacttctttttaccatctccctcaggaaacataccttatgaaacatatgcgcaaacacaacccgcctgatcttcagcaacaggtgcaggcagcagcagcagcggcagcagtggcccaggcccaggctcaagctcaagcccaggctcaggctcaggctcaagcccaggcccaggcccaggcctcccaggcatcacagcagcagcagcagcagcagcagcagcagcagcagcagcaacagccaccaccacacttccagtctcctggggcagccccccagggtgggggtggtggggacagcaatcccaaccctccaccccagtgttcctttgacctgaccccgtataagacggcggagcatcataaggacatctgcctcactgtcaccaccagcaccatccaggtggagcacctggccagctcttagagatccgtgctgccacccactgggaagaggaagaagtagtcctggtgtcttctttctccaactcttggtgggaaaagtccttttcttccttgacaggccttggctccatctccttgggcctctgtcacggctttccttcacaggataccatcctttttctgaactcttcttcaaaaggaacatcagccctcctgattgcaaaggaatactgagctgatggtgtcatccagcagcctcccctcccaagcaaagcttctaaaactgggggtcggtgctcaagggaaggatttgctatgacctcatagaaccttgtccagtgtggccacttaccctatccttaccctccttatcctcaaagtttgggctgatgtaagactagaggctggccctcccagataacagagaaaagggagccccaaatgcaaccagcctcttgttctattcttgcctgcaaaagaacagaggtttctcaaatgcctcagtccctgagagccatttcttcccctacatcgtctcactttgcttcctattgactgctggtagaaggagatttggggtaggggctagacctccttttatttgaagggggcaagggctgagatgtggtccccaaggggccagaaattcccaagttggtcacaggtggcttagaagtgtgtgttatggttttacggatttccttgaagcctctctccttctctgcctacaaagaccctatactctcagtctccccaacccacccccaaggagctgtgggaggctttgtgttatctgtgaaactccaaaacaggggtgttgcggagaagggagagttcaaggcaaacgcaaggactggacttagctccctaggtgccacagtcagatgccggacacggatttatatataaatatatatatataaatatattatactcactcatcacggccatctttgttgtaaccatttctgtgtttataaatgcattatctctgagaattttcatatttgatgttttgtttatttttgtcctttttttccctctctccacccctgtcctctagccacagcatttttctttttgtcttttttttttttttttaaatcatggcagatttcagaggaaaggaaattaaaaaaaaaatcaggaaaccagttgttataaagtaatttaaaaatgaagaaaaaaagaaaaaaacttatgtacaaaccaaggggtgtttttagaacattgtatagaaataaattcatgtaaaaggatcagaggcagtggagctactgatgtgagcgagcatgcggaaaaggtatttggggagatgtccaagaacagtactgaggatttataccagagtgtgtgtgtgatgaacaagtgcttgtgtgatgatgccccatttgtgcaattctccagtcatggaagggtacagtttcatgatgtctccagtgaaatcctggtttatgaggacttctacatacacattctgtcatggggattgcattgcctaaatatgtgagagcaaggctttggttatgtgttaacaaaacagctaagctccctatggaagaaaaatggaagcctcttgaaaggacctacactcctgcctgagtctgtggaagaggggcttgcagttggcaatgtgtatacatatgtgtatttgttaccttgtggaaatcataaccggttaaggggtgcaagattgatttatgcaggagagctgtagtactatggagtagaatgtggtcatgaaacctggacttcagccctttgcctaccatcaaccagtgttggccagggtgcttcttcaactgttagtgaagggattggactagataactctgaagataccttttttgagaattaagtaacttgctttaaggctgggtgcggtggctcacgcctgtaatcccagcattttgggagggcgaggcaggcagactacttgacgtcaggagttcaagaccagcctggccaacatggtgaaaccccatctctactaaaaatacaaaaattgatggccgtgcacggtggctcacgcctgtaatcccagcactttgggaggccgagacaggtgaatcatgaggttaggagctcgagaccagcctggccagtatggtgaaaccccgtctctactgaaaatacaaaaaataagctaggcatagtggtgggcgcctgcaatcccagctactcaggaggctgaggcaggagaatcttttgaacctaggaggcagaggttgcagtgagccaagatcgtgccatggcactccagcctgggcgacagagtgagactctctctcaaaaaaggtaaattaaaatcccaaaattaccccgggttggtggccccgccccttagtcccaactgcaggtttaggccaaaaaatgacttgaacctgggaagccaaggttccaataaaccgggattgcccccctgcactcaaacctgggccccaaaagggaatttgttttggaaaaaaaaaaaaaaccaaaaaaaaaaaaccttgctttaagcaccgaaaaagttgtgaaagttgtgaccaagctcccacatcctgagaactctgggactgctggccaatagtacttgttatgtagttgggctgggataaataaagcccacttaatttagtgctagatatcctgtgtgggcacctaagatggtgtctcaatatgttgtgtaataccaatgaatgtatcacatatgaccaaatatgccaatgtttcttagctccctgcatatttactgctttttcctcccactctcaccaactcttgaaaaggccctaatggccctaacttcatcaccagtattagaactagaatctactctttttatggatacactcacactcacttattccaacaaccctatgagggaggtagtagtctcattgtatagtaaaacaggcacagagatcaagttaccgaaaagcatgacttttgtaattagagcagtttcccggattctattgctgtatcttactacctgcacactagtaaacctggggtttacaggctacagatcctttcagctctgatacccccaccactctacagcccctgaaccccctcctccagcctgctcttactgtccagataatgtttcaaatacatccctgcatccatctcgaagcaaaacaaagcaacttccaatccgccccgggttggaagttcctcttctccacatatttggtagaaattatatagctgaaagtctgtctctttaaaaacttgccgtaagacattggtaattcttatgaaggatgtgtgagggtacgaaaagtgtgaggggtggcagctatctctaagatactatcttactaacaccactattaggttatggcctttgtgttggcagtgtgttgacagcctagtgtgttggcagcctctcatacccttgactgcttcccattctgatgaaaaccatagaaatcactctaccatagctgactagagtgatggctagcaactaactagccaactagcccagtagtgatactgctgcatccctcaatcccttcagaattatgatgctaacatcacatataaacaaaaggaaaacaaaaacacgagatttcccccttagagagtagcaagaggggccaggcacagtggttcgcacctgtaatcccagcactttgagaggctgaggtgggcagatcacctgaggtcggaagttcgagaccagcctcaccgacatggagaaaccccatctctactaaaaatacaaaattagtctggcgtgatggtgcatacctgtaatcccagctacacgggaggctgagacagaagaatcacttgaacccgggaggtggaggttgcggtgagccatgatcacgccattgcactccagcctgggcaataagagtgaaaattctgtctcaaaaaaaaaaaaaaaaaagcaagagggcaaggcaggaagtaatattttatatgtgaaagtgtattctagtgtaacgtacaggagctctgacaaaagatgtgcagaattatagctttattatgagtcattctttgtatttataagtagaaagttgatcatctttctcaagttaaaaaaataatgctgggggagatggtgtttgtgtgagtgaatagaaattcagacggtttaaatgtctcaaggcctgatactcttccccaacttccttaagaaactaactggcttgaaaaaagtcattctgcaaaagagggaaaaaaagttggatcttccagttgctgagaaggtatgtttacgcaatatgagcctaaagtgaacagttacccctgcacggattaccatacattcccgttttggagggaaaaaagtttgctagagaatgcaaaatggcgacctccagtgacgtcatacctgtctcggtcgcgtcctggggtgtctgtaagggcggaagcgggctacagccgcctcactgtgggcggtcgtggctaccatgcaaaaggaaaagtttcagtgtcgggcggatgtgtaccggcggtaatatagtaagggcggaagttctcctttaagggcggaagttctccttttaagggcggaagttctccttttaagggcggaaaggctttagccgcaaaatggcttcggcccctgtcgcgttacagtcacttccggggcggatcggaagttgctttgttttgcttcgagatggctgcggggatgtatttggaacattatctggacagtaagagcaggctggaggtgggggtcggggctgcagagtggtgcggggatcagggatgagaggatctgtagcccttaagttccagtgacgagaaggtcacaattatgaagcggttctgtggcaggaaatattggagggtgcggagaaagagggggcggggcagcaggatcgaggccccgctgatgggtgtagacgagggaggggtgcggtgtgggggttagagacgtgtcttgaagggctagtgtgcatggccaggaagatagttgctgcccccattctccagggtctccagcctcggtagatttttttccccatagtcgttcagaatcgttatcacacactgccatttggagcagcggtaaagacctctcctccactccattcttcctcaaaagtggcttctcatggggttgagagtggtggtgatgagtgaccactgtcagatgatgaactagaacgcttctcttcatggagtaaagatctaattcccatcaaatgaaaatctggtgtttatgcgatttatgtaaaccacccctgcagaaagcctattgctctgtgcgcttacatttgttttagggcccggagtcatttattcaacaaatatttattgaggtcctgctatgggtcagacataatggcaggcactagggatagaaaaatgagtaagacaaggctcctgccctcaagaagctcacgatctagtaggaaacagattctgcaaataattataaaacactgtgacaagtgagataatggaaatacattaaaaaggacacttggtaggcaaccctggagaaaaggggggtaattacctggggatgtaggaaaagctttacagcggaggtgatgtttgaatagggtcttgaaggttatttgccagtgaggagagaaaaaaggaattccaggttggggaaagcatccgcaaaggtactgtgatgggtttgtggcaaggtcaagggtgtttgatatttatgactcagaggtcagcgtatttgatatttatgaatctaaggtaagaaattgagaaaggagactggagaaagaggctgaggctagattggacaaggtcttttaagccaaacgaagaagtttgcattttaaagtagagtatgatttttatagaggaaaatgactaatatatggtaaattggagcatgatattgttgataacagagatcaattagtgataacattccaggacagagataagaacctgattttagggagttacagaagtatttaggagttaaatatgaaaggactgactgaatgactgagtggttgagagagaaggaagaatctaaggtggcttcttcctgcttagaaagtgaggtagacaggctgggcacagtagctcatgcctgtaatctcagcactttgggaggccaaggcgggcagatcacttgaggtcaggagtttgagatcaccctgtccaacatggtgaagcccagtctctactttaaaaaaaaaaaaaaattagctgggcatggtggcatgtgactgtaatcccagctacttgggaggctgagtcaggagaatcacttgaacccagcaggtgaagattgcagtgagctaagatcatacataccactgcactccagcctgggtgacagagaaagactccgtgtccctctcaaaaaaaaaaaaaaaaaaaaaaacaaaggctggtggccaggcacggtggctcatgcctgtaatcccaacactttgggaggctgaggcaggcggatcatgaggtcaggagatcgagaccagcctggctaacatggtgaaaccccgtctctactaaaaataaaaaaaatagccaggtgtggtggtgtgcccctgtagtcccagctacttaggaggctaaggcaggagaatcgcttgaacctgggaggtggaggttgcagtgggccgagatcatgccactgcactccagcctgggcaacagagtgagactccgcctcaaaaaaaaaaacaaaaacaaaaaggctgggagcggtggctcacgcctataatcctagcacattgggaggctgagatgggtggatcgccttaggtcaggagttccaagaccagcctggctaacatagtgaaaccccgtctctactaaaaatacaaaaattagctgggcgtggtggcagacgcctgtaatcccagctacttgggaggctgaggcacaagaattccttgaacctgagattgcgccattgcactccagcctgggcgacaagagcgacactacacctcaaaagaaaagaaaagaaagttactcagcggagaaaagatcatgccaactgctgcagagatattttttaggataggcttaataacaccattagatttggtaaatcaccagtgactcagtcttgtgaactggtggtagcagacctgaagttgtaggtttaaacagtagaggcattttatttttttttatttattttattttagtttttctgtttgtttgtttgtttttgagacagagtctcactctgtcacccaggctggagcgcaatggtgcgatcttggcccactgcaacctctgcctcccgggttcaagtgattctcctgcctcagcctcttgagtagctaggattacagtgcccgccaccatacccagctaatttttgtatttttagtagagatgaggtttcactgtgttggccaggctggtctcaaactcccaacctcaggtgatccacccaccttggcctcccagagtgctgggattacaggcatgagccaccgtaccaggccttttattttttatatatatatttaatttttatagagacaggatctggccatattgcccaggctggtctcagactcctgagatcaagcgatctacctgccttggcctcccagaatgctgggattacaggcgtgagccactgtgcccagcaagtagaggcatttttaaagttttaggtggagtcttggcaagagatttctcttgtactggggtgacaaatattcatgcatttattcaagtatttactgagtacctgctctttgcaagtcataattctaaacactatggaaacaggagagaatatgatagccatgttcggcctggggagacagataccaaataactaattacacattattttttttaatttttttgttttttgaaacagtcttgctcttttgcccgggctgcaacctctacctccctggttcaagcaattgtcctgcctcagtctcttgagtaactggaactacagccacaggccaccatgcccatctattttttttttttttttttttgagacagagtctcgctctgtcgcccaggctggagtgcagtggagcgatctcggctcactgaaagctccacctcctggatgcacgccactctcctgcctcagcctcccgagtagctgggactacaggcacccgccaccacggccagctaatttttttgtatttttagtagagacggggtttcaccatgttagccaggatggtctcaatctcctgacctcgtaatctgctctcctcggccacccaaagtgccgggattacaggtgtgagccaccgcgcctggcctaatttttgttttgttttgtttttgagatggagtcgcactctgtcacccaggctgaagtgcagtggtgcgatctcagctcactgcaacctccacctcccggatttaagcaattcttgtgcctcagcctcccaagtatctgggattacaggtttcaccatgttggccaggctggtcttgaactcctggcttcaagtgagccacccgcctcggcctcccaaagtgctagaattacaggcrtgagccaccgtgcctggccctaatttttgtatttttagtagagatggggttttgccaggctgccaaggctggtcttgaactcctggccttgagtgatccacctgccttccagartgctggattacaggcatgggccaccgcacccagccaactaattacacatttatttaattacagttggataagtgctttaaaaaggtggctagaataccttgacatagatcgagggcagttaacagagtctgggaaagttgagtttgagctgaactttggaagaacgaacaggaatttaataggccaagagggatggggtggatgggatgaggaaaarcgagcggtgcattccaactagagagaacagcatgtggaaagccaaatggcaggaggagcacaggccagtttgaggcagtgcgaggaggccagtatgggcaaagcagagcacaaagggagactgacatgagttcaggctggtgtgaggtaagcaagggccagaaagcgcagaacatcttcagagcagtaggaagtgaccagaaggttataagcgggagagtgacttgattaggtttgcattttttatttttgtgtttgtttttgtttttgtttttttgagtcagtgtcttgctctgtcatccaggctggagtgcattggcgtgatctcggctcactgaaatgtccacctcccaggttcaagggatttttgtgccccagcctcccaagtagctgggattacaggcatgtgcaccaagcctggctaagtttttgtatttttggtagagacagagtttcaccatgttgcccaggctggtcttgaactcctcagctcagctgatgcgcccacctgggcctcccaaagtgctgggattacaggcatgagccaccgtgcctggccaggtttgcattttttaaaaaggacattctggctactatatggaagtagattggaagtgttatgtgtataatagaggataccaggagactatttgtaatttgaggacaaagagcttggaggcagagatggaaaataaaagaaaggggcccgtcttaagtggctcatgccagtaatcccaggcactttgggannnnnnnnnnnnnnnnnnnntggggtggatgggatgaggaaaagcgagcggtgcattccaactagagagaacagcatgtggaaagccaaatggcaggaggagcacaggccagtttgaggcagtgcgaggaggccagtatgggcaaagcagagcacaaagggagactgacatgagttcaggctggtgtgaggtaagcaagggccagaaagcgcagaacatcttcagagcagtaggaagtgaccagaaggttataagcgggagagtgacttgattaggtttgcattttttatttttgtgtttgtttttgtttttgttttttggagacagtgtctcgctctgtcatccaggctggagtgcattggcgtgcagtcttggctcactgcaacctctgcctcccaggttcaagtgattctcctgcctcagcctcctgaatagctgggattacaggcacgtgccaccacacctggctaatttttatatttttagtagaaacaggctttcaccatgttggccaggctggtctcgaactcctgacctcgtgatccacccgcctcaacctcccaaagtgctgggattacaggcttgagccaccacacctgacgggaagagcttatttataaaggaaggtcactgaaggcgaaaagggtgggatagccatgcagaaatggaaaggttttgtagagaaagagttaagcatggcctgtcatgagagaactgatccatcctgtcacagataaatccagaggttcagaggaaggaaaactgagctgcgctttattttttgtttgtttgtttgtttgtttgagatggagtctcactgtgtcgcccaggctggagtgcagtggtgcgatctcggctcactgcaaactccgcctcccaggttcatgccattctcctgcctcagcctcctgagtagctgggagtacaggcgcccgccatcgcacctggctaattttttgtatttttagtagagacggggtttcaccatgttagccaggatggtctcaatctcctgacctcgtgatctgctctcctcggcctcccaaagtgctgggattacaggtgtgagccaccatgcctggccatttgtttgtttttgagacagggacttgctctattgcccaggctggagtgcagtggctcaatcacggctcactgcaacctctgcctcctggattcaagtgattctcatgcctcagcctcccaagtagctgggattaragatgcccaccgtcacactaggctaattttcatatttttaatagagatggaggtctcgccatgttggccaggctggtcttgaactcctggccttgagtgatccacccccttggcctcccaaagtgctgggattgcaggcgtgagccaccatgtccggcctgaactgcactttaaaaggagctgtaaggcctatgcatagtcagtcctgtgattgtttctctctcttccctaggtattgaaaaccttccctttgaattacagagaaactttcagctcatgagggacctagaccaaagaacagagggtatgtatagagtaaaaagtttttgtatctaatgagtgtgtgtaatcatttatttttctacttgatgttaccgtatcatctggtatgatctggagaactgtggcttctctcgctccttttttacgctcttggaattcttaaaacaggataatgatcctcatttctgtgtcagctttttcataacaaatagagtattgtgaaaacgcctcaagaattcaaagatgctgtgttctttatgtcttcctggagaataattagccaggctggctcacacctgtaatcccagcactttgggaggcctaggcgggcaggtaacttgaggccaggagtttgagatcagcctggccacatggtgaaaccccatctctactaaaaatacaaaaactagccaggtgtggtggcacgcaccagtaatcccagctacttgggaggctgagacgtgagaatcgtttgaacctgggaggtggaggttgtagtgagcccaaatcatgccacatgtcactgcactccagcctaggcaacagagcaagactctgtctcaaaaaaaaaaaaaaagaagaattaaagaaagtcaactcgagtcatttctgctctccacgtttgatatatttataggatgactagaatgtttctacttctctcattgttaatgttactgtcacaaattcccagtgtgactttagactgcaacatatgttggtagatgggaggtttgctatatgagaagtccttaaaaagagaaagaaaaaagaaagaggaaagaaaaaaaagcagtaattgacaatgggatctctataccgttcacacttacagaagcattagataccatctccagcctggaacattgagcaaatttggctgcattggggcattcacttggtttcttcaaagatgtctgttggagctattcccatacccactgaaggatctgtagtcttgtcttcattctatgtagccatgttcaaggatgtaacagactggttttgagatacatgaagctgtgtcttaagttactctgagtttacacatgaaaaggtgaacatcatcaaaaaccctggacayagttccctgagaactgcctgccraatggtgagaaccagattgctttttttgtaatacagttgtaactcttgagttcatgcatggaaagacagttggagattatggaactatatgctttttcagcttcttccaagagcctggaatgaagtggagtataaacagtgtcttcacagatcctcctggttatctgttgctgcactatgttagagtcagacttgtctcttactactgacatatttatgagcccttccaaatattagtaaacatctatagtctcaatgtcctgggacattaccattcttccaatattaaaacatttggggccgggtgcggtggctyacgcctgtaatcccagcactttgggaggcagaggcgggtgagtctcctgagataaggagtttgagatcagcctggcccatatggtgaaaccctgtctctgctaaaaatacaaaaattagtcgggtgtggtggcacatgccagtaatcccagctactcaggaggctgatgcaggagaatcgcttgaacctgggaggtggaggttgcagtgagctgaaatcacactactgcactccagcctgggcaacacagtgagacttggtctcaaaaaaaaataaataaaataaaataaaacatctgggagaccgggtgccgtggctcatgtctgtaatcccagtactttgggaggccgaggcgggcagatcacttgagatcagaacttcgagaccagcctggccaacatggtgaaaccacatctctactaaaaatgcaaaaattagccagatgtggtggcgcacacctgtagtcccagctacttgggagactgaggcacgagaatcccttgaacccaggaggcagaggttgaggtgagccaagatcgtgccactgcacaccagcctgggcaacagagcgtgactccgtctcaaaacaaaaaaacgtgtttggagcaatatctaggatggacaaacaggaaaaaaagaagtaatggaaaatgaaagaagttgcaatgatgagccaaataggatgggcagcctggctgcagtggctcacacctggaatcccaacactttgggaggctgaggcaggtggatcatttgaccaggagttcaagaccagcctgggcaatatagtgagacctcatctctagaaataatttttttaaaaaaattatcagggtgtagtggcatgtgcctgtggtcccagctactccagaggctgaaatgggagatcatttgagctcagaggttgaggctgcagtgtgatccatgatcatgccactgcactccatccaacctgggcaatagagtgagaccctgtctcaaaaaaaaaaaaaaagaaaaatagagtgagcagtaagataagcagaattgttacatggatgttggagtaaggtctaattttaaattgtgtgatatactcaactactcaggaggcgaaaagatagaatcacttgaggacaggagttggaggtcagcctaggcaacaaacataagagagaacctgcgcctgcctctaaaaataaatagattaggccaggcatggtagctcacccccaataatcccagcactttgggaggctgaagcaggcagattgcttgacccaggagttcgagaccagcctgggtaacgtggaaaaagcctgtctctacaaaaaaatagaaaaaattagccaggcgtggtggtgcctgagatgggaggatcaccagagctcaggaagttgaggctgcagtgagccatgattgtgccactgcactccagcctgggcgacaaagtgagaccctgtgtcaaaaagaaaaaatactaataattttgaaatgtatgatattgatgtacagacttggaaaccagcaacagcagatgactcagcctgatttgcggcagacaactgctgtgggatgtttttgagaaggaaacaatggcttttgagacaaaattcaagaagcagcaagcccttcaaagaagcatcttcaaacatggacaaaaatacacttcatattaatgtggtgtgcaaaggatcccttgctgtgtttcagtaatttaaattccaactatgatagcaatgttttcagcaccttgaaaggacctttaaagcaaatattgtcagtatgttccattacttgagtgcatggcacagtacctctgaacattcagtactttttagttggaaggttatgctaatcaatggaaaaggtccaaagaacaaaaggaagaaatgtgtttcacctagccactcaggggccattgtgaccaggcctctgtctctgttgtagacctgaaggctgaaattgacaagttggccactgagtatatgagtagtgcccgcagcctgagctccgaggaaaaattggcccttctcaaacagatccaggaagcctatggcaagtgcaaggaatttggtgacgacaaggtgcagcttgccatgcagacctatgagatggtatggccctgttcatggctccccacctacttcccatctaatcctcagggtcttagacccctccttcaactgtgttgggatctgtttggggtctgtgagatccataaactctgccttaacctattttctttaattggagatagttttgtacctctcctttctccttcctttccacccaggtggacaaacacattcggcggctggacacagacctggcccgttttgaggctgatctcaaggagaaacagattgagtcaagtgactatgacagctcttccagcaaaggcaaaaagagtgaggagggggcggggctgtgagaggtggggcgaggactgaaagggagaagaagtcagctcttcatctggtgggragtttggcaccaggttggaaagggggagagaagaggacttaacccatctttctgtctccctgccttctggctttctccctcttccctagaaggccggactcaaaaggagaagaaagctgctcgtgctcgttccaaagggaaaaactcggatgaagaagcccccaagactgcccagaagaagttaaagctcgtgcgcacgtgagtgattcagggagccctttgccggatgacatcctcttctctcccggtgccccactcccagcctgcaccgccccctgccgctttctatatgtctgcgccaagaactcttcttatcattttggtatctgctggagaagccacaaatcatttgccctaccaggatctcctgccacctctgaaagcctcaggctttagcttcccttcctgtagatgacactttctcttcctcttggcatgcagaagtcctgagtatgggatgccctcagtgacctttggcagtgtccacccctctgatgtgttggatatgcctgtggatcccaacgaacccacctattgcctttgtcaccaggtctcctatggagagatgattggctgtgacaaccctgatgtgagaaacattttgccttaggatggggggttgtgaggggcatgaagggagtgggtacaagagggaaaatcccacagttgagtactgggacttcagaatagaagaaagatgggctggacgtagtagctcttgcctgaaatcccagcactttgggaggctgaggcgggcagatcacgtgaggtcaggagtttgagaccagcctggccaacatagtgtaaccccttctctactaaaaatacaaaaattagctgagcatagtggcacacgactgtcatcccagctactcgggaggctgaggcgagaggcaggagaattgcttgaacctaggaggcagaggttgcagtgagctgagatcacgccaccacactctaacctgggcgacaagagcaagactctgtctcaaaaaaaaaaaaaaaaaaaaagcctgaaagcctggcgctgtggctcacgcctgtaatcccagcactttgggaggccaaggtgagcggatcacttgagatcaggagttcgagactggcctggccaacacggtgaaaccccgtctccactaaaaatacaaaaattagccaggcatgatagcctgtgcctgtaatctcagctgcttgggaggctgaggcaggagaatrgcttgaactcgggaggcgggggttgcagtgagctgagatcatgtcattgcattccagcctgggcaacagagtgagactctgcctcaaaaagaaaaaaagaatagaaggaagatggtgggaactggttggccttgggacttccaagaattctccaaaaggatggagtaaaggacaggatgttcctaaggaatctggaggggctttctctccttcctctggcccttcctggcccctgactacttctttcttcctcttccagtgttccattgagtggttccattttgcctgtgtggggctgacaaccaagcctcgggggaaatggtaagtggcaggagttggagggtccctaagttgagtggtcaagggcattctccctttcactcacttttctctccccttctctgtttcaggttttgcccacgctgctcccaagaacggaagaagaaatagataagggccttggattccaacacagtttcttccacatcccctgacttgggctagtgggcagaggaatgcctrtgctggggccaggggttcagggaggagtggatggcacagtgctgtcatcccttctcctcccctctccccactcccggtgctgaggctgcatcagaccctggtagggaggggtgccgcagccactaacggtatgtgctctccttcagscctctcccttcggagggacgtggtcttgcccactgtccttttgcctccatgctgaggtcggtgctgtatttcagagggagggtccttttcattctccttgctttgtatttaaggactggggcatagcatgggggcagtcccccagacctcttcattccccctcctgtggtgagggctaggtgtgatcaacacttttcttctccrttcccttcctgcttttttcatggtgggggatccaccaggtcatctaggctctggccctagttgaaggggcaccccttcctctgtgccaagaggattcatcctgggagagggggcaaggtggaatgcagataactcacatgtaaaaggaacttgggtaggtaaataaaagctatacatgttggcctgctgtgtttattgtagagacactgttttagtaaacatgctgagcattcattttgcgtcctctgggttggatgcratgtgagaggatggcatgccagaattaggacaygacatgaaaccagagtggtgcctctgtccgagaacttgtaagttctcaacttgggaaagacagaggtgctggagggtaggcctcagaccagggggtctccaaaactttgtaaatcatgcatcttttctccataaaacatctttcacttaatttccaataaatgatgtatttgtgctatacatacgtactgctatactatacattagcttgacttctttttttttttcctttgaggcgaagtctcactctgttgccaggctggagtgcagtggcgtgatcttggctcactgcagtctccgcctccgggttcaagtgattctcctgcctcagtcttacaagtagctgggactacaggcacatgctaccacgcccagctaattttgtatttttagtagagacagggtttcaccgtgttggccaggatggtctccatctcttgacctcatgatctgcctgccttggcctcccaaagtgctgggattacaggcgtgagccacagcacccaagctgatttctttttttcatttttaaaaattttttttaaagtaggccaggcccggtagctcacgcctgtaatcccaacactttgggaggccaagggaggtggatcacctgaggtcaggagttcaagactagcctggccaacatggcgaaacccggtctcggccaaaaatacaaaaattagctgggcgtggtcatgggtgcctgtaatcccagctactcgagagggtgaggcaggagaatcgcttgaacctgggaggcagaggttgcagtgagctgagattgtaccactgcactccagcctgggcgatagagtgagactccgtctcaaaaaaataaataggctgggtgcggtggctcacacctgtaatcccagcactctgggaggttgaggtgggtggatcacctgaggtccggagttcgaggccagtctggccaacatgttaaaaccccatctctactaaaaatacaaaaattagccagatgtggtggcatgtgcctataatcctagctacttgggaggttgaggcaggagaatcacttgaacccaggaggcagagattgcactgtgctgagaccagccataatttttgtatttttagtagagactgggtttcaccctttttttttttttgagatggagtctcactctgtcatgcaggctggagtgcagtggcgtgatttcggctcactgcaacctccatctcccgagttcaagcaattctcctgcctcagcctcccaagtagctgggactacaggcacatgccaccacgcctggctaattttttgtatttttagtagagacagggtttcaccgtgttagctaggatggtcttgatctcctgacctcgtgatctgcctgccttggtctcccaaagtgctaggattacaggcatgagccatcgcaccggccaagtttcaccattttggccaggctggtctcaaactcctggcctcaagagatccaccctccttggcctcccaaagtgctggaattccaggaatgagccacagtgcctggtctctattttattaatttattttattttattttatttttgagacagggtctcactttgtcacccaggctggagcacagtggtgagatctcagctcactgcagccttgacctctgaagactcaggtgatcctcctacctcagcctccccaagtagtaagtgggacaacaggcgcacaccaccacacctgacaatttttgtattttttgtagagacagggtttcgccatgttgcccaggctggtctggaactcctgggctcaaggaatccacccgccttgacttcccaaatgctgggattacaggcgtgagccaccaagtctggcccaagacaatttcttgttttatttttcttttttacttttgcttttgggtggggacagggtctcactttgtcacccaggctggagagcagtggcccgattgcacctcactgcagccttggcctcatgggctcaagcgatcctcccatctcagccccccaagaaactgggactacaggcacgtgccaccacgcttggctaattttttgtactttttgtagagacgaggtttcgccctgttgcccaggctggaatttctcattttaaacacaaaacagatacaaaagcaaaagttctcctcccatacctcagtggactgtcttactcgattctcccttggaaaccactttcgtagaccactgagccaccctcttgttttccccttggacccattttgctcacggaggcgccctgtctagttcctacccagataggccttgacttggttttgcacattctatctctgcctgcgcttagctctagacctcacgacctgtttgttgggcgagttgcttccctaagccccgatttctcatctgtaaaacgaatgatagtgtatctaccttatgggattcctatggcaattacgtaaggtagtgcatgtaaagatgctaagtggctggctacggtggctcacacctgtaatcccagcactttgggaggccgaggtgggcagatcatttgaagtcaggagttcaagaccagcctggccaacatggtgaaacccagtctctactaaaaatacaaaaattaggccgggcatggtggctcacgcctgtaatcccagcactttgggaggccgaggtgggcggatcacaaggtcaagagatcgagaccatctggccagcatggtgaaataccatctctactaaaaatacaaaaattagctgggcgtggtggcatgcacctatagtcccagctacgcgggaggctgaggcaggagaatcacttgaacctgggacgccgaggttgtagtgagccgagatcgcaccactgcactccaggctgggcgacagagtaggactccgtctcaaaaaaaaaaagaaaaagacgctaagtgaaggtagctttttgccattcctaccatctggatgggctctggccactttagggccctgagagcccggctgtcgaggccccgccccggcccgctctttgtgacgcgtgggcggtgcccgcgtgcgccccgccccgcgcctgcggctctctctgcggcttggcccgttagaggcggcttgtgtccacgggacgcgggcggatcttctccggccatgaggaagccagccgctggcttccttccctcactcctgaagggtgagaggtttacacctgctccaacagactctccccgggctagtcctctccctcccgagagctctgcttttacggtttctggatcgcttcctcatggtggtcgcgctgggtcggctccctaggtcctgggatactcccatctccccccgcccgcggccggacctttgcctctgtctctagactccccccgccctggtcagcagggataaccctcaccccgttcctaatttgccagtctgggtctgtctgtcctggtctcggagcgggttttggggttcggtccttccatcatccgttcgcccgctccgcagtgctgctcctgcctctggcacctgccgcagcccaggattcgactcaggcctccactccaggcagccctctctctcctaccgaatacgaacgcttcttcgcactgctgactccaacctggaaggcagagactacctgccgtctccgtgcaacccacggctgccggaatcccacactcgtccagctggaccaatatgaaaaccacggcttagtgcccgatggtgagggccagactaggggggaaaccgaggcacccagagtgttcacccaaacctcagggcaaaaacccctgtgctcatgtgaggcggggaagggcatggctggcaccacaccatgagctcgtactctccaccctccccatggcgtggagtccattgcccacagccccaccccaagctccccacgggttcatcttctccacccctgccctttctcaggtgctgtctgctccaacctcccttatgcctcctggtttgagtctttctgccagttcactcactaccgttgctccaaccacgtctactatgccaaggtgaggcccaggacaaaggttggatttggtgccccagggccaagggagaggcggcagcagtggggagttgaggaagggttccaggagagtcatccttagctcctccttccctgccattttgccagtcatttacccagattatatatgaatacagtctcaccttggatattcagattgaacaattctgttactgcaagaaaagtagagaagagactgggcatggtggctcatgcctgtaatctcagcactttgggagcccgagatgggcagatcacctgaagtcaggagttcgagaccagcctggccaacatggtgaaaccccgtttctactaaaaatacaaaaaaaaaaaaaaaaaatagccgggcttggtgatgggcgcctgtaatcccagctactcgggaggctgaggcaggagaattgcttgaacccgggaggcaaaggttgcagtaagccgagatcatgccactgcaccctatcctgagtggcagagcaagactgtgtctcaaaaaaaaacaacaacagggacgagtgcggtggctcacgcctgtaatcccagcactttgggaggccgaggcaggcagatcatgaggtcaggagatcgagaccatcctggctaacacggtgaaactctgtctctactaaaaatacaaaaaattagctgggcgtggtggcaggcgcctgtagtcccagctactcgagagactgaggcaggagaatggcgtgaacccgggaggtggggcttgcagtgagccgagatcgcgccactgcactccagcctgggtgacagagtgagactccgtctcaaaaaaaaaaaaaacaaaaaaaacaaacccaaaacccaaacaaaaagaagtagggaagagggatgggaagaggcaaagagataagcccttacgtttcttcgaacaggtcagtgattttgagtcaaatgcaaaagtgacggcagggatgtggcccagacaaacagagattcatcttctgaagggaccctttctcaggtctagagggttccagcagggaccatgtccctttatccctgcctagaaactgagagataagacatgctggaaaaggggttgaagaaccagctggagcagaagtctgccctttaggaaaggctttcccattttccttctcttcctgcagagagtcctgtgttcccagccagtctctattctctcacctaacactctcaaggagatagaagcttcagctgaagtctcacccaccacgatgacctcccccatctcaccccacttcacaggtgagaccctctcagcagccgggagaccaccagctactcccacaactcccagagcccacaacgtaaggcatccatggcagggaaatgggaagcatgttgggcgggaagggggcgccagcagacagctgtttacacaaaggagtgtcagctttttatgaatacaagttagggctctcctggaccagaatctcttctgccattacttacaattttgccctgaatccatttttcccaattccagagacattgttgcattacaaaggacctctaggccctttataagctaatgtcttcactttagaaaggattgactgctagctactcagcatacttggtgtttcctaagggagagggacaaatggtggtatttgaggtggaagttagggaaggaggagtgcttgccagggaggtgggaaggtgatgcataccaccagccttacagttgccgtggtaatgttcttttagtttaatacttatgttcttttctgtgtttttctgtgtgtataagtgtgacttggtctgctttgtttatgtgtgtgtccctctgtgaacaaagacactcaggggctagaagcctgactgtctctctcccttctctctaaaccctgctgtagtgacagaacgccagaccttccagccctggcctgagaggctcagcaacaacgtggaagagctcctacaatcctccttgtccctgggaggccaggagcaagcgccagagcacaagcaggagcaaggagtggagcacaggcaggagccgacacaagaacacaagcaggaagaggggcagaaacaggaagagcaagaagaggaacaggaagaggagggaaagcaggaagaaggacaggggactaaggagggacgggaggctgtgtctcagctgcagacagactcagagcccaagtttcactctgaatctctatcttctaacccttcctct

SEQ ID NO: 7044 - DNA, 30697 bp, Homo sapiens
ctttgtgaaattgtcactgctctttaaatcctcataatatggtattgctgaaggatcaggtactaccaaacactggaaatataagaacttttataatttatgtaattaaaatatgtgatgctttccacttggggttagccagtttgaaaagttaaattggaatgtgtcatgatggacaaactccttgaaagaatcatctgcacttctggtctccatgcccccgaccccacccagcctaatctggcttcagctccctcctctcgcctaaaactgtgcccaccttgatcaccagtcgttttcttgagtacttttcaggtctgtatttcttaacttttcagaagcattcagcaatgtgggtgacttttttttaactctggttatgcccacctctttggccaccccagcaggtaccgcctaaatttctcttcctctgctcatcacttaaatttggggcttggccaggcatagcagttcatgcctgcaatctcagcactttgggatgctgaggtgggaggattgcttgagccggggttcgaggctgcagtgagctatgattgcaccactgctctccagcctgggagatggaacgagactctgtctctacattagttcattttggtgtgattcattcttccccaaggtaccagtgaccacgtgtatactgagggaaatcaaatatgtctttacatggagcaggtcactcgcttctcatccttgggtactaccaaatcattatccaaaatgcacccctcgaactccccacagccatacccactcctccttctctccttgggaatggtggctccaacagttactcaaggacacaagccagagagctgggagtcatccctgtcttctccttgcccctcacctatagtcaacaagaagccctgcccacccttcttccaaaatagacctagaatccaacccctcttctccacctgcactgcttccagccttgtcttgggcctcactgcttatcacctgcacccctgcgaagtgtcctaatgcatttccctgcatctgcccttgccctctgcggttcgtcctcaccatggaagcagccagaccaatcttaactccactacatgccactcccctaaatttgccactgccctcaggacaaaaagcagattcacctggcactcatttaacccagtggatcatttccatttcttcttcttcttcttctccttttttttttttttttttttgagacagggtctcactctgtcacccaggctggagtgcagtagcatgatcatggctcactgcagccgcgacctccctggactgaggtgatcctcctacctcagcctcctgagtagctgggactatgggcactcaccatcatacctggctaatttttgtatttttttgtagagatggggttttgccatgttgcccaggctgatcttgaattcctgggctcaagcgatcctcccatcttgactttcaaagtgctgggatttcaggtgtgagccaccatgcccatcccatttcctctttcttaaaacaatatcttcacttggccttcaaaccatcactcctgatttctcttccacctcactagctacttcttttccttcttctttgctggactcgtgcaactccctaaactccgaataatattaagtgctctggggctcagtcctgggtctttttctcttcctgctgtgtcatcactcccttggtgatctcattcagtgtcatggctttaaacatccctatgccggtgacccccacattttatctcaagtccagacctcctccctgtaatacagactcgcatatccaactccccaccacatatctccacctgggtctctgacagacaccccaaacttcagttccaaaactgagttccttcctcatctccatgcccagcctatcccacctcagttaagggcagttcaacctttctgttgctaaggccaaaagccccggacttagaccttgactctgatctttctctctcatcatactctacccattagcaagacctgtcagccttggagtcaaaatatatccagcggaatgacatgatgtccagattcacttccaaataacacagtagggaatctagggatgggggtagaattgaaaccagactgtctataagttgatcattgttgaaactggtgatggtacatggaggttcattgtattattccactttgtttgaaatgttccaaaatcagaaaaattaaaacatactatttcactgctaccactctgatccaagtcaactgacctcttgcctggactgttgcagtagcctcctaaccatacttctgcctccactttcacctccactccaccctctgcttctaatttaatttcctcccagcagccaatgtgattaattccattaaaatgaaagaccgtgtcactcctccactcaaaactctccaatgtatggtgtcagactcctacagaacaacaaaaaatgctccccagtggttccccatttcattcagagtaaagccaactcctaacagtcgtcttcaagatcctatccactcctgctccttgtttatggaataaatctttttaaaaagatcttatatcctggctgggtgcggtggctcacgcctgtaatcccagcactttgggaggccgaggcgggtggatcgcctgaggtcaggagttagagaccagcctggccaacatggtgaaacaccgtctctactaaaagtacaaaaatcagctaggtgtggcggtgggcaccttgaatcccagctgctcaggaggctgaggcaggagaatcgcttgaacctgggaggtggaggttgcagtgagccgagattgtgccattgcactctagcctgggcaacaattgtgaaactccatctcaaaaaaaaaaaaaaaaaggatcctgtatctatttgccttgccaccctttactacttaaaccgcattcccttccactctctgctcttgatcactccgttccaggcacactgatgttccttatacttgccaccgggcagtaccaccacagggtcctcgtactttccactccttctgccatgaagaatcttcttccttctgttacacacgtggctcactctaccttcttttttttttttttttttgagacggagtctcgctggagttcagtggtgcaatcttggctcactgcaagctttgcctcctgggttcacgccattctcctgcctcagcgtcccgaatagctgggactacaggtgcctgccaccacgcccggctaattttttgtacttttagtagagatggggtttcaccgtattaaccaggatggtctcgatctcctgaccttgtgatccacccgtcttggcctcccaaactcttcaccttcttatgtctttgctcagatgtctccttttcagggaggccttccctaatcaccttatgtaagactgaaacctaaatacatgcccccaacacacacacacacacacacacacacacacacacacacacacacaacctcttaatcccttctcttgctttgtttttctgcttagcacttatcaccatcttctttactataattttacctatttatcctatttgttgtttgtctccactaccagaaagaaaactatctgcaggtagggatttttcactactgtttgttcactgttgtatccacagcacctgcctggcacagagtaggtgcccagtaagtatctgttgaatgagtgaacgaatgagtgaatagcactccaagattcaatcctgcccacctgtccaggtacatttctaacctctcccctgctcaccctttcatcccaaggcacacagcacacttgagtccctggcatatcctagcattatttatacttctcagcctctatgctgtaccctcatcctcctggctggagtgccagtcttttttattttttatttggagacagagtctcatgctgtcacccaggctggagtgcagtggcaccatgatagttcactgcagcctgaaactcctagactcaagtggtcctcccacctcagcctcccaagtagctggggctacaggtggacaccaccacacctagctattttttaaaaaactttttgtttttaaaacaaaaactggagttttaaactccaggccaccactgcctctcacctgcaccactgtgcagtgtcctgaccatctccctacatctgttcttgcccttgcaatcatcctcaccacagaagcagagaagttacaagtgtggcaaagggcagaccggaattcaaagccaatgtggagtggggagttggatacatgagtctggatttcagggaagaggtatggatttaagatacaaatgtgggagtcactgggtatggtggctcacgcctgtaatcccagcactttgggaggccgaggagggcagatcaggagttcaagaccagcctgggcaacatggtgaaacactgtctctactaaaaatacaaaaagttagccaggcgcggtggcgggctcctgtaatcccagctccttgggaggctgaggcacaagaatcgcctgaacccgggaggcagaggttgcagtgagccgagattgtgtcactgaactccagcctgggcgagacagtgagactccatctcaaaaataaacaaataaataaaaataaaattaaaatgtggaagttgccagagtaaaaacatttaaacgctggctgaaatcaccaagggagtaagtctagaacaagaagagaaaaggacccaggactaagccctggagcacttaatattattcagagtttgggaagttgcaggcgtccagctatgttgcccaggctggtcttgaactcctggcctcaagtgatcctctcaccttggcctcccaaagtgctgggactacaagcatgagccaccatgcccagcccggatccccggtctttaagattcctctcaagcaggtgtctgctaacaccaaatgaaactcatctgccggcttcatgttttcatgcttttttcctacttaactcatcgcactggacttttgcagtctcttttttctgtgtctcctccaccgttctgggagtccccttggaacaggaacctcatcttattttgtcttcttggctcaatgcatgaacttcttggttcagtgcgtgaatcataatacctgttaaacccactctatgggccgggcgcggtggctcacgctgtaatcctagcactgtgggaggccaaggtgggcggatcatttgaggtcaggagtttgagaccagcctgaccaaaatggtgagacccccgtctctactaaaaatacaaaaaaaaaattagccgggcgtggtggcacatgtctgtagtcccagctactagggaggctgaggcaggagaatcgcttgaacccgtgaggcagaggttgtagtgagctgagattgcaccactgcactccagcctgggcaacagagcaagacccggccaaaaaaaaaaaaaaacaaaaaaacaaaaaaacccactctatgaatagtgagggtcaaagaggttagagtctggcacaggtagactagaattcccagtctgttctcttgggctccagattctcactccaccacctgaacactagtgagtcccttccgttcccaagcctcaatttccttagacagatgtaagcagttgaattgactaacaactatccaaccccaacctactgggcaagttgcctcctttggggtcaaacactatccaacttcagtttcccaacgtcataaaggagaactctaaaagttgagaatcgaaactgatgacagattgactagacggccagcctgttaaggtggccccagatattccagcctcagcccagagtcctcctgtgcccctactgcagcaagggtgtctccaagaagggggacctggagtcagcccgtcacacctggtttcctctctgctagggtccctcctcccacagagcactggagggcagctgaggaggagctaccttaaaaaaggaggtgtgtgccagggagctgggtaggagcctggctatatatctgcccagcagcggtactctcgggacagagatggcactgatgcaggaastgtatagcacaccagcctccaggctggactccttcgtggctcagtggctgcagccccaccgggagtggaaggaagaggtgctagacgctgtgcggaccgtggaggagtttctgaggcaggagcatttccaggggaagcgtgggctggaccaggatgtgcgggtgctgaaggtagtcaaggtaagactgggctcctccagcccccacgcaagacaaaaccyagtatcagagtccacgtccctggggatgctggggacccctgtcctccttatccctagcccatgctgatgacatctcagaataccccatcccacctagctgtctacaccccacygcaccactgccttgagtagaatgagtctagtaataatagctcacatttgggggctcactggactaacctcttaacatacactatctctaattcttgcactctgtgagataggtactattctttgcccagtttacagattagcaaatggaggctcagaaccaatacaatgcgaggtccttggttggatcctagtgtgaatgaaccatctgtaaaatacagtttggggacaactggcctagatatcagatagtacatatatctgatataggaaatcattgttgattttgttaggtgtaacagtagttttgtggttatcagaaggttgtcttttgtttggacacgaacactgaagtattttagggacaaagttccttggtgcctataatttactttaacgtggcttagattaagcacatgtagccaggaatttagacttgttgaatcaactagttgggtatatgagtgttagttgtatcatctatttttctatgtgttttaactttttgataataaaatgactttttttttttttagagacagggtctcgctctgtcacccaggctggagtgcagtggcacaatcaccactcactgtagcctcaatctccctgagctcaggtgatcctcagcctcctaaatagcttgggattacaggcatgcaccaccatgctcagctaatttttgtattttttgtagagatagggtttcaccaatgttgcccatgctggtctcgaactcctgggatcaagaatatgcccaccttggcctcccaaagtgctgggattacaggtgtgagccaccatgtctggccggccaataaaatgatttttgtttttgttttttttttttgagacagagtcttgctctgtcaccaggctggagtgcagtggcacgatctcagctcactgcaacctctgcctcccaggttcaagcaattcccctgcctcagcctcccaagtagctgggacgacagcgcccaccaccacgcccggctaattttttgtattttagtagagacagggtttcaccgtgttggctaggatggtctcgatctcctgacctcatgatctgccctcctcggcctcccaaagtgctgggattacagtgagccactgcactcggcctaaaatgattttttaatggaggctcagagaggtgaggtgacttgcccaaggtcacacagtgttgaagctgggatttgaacttgactcaagggacccaagcccccctcactgagattttcccccaagcccttcctccagctgtttcatgccaccgcctgtgctagctaagatcaaaattcaagagggtcggagctagaaagactttggagaatcagacagtctcaccaatgactcacttaaaaaattaagtaaaccgaggcacagagagggtgagagataccccaaggtcacacagcgagttggtggcaaaggcaagactagaattaggacccctgactcccagcccagtgctcaagttctctctctaggggcaaccaactcacagagggatctagaagccctgggcccctatccgttctttgcacctatccccagcatatgaagcctgaggccatacaatttataagtgagaaaccacaaattttgatattagacagactcttcgcttcttcctttaccagctgtgtggttttgaccttcccactcttctttctcaaacccacattcttttcatctgtgattggggcatcatcatcatctctccctcaccaagccagtggtgcaatgcaggctgaatgattcatgcacgataaatgctcagaaacagaagcatcattataattcttgccaagctttcttctgggcctgggactcaagtctgactctggcagaccctcctagaccaccccctccccaacaaacttgagaataaagtggagggaataaggaatgtctggtaagaggaggatgctacaagaataagtttattgtgtgtgtgtgtgttccaccacgcctggctaatctttgcatttttagtagagacggggttccatcatgttggccaggctggtctcgaactcctgacctcaagtgatccacccacctcggcctccccaaatgctgggattacaggtgtgaaccaccacgcccggccaagaatgagtttttacggcaggaaatgctatttacctaagcctcaaatacttcctgcacatcatagccacttttcctcttgaaaccactaaatggtagcaatccccagtgagccatgactaatgaggaataatatatcttatttagagtctaaaccctcccgttccccaccctctgaaaatctagtgagcggagctggtccacataagggaatgctcgtcttcaaatgaattgtgcttaaataggtttaaaactgaagcaaatcaggaagcctgttctggatgtgttcttttctctctgcctggatcttaccagtgggaaaggcagaaagggaagtctacgccaggcacagtggctcacgcctgtaatcccagcactttgggaggccaaggtgggaggattgcttgagcccaggaattcgagaccagcctgggcaaaatggtgagacccccgactctacaaaaatatatataaaaaattagctgggcatggcggtgcatgcctgtagttccagctactccggaggctgaggtgggaggattgcttaagcccaggaggtcgaggcttcagtgagtgaagatcgtgccattgcactccagcctgggcaacagagcaagaccctgtctcaaaaagaaagggaagtctagactggccttcggggggaatgtgtccttcattcacacacagggtgccatctccaaccctctcccagggggtggaggtgctgggtctgaatgcccatggtcccttggaagcagggcctggctcacagccttgggtcacgaggaagaaagaggcggaagaaccatcccctacttgagttctggctctttctctgactctgctgccttctggctgggagaccatggcaagctcctcactgcctcagtcttctcatctgtacattggagataattctcctagtacccacctcaatacaggaagtgaaggcgtttttttttgttgtttkgttttgttttgttttgtttagatggagtctcgctgtgtcgcccaggctggagtgtagtggcgagatctcagctcaccacaacctctgcctcctgggttcaagcgattctcctgccttagcttccccagtagctcggattacaggtgcacacaaccacacctggctaatttttgtatttttagtagagatgtgctttcaccatgttggccaggctgatctcgaactcctgacctcatgatccgcccaccttggcctcccaaagtgctgagattacaggcatgagccatcatgcctggctgggaagtaaagattaaaaggaataatatgtatacagggctctyatgggtgccagacacagggcgtgctcatgtcatccagcatccgtgctcatgtcacacagggcatgttatatcatccggcaacagctggaatctgattcttgtgcagtgactccaaccaccaagaaaagtagccctctgggggtctgatgcctccctagcaattccacctcccaacacagaatgagaaggagaggaggccagagagttgtggcgctttgcataccagaggcaccagggcctggagagctcatctagaatctcaaaacatcgaaaaatcccttctcgacctccttccattactaacaggaaaactgaccccccggcagcagaagagattgtctaagtcagctggataatgagaagaaagagaaatgtattgctgacttcctgtgtgccaggcaccccaccaaacgcttggcatacattatttcatctgatcctcccagtagcccagtgactcttgttccaacattactttcattttacagatgagggtctcaggagtcagaatgtttacccagctaagaaacagggaagagtcaagatctttttcaggctgctccatttcacagcctatggctcttaaatccaccaggcaaacttgctccttgctttataatgtcatgaaattattcagccccaccaccacccccagaatcctcaaacaaccctatggagtagatgctaccattcctctggagtaggccttactctgtgggtaagaagactgggtctcagaagcaatgcagtgtagtagataagaagctgggcatttggggaggccaagggggcaaatcgcttgagtccaggagttcgagaccagcctgggcgacatgccaaaacccagtcactacaaaaaatacaaaaattagccaggcatggtggcgcaggcctgtagtcctagctacttgggagactgaggtgggaggattgcttgagccaagatcatgccactgcagcccagcctgggcaacgggagtgaaaccctgtgtaaaaaaaaaaaaaagagtctgggctctgagggctgcaaactgcgagacctgagacaaatgactaatgaggagaaagacaaatgtgttgctgacttcctgtgtgccaggcaccccaccaaacccttggcatacattatttcatctgatcctcccagtagcccagtgactcatattctgccattgctttcattttagagatgaaggtcttaggagtcagaacatttacctagctaagaaacagggaagtgtcaagatctttttcaggctgccccatttctccatcccatgtctcgagatcctccagacatctcagttttctcacctgtaaagtgtgggtattagtactacccacaacccatccctcagcgggtggtgagcattcagtgagacagtgcatgtgaagtgccgcaggggttgcctggctcatggcagtgggcctcagggtgacggggctctgtgttctgcaggtgggctccttcgggaatggcacggttctcaggagcaccagagaggtggagctggtggcgtttctgagctgtttccacagcttccaggaggcagccaagcatcacaaagatgttctgaggctgatatggaaaaccatgtggcaaagccaggacctgctggacctcgggctcgaggacctgaggatggagcagagagtccccgatgctctygtcttcaccatycagaccagggggactgcggagcccatcacggtcaccattgtrcctgcctacagagccctgggtaaggggaggggaagctcacccgactcacacacttgcccaccccagsagacttcccagtgtctcacctttactcatggccacgtgcacacacccacatttattcatttcatctgtgtcctatgcttggggctgggttattgcagtgcacaggattaactcaactctggctatcatattgctcaacttggaatacagaaattgaccaaagaattgcagagataaatacatgattgcagcctgggcgcggtggctcacgcctgtaatcccagcactttgggaggccaaggcaggtggatcatgaggtcaggagttgaagaccagcctggccaagatggtgaaataccatctctactaaaaatacaaaaaattagctgggtgtggtggtgggcgcctgtaatcccagctactcaggagggtgaggcagagaatcacttgaacccaggaggcggaggttgcagtgagtcaagatcgcgccattgcactccagcctgggcaacagagcaagactccgtctcaaaaaaacaaaaaacaaaaaaacaaacaaaaaaacatgattgcaaatggtgtaaatgctcagagaaaaagaatggggtggcctgggtaaccacagaaagggtgctcaggaagtgactttctggggaaacaacattcaggaggctctgacacccagtgaggggaaggagctaaaagtgggagtgggggtctgtcactgcattttatagaagcagatcctaagacatggatgtgaggatacgcagtttatttgggtattcctcccaggaaacaccggtagggaagtatggaactgagatgggaaaggcaagaattcaatacaacgtgcgtccatgggcaagtcaccaccctgagcttcatgtcctgggagaactcacagtcccattatggagcgaacctcttcgggatcccaagtgggacgctggcgtgcttactcaccagcttcccagccgtcactggttgggggctgctttgggagcactaactcactggyccctgttgtttgtcctcgggcagagtcctaggtgtttgaagtaaaacctacatgctgcaagcccagatcctagaggtttcatctcatgtgctaactcctatcagctgtagtggctggctgcgtggagttgctctttggagaaggtataagagacaggatctgattttagcaaggaagagagtgctgggatgtctcagtgatgtgtaccatggaactggttcctggttctccctatragtttatatatatatatattttttgagacggagtctcgctctgtcgcccaggctggagtgcagtgccgtgatctcggctcactgcaacctccacctccagggttcaagtgattctccagcctcagcctcccgagtagctgggattacagcccgccaccatgccatgcctggctaatttttctatttttagtagagataggatttcaccatgttggccaggctgatttcaaactcctaacctcaggtgatccgcccacctcggcctcccaaagtgctgggattacaggcttaagccaccacacccggcctccctatgagtattgaaagagatacaaaacagatattaaagaaaatgagggacattgargacatccagggaggggtctgatgcatggmaagcccaatgttggttctccagagtaagaatttcacaaaaaggacaattagacaaggcaaacctttggtttctgaagatatgaggtctcaagtgtccctggagggatacttccaatgtaaaggcaggctctccccaaaatactacttaccaccctctggcttcctcaatccccaatctcttcctttgctccttcactcctcagggccttctcttcccaactcccagccaccccctgaggtctrtgtgagcctgatcaaggcctgcggtggtcctggaaatttctgcccatccttcagcgagctgcagagaaatttcgtgaaacatcggccaactaagctgaagagcctcctgcgcctggtgaaacactggtaccagcaggtgagggggctgccaggatggcaggggcaaggagagggaagagggtgaggaggaaaggcagggcctgattttcatctcaggaagctgcagccaggggaaatggaagcaggtagagagggagagaatgctagtcttttgaaatgtaaagtgaaaccgtcagtgaagaaggtggaaaaggaggagaggaggaggaagaggagaaagaaacagagaaggaaggagaaaaataggtgctctacagtatttcagtaaactagttatttttattttattttattatttttttttgagacaggatcttgctttgttgcccaggctgtagtgcggtggtgcaatcaccactcactgtagcctccacctccctggatcaagacctccctgkctcaagtgatcctcccaccttagcctcctaagtaactgggactacaggcatgcacaaccatgcccagctaattttttttatttttcttttgtagagacagggtctcactatgttgaccagcctggtttcgaagtggtctcaagcgatcctcccaccttggcctcccaaagtgctgggattacaggcaygagccaccacacccaccccacatgttcttgttacccttcaattacagtctaggcctggcagatgtcagcttcgccgggtactgtggccattcgtcacagcaggttaaggactaacaaggggaaggatttctttaattccaccccaggagtcgaaaagagggcatgtgtgagtgtaaacagccctcagggacatttctcaggcagcagctcagtcagttttggaaacaaaatcttcctccgagataacggaaactccaactgcaaaacagaactcagagacaaaaatcatttattatatagaacttgcagagaagttacaagggaatcagacagcagaaggaaagatttgatccaataaaaataaaataggctgggcatgatggctcacgcctgtaatcccagcattttgggaggccgaggtgggcagatcatgagatcaggagatcgagaccatcctggctaacacagtgaaaccccatctctactaaaaatacaaaaaaatagccaggcgtggtggcgggygcctgtagtcccagctactcgggaggctgaggcaggagaatggtgtgaacccaggaggcggagcttgcagtgagccgagatcgcgccactgyactccagcctgggcaagagagcaagactctgtctcaaaaaataaaataaaatataacagggatttaaagaaaaaacaattaccggccaaatgtggtagctcacgcctgtaatttcagcactttaggaggctgaggtaggaggatcacttgagcccaagggttcaagaccagcctgagcaacatagtgaaaccccgtctctacaaaaaatacaaaaatacaaaaattagctgggggtggtgatgggttcctgtagtctcagctgctcaggaggctgaggaggaaggatcacttgagccccggaggtgaagtaagttgagctgggtattttttttatctattcactaaggcttacatcttacagattacaggcatcctacattttatatatcatctaagttttaagaatgtaayatttcactaatattgaagaaaataagttatattaccatgagtttaaatttctaacaaaattataatgttattagttatggtttacaaaattgagtgttaaggatgaatttgcaaaaagttacaaaacaaattaattaacttataatttttttttttttgagacagagtcttgctctgtcgcccaggctggaatgcagtggcgcaatctcagctcactgcaagctccgcctcccgggttcatgccattctcctgcctcaacctcccgagtagctgggactacaggtgcccgccaccatgcacagctaattttttatatttttagtagagacggggtttcaccgtgttagccaggatggtctcgatctcctgaccttgtgatccacctgccttggcctcccaaagtgctgggattacaggcgtgagccactgagcccagccttataaatacattttaattcaaaattgaatttctaaggtcaaggataaagtttttttgttagtaagtcagtgacctataggaaaggcccaaggtttcatttatttgggagatgagaattatacaagatgattctgtgtttgtttcaaggccaaagtgttatagcttttttttttctcctctgactttgggatgggagctaatattcatatatgatggccataggaaaatatgtcagttttacttccacaaatcaaactactgaatatttgaccaaaatttttcactttctggctaaatatcaatgtatcagtgaaattctttttttttttttttttttttctgagacaagttctcactcttgcccaggctggagtgcagtggcatgatcttggttcactgcaacctcctcctcctgggttcaagcgattctcccgcctcagcctcccaagtagctgggattacaggcacctgccaccacacctggctaatttttgtatttttagtagagacggggtttcaccatgttggccaagctggtctcgaactcctggcctcaagtgatccacccgcctcggcctcccaaggtgctgggattacgggcgggaggcactgcgcccggcctcagtgagattcttaacacaggaagtgaccactgtcagttaagatgcttccttttgcaagtaagagaaaaacacaaaaaccaactcaaactggcttaaacaataaagggaattatcagcttatgtaggaaaacccctaaacagtagggggggcgggcggggggggcgggtttcaggcactggtgagggcactggctctgtttctctggaattctctcagcttctcattcctctatatgtcagcttggtcctttggcttgtttccctcttggtggcaaaatggccacaactattcctgccctcatattcacacatgggaggacttctcttctttcaaccactgaacaaaagaactaggctttactctagttgagccaacttagatcgcatgccttctcttgaagcaatcacttgcaagggggaaaggtttatgctgataggactgtgccagtcagggcccatcctggagctgcgggtgggggtcaaccccttccaaacatcatggctactatgcaatggggaaggaaagaatgtctgctagagaggcaaccccaatcttcactacagaatctcacctattaccattttttccctctatctaaggaaacctttcctttcttttaagaaacatttctcagcagctcaatacattaaaatagatttaaatgggactgcttaggctagaatgtttgtgaccgagcgcaatctgctcatacctgttcataagttcattccaggagttacatctgttgagcatatattgaagcccaatggactaactcagccctttaattctaaaatggtgaaacctatgtctagagatggaatgtgacatggccaaggtcacacagccagtaggcagcagagccaggactagaacttggatttctcagcttctggtccaacgccatccttacacagaatcttagggtctctctctctctgtcttcccatctctttcaacagtatgtgaaagccaggtcccccagagccaatctgccccctctctatgctcttgaacttctaaccatctatgcctgggaaatgggtactgaagaagacgagaatttcatgttggacgaaggcttcaccactgtgatggacctgctcctggagtatgaagtcatctgtatctactggaccaagtactacacactccacaatgcaatcattgaggattgtgtcagaaaacagctcaaaaaagagaggtactggaccactgtttgcccaccaaatcttacagaaaaaaagagagacgggctagtgtaacgtggcatagagttttatggattggctgtattaagcagtaaggctgccaccatagttgagcatcgacctcccacaccaacacagctggcatctcaagttggtggcttatcaaagtcactggggggccatggggcgggtagaagcctgttccttgtttcctaagccaccctccaccttagcttggccttcttgctctctgaagaccattcagtgctttgtaggagctagcatgggaaaatggaaagaatcttggagactcaagtttaaatcccagctcagccattttcctactgctatgagcctcaatcccttatccataagacaggagtaaactggaacctacgayataggattgatgtaagggttggagaaaatctgtgttaaggatccacaatatctagcatctggcagatgctgagtaaatgcttatattggagcatgtgctgtcagcgtcccattcatatcctctcggcctttaccgttctagggaaggttggttccacttccagctgtcagcacctgcatccctttgccagcagacccactctgagaagagccctccaccagatctggtgggagttggtggataaataccacagctccctcacccaaaagatggaaggaatctgggtctcattgcgtaactttttttttttttttttaagacagagttttgctctgtcacccagggtggagtgcagtggcgcaatctccactcattgcaacctctgcctcctgggttcgagtgattcccctccctcaggcttctgagtagctgagattacaggcgcctacaacccacacccagctgatttttgtatttttgtagagacagtgctttgccatgttggccaggctggtctcaaactcctgacctcaggtgatgcgcctgccttggcctcccaaagtactgggcttacaggcgtgagccaccgcactgggccccattccatactctttcctaaagatcgcctccagtggaccacagtagtaattacttcaatacccactctttgttgtctgccttcccttatctgtctcactgtctcactcccttatttgtgcttcctgggatcactttccaaataagccaaatccttatctggggatctgcttcaggggaagcccaacccagacaactctctgtgttagaagctctgggcctgtgtaagcaacatcacagtatttagtgttctgttatgtagtattgggtctcttttgtaaggaagaaaagccaggtctgctcatgaaaagaggatttattataaccatggccagaaaaatcgagaaagcatcaggacctgagactccctctctctctctgtcactctctctcatgaactacagcacttttcccctcagcctctgcttctctctccacacctgtccggctcccctctgcctcccaggtataagggatctccatcatccccatgtccaaaccccagagagaaccagtctgattcctggtcacgggacacagaccccatgtgttgggtcacctgccagccaacagaatgagccactttagatcagtgaccccaccccataggacagcctggcactttcaggcaggactgttttagggagcagtcagggttgggaggagccagcctggagcccaaagtccagttcattccagtagcctgtgtcacattcgattacacagatgaagtcgcagctccctcccaagccctggagtacaaagggctgggttttttttgtttgtttttgggttttgtttttttttttttaatggagtcttgctctgtcacctaggctggagttcagtggcacgatcttggctcactgcaaccaccacctcctgggttcaagctatcctcccacctcagccacccaagtaactgggactacaggcgcctgccgccatgccctaatttttgtatttttagtagagacacggtttcaccatgttggccagcctggtcttgaactcctgacctcaagtgatctgcccacctcggccccacaaaatgctgggattataggcgtgagccactgcgccccrctcaaagagctggtgttaatcatggacttgcagtcaccccaagttaataagcaagcccaagatccccttcaagccaatattctttaaaatatttattcaatatttatagaaaggagagacttttgggggcagcccaacctctgctctgttgaggaggtagatgggtaagagcccccatctactggctgtaagaacttagggcaatctaggccgggcaccggtggctcatgcctgtaatcccagcactttgggaggccaaggcaggtggatcacgaggtcaggagttcaagaccagcctggccaagatggtgaaaccccatctctactaaaaatacaaaaattagctgggcgtggtggcgggtacctgtaatcccagctactcaggaggccgaggcagagaattggctgaacccgggaggtggaagttgcagtgagccgagattgcaccactgcccttcagcctgggcgacagagcgagactctgtctcaaaaaaaaaaaaaaaaaaaaaaaaggaacttagggaggtctgtaaaaaggggacaaccacaacaataaacaataaaaataacagtccctaccttatagaattgctgtaagattaaaataggttaatctgcataggatttggccttgtgcttcaataaatgtcagtagttggtggcagtggtgtttctactatccaaagtaattcagcagctctaaccttaaacttaaacttgcaaaacctgctccgaaggtacagggccccccctgcctgaaagggcatctgttattactccagcatgcctcttggggcctcattctccccctaaattccttgcaaacacttaaggcactatcccaaagaagaagaatttttttttttttgagacagtctcactcggtcacccaggctggagggtggtggcatgatcttggctcactgcaacctccacctcctgggttcaagcaatgctcctgcctcagccttctgagtaactgggatgacaggtgcgtaccaccacacctggctaattttttgtatttttagtagagacagggtttcaccacgttggccaggctggtcttgaactcctgacctcaagtgatcctcccgcctcagcctcccaaagtgctgggattacaggcgtgagccactgtgcctggsccagataggaattcttggaaatagcattgtctccatcctgttactctcctgcggtgttttggggccctcttgaacatccccgggatgtggatatcacaattctcagtggctggacgaaataattgccgagaaggtttttttctggcttgaaggccttcaaaccattatgagcctgggcacccttttcctgtgttacaggcccatcatcctggatccggccgaccccaccctcaacgtggcagaagggtacagatgggacatcgttgctcagagggcctcccagtgcctgaaacaggactgttgctatgacaacagggagawccccatctccagctggaacgtgaaggtaatggctcctctctgggctgtcaagggcttgaaggtcagaacgacagataaactactcagtatttactcattcagttctgtgttgatggagaacagaactttagagtcaccgtttaagggccagctgcaccacccatgggctccgtgaacttggacaaattctttggctctcagagccttgggtttcttaccttcaaattcttgttctcctttcctttctttttcccataatttactggagaatcagttctgtgttcctgatcattctttgcgtgagttgggtccagccaagtcagctcaatcagccattctgtgccagtgctgttctcagggatggggtaggggatgtgggctgggggacaacacaggcacagaaataagacatgaccacgacgctcggccaggtgcggtggttcacgcctgtaatcccagcactttgggaggccaagacaggtggatcacttgaggtcaggagttcaagaccagcccggccaacatggaaaaaacccatctctactaaaaaaatacaaaattaggcgggcgtggtggcaggtgcctataatccctgctactccggaggcagaggcaggtgaatcgcttgaacccgggagctgggggctgcagtgagctgagatcgtgccattgcactccagcctggacagcaagagggaaactctgcctcaaaaaaaaaarraaaaaagaaaaaaaaaagacaccaccctcactctcagagaactcaccctatgttgtcaggaagcaaatccatgaaacaaacttacacaaaactgctagaattaccagagaagacaagatactctgaaaacaaacaaacaaacaaaaaatactaagtcatattattatatgatgccaaacctatagtataggcagagatcacaaaaatctattttattaacatcacactttctagtgtgcaaagctcttgtccaaggtctgtctcagttgatcctcataagcaattctgtaaagtaagaaggtcgagtgttatcactatctttattattattatcatcattactattattgccattttacagaagagaaaactgaggctcagagaggttaattaactaagggcactctgctaagaggcagcagaaccaggggctctgggggtctggaagcagaataaatgttaactgaagtcaccagagaagattcctttaaaaagttaggagttgaaatgagccctaaaggccggggggagatatagacactcagaacagaggacaaaggatgatgaggggtaaaggatgggaggctgggatgagcaagatgtgtacaggacaggagactgaactgcttggagcagaaggcagaagcagaatcagaggctccagtaaggtacatagagtataaacggggggacccgctggccaaatgaggaggcccacccatgggctggaaaatatacgcctctggatttttcctgaatataaaagccattgtaggctgggggcagtggcgcacgcctgtaatcacagcactttgaggggctgaggcgggtggatcccttgagcccaacagttcaagaccagcctaggcaacatggtgaaaccccgtctctactaaaaatacaaaacttggccaggtgcggtggctcacatctgtaatcccagcactttgggaggccgaggtgggcagatcacgaggtcaagagatcgaaaccatcctggccaacatggtaaaacctcatctctactaaaaatacaaaaattagctgggtgtggtggcatgtgcctgtagtcccagctactagggaggctgaggcaggagaatcgcttgaacctgggaggcggaggttgcagtgagccaagatcgtgccactgcactctagcctggcaacagagtgagattccatctgaaaaaaaaaaaaaaaaaaaaagaacaaaacttagccagatgtggtggcacgcacctgtggtcccagctactcaggaaactgaggcgggaggatcgcttcagcttgggaggtcaaggcgcagtgagttaagattgcaccactgcactgcagcctgaggtgacagggcaaggccctgtctcaaaaaacaaaacaaacacacacaacattgtgcaaatattttttatcttggctagtcagaaaacttggcaatgccaggcttatatttctttttctttttctttttttgttttccttttgagacagagtctccctttgttgcccaggctggagtgcagtggtgcgatctcagctcactgcaacctccacctcctgtrttcaagagattctcccacttcagccttccgagtagctgggactacaggcatacgccaccacacccggctaatttttgcattttttggtagagataggttttgccatgttggccaggctggtctcaaactcctgacctcaagtgatctgcccgccttggcctcccaaagtgctgggaatacaggcgtgagccactgcacccagccaaggcttatatttcttctggaaagaatcagctagaggcctgaccctcgccagcattttccaggtgctctccagccacctggggctctcaggccctggagtgtagcctctggaggtggtgagaacacagactctggagtctgaccaacctcacttcacatatctgccctgctccttactacctatgtgattggtgttcagtaaattacctaaccctgctcagtttcctcatcaataacatgggggtaacagtagaaccaaccaactaatagagatgctctgagaataaaatgcattaagggtatggaaggtgctcagcatacagcctggaaagtgcttaccactccctaaacatttgctgctgccgctgctgctgctactattgtaaagataaggacagatgaagggaacatttgcacatcagacaaagaagtgtggacttaacacctctccttctccctctcccttccagagggcacgagacatccacttgacagtggagcagaggggttacccagatttcaacctcatcgtgaacccttatgagcccataaggaaggttaaagagaaaatccggaggaccaggggctactctggcctgcagcgtctgtccttccaggttcctggcagtgagaggcagcttctcagcagcaggtgctccttagccaaatatgggatcttctcccacactcacatctatctgctggagaccatcccctccgagatccaggtcttcgtgaagaatcctgatggtgggagctacgcctatgccatcaaccccaacagcttcatcctgggtctgaagcagcagattgaagaccagcaggggcttcctaaaaagcagcagcagctsgaattccaaggccaagtcctgcaggactggttgggtctggggatctatggcatccaagacagtgacactctcatcctctcraagaagaaaggagaggctctgtttccagccagttagttttctctgggagacttctctgtacatttctgccatgtactccagaactcatcctgtcaatcactctgtcccattgtctactgggaaggtcccaggtcttcaccagttttacaatgagttatcccaggccagacgtggtagctcacacctgtaatcccagaactttgggaggccgaggtgggaggagcgcttgagccgaggagttcaagaccagcctgggtatcayagggagaccccgtctctacaaaataaaaaaataattcactgggtgtggttgtgcacatttgtagtctcaggcactcaagaagctgaggcagaagaatcacttgagcccaggaggctgaagctgcagtgagctgtgatcacactgctacactcctgcccaggccacagagcaagaccctgtgtctaaaaactaaaacataaaaataagtaaatccgtttaaaaaaaggattatcccagccctgccagggggaggatgaggaggggtgtgaggactaaatatacaaataaatagtgtggtcacatgacgcacagcaacagaattcggacccacagccttctgcagcaatcaaccccaaaccatcaggacttgggcgataactggcagcatctctaactccccaccctactcccatcctgcttcctatttatgaccaacccaagaaacccaaataagctccccagaccaatcacatggttagccccacttctggtgagtgcacttccagcttccccataccaacagcctcaatcacggcatccctgaagccttcccattttcctgcctgtctttaaatctctgtcaaaagcgagagatgggtggctggttcctttgctatagcaagttgggaataaatcgcctttgttagttctcatttgggggctgtttatttccacagggcctaatgctgtcctaatggttattgcttgatcatttgagcttctcaactctaagaaatgaggactggggaaactgaggcaaaaagagacaaagaatgggagattgaggatgatgcagtgtaaaaaaaaatcacctcaactcctaaaacccatacacaaacagtacataatagtcaggaaactgtaggaaagtaatagcatctttattatcaaaggacgtcatgtgatcaggtttactccaagcaataaaaagtttccttttgcccccctgttttgcctagttttctggtgggctactctcctaccatagcatagaaaatgcacactgcaattggttatcaacagcctctggtcaatttagcaatcataatctgtgtatctcccacctctgtttgccttcagggacagaaaaagtgcctcctttccaggaggtagacaggctgttccagtccccatctttgtgtccttcataatgcccagcacagcccacattgtaggtggtgggaaaattcttgtttaaaataaaaaaaagaatgaaaaatgcaatgtcttagtccatctgggctgctaaaacaaaataccatacactggatggctcatgaacaataaccatttatttcttacagctctggaggctgggaagtccaagtcaagacactggcagatttggtgtctggtgaggacctcttcctgattcacagatggcagcttctcactaagtcttcacatggtagaagaggcaaaggtgtctctaggatcgcttctttttttttttttttttttttttgagatggagtctcgctctgtcacccaggctagagtgcattggcatgatctcagctccctgcaacctctgcctccgaggttcaagcgattctcctgcctcagcctcccgagtagctgggactacaggcacctaccactgtgcccagctaattttttttttatttttagtagagacggggtttcaccatcttggccaggctagtctcgaactcctgaccttgtgatccacctgtcttggcctcccacagtgctgggattacagttgtgagccaccatgcctggcctctggggtctcttttatgaaggcattgatccagttcatgagggctcaggacccattatgtaattgaaagattctccgtggggcctgaaagcttaagagaatgaatgacccctccctcccctccctccttgggcccggtcccaaggcgcaaggccactcgcgccagcagcatgtgtcagcaagatagcagaagcgggaagagagcgggccagaagacacctaccccctgaagaccgagagagacgtcatccgggtacaatgtagcggttacaacagactgagaaacttcctgtttacaggagactacaaaacccctgccccgtcctcatttggtgctgacgccattttaagcctcagcccacctgcacacacactgcctcatgttgtctgttggccacgctcttggggttcgaaccaacacaagaccctttcactaattacttcccagaggtcccacctcctaataccatcaccttgggagtaaggactttttggaaattatcagtatcaaaatggagtcacttatgtcaaaccctaacaaatgcctgtcacaaaaattatctcaagaagttcctaaaatccgcagtattatagataaaccacttgcataagaatatttgcctaacagtgggtgtctccacaataagctaaagccaactcctgcaacaggctcctgtgatcaacggtacttgttttaaagaagcttatgtggactttgtcttttctcgttgccacaacctcttttaatgtgcctatagtccactatagcatgcatatctcaaattgcaattccttgcaattctggaataaacgctttattttggagagtcagtctctctgttatttattttacggtgtcaattttaacatatgaattttggaggaacacattcagaccatatcagtcaccttcctcttctttgaaatagaaaaagctcaaggccagagagtttattttagtaaagttttgacatacctgtcttcaaagataaaacatgaaacagcattccacacacaaaagtaaagtgattttgttcatccttcactgtgaggtattttaaccacagagattctaattttttggtcttggatgggtcctgggagtcagtattgcctggctaatttttgtatttttagtagagatggggtttcaccatgttggtcaggctagtctcgaactcctgacctcatgatctgcccgcctcggcctcacaaagtgttgggattacagatgtgagccaccgtgcccggacaggattctgcatttctcttttttttttttcgagacagagtctcagtctgttgcccaggctggagtgcagtggcacgatcttggctcacctcaacctccacctcccaggttcaagtgattttcctgcctcagcctcctgagtagctgggactacaggtgcgtgccaccatgcccagctaatttttgtatttttagtagagatggggtttcactatgttggccaggctggtctcgaactcctgaccttgtgatctgcctgcctcagccccccaaagtgttgggattacaggcgtgagccaccgtgcccagcctggattctgcatttctaacgagctcccaggtgttaccaatgctgctggctcatggactacactcttaagtagtaaggccctaggctattaaaggaaatacagattcctggattccacctatcagagattctgattctgttagtattttctgtgagacccaaaagtctgcagtttaaccagctctctaaggtgtttcttaggcccaactggactgggaaattactagaataaatgacatggaatcaaaacctgggaactaatcctgggtctgtcattaactccttaggagattcccatcccctctggagatctgtcatcaagaaatgattggagaagttaatctcttaggcccttctagctcttgcctttgagaaccgcccacctccccattcccacctggtatccccaacccagtacagttcatggccaatggcggtccaagtcttggaactacaatccccacaatgcctcgcgcctctcctctcacgtgacgtcatgaaggaggcttgataacggcggtgttctccacaatcctttgcggtggttcaagatggcggcgcccagtggcactgtgagcgattcggaaagtagtaacagcagtagcgatgcggaggagctggagcggtgccgcgaggcggcaatgccggcttggggcttggagcaacgcccgcacgtggcagggaagccaagagccggtagggtactatgtttggggagactggctgaggggcgtgggatcttcccctggagcctgagaggatggatggtgaggagagagtcactgggactcggcttccttccccgagagacctccagggactgggtgtagtgcagattgaaagcatgggcaggtgcagtagggagggtatttcattattccagtcggggaagctgaggtacccaaatgtcttttgattctgcctccttgggtctatcctcactgccccacactgggaaggctgccgtctcttcgagataactgcaacagccccctcccggtattctcgcacccagcctttccccacctccaacacattctcccaccctggaggttgttgccaagagcagtgcccagcacatcactctgaccgtgactccctagtgccctgggaataaatacagagccccgcaacatcaaggggcctaatcatggatagaacccaagggttcttgaatttggaatgaaaacatgttgcatctttgctttctattcatctctgactgaattttagcatctctttccgtcttgcaagcactaagccacagtagttctggcaatgccgttactttatcccaacagaagtcacagattttcatatctcattacaatctttgcagatacagatatcaatatatcattttattgataaaaagatattggggaaaaaagtcatttacactcatccctgatttaaaatgtgccactctaatttttagacccatctctatatctaagatgtaagaagcacatacatcacaagtttggttgtttactatcatgataattaaatttcggtatcattggttttctttgtaatcctgtatgttgcatttcatgcatttaaaacattgctctgagaagagaaccgggcttcaccaggctgttagagaaggctatggcaaagcaaggttaagaaccgctggatttgtttaaaaggacttacaagccctttggtgatccattgccttcctctcccttccttccctcctgccatactgcacttcctgtaggtagcttccagaccatagtctgcccctctcaccccctagtaccataaccacagttttctctgcaagttctatttacagatctgcctttccatctcattagcggtgggaacttgagcaaagtacttaaatctcactgtacctaaatttcctcatctgtacagtgcgggtagtgatagtacccaccccataaggttgagaagtaactgagataatgcaatctacagtgcttggcacatcttaaaggcccaatacatggtggcaaatatgtggttggtctttccacatggactgctttcctcctcctgcctaattctcgctcttttttttttcaaaactaggactcagtctgttaccgaggctgacacaatcatggctcactgcaacctcgacctccccctactcagatgatcctcccacctcagcctcccaagtagctgagactacagatgtatagtcccagctactttttgtattttttgtagagatggggttttgccatgttgcccaggctggtctcgaactcctgggctcaagtgatcctcccttctcaaccttcaaagtgctgagattacaggtgtgagccactgtgctcggcttctagttttttttgtttgtttgtttgttttttggggttttttttttttttgcatttttttttttttgagatggagtttcactcttgttgcccaggctgcagtgcaatggcacgatctcagctcactgcaacctctgcctcctgggttcaagtgattctcctgcctcagcctccctagtagctgggattacaggcgcctgccaccacgcccagctaattttttgtatttttagtacagacagggtttcaccgtgttggccaggctggtctcaaactccagacctcaggcaatccacctgcctcggccttccaaagtgctgggattacaggtgtgagccaccgcgcctggtctctttttttctttttgagacgcagtctcgctctgttaccaaggctggagtgcaat

SEQ ID NO: 7045 - DNA, 81742 bp, Homo sapiens
tagctgcgcatggttgtgcacacctgtggtgccagcttcttgggagactgaggtgggaggattgcttgagctcattgcaaggctgcagtaagccagcctgggcaacacagtgagattttatctcaaaaaaaaaaatttatttttgtaatgtgtgagtgagtcctataggtagagagaagttaacatttgtatgtatgaactgttgcatgaaatgtacagaaaagtagcaacttcttcaggaaattttaaatgtatggcaggattatagtttatagaacttaccaaatgaagaagaatttctaggccgggcacggtggctcacgcctgtaatcccaacactttgggaggctgaggcgggcagatcacctgagttcaggagttcgagaccaggctggccaacatggtgaaacacctgggctggagtgcaatggcgtgatctcaactcactgcaacctccgcctcccgggttcaagcagttctcctgcctcagcctcctgaatagctgagattacaggtgcccaccaccatgcccggctaatttttgtattttagtagagatggggtttcagcatgttggccaggctggtctcaaactcctgacctcatgatctgcccgcttcggcctcccaaagtgctgggattacaggcgtgagccatggtgcccggctgccccagcctcattttaatttccaaagcaatatctttttatttatttaacatatacttgttgaaattctatatgtgttaggattttccccccagtagcatgaattatatggtttccacgtgatacagagcatagtgtctagcaacaataggcctcagtaaacatttgtggaataactcactaaatgaatatattacattgattcatctgaaactgtcatttttagaggtcaaaatggttaaatatcagcaattcaatattcaacaaatatattaataagaatcattccagtataaaagtgaaaatacatattactccttgacactgttatcaatgtgtataattttctttcattagactacaaaacttgacttttctcttctttgcctaccaggaaacacgaaattatccagaatcatatccacaactgccaagggatgaaacagtggagaatcctcatctccagaagcacattttggaattagcatccattctggatgttcgaaacgtgttctttgagaataccattgatgactattaaaacaaaaaccctgttgtcgaaacaagttttcattttccacaaattttaaatggtgcagttttctaacgtgataagacacatagtggtgttacttagtttttattttttaatttagggccaccattttaaaaacaaacaaaaaaatgttcacacttttagggtaactgttttaaaatgcaacctttcaggtcttttaaaatcttaaccttggaatttttattttttgattttgagggatggatatttacctccaacttctaatcctacactcaaatagtcactattctcaccctgagaagagtaaatcatttatttttgtataatgaggtaaatccaactcttatacttggacctaagttaaatgtctggatttggaaatatgtaatggttcataatgatgaagctagccaccatggactactgaaaatcaagaacagagtccctccataatatattttttctcattccaacttagctggtagaaaaatgtttgatcctttgaaacatgatcaagccagttttttgaaatcatttaatttctttcaatactgtcataatttcagaaattggattgaattgcatctgaaagctacatcttgattgaggacttgaggtggtaatattacttggaatgtatgagtattatgagatttatttgcatattttctttgtagtctgtgaatgctggaaatgaaaaaggaaacaactttgaaatattttagtcaaaaaaccatgtcattggtttcataatacaatgtctccaataggaattctatttaaactcttggtttatgagatcacatttaaagactggattgatgtctgtgacataaagttttaattttttgcctcattcaaatttatgagacttcaaagtcatagatgttttaaattttggtaaggggtaactgggtgttatgaaacctaaaatgtaagttgattttgcattggtaatttggaaataagatttattaacattccctgtatttagtattttatattcatgcacaaaatttttattatcttaaataggactcagtgtatattataaagatttttcttttttgtgttttccttccctgtcattccctttataatttcacagtcacttgctatgaagtcctccctcctttttgattatgcagcattcaatttcagaaatctatgaatgagaaggccttatacctaattttctgtacaggatcacatctggcagtcccaggagaagtgagctgattgcttttgatatctctttcccatggccctaggtaaattatactctaaatttatttattttttttgaaacagagtcttgcttttgttgcccaggttggagtgcagtggggctatctcggctcactgcaacctccgcctcccaggttcaagcaattttcctgcctcagcctcccgagtagctgggattacaggtgcccgccaccatgcctggctaatttttgtatttttagtagagacggggtttcaccatgttggtcaggctggtctcaaactcctgaccttgtgatctgcctgcctcagcctcccaaagtgctgggattacaggcgtgagccaccgcacctggctattatttttaacttggttttcatttctggcatagagactaatttgggtctaagttattcccattcctgctttgatttgctgatttttcaaacctgaagtccaaagttactgtttttggggtttggggacttggggagtattttacttttttttttttttttttttaagagacagagtcttgctttgttgcccaggttggggtgcagcggtacattcatggctcactgcagcctcaaattcctggattcaggcaatcttctcacctcagcctcccaagtagctgggactacaggcatgcgccaccatgcctggctaattttctttattttttaattttttgtagagacatggtctcactttgttgagcaggctggcctcaaactcctgggctcaagtgatcctcctgcctcaacctcccaaagtgctaggattacaggtgtgagccactgtacctggcctgtttactttttaaaaatttttttgtttgttctttcaaacagtatttcagaaagcttgggaaaagttaccctggaaagatttcctttgctagtgggttttcattttcaggtaaagactgctttccttttttttcagtatcttaataaacttcatagctttcctttagtaacagtgttcattgaactacagcaatagactatcttcggttttctgacctcttgtttcaattccccttaagtcctgtgccagttatgctcctaccaacacagagtttcctgtcctctaatgtttaaaatagtatttactgttctgagctttatcctcccccgttaagcataaagaacactggtctgagaactaggagacctaagttctagtcctggctttcctggtaacttaagcgttatgccctttgacaactgtcttcatgtctctgcttgttagcactctcatctgtaaaatgaagaggttggcccaggtcttctccaactctgattctgtaatttggactcttggttccaaaaatattgatttccccactccaaccaccaagagaactatttaccctgtttgtagtgtacacaaccttttcttttgtaagtcatatttacctagattttgttcaagaaaatctgggtcccacttagctgttttagaaactagtacagacagagactctcctgaggaaattagagcttttatgattagaaacatgcttgtctaaaaatgagggtcttagaaatcacaacattgacccttatgatgttgccccttaagctaatagtgtaattccttactggtagttaaaaatctaaagtggactgaagtgatcttgaatcttcaaagagaggaaaactgtgctggaaaatgttattgtttcattgatgccttcaaaaaaatgcgtattaaacaaagactatactccagattttcttctgggcattggggaagcaaacaaaatagacttaaaaatcctcatgttcatgaagcttacattctagtagaaggagtaaggcaataaacataagtaatttatgttagaaaatgttaagtaggatggaaaagtgtagattatggtaaggtaaatcttttgtttgttttcttaagagaagaacaatgtttaaaagagtgatcaagcagggcatggtggcatgaccctattagtcccagctacctgggaggccgaggtgggagggtcacttgagcccaggagtttgtggctgcagtgagctgtgattgcaccactgcactccagcctggatggcaaagcaagacctcgtctctggaaaaaaagaaaagaaaaagtgatgatcagggtaggcttcattaggaaggtcacatttgcatgaacactttgccttttctttctttttatgaaagttttaaacatagtttttttgttttttgtttttgagacggagtttcactcttgttactcaggctgcagtgtggtggcaggatctcagctcactgcaacctccaccttccagtttcaagtgattctcctgcctcagcctccccagtagctgggattacaggcatgtgccaccacacccagctaattttgtgttttgagatggggtttcaccatgttggtcaggctggtctcgaactcctgatttgaggtgatccgttggcctcggcctcccaaagtgctgggattacaggcatgagccaccacgcccagcctaaacatacagtttaataaatcctccttgtaccttacccagcttctgtatttctttaatcaagggagaagaattatctaaaaggacagttgcccaatgggcttgagctgatgatagtggcaaagaatttcattttttaaaaatgcataccacctgccctttataaaaaaatttaaaccctaatgtatttaattttataattcataaaaatttaaatattggaactaagaacagagcaaagcaaagggaaaaagcactcctttgttttcaaattgcacaaactgtccctggagattctgatagtctctcatctctcttaactatcactgtaaacaacatagaaagcataagactgcaagaagtcagttatacacaaaacaaaatgaagcacagtggaattttctctttctttatctgtatatttctgaagttggtaaagcaactatcttctctattttacagaagagaaagctgagacccaaaaagctattcatagtgatagagctagaactaaaactcagatctcctcatctcagcccagtcttctcagtagctcagactgctttctataatgaacaagaaagaataattagggatttgtattttggcacaaaacagtatcaaatttttattgtaaaaatccacaaatctgacattttatcttttattctagccaggatgtattcttcatttgcatgtgtgtgtttctcttagaaagtggtgctctcaaacctttcaaagcacagaatttattgtaccctctttatttttaccaaattgaaacgtttcaggatttcagaagcaaagtgcaatccaattgtggctggagttttcctgatagaggatccgggtggttccctcccctccaacttctggctactgccctttatttcctttgtgcaatagaattccctgaaacagattatgtcgtaattatactgatttagtcaggataatgggaaaagcgacaaatcggatttatgtattaggtattatggagctttctttagcactctcctccaagtttaatctctgacatgtgtgatatagtaactttctgtctctgagaagcagtttggacccagctgaaaaattttatttatggagacttgtaatcagcctgatatacagagaacactctggactggaaatatagtcaggtaccaaggtctgctaatttggccattgccagtgattcaaaaccacctccccaccctgagtaaaagatttgatatgaatatgaatgctatgagtctcctggtgatgttttgggtgtatatgttcctgtgwgtgtttggaaatcatagagggtatttaccttgagggctcttttgttgaccttatttatttgaaattcttattttatttgtaatggcatatgtatatttttgtgatgctacatgcaatctctgtgtatactttttgtatatatgtatacatatttgtaaatatattggtatgcagtgatacagtatgtgtatattatgtacccatacccattgtgggctgaatttatttaagttctgtgaggacatcctagtggcattgttcatgctgctgtaattaggttgtggctgtatctcattcataagcctctattttgagaggcttgtgtttggataaaatgggctaatttggagttgaaattaggatatgaagatcttaacagaaagctagatatttattcttagctttaaaatcacctgcaaatttttatttaaactgatgataaattagtgatataacctgaaaaacctaagtatgtgaaactgagacaccagcagattcttaggctgtagtagtcctttattttcttgatccatatttaagtattattactgagtagtaaattatgtatattggggcttaatagagaggctgtggaaaaaaattgctttaatcacatttaaaaacataggaaaatgtccattaaataggggaaatatattcccagttgtcatttttatgcctcatactgaattttgattttggaacaattcttttttcatcagtgttttatgtgtctctatgaggcagaaaagggggcattagctaagggatggcctaacctaagtaggataggatttagtgaggaacgggaggttgttaatttgtatatttgcagcagctatgattaatttagtcctgtcttggcatttccggctacagattttttcttactggacttgcatatcaaaggtgagtaggctcatctgagaaaatgcttccactgaataaaatgccttcactcgtattgctgtgtctctatgagaccacttgtgttctgcaagttgatgatatattcgcacatgaagtagagtttttaatattagatgcatggtgtgctataaaaatctgggccttcaaacctctcccaaggatgatagggttggggaggataagaggatagtaaatacgtgcaatgccaatttgtgaacctatagaatgttgccaagtatcaatgtttggttacttcagttgacatatttatttgcatgaaagagtgtaggagatgtttaatatacacttaaatacattcactgcagaaattaagtagaggttatttttgcatgataaaatataactgcaaagcaacwttttacaccgtattctttggaagattaaatctatctgatccaatattatcttaaaatagagaaattatctcaggagtctgttttaccacccaaaaaaatgttacatttgctgattcattatattttaaataaaacagccaactattcataagacttttcaattatagtattaaattcagaaataattataacagcatttttcttgaataaatattaaaatttggtaatttattatttctgaaaaatcagtgaaaacatccataggatctgatggtttgttgtttgaataaccaaatcattgtttttgcactggagagtagtagagcagatattataccatttaaaattcatggaactgactcaggctccttgtggatattaatttgaggacagtagtggtaatcaaaagtacagtagaaaacacttgacattgtgaatgtgacctctgaccccaaccgttgtaaagccaataactttgagggtgaataaggtaacacttgcttagaaaacccagccctttcccccagtctcctgcgctcttatacattgatactttacaactatttttgctgtacctctcagtctttcctggataatgggaccacttaaaaaaaaaagtgattcatcttcctcaaactagaatttcaaagcctaatactacactatgttccagcttcactgagttttgaacaaaaagacttaagcatgccttgtgtttaaggaaaaataattgatgtgtgaatggaatcaatcacctattgacgggaagggtgtcaggatgatgtagggtgatatgcctttaattggataaagagaactgtattaagtataactaatttaataactgattgaagcaccattcttaattttaaaatatttttgttaatttcttttgtggttttaaaaattaataatttttttttttttgagatggagttttgctcgttgcccaggctggaatgcaatggcgcgatctcagctcactgcaacctccgcctcctgggttcaagagattctcctgcctcagcctcccaagtagctgggattacaggcgtgtgccaccacgaccagctaattttgtatttttagtagagatggggtttcaccatgttggccaggttggtctcgaactcctgacctcaagtgatccacccgcctcggcctcccaaagtgctgggattacaggtgtgagccactgtggccggcctaaaaaaaattctttttaatagttatcagactactttaaccagtgccatgtttaaacatacttggacaatagactcagtttttttaatagtttgaagtacattatattaaaactacaaactcacttattcaagcctaaatttcatcatagactataaattgggtatcaatttcctattttggtggacaattccagtctgtctactacgacaatcatctttttaggtgtaatattgtttaagacataggtaattttaggttttatacttttctcctaggcttatggaatgaaagctaataggatatcactttcagaatgaaatagggaattatggctagccttcttatagggctgccgtaaatgatacttaaatgtttgttatatcactgattttcttttctcttctgaagctgttgtgaatgtccactttgccatgattaaaagttgagatttgtaaacattacaatttgaaccataaattttctcaaacatgaaatcagtatgaataagtataaaatttgaaatgatcatacatgagaatcccaaaagtaaatacttccaaaccatagagggataaccactgtatttttaaaaagcttatttccacccttaaagaagcatgctactaattgctttttttctaaattaaaactatgtactgtggtaaattaaaaatctgcaggaaaaattgcttagtgttttagcacaataagaatttttattactcaggagttggagaccagtctgggcaatacagtgaaaccctgtcgctactaaaatacaaaaaaaaaaaaaaaaaaaaaaaaattagccaggcatggtggtgtgcgcctgtaatcccagctacttgggaggctgaggcaggagaactgcttgtaacctgggaggcggaggttgcagtgagccgagatcgtgccattgcactccagtctgggtgacagagcaagactcattctcaaaaaaaaaaaaaaaaggaatttttattactatttcctgaagaatggtttttgttaacttgttactgtatcattaaaaagaccttctaatggttcagtacaataatctagaacttgatttatgtggctttttatagttatctgaatgcattccttttgccacatagaccatatggctagttctccaacttttttgcttatttttaataaaccttgctgttcaacaatcagagaaacctttagattttggatgattcttccagttgaggtagaaacatcttagataataggaaaggcaaatacaaagtcctaacattttcatagtagagtttacaagtaaaataacttatccatataggttatcttcgttgtgtagcaccagtataaatagtgatttcattaatcattgaatcagatgaagcagttataaatcactttttactttgtgctaagaattattgtaatttcaggacactttattatttcctctgagcagtttccattggaaggttgagtttcccttttttaagttctaatcatcactaaaggttaagataatcaaataggagttaaaataagttatgtttgatctttttcccttgaaaataatgctgaacttattgtctacattctgattattaggcagaaatgcacttgtttaaatcatagaagtaattcatttggaggatataattactcgattttctagtggtgtgaaatactttttaacaattgtgcttgtctgtaactgaaatgttataraattttaacactatagggattatagagttatattagctctcctcaagagactgaagcacaatatttttcatgtaacaattcttatccaagtgctgctaatctgtcgtgcaaatartgaagctatttggttgcctatttagctattcacaaatcactgtaatctttgaaacaatcttgtcgttcatttgtattaatatttggatattgtgagttaatactttagaaaaaaatccatcaactcagccccgttagcaaaactgtttggattcatagtttttatatgtgttaacagtagaataaattttgaaggggctatttactaccaatgactaaggggaaaattatactgtcactatcatttgacttgaacatttgtggtattgtaaaagtcttgtcagttgtgttctaaattgcttaagccatacgttctcttaaacaggatgtttttttcttcctttccagcagcctttttcttctttgtctgttatggttaatactccatagattttagaaattgagaagttcttgaaacattttattttcttgagttcatcacttttgactcttgtatgagatgtgatttgtcataaaagatagccttccactacttcactaaatgaatttcagagtaaacactgtgattctgcagagcggattcagtaggctttccaatgttttctcctgctatacagtgcctaccaccttgagggcacttcagtactagaggatgaaaactgaaacgttgttttgatgtttattgaataacgagattagagaatatttgatttttgttgtcagtgtattaaagaaattttcacattgataaatgttctctaggaatgtgtctacattcatcaggtgtgaactcttgtacatgaattttgtaccttgaatccacatatatatwaagtgtatcatcaatataaaaataaacattatttgcttaaagtttttggtactttttcggtattgacagctgaactgttagggtttgcttcattcaaatatctcagaggctttgaactatcttggggttgatgcttcttgttagtttgtcaatgtttgaatcctggttttggttttttccctgccctgctcctgcaggtcagaactggaacacgcgagggaagggactgttgaagaattgggtggaatctgcttattcttgggcttgtgttgagtctggggatggaaccagagttccttaaggtggaatggctggcttggcattgacgagttcagggacctgacttagggtactgatttggaccgtgactttttgtttgagatagagtttcgctcttgttgcccaggctggagtgcaatggcgcgatcttgactcactgcaacctacacctcccgggttcaagcgattmtcctgcctcagcctcccaagtaattgggattacaggcatgggccaccatgcccggctaattttgtatttttagtagagacgaggtttcgctatgttaggctggtctgaactcctgacctcgggtgaaccacccgcctcggcttctcaaagtgtggggattacaggagtgagccaccgcgcccggcctggactgtgacttggaacaagatagtttttcctcttttgtttattttcctactgcctgcatgattgctatttatttaaagagacggagtctcgccacggtgcccaggctggtctggaagccctggtctcaagagatcctcccacctcggtcttccgagtagctgggaccacagaagcgcgcgccgtgcacttttgatgttttcaacttccttcctaagcagaaaggagacggcccagcagcggatggtgaagctaatccaatatagtgagctgccaccagcgtttttaagtgcattacatagtaagaacgtggttctgctggacgttatgtactcggttgcgatataaaacgcatcatctacagtaggtgacaggcgccaaagtctaaaaactggtctcaaggtgtaaggtcccaggactagtttctggagctactggcttgtgagtgaagctggaggcgcagacttcccgggtcacacggtggcaaggcagctgcctagggtgcggcgggaccgggcggcgcgggggggcgcctggccaagcagtgcagccccggccgggtttgtagccagcacagcacagcggggcctgtggcaccgactgggttcttttacttttgacacgaagcccctcccacttaccacgctctgcacgcgcccctgttaaaatagaaaaagaccgagaggcctcggagactcagtcatcatctgtggctctggccgctcgctgacgtggcgaactgggctgagggagcgcccggctgggcacccgagaactccagccgttccggcccagtcgccgctcagaggtggtaacagtagccgccaaggccgcgcacgggcgcatgcgcgcgtcggaccaaccccctccccccaccgcgcagtcacttccggcgcgctgggagacgtgcggttccgggtcgctgctcggctcgccggctgggcggtgggggttggtgacgcgggccggggctcacgagaggcccgggaggcggggctttgctggcttcccagagagaggcaggtgcgcgggccaggactccgggaatgcgagcaggccccttattctcccagtggcctcggtctgtccccacagcggcccggtcagggttgcccgagccccaaggcggggggcggcaccggggtgctgaaagggtgagagtgggggcggaggcgggctgccccggcctgggagtctggagcctagggttccgggattcctccctgcgcgaccttggacaagtcgctcctcctctctagggctcagtttccytgctgtcaaatgggagagatgttggatccttcctttctttgacagtccaaagcacgggcggggctggaggtagcctgagggagtgagatccaaactgccgtggcaggcacctgcctgcctccctgggggttagacatctgtctttacccaattttgccttgctttttgtcagtgcacatccgtgaccagacgcccagggtctggccgggtaaacagtatgtgagtgtagtaatcaactgagaaataaatactggctccaggaaaacttaacctcattcaaattgttttgctcagggctcccagggagaagtgaatttaggcacccgctgcggtgatcaattctgttctatgcgcttgtaagtgaagctcttaggcaaaaaacaatttcataggagatcagggttagggagggtatcccattgagagttgtgacaggttttcttaccccctttaatccttcttctgcccctcctcttccttcacttcttccccctatccccacccaacattttggccatacacttgaaaagaaatacccaatgcattttatctttgtcttcatgcaggacagaatgctttgacctccaagctgttttaaatctagtagataagccaggtgagtaagtggtttacacacattgaaagtaaagtttctgaagaattgtacagccttaatggaggatctgaagtggtaagatggcatttgtgtatctcagagcagagcttaggtatcctccacaaaacatggaaagttaaggttggaaccagaatattagtgttttatacaccattaggaggaaaaggtttttgaatcttactttgaatatcatgtcaaacattcttaagaaaagaaactgtgaggccgggcgcagtggcttatgcctgtaatcccagcactttgggaggccaatgcaggtggatcatctgaggtcaagagtttgagaccagcctgaccaacacggagaaacctcgtctctactaaaaatataaaataagccgggcatagtggcgcattcctgtaatcccagctactcgggaggctgaggcaggagaatcgcttgaacccaggaggtggaggttgcggtgagccgagatagtgccattgcattccagcttaggcaacaagagcgaaactccatctcaaaaaaaaaaaaaaaaaaaaaraaaaaaagaaagaaagaaaataaactcattggaggtaattttatcaaactcaaaaccacacagcgtctctagaaaatgttcaaggatatcagatacttatataatagagttgtctggtgtgtcttcttttttctgttaccagcttttcctattggacagttgattgcaaaccatcctgaaacagtaggatattacaccttttacatattgaattacatattgaatattgaattacatatgaattgaattacatgcatttttgtcttcaacttaaagaacactaaactgtagttaagcttattggaggaaggatttgaaatcattaagtcatgaatatatgatgttgatgtctgctctgggacattttaccaagtgtgttatatgtcatagccaacatgtaattaaaaaaaaaaaacgtagagatttgtgaatcagagtcctctgttcaaataccagcccttccacttagccacacaatctttggtaggttacttcatcttcttgagactgggtttcttcatctgtatatgcatatgaagcacctgagtgctttttaaatgtttagtaattgtgttctataagtgtacatgtaagttatgaaacttagttttgaaatctaaaacttaacaactcagatgcgaaatctttccaatgtttaacttttgaactgtctctttcatctgatttgtagatcctgtgttgccataagcccttggcccacatttaagtgggaatgcagctagcttggatgtctgaaactttgtaggcgcctctgtctgaatcctgaacacaggcaccaggactactgagagctcgtcatctgtgcaggatagccacacagcaaacatgtttgcaaaactgaagaagaaaattgcagaagagactgctgttgctcagaggccaggaggtgctactaggatcccacggtctgtgagcaaggaatcagttgcctcaatgggagctgactcaggagatgactttgtaagtacctttacttaagaaataaagatacttttgcagggtattcttccaataaatattttaaattgcttgattatttcatacctttcatggtttatagctgtacaagagcctgtacatctgattcttcttactctgaggtacctttttgttaatgtttggtttgtaaatgttaaggtactctatwtttttkscttatttttctgtgagttcctctccatattctctccagtgtcctcttgtactgtttttccgtctatataccttatacatcttcttttgcatttcatttctgaaaatgtctgggcctgttttcattgcagacatatatacttatataacaactaagtcattgctgcttaacaaggtctctgagttgtggtatggggttagcaagagtgcattgttgtattgggacgattgttggaaagatggccccagtgattacagtatgttgctttttttcttttttctttcttttttttttttttttgagatggattctcgctctgtagcccaaagtggagtgcagtggcctgatcttggttcaccacaacctctgcctctggggctcaagcaattctcgtgcctcagcctcccgagtagctgggactacaggtgtgttccaccatgcctggctaattttttgtattttagtagagacaggttttyaccatgttgcccagggtggtctcaaactcctgagctcaggcgatccgcccaccttggcctcccaaagtgctgggattacaggcgtgagccaccatgcccagcctacaatatgtttcttattagtaaaatacatttgtgactataagatttcaaaaaatgaagatgttgctatatgagggaaatgtcatgcttaaaaaataaagtgtggcttttgcatatgacaggatcctcttaagttagataaatttcttttctcttcttttttttttttttgagacagagtctcactctgtcagccaggccggagtgcagtggcatgatctcagctcattgcatcctccacctcccgggttcaagcagttctcctgcctcagcctcccaagtagctgggactgcaggtgcccacgaccacacccggctaatttttttttgtttttagtttattgtttttgagatagggtctcgctctgtcacctagggtggagtgcagcagcacaatctcggctcactgcaacctccatctcccgggttcaggcgattctcctgcctcagcctcctgagtagcttgggactacaggcacccgccaccacgtccagctaatttttgtatttttagtagagacagagtttcactgtgttggccaggctggtctggaactcctgacctcgtgatcctcccgcgtcggtctcccaaagtgctaggattacaggggtragccaccacacttggcaataaatttctttaaaactcatttataatrctggatatatatataaaagaatgtatgtaatatatatgtaaagtataaagcataaagtaaatctatcactcatctgaagagatagaacactatcaattctgttaagccacttatatgtttcttccaatttcctctacccaatttaggatagcataaccactattctaaattttgtatttttcatttacttgctttttaaaatatcttaccagatatgtatgtattcataaacaatttattatttaatactgcttgtttttgaagttataaaagttgcacactgtagacttcttggatttccttttttaaaatttaattcaacatgcttataaaatgcatccatgttacaggaagctgtggttcatttatttttactgctgtataagattccaggctggacacagaagctcacgcctgtaatcccaatgctttgggaagctaaggcggaaggactgcttgaggccagaagttcaagaccagcttgggcaacatagcaagactgcatatctacaaaagtttttttttttttttttaatttgcctggttggtggtggtatgcctgtagtcctagcttcttgggaggcagaggcaagaggatcgcttgagcccaggagtttgggattgtagtgagctatgatcgtgccactgtactccagcttaggcaacagagcaagactctgtctctaaagattttttttaaaaaaaagatcccagcatttgaaaaggccacatttaatgtctgtcttctcctggcgatagacatttgaattgtttccgttgtcagatgagtcttcctcctgctttcttgtactgcctggatcccaggtcagattacatggcagaagttattaggttatcgggatggagcaataagattaccagatctacattatcactggctcctatatttaagaggaaatataagcacacatttgagcatcgggctgaaggatgtagttttaaggctgggttctgtgacagatggacctgttttgccttcatgctgacaccctaaatgaagtcttttatttagtaatgtattccaaatacagagattgacccagattcaggaagtaatttattttggggtttctcaagttttgaacttaatacagcctgatcctcagttcctatctccagacccttatatccaactgcatatgtttctccaaacagatccctcctctgtggcatctcaaattctaaatgaacaaaattgaattcattatttccatctccaaatgtgcaccttcatcttcccaagtcaccagccagaaaccctggaggtattttaggctcttccctcctttcacttcttggtgtccaatcagtcaacacgtattatggcttctatttctttcttttttttttttttttttggagacagagtcttgctgtgtcgcccaggctggaccctgggttcaagcaattctcctgcctcactcagcctcccaagtagctgggactacaggcacacaccgccacacttggctagttttttgtatttttagtagagatgaggtttcaccgtgtgcccagtctggtcttgaactcctgagttcaggcaatcctcttgccttggcctcccaaagtgctaggattacaggcagctttcatttcttaaatgtctcaaacttgcctccctactccatcttctagtagtacatttactagcagaggttaagcatccctaatctgaaaatttgaaatctgaaatactccaaaatcttaaactttttgagcgccaacatggccacaagtggaaaatttacacataaatacttaacacaactttgtttaatgcatatcatttaaaatattgtataaaattatgttcaggctatgtgtataaaacgtatatggaacataatttcacgtttacacttgggtcccatccccaaaatattatattatgtatatgcagacattccaaaatctgaaaaaatccaaactccaaaacacttctgatcctaaactgtttgggcaagagatactcaacctatactatcatttgatttcaagctgcctttctttctgggacaaacttgtagtctatctgggttccctgtccccaaagtgacctttttttttctttgagacagggatctctttctggcacccaggctggagtgcagtggcccgatcacagcccactgcagccttaacctcctgggctcaagcgattctcccatttcagcctcgtgagtagttgggactacaggcacgtgccgccacacccagctaatttttgtattttttgtagcgacggagttttgccatgttgcttaggctggtctcgaactcctgggctcaaacgatctgcccaccttggcctcccaaagtactgggactgcaggtgctagccactgtgcacagcccaaagtgatctttctaaaagcagatctgttcatgtctctccagtacttaaaactcataaaactcagtggcttccccattattttcaggatgaagtacagactcattattatagcataatggtaaactgtcatggtcttctctcagcttatatggccagcattatctcactgtactttgctacaccctgtgccacagccagactgaatttattgcactttctagaatggaccacattctttcatgcttacaatttttgcacatgctatttcctctctctagaatgtctcatttcccctttcactcctgcattcctctgacagactcttgtgcatcttaagactcagctcatgtgttacttccagcaaactcccttgacctgaccttctcctctggcagccccctaccctttacccctcctggctgtttggtgccttgtcttctgctaacctctgtaatagcacctgctgtactgcattattattgatgatttgcttgtttgtctcttccactgaactgggagtttcatgaaagacaataaagtgtagcccttaggaactcaggtcaggttatagagtcatatctgctctattattattatgtgactttgggcaaatttcttcatttttccttgccttatttttcacatctataaaatggggataggaactgtatctacctttattaaagtatgtgtgtcaaggatccccaagatcatccccagatttaattattcactaggaggactcacaagactcaccatatagttttactcactgctatcatttattacagtgaaaggatctaaaacagactcagcaaagggaaaaggtgcatggggaaaagcttggaggaaacaggtgcaagcttccaagattcttctcccagtggaattacataggacatgctccattctcccagcaatgagttgtgacaacacatgtaaaatgtctaccagggaagctcattagagactcagtgtccaggctttttattggggactggtcatgtgaacaccctctgcctactatgtatcaaaattccagaatccaggccaggcagggtggctcacacctgtaatcccagcactttgggggaccaaggcagatggatcagttgaggtcaggaatttgagaccagcctggccaacatggcgaaaccctgtctctactaaaaatacaaatattagctgagcatggtgacacacacctgtagtcccagctactcaggaggcaggagaatctcttgaacccaagaggcagaggttacagtgagccaacattgtaccactgcactccagcctgggtgacagagcgagactctgtctaaataaataaataaataaataaataatccagactccagaaggaaaccaggtattcagcataaacccatatttttgcacaaacattttaggcacaatgagccattcttaacagaatgatgggaaccctcccaaaatctaagttcccagatgccagccaaggaccaaccttaaaagcaggcctttctaaggataacagtctgaggcctgtaatgtcagttcttctgcgtagaatctaaagcacttagcatggcgtctggctctaagcatttcataattagcttctgttgctgctgctgctgttattttggataggagctctttgtttcaccactattcctagtgcttagcacagtagkgagacataggatgtctcctatgtctcactaacagtaataatcataacagcttcttatactgctagtggtgtggtctgaatgtatgtctccaaaaattgatatgttgaaacctaatcactagagtgatggaatgaggaggtgaatcgtctccgagatgattagctcatgagggaggaaccctcatgaatgrgattagtgctcttacaaaagaggccccagaaagctgccttgccccttccaccatgtgagggcacagctagaaggtgtcatgtatgaaccagaaagtgggtcttcactagacaccaaatctgctggcaccttaattttggacttcctaggctccagaactgtgagaaatacatttctgttgtttataagtcacacattctatggcatttcattatagcactcaaacagactaagacaactagtaatagatgacacatattaaagctaatatgtgccaggctgtgttttagggatttgacaagtattgatttacttaatcctcatcacagctctgtgaggcaaatgctgtttgttatcacagattgcaaatgaggaaaccagtgcacagagaagttgagtaatgagcctaagttcttacagctcgtaagtggtaaagctgcaacctgaagcaaggttttctgacaccagagactctcctcttaactgtccactgtcctgactctcagtacatattggatgggcaagtggctggacatgtagatgaatatttgaggtgaattattgaataatctttaaaaacattttggggatacaatgggaaacatgattaaggactggatgttagtattttttgttaggaatgataatcatatgttgcctatgaagagaaatagccttaatttttggagtatttaggatgaaatgccatgatgtctgttatttaaattacttcagaaaaataaaaattgatgaagcaaataagggaaagcatcagcaattgtgaaagtagatggagagcattatttagaccaatctctctccctttctatattttgaaaaattgtataatgaaaagtaaaagagattttaaaaactgagttattagcaattgcaagcagtgcctatagcaatagtagtattcatttattttaaaataatctggtttgttggggaaaaatgtatgcctcattaatatattggtttgttgaatgcatattatctgctgaagtctatgatgcaagttagagttttagattgatatccgtttgtttcatagatgaagatactgaaactttatcaatatcggtgaaagattcgtagtcatagaccagcttttgatccctaaagaacccccgccttctttatcccaggactttacttttggaaagataaagtgatttttttatcatggcaaatatagtttttgtattatatacttgctgtaataatggatctatttactattatttatttcagtagcatgcgtacacataaaattgatctgtttagcatctcctctctccttcactttataagaggaagaaagcgttgcttccactttccaggtagagaaactaggcccagcttttcagtgattacaattaattaaagtgtaaccaaacctaaaataagacttgtcactttctggctcagtattgtggtctcacacatatatgaatacgaccttccttgtgtctacctcaacaggcttccgatggaagcagctccagagaagatctttcatcccagcttctgagaaggaatgaacagatacggaagttagaggccagactttctggtatgtctaagaactcataaaaagcaaacaacaggaaacttgccttgcttgactctcttcctataaaatagccatataggatgactttatagttattttcacatatcattttgatctttttagaaaggagcaagtataccctcttcttttgttagtgtagtaaatagtataaattcaaaactgaatttgaaagtttattaaaaaattttttctgctcctgaggtttctagccatggaaataaaagataataataatatatgtacaatagatttgaccatcttccaccattagcatagcctgctttcaggtggaaagggatggcgttagtatttaaagggaatggccracagatattggattcatcagcaccagagattggtgctgtgttgccacttcctgcagctcataccacctgtgtaagtgttgttgtaggtctttgggccacttttcaatggtatttctgacttcagcacctgcatagaaggtgtcactctcattatgtcttttgtctgcagtttacaatttacacagctcccattatatcctttgcctgaggagggcatggtcatgatagaattgtgagttattattttggtttctgccagtggatacatttggaaagcttcatcctgtaaagtggttcatggcttctgtgtctctttttgtcccttggccttttaatgcccattttattggagtaaaacagcagaccgaagttcaccaagtggtatgtgaaatatttatatttgtgtagctatcagacccaaattcaccaaattgtatgtgaagtatttgtatttatgtagttatcaaaggttcatagcatagctcacaactaccagttaattattttgtcctcactagagccttattaggcttagcaaggttaaggcctcacaagtagtaagtggtagagctgggatccaaacccagatttatttgatgctagagtcttaattccatctgccttaaacttaattgttgctatcctgytactcctacccataaataatatcagtaacagaggtaaagtaattttacatttgtttaatgttggagagagagttataaaataatatatataccttccccatatggtaggaagaatagttgagcttgacttacgttagagaagggacagggaagagcactgacatttactgggcccactatgtggtgagtattgtcctacagtattagtatgagtaatgataatagtcacagtaacaataagagctacattttattgagcactgtgtgcaaagcacttaaggcacgtaaaatgttttatctaatgcatcttttgtggtaggtacaattaatatcatcatttaatatatgaagaaactaatactacaggaccaataatttgcttaaggtccccagctaaggactgacagagttgggatttgagctactatgttttcactaaaccataactatcttctttggccacctagataattaattctgacattcacatttaatgtagcgtaggttaccaagttcctgtgtagaaagggagctcacttttttagagaattaagtgctatcactataaagacaatgctgcacctaaggtgtttgttattgccctaactactgttcctgagttgtgtggactataagcgagctgtttagtgagttcactttgatctatcctactgctaagaccggaaaaggaagtggaaactgagatttgaaattaagtcatgagataaatctgtgtttttcatagcaggacatttctgatcaccaggctaagcctaattcttgtttttctatcaaggctaaacaaacttgcctttttgtactcaccatttatacaccatggatagtttgtactatacttgttttcctgtgttgttcattgttaatgggaggctgtctgtctagctttccttaacaggaatggttttcaggttaagaaaatcatcatcatttccattcatttttttgtttaattaacttcctttcctgatgtttgtccatttctggtatgtgcgtcaccctcctcacccaagactatgctgaacaggtccgaaacttgcagaagataaaagagaagcttgaaattgcattagaaaaacaccaggattgtacgtatttttttcctgcttttttcaatcttttcaaggtttagtttttgaaatgaaacartagtgtatggttaagtttgtccttcttcaaagcacaaatctttattttataagtagtgtacttcttaatcaggttgatataacatttggatgatatttataagtatgcaagttttatttatgttggcttatgggcatgactcttaggagtaggtcattatgtgtatcagcttgtctctatccagttgacccctttatttaggctaccctcaggttttaataaaatctagtacccatcccttaggtctggattaggaaatgggttctcaccacagcttcattactgctgtgttgagtaactgggagaaatccctgtcatcactccctcagcaataaatcatacattttgtgtagtctaccctcaatcatatattctttgggtaccatccaagaaagatgttagtagaagtagaaagttattttttttgttgatatgtactaaaacttttaaggaaaataaagtaaaagaaaggttttttgtttgttttgatttttctttttgtttttaattctgataaagtggtagtagccatcacttagcatcagctttgatgttttctggcaacctacctaactcagtgttctatcattgtaccatttaaaaagttaccttttggcatctttgtaaatatatatacttgtctattacaaaaaacaaaaacgataaggaaacaaacaaaaactgtggtctattaccaaggccaaaatattcttctggaaagttgaggtggatccagcttttcctagtatcacaatccacttatgtgactttggcctttttcattaggtgacagttgtaatcacatgggctatttgtcatgctgtttctgaagtgttttcatatctcaaatagagcctctttgttaacagcttccatgcggaaatttcaagagcagaatgagacattccaagccaacagagccaaaatggcagaaggactggctttggcattagccagaaaggaccaggtattttatatgtggcactgcccagaactggtggaaagatttcacttagtgacgtgatttcaaaaatcatgacataacctatagaaaatatttatagcctaggagaagagaaatgttaaaagttcgttaaggttttctttggccttttcttgtaaagtgaagaaactttacagttctaatcatgaaatgtgtccagaatgtgagagtatcattccttgtatctgtgtagtttcataaaattgagaagggaaatagtgtatctgtaatctgatggcaggccccaaaataagagaaaaggtctctcccctctaaaaacctctctgaaagtctaacccccaaacatttgccttttatcctggagaagatgttattaacttagtcataatccatagtatacagagttcttccaacctctgttcccacgtttcttcaatcccaaccagcaggacagaggggaaatcctataatctcagcagaaccaaccactggaagatgctgaatgaataaccacaaggaaggaaaataattctgttactggctattacagtaattatgaagtatattttgttcaaaataatagatgacattttaaatttaagataagcatcaatatattataatgttaattttgatttattaagacagagtttattatgtttcacttaagaaattgtataatttatttcatctggaggaggtgggttggttggttggttttaaagtgtctgttcatcatctaggacatttactagccagaaaaaatacaatttaccaatacttagtggataactgtggtatgaatgtatataaatgaagaaataatctaaaattgatggattctgattataggcaatcaggatattgcctttgtgcaaatgggctttttttcccactattttatggtttgtgaataaggggcataattctttttcttttgacttacacagatggcataaagcatgttggtaaaatcaaaatgaaaaggaaaatgattatcagggactgcaaaagatcccccctactcccccagtttcaggaattaatttctaaacatcatttccagaattactcaactcagctggtcccagctacccactcccaagaaataacagtactcatggcaaaactcccaggaacaagccaaaaagctgcatcagaacagcagatacagcttttcttgggtgccctgcttagtaaaaatctgcaggcttatattcatgaattcattccattctagaatcttagataaagttcattttcttctatttttgtgactcttgcctttcttaatattaaaccaagtttatagatttttttttaattggcttttttgttttgtttggttagttgctttctgggaagagttgggttgttttgttttctgaaaatcttggtattacagatactcttcactggaaaccatacttttttattgttttgttttaggaatggtcagaaaagatggatcagcttgaaaaggttagttcatctttatttttrtctcatttttgttggtctcgtctctggggtatggaaaacgttttatccggtaaccaacatactgattgctataccacctcttggaagcaggacagtttatgattagatactgacttgaaaagctctgatcctccccttttttggtgaatgtgcaggatgtcttttgtttgcccctcttgatatactctgcactcctcctctcttccctttctctgtgtacctgaacgccgatagaaactgtatcagcagggctcagaatgccctctggcatccggttgggttcagccagtggggaaccctgaaagaaccatgtgtgaaagaagatgtggtcaggatgtttcttcccccacctytctccatgtgggctctcttcagcttagttgcatcccatggccaaagtcacagcttcagttggaccttyggtttgccttcttgacatagtttttgtctctctgggtttcctataacctcttcatctttttgcctctttatggccaactgttgccagcacattatcttttgggctatcttacccatcccacagctttgataagcccctttattaaaccatcctcaaaatgcctgatttgagatggccgtctctttcctgctgcggttctgattgacacgtggtaatattaggaacacttaaagatgaagcagtggggaaggaaggcatttctcaaggctcagcattgaacatatatgagaacctcttggctagatgtagatgaggaaattgattattctagtaccattgcttgcataacaccgtacaggtaccttaagtaatatattcctggctcccacatataaacgagatgaaatttcaagtctacaattggaaaaacattttagttttaaaataatcattagtgtcaactattttttttccataaaacaccaagttaactttactttctgttctatagaaatctgattatcaagctgaragaatacattaactttttttgagacaaggggttgttctgttgcccaggctgggagtggcacaatcacagctcagtgcagcctcaacctcctgggctcaaatgattttcccacctagacttcctgagtagccaggactgcaggcttgagccacagtgcccagctaatttttaaaaaaattttaatagagatgaggtctcactgtgttgcccaggctggttttgaactcctagaccaaagtgatcctcctgcctggcctcccaaagtgctaggattacagtcgtgagccactgtgcctggcaacagttttatataaggaaagaattatagaaaagtcaagtcccaaggaaacctgtgcttgaaaaaaaaaaaaaaaatcctcaaccatatgctattaatgacagtcttcttaaatatggagatatgggttgggttaaggttttcttgctgtaaaagaaactcttaagattatggcaattgaaattctcattgaactgtttttttatcttttaaaattttggtaaagggtatccatataggactgaaccaactaaaaaacctacttaggttcacaaggttcacaaagggaattttctctttgttttgtttttgttcttttgaaggagaggttggggaaaatttttcttttttttttttgagacggagtcttgctctgtcgcccaggctggagtacagtggcatgatcttggctcactgcaagctctgcctcccgggtttactccattctcctgcctcagcctcccaagtagctgggactacaggcacccgccaccacacctggctaatttttttatatttttagtagagacagggtttcactgtgttagccaggatggtctcgatctcctgacctcgtgatctgtctgcctcggcctcccaaagtgctgggattacaggtgtgagaggttggggaaattttctagagtaggaaatagtaatgagacacctatataggtcttcgaagctacttttcatcgttaaagttttttttttttttttcagtcaagagttagaaactgtaacagaagggttagtccttaagagagtccttttttctttttttctttttttttttttttgagacagggtctcaccacgatgcccaggctggagtgtagtgcagtggcacagtcatagctcactgcagcctcgacttctcaggctcaggtgattctcccacctcagcctcctgagtagctgggattacaagcacatgccaccatgcctggctaatttttttgtattttttatagagatggggtttcaccatgttgcgcaggctggtctccaactcctgtgctcaaccgataggcccaccttggcctcccaaagtgctgggattagaggcaagagtccactgctagaaatgatcatttaataaattgtaacctgctgacaccagtcatgtctaatttttttttcttttttttagcttgttaactgaaatcagttctacttttaatctacgtgcatttaatttttttcaggcattcaatcttactggttactcatgtttttcagccagttcagtgtgtcactaagaatagacatgtaaaataaggctgggcacagtggcttacgcctgtaatcccagcactttgggaagcagaggtgggtggatcacctgaagtcaggagttcgagaccagcctggcaaacatggtgaaacctcatctctgctaaaagtagaaaaattagccgggcatggtggtgcatgcctgtagtctcaggtactcaggaagctgaggcatgaaaatcacttcaacctgggaggcagaggatgcagtaagctgagatctcaccactgcaaaccaacctgggcaacagagtgagactctgtgtcaaaaaacaaacaacaacgacgaaagartagacacataaaatatatatctggacttgctaaacagatgtaagaactttaaagttctacataggccatgcacgatggctcatatctatcaacactttgagaggctgaggcaggagaatgtcttgaggccaggagttcaagatcagcctggataacagagcaagatcctgtctctaccaaaaaaaaaaaaaagttctacgtaattgttgcttttattcccctttttcacaattatttaaaacacatttatttttaaataaagaattaaattctctagttaaaggattaattcaattaaagaatttgtaaataatgccatatttctgtaatgctttccattatcaatgcatcattgtccactggcatgagatttcctgaagatttttcctttattaagaattccactttcaggccgggtgtggtggctcatgtctgtaatcttagcactttgggaggccaaggcgggaggattgcatgagcccaggagttcaaggccagcctgggcaactagtgagactctgtctctaaagacaaaaattttaaaaaagaaaagattttcactttcgtaatacagatttctaatgctttcgttgcctgagttgatgtcttcttctttcaartaggagaaaaatattctgacagcccagttacaggaaatgaagaaccagagtatgaatcttttccaaaggagagatgaaatggatgaattagaggggttccagcagcaggaactaagtaaaataaagcacatggtatgcatttttgttttagtagctaaatactgaatagatgattattcactctgattttactagtcatcactctctaattgctgataaacatacaccagtaatatgtgatattaatcatatttgatattaatcatatttgtatgtttttaaatttattaaaatagaaaagttctgtttaaaatgttctttttctgttttgttttgggttttgttttgttttgttttgttttgtttttaactactgggtatataaattctcttataagcccacaaaaatgttatagaaatttggctattggtccacatttttttttttaaatagatggagtctcacggtgttgcccaggctggagtataatggctactcacaggtgcgatcatagcacactgcagcctcaaattcgtgggctcaagctgtcctcccactttagcctcccaagtaactggaactgtaagcatgtactgtaggtgtgtgccaccatgcctgacaagcttagatttttttttttctttcctttctttctttctttttttttttttttttgagatagagtctcactctgtcacccaagctggagtgcagtggcatgatcatggcccactgcagcctcgacctcccagactcaagggattcttccacctaagcctcccgagtagctgggactacaggcgcactaccatgcccggctaatttttgtattttttgtagaggtggtgtttcgccatgttacccaggctgctctcaaactcctgggcttaaacgatatgcatgcctcaacctcccaaaatggtgggattacaggcgtgagccaccgtatccagccgagatttaagtgtatttttcttttttacttcttttttttttttgagatggagcctagctctgtcacccaggctggagtgcagtggcgcgatcttggctaattgcaacctccacctcccgggttcaagtgattctcccgcctcagcctcccgagtagctgggattacaggcacccgccaccacgcccggctaatgtttgtatttttagtagagatagggttttgccatgtcagcaaggctggtctcaaactcctgacctcaagtgatccacctgcctcagcctcccaaagtgttgggattacaggcgtgagccagcatgcctgatcttaagtgtatttttcttagcatagcccaatgaaactttgtatttttgtgtcagcttttaaaaaaagaagaaagtctagggaaaatggaacaagaattggaggcacgaaccagagaacttagtcgtacccaggaggagttgatgaactccartcagatgtcatcagacttaagccagaagctagaagaattgcagagacactactcaacgctggaagagcagaggttcttgcttggtctgtggggcccttgggaagaggtgttagtgtagttctggctatagcctgcccacctttccccattgttcattacaccactttctgattccggtgctggcaaaggcttctggacacatccttacctgcctaggactcaggcctcaccctacctccaacccattttccccttcagctgctgaaactcaggacagttccaccctgctgaacaattcagtgtggttttagtttgtaaagtattaatagactaaggaaaggcaggtcaggatttctttcttaaactagggtggactttttctctttgggctcctgcttcagagagagccgaggctttttccgttgaaaacctgcatgtggctaatgatgcttgtagccctgacacagaagaaaccatttgtatttttcctgcagaagactgtatattagatgagatatccaaatttgttcattgtctgctttcttttgatgaagagatcatgtgatagcttcaaaaacaggtgcagaaagtaagatcacagccctggaacaaaaggaacaagagctccaagcactcattcagcagctttccattgatttgcaaaaggtaagtagaatatgaggagaagacctggatttctaagattcataaaaactaattctttcagaaatttctgcctgagagtagctactgaacatacatttctcatgcagtccacatggctccatttcctgtactagccaggctgcactcagatggaaatggccatacagctgaacaagggttgcttagcagaagtagtcagtattttcctgtcaggaattctcaaagtacaccatttggtcgactcaaatatgtctctcttttttttttttttttctttttttttgggacagagtcttgctcttgtcgcccaggtattataggcgcccgccaccacacccggctaatttttgtatttttagtagagacagggttttaccatgttggccaggctggtctcaaactcctgacctcgtgatccaccaacctcggcctcccaaagtgctgagattacaggcgtgagccaccgtgcctggcctgactcaaatatgtctttaagcacataatggaccttgagcatgaaaaatacaatagtggctgacatgaccagggctgtacctttgacatacttggctctaatccagtttgttttatggcacgtaatcaaatgatgtcattacaatttgttttttcatttcattgacatacatttgtttctacattagggctgtgctacactctgagaatataaagatgaatgataatatttttgaatataaagtagtgtttctcaggcccagcacagtgactcaagcctgtagtcctagcactttggtaggccaaggcaggaggatcacatgaggtcctcctcttgaccccatctctaccaaaaaaaaaaaaaaaaattagccagttgtggtggtgtgcacctgtagttccagctgtttgggaggctatggtgggagaatcgcttaagcccaggaattcaaggctgcagtgggccatgaccatatcacagcactgtagcccaggcaatagagcaagactatctttaaaaataaaaataaggctgggtgtggtggcgtgcacctgtaattccagtacttgggaggctgaggcaggagattcggttaaacctgggaggtggaggttgcaagtgagctgagattgtgccactgcgctgcagcctgcctgggtgacagagagagactctgtcttaaaaaaataataaaataaataaataaataaataaatataaataaaataaagtagtatttcccaatgacataatttattattggcattttgagcagaacaactcgtattgtatgattgtccattgcattgcgcgacatttagcattcctggcctctgggttctgaatgccaatagcatccttcagtcattgacatccagcccttcccctcacatcacagaaccaccccctattcggcagtgccatccaccctaccctcatctttcagaawtgctgatctcaagtgagacagagccttacaacataattacagtacagtaagattttgtcaatagaggtcttagctaagtattatcatacttacagatacctaagtggaaactaagaggttattgaccttgttcacagttataaccgtaagtgacagagttggattctaacccaagtcttactccagaactcatgcttattctactgcactttgctgcctcacaataaggagcacccagtaaatatatacgtgaatgaatgactgtgatacaggctttttaccctcaatgaactaaaaatctcaatacagacattgttttccttcagaggcttacagtttcattatagaactcaaacctactgtaatcacaagaaaagaaatgctcaaacaagaagtctcaagtaagtgaactaggtttttcttttttcttttcttttttttcttttttttgagacacggtcttgctctttcacccaggctggagtgcagtgacgtcaacggctcactgcagcctcagcctcccaggctgaagtgatccttccacctcagcctcccaaatagctgggactacagacacatgccactacaacaggctaatttttttttattattattatctgtagagatggggtttcgctatgttgcccaggctggtctcgaactcctgggctcaagcaatccacccgcctcagcctcccaaagtgctgggattacagaggtgaaccaccacactcagccctagatttttcaaatacaaaagatataccataggggaagtacattccagcccaggagtcaaggaaatcttcctagaggaactggaatgtcaaggatcaggaggacagcaggaggcagaaaaggcagaaggtcagagagtacatttggggtcatggaagaagggggaaaatagatacacaactttggtttttgtattattttgtttttttctgagacagggtctcactttgtcacctaggctggagtgcaatggcgtgatcttggctcactgcaacctccacctcctaggctcaagcaatcctcccacctcagcctcctgaatagcagggactacaggcaccaaccgggctaatttttgtatttttagtagagacaggatttcaccatgttggccaggctggtcttgaactcctggcatcaagtgatctgcccacctcggccctcaaagtgctgggattacaggcacctggccacaactttgatagtcaagggaccctttgatgtcaattagaaccatctgttgtttttataattggaaaaatggggctcagggaagtccagactttggtcacagtaagtttcttcattcattctaaaaatattagttgagctttactatgtgctgggctctgtgctgggtgttcataatattatggtgagcaaaatagatacagttcttgcctttgtggtgcttatagtctagaagggaagtcagacattaatcagtaatcacatatataattactaaccgtgatgagtgttctgaaagaaaactacgagatttagtgagatcctattaaaagatatcagatcagggctgggcttggtggcttacgcctgcagtcccagcactttgggaggccgaggcaggtggatcacctgaggttgggagttcgagaccagcttgaccaacatggagaaaccctgtctctactaaaaatacaaaattagctgggcatggtggcacacacctgtaatcccagctacttgggaggctgaggcaggagaatcgcttgaacccaggaggtggaggttgcagtgagccgagattgcaccattgcactccagcctgggcaaaaagagcgaaactccgtctcaaaaaaaaaawawatatatatatcagatcagatccagttggagccgtagaacacttaaggaagtaacactcgatacagtgctcaggctggagagaaagggatgatgggagagaatttcaagcagggaacagcatgaacaaaaactctgaggcaaataaaaggattagcacattcaaggaactagaagaaagccagtgacatacagaataagagagaataacagattactctggccgttaggagactgagagggtcttccacttaggaagcttttgcagttgttcgaccrtaagatgatggaggctttgacaagtgtggtggtgaagataataatgggtagacaaatgtaagaactattgaagagattgacagacttactaatgtaatagatatgggaggacaggaagagaaaagtctgtatttttatgggtgatttatgggcttctggcttgggcaaaagaagggctggtattgtgtgaagattgtaaatttggaatttgtttttttcttgtctttattgagtatatataaaaacatatttataaaatatgagtatgatagaaagtataataaggcaatgagccctctgagctatccctcaggttaagaaaaagaacaatgtgtttatctttgaggttccctctgtgcccttcactattccatcccattcctttttcctttggaagtaagtactatttggagattgcttcattgtctactttgctttctaatgttgtcagttttatccctaaactatcttctttagtttcccatgcttgttaatgttatataaatcattctgtaggtatttttctaaacttactttttgtgctcaacattgcactcctgaaaaacattcatatgatacctggagctataatttattttttctcaattatatagtaatatagtagggacataccaaaattttaatttttgtcgatggtgggttttttttttgttttcgtttttttttttttttttttttktktgggtgtcagggtctcactctgtcacccaggctggagtgcaatggtgcaatcatggctcactgcagcctcaaattcctgggtgtaagtgatcctcctacttcagcctcccatatatctgggactacaggcttacactaccacacctggctaattaaaaaaaaatttttttatagttaaggtctcactatgttgcccaggctagttttgaattccaggacacaagcaatcctcctgcctcagcctcccaaagtcctgggattacaggcatgagccactttgcctggcttgtgaagatttttaattactgaatagatttccttaatggtaattctaagtttatgtatttcttcctaagttttgttaatttatatttttctacataattgttcatttgctataagtttaatgttttggcattgtatttcttatattctttttttagttgctcccctatcttcattcatagtagtatttatgcattttctatttttttctagtttattcttaccagatgtctgtcagtttggaaacaaaattttactttaattcttttcattttgtttttatttaacccacagtgttcagaattacacattttttactctactggatagcagttcctcaactgtagccattatctttcaacttcccaatttatgttcttcctaacctgtattgtacttaacacaatattttcatggaattcaccttacttttttttttttacttaaataagtatatttatgtatttatttatttatttatttatttatttatttagagatacagtcttgctctgttgcccaggctggagtgcagtggtgtgatcttggctcactgcagcctccacctcccaggttcaagtgattctcctgcctcagcatcccgagtagctgggactataggcacatgccaccatgcccagctaatttttgtatttttagaagagacagggtttcaccatattggtcaggctggtcttgaactcctgacctcttgatctgcctgcctcggactcccaaagtgctaggattacacacgtgagccaccacgccctgccatttattttattttatctatctatttatttatttttgagacagagttttgctcttgatgcccaggctggagtgcagtggcgcgatgttggctcactgcaacctcaaccttttttgttttcaatttttttacttttgtagagaaaagatctccctgtgttacctgggctggttttgatctcctggctttaagcaagcctcctgcctcggcctctcacagtgctgggattacaaacataagccactggtctcagcaccataaatacatttataatgaaggaaaaaaaggcatgttgggagaaccaaaaggatagacaagtggttaacgcttagaaaggaagtggaaacggtgctagatgaggctgggaaggtatgcagggccagttgtatagactaaatagtgaacatgaaatttcataaataatcattagtgaatatttaacaagaatagctgagcatttaccctgagctcagtattcaagagctttacagatagggactcatcgagtcctcacaactaccctttggttagacagtgttttcctattttacaggtgatagtaatgggcatctgacatcaaaggctaaatgatttgtcaagaccgtacagctggagtcaatgacagagccaggattcagactcatgtctgtctgaatcaagtgaccaccacccagaattgatgcagtccatattctgggactataactgtgagacccagactcgggagggagtaggtgaagagggtgatcattaggaaaggggcaggtttgatgtcagggagtatggcttggtaactgttcccgtagtccacatgaggtgtagagggcctgaagtaaatcagccagcctggagaaggagatcgcatatcartatgttgcacaagaggcataagtggaacttggccactgattctttttctgtccctaactttgcctaacacagtgacctgtgtaagatgtgttgttttggttttaactggaatgggtcatctatacctcttgaattcagattgatgtgtaggggaacaaatgcagactttggatccagaagacctggatttaaattcttcatctatcgctaataggtatatgcctttgggctagtccctaagcttcagtttccttgtaaatggatgtgataaagagcatttgtaaggactagacataataggaagtgcttgcagcgttcccttgaccctatatgtctgtctttacgctattaccacactgtcttggtcattgtcactttagagttgaaatcaggtaatgttctccaactcttacatcaacagttactctttttctttcctttttttttttctttgagacggagtgtcgctcctcgctcaggctggagtgcagtggcgcgatcttggctcactgcaagctccgcctcccaggttcacgccgttctcccgcctcagcctcctgagtagctgggactacaggcgcctgccaccacgtccggctaattttgtttttgtatttttagtagagatggggtttcaccgtgttagccaggatggtctcgatctcctgacctcgtgatctgcccacctcagcttcccaaagtgctgggattacaggcgtgagccaccacgcccagcctacagttattctttttcaagattgctgcagcaatcttgttatagctgcttctgctatattacagttataactattgctagtattaacattagtaataagagacccataaagatgggtcaacatggccaaaactggctttttttttcctatcacactcactcactttcctgtgttatccaccttgcataatgttaccatttgcccaggtgtctgagccacagacctgagagttgtgttcagctgttctttcctcctcacccagcctctagccttgcaggacttgtctgttacctctttgtatgtgctgccctttatgcagaatgattgttcctcttccaccctctttcacctggacttgcccattcaggaggcctgatctgattctcccagttaatccctcttgcatctcatatctcatagcacggtgtgtgtccctctgttgaagcacagttgttttgtaattagktgtgtgtctgtctccaccaccagcctccatgctggaattaatgttgattgtatcctcagaaaacaacagatagagttcaggcttgatgaaagtttattgaattgtggggtcataaatctagtcttcagacttcccctccactatctctgttgtccacctgtgagaattcagaatggcaaatacttcttcccaaaaccatacaccctggttgctgcatcttatcctgaggagagatcggccaagttacaactgaacatgaaagtttatggcttgaaatggagcaacggaagtgtaagataagggaatttgagggaacagagtacatgtaaagaggtacaagtcttcacagtgagattttgttgccctacaaccttttctggggaagaatgggcatcctcagtggggatgtaagaactcatgtattcaaagcttcctggatcctctgctttgacattgagcagtgatatggttaggctccgtgtctcatctcaaattgtaatgcccacatgtcaagggagggacctggtgggaggtgatcggatcatggaggcagatttctcctttgctgttcttgtgatagtgagtgagttctcatgagagctgatggttttacagtatggcacttcccccctcgctcgcttgctctatcctgccaccgtgtaagatgtaccttgcttccccttctccttctgccatgcttgtaagtttcctgaggcctcccagccatgtggaactgtgagtcaattaaatctctttcctttataaattactcagtctcaggtattctttatagcagtgtgagaatggactaatacaagcagcagttgaagattagtagcagtaaaaggaaccaagttagtcccaacctgttgctaccaccactaccatcatagctaaagagatagactggccaggcacagtggcttacgcctgtaatcctagcactttgggaggccgaggctagtggatcatgaggacaggagattgagaccatcctggccaatatggtgaaaccccgtctctactaaaaatacaaaaaattagccgggtgtggtggtgggcgcctgtagtcccagctactcgggaggctgaggcaggagaatggcgtaaacccaggaggtggatgttgcagtgagccgagatcgcgccactgtactccagccaaggcaacagagcgacactccgtctcaaaaaaccaaaaataatagattgaaataaaacgggcagctgttggtctaaagccaaggtatgagaagcatggcagctctgctgtggtccctgtcctgtgagccaggtgaatctcatcatttcagaagttctctctttagccttaaagccactacatcagcactgttactgctttatccagcccctcagctttcaggagcattgttccataggtcattgcaggctgagtgcttcttggtgggattagttctgctgcctctaccacgtaggtaatgcctttgttccagactgtcagttgtttaattgggaagagtgtttgcttcttgctgcactaggtctgagctggatccctgagttttgccaggttctaatcttgcattttctgtatcccattttcaggaagatctcttagctgtttgttcttctaggatacagttgaggacagagttgcaggaaaatgtgatggcccaaaagaaagcaggaaggaaggaagagagggcttctagtatagagtgatctctgctttcacctgcaggtcactgctgaaactcaagagaaagaagacgttatcacacatttgcaagagaaggttgcatccttggagaagagactagaacagaacttatcaggagaagaacacktgcaagaactcctgaaagaggtaacttctgttctctttgggctggctggtrttggaaaggcagggttgattctggtgacttcacaattcctagagtttcagagctgtagggccagcaaacagcatggtaacaaaagaagtgtctccaactttggcttgtyctgcttacatcagaaagagccttatgtcccctgtgggtgacatgcttttctcagggaaagggagagctgtattcagagatacatacaaacrgatagcatctcatcaccaataaaccacacctagtgatttccgccacttgggctgccttgtctttctgcactgccctcttccccaccattttgtactctgcagtggccaaggtaaatagctacatctgccccttggcaaaagcaagaattaccttgggcagcattctctccttcccaagggaggctgttgtgcagactggcctcttccccagtggtgcaagggaactttctcatcaggctgagctcattgtctgcacacattctgctcttccctctctttctgttccagtgattggccacactgtgacaaaggtgacaaagcccaggtcatgaggctcctagattagaccctccctttctttcttcagtcagtttcaactaaatacctccatctccagtgccactggttgtacttcagggtttccagcaaatctagcctagtctatgttagaagtctccagattggcctacccagcatcagtctctcttccttcactctctgacacagtctcccacgctcactgccaaactgatcctcctaatcagcactggtgaccatatcackctcttaaacatcttctacaattcccttcaacagtctacaggaagtgtaatgtgggttctagggaataaattgatttctagaatcagaatgtccatgcttgcattttgcctcttctgcttaccagctttgacttggagcagcagttcccaaccsttttggcaccagggactggtttcgtggaagacagtttttccacagatggggtcaggttgggtcgggtgagggggtggtttcagaataaaactgttccacctcagatcatcatcgtccctagattctcataaggagtgtgcaacctggatccctcacttgcacagttcacaatagggttcatgctcctatgaaaatctaacaccaccactgatgtgactggaggcagatcttaggtggtagtgcttactcaccactcacctcctgctgtgcggcctggttcctaacagactgcaaggtctgtggcccaagggttggggacccctgacttagagcaagtaatttaatctctttgtgtttgcttcctccccaataaaattggttttattatactattaaactcagaattgttgttagggttaaataagttacaatatgtgaagtgcttagaatgataaccggaacagagtagggtctcaatgtatgtcagctgtaaacatgatcaatattattattgtgccatcatcattattataatgtttaatgtgcatagaaattacttgggaagtttgtttaaagtatatatctctaggccaggcgtggtggctcacgcctgtaatcccagcactttgggtakccgaggcgggcagatcacctgaggtcaggagttcaagaccagcctggccaacatggcaaaaccccgcctctattaaaaatacaaaaattaggccaggcgcggtggctcacacctataatcccagcactttgggaggccgaggcgggcggatcacaagatcaggagatcgagaccatcctggccaacatggtgaaagcccgtctctactaaaaatacaaaaattagctgggcgtggtggcacatgcctgtagtcccaagctactccggaggctgagggaggagaattgcttgaacctgggaggttgcagtgagctgagatcatgccactgcactcctgcctggtgacagagcgagactctgtctcaaaaaaataaataaataaataaattagctgggcatggtggcgggtgcctgtaattcyagctactcaggaggctgaagcaagagartcacttgaacccaggaggcggaggttgcagtgagccaagatcgcaccactactttccagcctgagcgacaagagtgaaattccatctcaaaaataataaataagtaaataaagtatatatctctggccctaccctcagaaattctgatttccttaggcttggagcaaggcctcaaatctgtgcaactagctgagattaacaactatctcagtaacagctatctcagctaagtctacatttctttttttttttttttttttgagacggagtctcactctgttgcccaggctagagtgcagtggcgtgatctcggctcactgcaacctctgcttcccggggttcaagtgattttcctgcctcagcatcccgagtagctgggactacaggtgcacaccaccacatccagctaatttttttgtatttttagtagagacagggcttcaccatgttggtcaggctggtctcgaacttctgacctcgtgatctgtccacgtcggcttcccaaagtgctgggattacaggcgtgaaccaccgctcccagccccatttttttttttaagacagagtctcactctgtcacccaggctggagttcagtggtacaatctctgctcactgcaactccgcttcctgggttcaagtaattctcctgcctcaacctcccaagtagctgggattacaggtacccaccaccacatccagctaatttttaaaatatttttagtagagatgggatttcaccacgttagccaggctggtctcgaactcctgacctaaagtgatctgcctgcctcagcctcccaaagttctgggattacaggtgtgagccaccacacccggcctagaatttctactttgaaaaatgttgcttacagaatcaagttctaactcctttttgcaacattcaaaagcttctcatgagctggcccttttgcctatctttctagtcttgttttttgacctaaacccatcatcattttggcttctgaggagtagtagttccctcaacgtagcaggctgttcacatagccgttggtcatccccctgcctgggaggctccctgaaccctaacgactttgtgagttctaaagctgcctacctgccctgtggcagggagtatctcccaycctgtgcttcttcctctttgtggacacttactgtactctattgtgtaattttttattagtcttttgttccagcctcaaggtcaagggactatttcaaatttatctgtgtgtactttatgatatgtgaattatttctcaattagctgaattattaaaaatgtattcatgtctcttgtgcctagcacaagtcacaatatgttgtagataatctgtaaatatttattcaactgaggaatgatagtcttcttttactcttctttcaacttacagaaaacayttgctgagcagaatttggaggataccagacaacagctcttggcagccagaagcagccaggctaaggccattaacaccctggagactcgggtactgaccttactcctggtgtttcctaagtttgggtggtaacctggctgaatggcaacatggtgtgactgagaatcttcttggtcagagttttttcactagaagggattatttttggatcttacctatacagggatgagttagtcattttcttcatccttgtcacattactatgattgagttatatgtttatttatacccttttatccccattggcctccctcccataggataccattccgttgtggttcatatagatgctctttttgttgggttgyyttaaaatatgtagcactgggtttttaatttctgtaaatgatgcagctatgggtatgttttctctattacttttagctgcctcaacttctgtctgtacccacttcattgtactttgtagttatctatgtggtagacatccagattgcttccttcttcctgccacctcagatcatgcataaaacctaaagagactaagtactataggagaagattgttcccagcaagcctgcacctggctctcctcctccagcatgcatgagcgttcctatatatgcmtttctgacttttccagcattggcatttccaagcctttacaatttttgccagtttactgagtgtsgagtggtatttcattgctttaatttgcattgctatggtgattaatgagtttggccttgtcttcatgtgcctgttaattcctgggggtttctgcttttggaattgcccattcatatcctttccttattttctttgggggtttcagtcttttcttatttggtttgtaggatttcattgtatattcttgttcctaatgctttatcagtttcagtcctgagtcattctgttaactttgtccatgtatcctttgttgaatagactttcttaagttcagtgttaccagattcatcacatttttgctgtggagtttgaagttccatttagaaaatctattcctgttcctaagtcacagagatctactgttttttccctattaactttataatttttccttcacataataaatctctaattcacttacaaactgtctttctgtatggtcttaggtagggatctaaatatggagaaattctgcatatttctcaaaatcatttactaaacagyctgtcctttctgaattgattcctcttgctaactttatcacgtattgtttcygtctgcacatgggtttgtctctgcattctctgtccattggtctgattgtctgctcttgtgtaaacactacaatgtttttattactatagtgatatctgtactatatctcaacacccaataagacaaattctctttttttttcaaaggttgactttaactatttatgggcctttaaaatttttaagtttttgagttactaaaaaattcaacttgaatttttattgggattgcattaaatgtataggctaattgggaaaaattgtccattttataatattaattattccttctaacaatgtaaatatattccatttattcagattattttctgtgtgttttattaaaattttacatttttctcaatagatgtcttattttcttgcctaagttgctaattcctagaaactttagagtttgtgttgatactgtgatggtatcttttttttcttttgagacagagttttgctcttgtcacccaggctggagtgcaatggcacaatctcggctcactgcaacctccacctctcgggttcaagcgattctcctgcttcagcctgccgagtagctgggattacaggtgtccagcatcacrcccagctaatttttttatatttttagtagagacagggtttcatcatgttggccaggctggtctcaaactcctgacctcagatgatccgcctgccttggcctcccaaagtgctgggtttataggcgtgagccaccgcgcccggcctgtgatggtatcttatttttaatctttctttttttttgagatrgagtctcactctgtcgcccaggctggagtgcagtggcactatcttggctcactgcagcctctgcctcctgggttccagcgattctcctgcctcagcctcccaagtagctgggattacaggcacgtgccaccacgctaagctaatttttatgtatttagtagagacagggtttcaccatgttgaggctggtctcaaactcctgaccttaggtgatccgcctgccttggcctcccaaagtgctaggattataggcatgacccactgcgccaggcccttatttatttatttatttatttatttatttatttatttatttattttttggagacacagtctcactctatcccccaggctagagtgcaatagtgccatctcggctccctgcaacctccgcctcccaggttgaagcaattcttctgcgtcagccttctgagtagctggaattacaggcacgtgccaccacgcccgactaatttttgtatttttagcagagacggggttttgtcatgttggccaggctggtctcgaactcctgacctcagcctcggcctcccaaagtgctggaattacaggcacgagccaccacacccgaactttatttttaatcatatttataattggttatttctggttattctagagaactgccattttttaaagttgatcttggatatcacacccctgctgaactttcttactctactactgtgtgatttttttgttgtttttcttaggtagataatcatattatctatgaaaaaatgacaactttatcttactccttccaatcttcccacctcttattccattttctgttcatatagcattaaagacctccagactgagtgaagcaataaaagggttagtgggaatctttgttttgttcccagtcttaaaggaaatatgcctaaagtttcattatttggtgtaacatttgcaggtttttggtatgtatgtatttatttatttatttatttgaggcagagtctcactctcatccaggctggagtgcagtggcatgatctcggctcactgcaacctccgcttcccaggttcaaacaattctcctgcctcacccacccaagtagctgggttaaaagatgcctgcctccacgcctggctaatttttatatttttagtagagacggggtttcactatgttggccaggctggtctcaaactcctgacctcaagtgatccacccatctcagcctcccaaagtactgggaatacagcaccatatatttatttatttatttatttttattttattttattattawttttttgagatggactcccgctgtatcacccaagctgtagtgtagtgtcctgatctcagcctaccacaacctccgcctcccaggcacaagcgattctcctgcctcaacctcccaaagagctggaattatgggtgtgtaccaccacacccggctcatttttttttttgtatttttttaatttattttattttatttatttttttttttttgagacagagtctggctctgtagcctgggttggcgtccagtggtgcaatcttggctcactgctctctctgcctcctgtgtcctggttcaagcagttctcctgcctcagcctcccaagtagctgggattacaggcatgtgaccatgcccagctaatttttgtatttttggtagagacaaggtttcaccatgttggccaggctggtcttgaactcctgacctcgtgatccacctgcctcagcatcccaaagtggtaggattacaggcgtgagccactgcgcccagcctttttgtatttttagtggagacggggtttcaccatgttggccaggctggtctcaaactcctgacctcaagtgatctgcccacctcagcttcccaaagtgctgggattacagatgtgagtaactgtgctggccaatttgtttaatttcttgaattgaatatttatctcatttttaaaatctttcttatttcctgataaatacattttaaactatatttttctgaaaagactgttttattataatttcaattctgtttctgaatatcctttttgatcagtgtacattgtcgtacaaccatcaccaccatccatctccaaaactttttcatcttcccaaacagaaactctatacttattaaacagtaactccccaattcctcctaccccagtctgggaaccaccattctattttctgtctctttgagtttggacactctagatacctcctgttggtggaatcatacaatgtttgtccttttgtgtctggcttatttgacttagtatatrcatcttcagtgttcatctatgttgtagcatatgtcagactttcattccttttttttttttaacagaattttttttttttttagaatttttttgagatggagtcttgctccgtcatcaggctggagtgcagtggcacgatctcggctcactgcaacctccgcttcctaggttcaagcaattcccctacctcagcctcccgagtagctgggactacaggcgcgcgcctacaggcacgctccaccacgcctggctaattttttgcattttagtagagatggggtttcaccatgttgaccaagatggtctcaatctcctgaccttgtgacccgcccacctcggcctcccaaagtgctgggattacaggtatgagccactgtgcctggcctattcctttttaagactgaataatattccattatatgtatagaccacattttgtttctccattcattcattgatgaacacttgaattccatttgtcttttttttttttttttttttttgktctttttctcccctttttgtggagaacagggtctccctatgttgcccaggcaggtctccaattcctgggctcaagctatacctttgtttccctaagtgcttggcttgcargcacgagcccccgttctgtaagcccagtacttagggaggcaaaggcatagcttttttttttttagacaaaatctcgctctgttgcccaggctggagtgcagtggtgcgatcttggctcactgcaacccccaccccgcaggtttaagcagtttttgtgcctaagccttctgagtagctgggactacacatatagaccaccacgccttgtatttttagcagagatagggttttgccatgttggccaggctggtctcgaactcctggcctcaagtgatccacccgtcttggccttccaaaatgctgggattacaggcataagccaccgcacccaacccacacccagcttttgatggacatttgcgttgtttctatcttttggctgttgtgaataatgctaccatgaacgttcctgtacaaggtttttgtgtggacttagtgttttcatttctcttcagtgtatacctaggaataaaattgcagggtgatatggtaactttttctttaatctcttgaagatctgaatctatcttgaacttggcttctaaattgagacttaggtattttctgatctcaggagtgtaaaacaacgtcttagttttggcgctaccaccaataaaatttgcagtcatgagctagtaacaatcctgttcttctccgtggactagtagcccctttctcatgggattgtttcggttaaatctaagatgtgaatgtatgtgaggagcctaggccttaaaaacgtcctctccttggctggacacggtggctcatgcctgtaatcccagcactttgggaggctgaggcgggcggatcacaaggtcaggagatcgagaccatcctggctaacacggtgaaaccctgtctctactaaaaatacaaaaaattagctgggcatggtggcaggcgcctgtagtcccagctactcaggaggctgaggcaggaaaatggcgtgaacccaggaggcggcggagctttcagtgagccgagatcgcgccactgcactcaagcctgggcgacagagcaagactgtctcaaaaagaaaaaaaatcctctccttgtgtgtctacctctccttcaccaagctgcatacagccttccttgtgcttatgtttaataataaagctccccagctgggcgcggtgaatcacacctgtaatcccagcactttgggaggccaaggcaggcggatcatgaggtcaggagatcgagaccatcctggctaacacagtgaaaccccgtctctactaaaaaatagaaaaaattagctgggtatggtggcagttgcctgtagtcccagctactcaggaggctgaggcaggagaatggcgtgaacccgggaggtggagcttgcagtgagccgagatcatgccactgcactccagcctgggcgacagagcgagactccrtctcaaaaataataataataataataaagctccccaaggccagaccttattcagtaaataagaaggctttctaagagaaattcatagatgtagcttgaatctggtaaaactgccatcttggagagccaagtgcaactcagtactagacagtgagtccctgagggccagtctacatctgtcccactcacggcactggcctcgtgcccaggtgcagttcctggtatggagtcagtcttgctcagtatttgtggaatgagtaaatcctgaatttgtattgtgaacagtaattccacttcaaggaatctgtcctaaggaagtgattcaaaccagttaaaaaaatactgtgtgtcctggccaacatggtgaaaccccgtctctattaaaaatacaaaaattagcaaccaggtgcggtggctcatgcctgtaattgcagcactttgggaggcsgaggtgggcggatcacgaggtcagcagatcgagaccatcctggctaacatggtgaaaccctgtctgtactaaaaatacaaaacattagctgggtgtggtggcatgtgcctgtagtcccagctactcaggaggctgaggtaggagaatcacttgaacccaggaggtggaggttacagtgagccaagattgcactactgcacgccagcctgggcaacagagtgagactccatctcaaaaaaaaaaaaaaaatagctgggcgtggtggcrtgcgcttgtagtcctagctacccaggaggctgaggcaggagaatcgcttgaacccagcaggcggaggttgcagtgagctgagatcacgccactgcactccagcctgatgacagagtgacactccatctcaaaaaaaaaaaaaaaaataggccgggcatggtggctcacgcctgtagccccagcactttgggaggctaaggcaggtggatcacgaggtcaggagatcaagaccatcctggctagcacagtgaaaccctgtctgtactaaaaatacaaaaaattagctgggcatggtagcgggcacctgtagtcccagctactcagaaggctgagggaggagaatgacgtgaacccaggaggcggagcttgcagtgagtggagatcatgccactgcactccagcctgggcgacagagcaagactccrtctcaaaaaaaaaaaaaaaaaaatactgtgtgaagatgttaattgctgcattcttttagatgggaaaaacagaaagcctaagtaggcagcacagtaggcaaatgggtcagtaaattacaaaacactctagaggaaataataatctgaggtctaaagattacatggagacagaaggacatttaagagtagggaaaagatacaaagttttacattgtcctattaaaactttatataaagctataaacaaaagtcattaaaagagagtttaagaaaatacgttagaatgctagtgttttataatggtagacttatgcagtatcttttttctcaggttacatttttctataatgtacctgttttatttaaatcgctttgcattttaaagccatttgttaccactcttcagcttcttgtgaacagaaagaatgcttctgcttccctctcaggtgagagaactggagcagaccttgcaggcctctgaggagcagctccaacagagcaagggcattgtggctgcccaggaaactcagatacaggagctsgtaagtgcttattggagctgctgcattccaggcccttaatgctttctctccaggcctttgcagatgctccaaactcattccgaacttcggcaacggtacctggacctgcccatagatacagttcttgtgctggatgtgagcaggccrgcagcagggggtggagggagtcaggacctaatggtsggcctgagttacctgggaggtgcaccagcagctcctttccaccttacatcccaccttctggtccagcctggtcctggggctgtcagaggtggcagctccgctaggagtcaagcctcaacttgmaatcaggggcggggagaacaagtccagactctggggaggatggcctgtgatgacaggccaagcgtggtgtggagttagaagatagggaaatcaaaccagccagcgtgtatttcatattcgccatgtcccaggcactgtgctcagtgctatgcacgtgttttcgtttagtccttgcaggagacctgagaattatgcactgtcatcctcatcctgtagacgaggcaagctcagaaagattggctcagtagcccacaggctcgcagccagtaaatggcagaatccacatctttctcctstcaaagccctgttcttcattgctgtattatactgcctccccagtataatttctccccagggaaagccgcagccactgaggcaacactgagtagtgtgaaggaggcctgtgtctaagggctggctggtgcccagagctgtccccacacaccttgaggatggagtgatgacatcaagactccatcttctggacaggccagggtccaggagcaacaggcagagcctgcaggggggacctcagcaacgccaggggggatggggtcaggagagagttgtttctgttggatactcatcttctcacctagggccagactaagatcccccactggaaaccattgtcaccctgactgaccgtcctttggtctccccgcaggctgccgccaaccaggagagcagccatgtgcagcagcaggcccttgctctggagcagcagttcttggagcgcacccaggcgctagaagcccagatagtggccctggagagaaygcgggcagctgaccagaccaccgcagagcaagggatggtgagtgaagagctaagagagggtgggcccaggagcaccagggtcccccacagcgaagtcagcctcgtgcttgacagtgtgkcaccrcctctgcactaggaaaccactttagaaggcagctttttttttgtttgagacagggtctcactctgtcacccaggctggagcacagtggcatgattacaactgactgcagcctcgacctctcagactcaagtgatcctgccacctcagcctcccaagtagctgggactacaggcgtgcaccaccacagccagctaatttttaaattttttggagagacaaggtctcactgtgttgcccaggctggtcttgaacgcctaggctcaagggatctgcccacctcagcctcccaaagtgctggaattataggcatgagccaccgcacccagccgagagcagttcttatctttccagagacacctgctcatgagactggatgtataaaggctgctttttataaaacaaaacagatgggttttctttttccttggagtttccacagagacttcctactttctgaccagtcccctctgcttcttcccattggcttttaaaatgtatattgttcctccctatgccttcttcctggtccatgctccctgtgcccagggaaatatggtagtgaagacttcttttatatgtgttcttctgaattggcagagacaactggagcaagaaaatgcagcccttaaagaatgcaggaatgaatatgaacgttctttacaaaatcaccaatttgaactaaagaagctgaaggtatttatctaattgaatcaaagtttcataaaagtgttcatgttttctacatgtgtatttacagtgccccacttctcatacttacagtacaggaggaggagaattagcatttgttcaatagttctgttaggcatcggccagaaattgccacttcattaagttctctcagggatccaggacagtaggaagaattacattcatttggcagttaatgtcattgaggttccgagggtaaaccgtttgtgcaagttgcatagttggttagaggtgatgctggtctgacttcaccctaccacagaggccagcccttcctctgtggaatcaacagctgcttgaaagtcatgctgtcaaaacactgctcttgctgatatttccagggagaccttaaagcaaggccttaaaagatgataaggacctttgttttgcttgtttatatcagggaccatgtacagaaatgaagaaacaatctgctggattgttaaactttctcttctgcaaacttggagctttaatcagaggatgcctctttcattccctaaacataactggataaaaaggaggaaagattctgtcactttcttatatgcccccagactcccgtggcccctttcaaagcamcttggataatgggacattgtagtacttgcccagcttggtcatgactcaaagatcttattgatcccttggcagcagtcttctctgagagtgtccatagatgaatgcctgcacctagtaagcttccagtaatcagatctgatgagtgacataggtactaatgtagtagcattgcatcatgagaagcatggactttggagtcagatttttttttcatgcattccttcaataaacatttgagtcctgtaagtgccaggcatcactgtaagtgctaggatgtattaaatagcaatgagccagtgcggtggctcacgcctctaatcctagcactttgagaggccagggtgggtggatcacctgaggtcagaagttcgagaccagcctggccaacatggtaaaaccccatctctactaaaaattcaacaattagcctggtgtggtggtgtgcgcctataatcccaactgggaggctgaggcaggagatttacttgaacccgggaggtggaggctgcagtgagccaagatcatgccactgcactccagcctgggtgacagagtgagactccgtcccaaaaagtaaataaataaaataaaataaatagcagtggaaaaaataggtaaagttcctttcttgtggagtttgtaactagagatggtaaccaagttacaaattaacaataaatgctatgaagaaaatagagcagggcaaggacagccaatggggaggtgggagaggagaggtctcttttccatatggagttagggaaggctttgatgctggcagaagggcctacaatgtgaatatttgaggagraatattctagactgaagaaataacaaatacaaaggctctgaggcaggaaaaarcctagtctgttcaaagaatagcacagaggccagtgtggctgcagctagtggccaggggagagcatggctggtggtgaggcgggacacaggcattaaaaagaatcatgggaagccctggcaggtctttttttttttgagacagggtcttgctctgttgcccaggctggagtgcagtggtgtgatcacagctcactgcagcctcaacttcccaggctcaagcaatcctcccacctcagcctcatgaataactaggactacaggtgtgcaaaatttattaatttttcttttgtagagacagggtcttgctatgttaactaggctgattttaaactcctgtgctcaagcgatccactggccttggcctcccaaagtgctgggattacaggaatgagccactgctcctaaccagctatggcaggtcttaagcagataagtgatgtgagaagttttgttttaaaaggatttctctggctgcctgtgaagaatgtttggtaagggaggcatgagcagaagcaagaagactgtttaggagactttttaggaatctaggccagaagtgactagcacattagtggtggacttgggaagaagtattcagatcaggatttattttagagatagagctgttttgtttgctttttgttttttgtatgtgagacggagtctcactttgtcgcccaggctggtgtgtagtggaacgatcttggcctactgttacctcaacctcctgggttcaagcagttctcatgccccacctcccaagtagctgggactacaggcacrtgccaccatgcctggctaatttttgtatttttggtagagacagggtttcaccatactggccaggctggtctcgaactcctgacctcaagtgayccacctgcgttggcctcccaaagtgctgggattacaggcgtgagccaccatgccctgcctgagatggagcttttaggacttaggaatgagaaaaaaataggaattgtagatgacacctaggtttggtttgtataactcagagtttctccacctcagcgctattgacgtttgaggccggatggttctctgttgtagaggttctctgttgtggatggttctctgttgtggatggttctctgttayagagggtctctgttgtggagggtctctgttgtggatggttctctgttgtgggtgggtctctgttgtgggtgggtctctgttgtggagggttctctgttgtggagggttctctgttgtggagggttctctgttgtggagggtctctgttggggatggttctctgttgtggaggctctctgttgtggaggttctctgttgtggaggatctctgttgtggatggttctgtgttgtggagggttctgtgttgtggagggttctctgttgtggagggtctctgttgtggatggttctctgtcgtggaggctctctgtcgtggaggctccctgtcgtggaggctctctgtcgtggagggtctctgtcgtgggtggttctttgttgtggagggtctctgttgtggatggttctctgttgtggagggtctctgttgtggagggtctctgttgtggagggttctctgttgtggagggtctctgttgtggagggttctctgttgtggagggttgtctgttgtggagggttctctgttgtggagcgtctctgttgtggagagtctctgttgtggagggttctctgttgtggagagtctgttgtggagggttctctgttgtggagagtctctgttgtggatggttctctgttgtggagggttctctgttgtggagggttctctgttgtggatggttctctgttatggagggttctctgttgtggagggttctctcttgtggatggttctctgttgtggatggttctctgttatggagggtctctgttgtggagggtctctgttgtggagagtctgttgtggatggttctctgttgtggagagtctctgttgtggagggtctctgttgtgggtggttctttgttgtgggtggttctctgttgtggatggttctttgttgtgggtggttctctgttgtgaatggttctttgttgtggatgggtctctgttgtggakggttctctgttgtggatgggtctctgttgtggatgggtctctgttgtggagggtctctgttgtggatggttctctgttttggatgggtctctgttgtggaggttctctgttgtggaagttctttgttgtatttgctgcaaatatgcatgataagatgcttaggagcatctacccactagatgtcagtagcagccccacttaggacaaccacagtgtctccagacattgccaaatgtctygtgggggcaaaagcactgctggcagagaaccactggggtaactgaatgaatagggtacgtaccattcactgagatgggggtcctgggaggtatgtcaagagtggattccattttgggcatgttgagcttcagaggcctacccaacaggcatatctagtagtctgtaggctgacaagtctggaaaattggagcagattctgagtagacatataaattaggaagcctgtgtgcctatagttccagctgcttgggagcccaggaggcggagcttgcagtgtgcaagatcgtaccactgcactccagcctggatgacagagcaagaacctatttcaaacacacacacacacacacacacacacacacamaaaactttaaattaggaaaccatcaatcagcatagctcataggcaaaattacagccaaatggctatcaatgagtgcagatagaaaagaggccaaaatgaaggccagggccacacccacaagcacaggctcagaacaaaaggaggggccgacagagaagacgccaaaggagccgcaggtagggtagcagtaaaagcaggtgcatgtggggctctggaagtacagggcagaaagcgctacaagaaggattgagtagtgaactctgtgatatgctgccaactggtcaagaaaggagacaaagagctgaccattagatttgacgagactgagtttgttggcaacgctgggaagaatagtcaccgtagagtcgtagggaatatggttgacgagagcaggttaaaatgagactagagagatgcttccacttgcagtaaaggcaaactaggtaattcagaccagctcacctgaggactcccagaaaaactggccaaaataagagaacatctgcttgtaggagcctacaggactgaggaatggcccatcctgcccagggacgggagtccagcatgcaaagcagcttttgccgtggtggtatctgctgatcctgaagaggctggaagtttatctaagtttttcatagtttctcagagttaggggaataaaatttggagtttaaattttattaaagcttggatccagcctgggagatcctgaaagctttggttaggcacaccacaggactacacgctaggagtaagcttgaacgggaagtaaccagcaccccatctgcaccccgcccccagctttgattgcactaactgaaggacacggggtggcccaggaaaagcccattagctaattttggattaaaatgatcccaggttattagtgctcctgggtgactagaaaaaacaaaatcaaagataggtaaacaaaaatacaaaacaacacaaaagaaacagactcacaagggctcagatatcatatgcttactatgtttaaggagataaaagacaaaatttaaaatttcagcaagatgtggaatagttctattattatagttatgataaaagacagcagttttaaaaaaggaatcaaatagaactttagacctgaaaaatagaataactgaaattaatacaataaattacaaaaggacaggaggaagctttctgggggatgggtatttttactatttttattagggtgatggtttcatcacagttcatcaaggcatacacctgtagtcccagctactcaggagactggggcaggacgctctcttgagcctagaaggtcgaggctgcagtgagctatcatcacaaactggactgcagcctgggtgatagagcaagaacccatttccaaaaacataaaaatttaaatgtaaacatatagaaaactcttatatgtttacatttaagaaatacactttcttttttttttttttttgagatggaatttctctcctgttgcccaggctggagtgcaatggcgtgatctcggctcactgcaacctccgcctcctgggttcaagcgattctcctgccttagcctcctgagtagctgggatcacaggcatgcaccaccacactaggctaattttgtgttttcagtagagatggggtttctccatgttggtcaggctggtctcgaactctcaacctcaggtgatccgtccacttttgcctcccaaagtgctgggattacaggcgtgagccaccatgcccagcctgaaatacactttcaaataacccataggtcaaagaaaaaaatcacaatggaaattttaaaatattttgaaataaagttgggcacagtggctcacacagtgagctgagattgtgccattgcactccagcctgggtgacaagagcaaaactctgtctcaaaaaaataattataatattttgaaataaatgattttgtaaatactgtggatcaaaattggtcaagtataactaaagcagtgcatggaaggaaatttcagtctcagtggcatctcttaggaagaaagcctgaaaattgagccatgtatgcatctcaraaagtcagaagaaggcacaaatcaaactcaaggaagaaataacaaatataagcacagaaattaatgaaatagaaaataaaatgggcccggcgtggtggctcacccctgtaatcccagcactttgggaggccaaagcggatggatcacatgaggtcaggaattcaagaccagcctgaccaacatggtgaaagtccatctctactaaaaatacaaaaattagctgggcatagtggcacatgcctgtaatcccagctacctgggaggctgaggcaggagaattgtttgaacccgggagtcagagattgcagtgagctgagatcgtgccattgcactccagcctgggcaacaaaaatgaaactctgtctcaggaatgaagtgaagaagggagggagggaggctgggcgcagtggctcaaaccagtaatcccagcattttgggaggccaaggcaggtagatcacctaaggtcaggagtttgagaccagcctggccaacatggcgaaacccggtctctactaaaaatacaaaaattagctgggtgtggtggcacatgcctgtagtcccagctactcgggagggggaggcaggagaatcgtctgaacccaggaggcagaggttgcagtgagctgagattgcgccattgcactccagcctgggaaacaagagagaagctccatctcaaaaaagaaaaaaaaaaacaaaagaatgggaccctctcatagtagcgaggactgctgaagcctgaggtggattatttgaaggtgaataaaatcgctaagctctgggtgagacagatcaaggccatatttagtttaacagtctacttgttccatcagctactaagaagggtgtgctcagtcttccactacgatggtagatttgtctctttcttcctttagttctgtctgtctttgcttcatgtattttgaagtgctgctattaggtgcacatacatttagaattgtttttctccatccacgctcttcaaagcagctgttccctaagcccatcctggagaatcatcgcagaggcagccgtgcatgggtggcctggtggcttctgcaagctgcaggccctgctttgtgccacagtgaacctgagcaggcactgtcaaccccasctcccacagtgctggatcttasgtggctctgaggcgctagggcagactttggagccacagagactcagttctgtcttgtcagcctagcccctcactagctgatgcttgaaggaatccattttcctgcagccttgacctcccggacacaagcaatcctctcgcctcggcctcctgagtagctggcactacaggcatgtgacaccatgctcggctaatttttcttattgtttatagagacagatcctcactgtgttacccaggatggccttgaactcctgggttcaagcgatcctcccacctcagcctcctgaagtgctgggattattggtgtgagccaccgtccctggtcattacttcttcttctttccataaccaattgttccagtcccccactccattcacgtggcctgcgagtctgacttcttgttcttggctactgtccttagaccagctcttcaggataggcccctagccttggtgtgggtcctggcggggrtgctcgtggggcaatcgatcctcagtggtgtgccatttccagagaagtcggtgggttgcctgccaggatagctctgagagggatactgagggcatggcagggaggggccaggctgggagcctgggaagtggggagcatgttggtctggctctgcaaagccatgccctgtctgctgggcttcttgcgtggcatayagctaaaaaactgtgaactaagttttggggctcagtggttttctgcattgtaggaagaatggagccaaagagaarttgtgagcgtggccatggctcaagccctggaggaggtgcggaagcaaagggaagagttccagcaacaggtgggccctgtttcacgctgaggggcgatgtccccctgcagtcccayaggcagcaggcccatcctgccgtgagactgttggagagggcctgtctctccagggtagggtagtagactcaggactcagggaatgcagtcagctgcgtgggcccctgtgctctctaggaagctgggagacaaatgttataaagaaactcttaccccatagkatgcccttttctgatttttcaactataattacctggaaagtggtccatgtccacgggcctagtgggctctaattctgtgaggtgacctatcattgcccacctgccccagaggccacgtaaggttgggttgagtttttgcaggaagtatgggaaagcctcccttgaaggtagactttgcatctgaccccagagcttctagttaagtggctttaggcctttggtaagtccttaacaaatctgagtctcctctgatgaggactctagccttctacttacacctctgggaaactattctgtaatgaggcaacatatatcaaatgcgtgtctagtgctggggatgttgcaggcactcaggaaatggaagttatgacagcttgttgggctgggcagaatggccacgtctctggttgacccactgttggccagggggcagtgggaggcgactgcccctgtgcagggcccctaccaaggagaatagatttgtgcatgttcataggagcagagcttagctgggggtttgctctgggtmgtggacttcagggagggattcgtggtgtaccctggagagcggggaagtggagatttctgtgggaagatggagtcactgctcacaaccttccctcttgttgatttttctctccaaggcagctaacctgacagccataatagacgagaaggaacagaatctgcgggaaaaaaccgaagtgcttctccagaaagagcaggagattctccagctggagcgaggtgaggagtcggtccctggctgagccttctctccttttcaggcccagcatcctgccttgtgacggccttgccaccaagcagcatggagtcactgggctcacagtgccccctcccctcctccccgacctaggtcacaactctgccctgctgcagatacaccagctgcaggccgagctggaggccctgaggaccctcaaggcggaggaggctgcagtggtcgcggagcaggaggacctgctgaggctgcggggcccattgcaggcygaagcactctcagtcaatgagtcgcacgtaagtcccagctgcacctgcatgggtgctacagcaagatgcagggcaggtgccgagagtgcccctaaggaggcagcagtrgggacacatggtggacacgacgctcccctgcatgtagggtcctttctttgaagtagggcacttggccaggcgcagtggctcacgcctgtawtcccagcactttgggaggccgaggcgggtggatcacgagttcaggagatcgagaccatcctggctaacacggtgaaacccagtctctactaaaaatacaaaaaattagctaggcgtggtggcgagtgcctgtagtcccagctactcgggaggctgaggcaggagaatgatgtgaacccgggaggcggagcttggtggagccgagattgcgccactgcactccagcctgggtgacagagcaagactccgtctcaataaataaataaatagataaataaataaagtagggcactcatatggctaggaggccatgagtcctgaagagcccatcacagatggcasccctgtcggtaggcaggggagagcaagccccttcatcccagcaaagactagtcgtgtgattagttgtgggcattgggcattggatcttctccaggaattgcttcctggccagttgcctgttggagcacaacgcccatacctaagggacgagtctagctccccttccctgtgtacctgtggctcagcttcacctgacctgtcctggctctcaatttgctgctgccaccttgtaggtgacctcgagggccatgcaggaccctgtgttccagcttccaackgcaggaagaacaccaaatggtgaggttggggccatggatctcacacagctacagaaggagaaacaggacttggagcagcaacttctggagaaaaataaggtgaggatgccttttgcatggctgtttctgtctccaccaggtcctcaccctcaggcctaaaatgacccagtccatccttggaggtttttgtggtttcccccgcacctcctggcaaccatgacccctctcacccaaaggccttcctcctgatcttccgttcctcctgcactgtcctcctccacaccctccccagccctcttctccccacccsctggagaactggacaagtgtcaggcttgggcagctgcaagcctgcatgttccctgccagctctgctgtccccagccaggccatagcgacagtcctctttcgtctatacttcctttctacagctgtggaagtaaagcactgatagctgcctttaagggtttgtttgggtgggaggagggggttatgaaatgaaggtatttgtgaaccgtcctataaactttataaactctctggtatttggtagaggctcaataaatgtcatggtccccacccttcaccctccagcctttccacctatataaatgcaggatctcatttaatcctggttcttaaagtgtcctgtgaagcttagtgtgccagccggctattgctctggcctgacattctgcccccaaattgtgtgtgtgtttgtgtgtgtgagtgcacgtgtgtgtgtgtgtttagatcttttacaagggggaaagtgttcattatgtctaatataaaatacagaagctttgcagcagtggcagtatcgtagccaatgaggtctatccgaggcgcgattattgctaattgaaaaaaaaaatacacacaggaaagtgtacaaaacaaatgtgtgtctcagtgaattaacagaaagcagacccatgtaaccaccccgatgcgaatcaggatattgccagcatcccagaagcccagccccctgagcccctcccagccctgtcagtcactccgatcccagcccttctggcaatgactgccttgcttttttccctagtgtcacctcagctcgcattgctcaaccccacagtttcgttttgcctgtttgcaaatttcccgtttgtcccctaggacctccgtcccttgagcctctggccttaccagctgtgctgccttcctgcctccttgttcagcgtcgggtctgtgtctgtcacgggatcactgccttcccgacacctgcggtcctctggcctctctccctttcctcagactgtcctagccaagctctggttaaacttgggctaaacccaactcttccctgctccctgcctgcagccatggaggcagacctggctggagagtgccatcacctgggcattcaggtcccctcgaagctcaggaccatggtcctgcgggcagcccagtgttccccgcaaccccacctcatccgtgggccttcacgcccctctgcccctaaccccaacttcatgtctaccttctctcctctcttcacctcaaccctgcctcacccaccctggtgctcccacctcctgcttctctgagaagggacgtgccacagcctctcctcatatcctgttcccccacctccccaagcactacgccagccgcctcccccttcttgcctaggtcgttttttcttggaatcgtcccatctactgagaggtgcgccgttgtgcaggcaccttatgaaagccctcggcttgcacccctttgccctgctgctgcgtctctgctcacctgccgtgctgacatgttaaaacttcctatatctgccatctccattcccactcctcttctctctcaacctttcctccaccactccacagaaaaacactcttgtcaagctcatcagtaacatctgcactgctaaatccagaaggcagttcctaattttccctctgattggcctgttggcagccttggacaggcgtctcttcctcctcctgaagctcccatccatggcctgctccttctccgtctcctctgacaggccagtctccttcccactgccacccgccgtgcacaagggcagccctcacagctcttctctgcactgtgcgccctcctctgcgatctcagccatgccctgcgcagctgactcccctccctacctcccgcccagacagctccacggacactagcctcacaaacctgtctccacatgagctctaaggtgtctgaaactcaaaacatcggaaaacacacttcggcttcactgtgttccctggctgccatgccacctttcccatctcagtagacggcaaaagccttggagttgtcctatctgccttggttctttctctaccagcatccaggctgttagcagattccttcagcacccccttcacacatttcccagaatccaccacttcacatcgctgccacctgcttcaggttaccattgtctcttctctgraagatggtatcagacttctaactggtttccctggcactcttgtcttagccctctgatgaaagcctgtctctgttgatctcttatgaaagcctgagtccttgcagaggcccgcaaagccctgtgtggtgtggcccctcattacccctgccagctgagcccctcctgtcctcgtcactccctctcagccacaggggcctcactcccatcaagtaccctccaacctcagggccttggcacttgctgagccttccgtttggaagtgcctttccctggtcatcctcactttctttatgccaccctgaccagcctcaccaccagaaccccaccctccctcaccatgctgcctcttctccatgcctcttcataccctctgatacactgyggatttgattattgatttcttttttttttttttttgagacagagtctccccctgtcacccagactggagtgcaatggcgtgatcttggctcactgcgacctctgcctcctcggtgcaagcgattctgttgcctcaacctcccgagtagctgtgattacaggtgcccacgatcacgcctggctaatttttttttttttgagatggagtctctgtcgccaggctggagtgcagtggcgcgatctcagctcactgcaacctccgcctcccgggttcaaacaattctcctcctgcctcagcctcccaagtagctgggactacaggcgcgctaccacgcccagctaatttttgtatttttagtagagatggggtttcaccatgttggccaggatggtctcgatctcttgacctcgtgatctgcccgcctcggcctcccaaagtgctgggattacaggcgtgagccactgtgcctggctttttttgtatttttagtagagacggggttttgccatgttggccaggctggtctggaacacctgaccttgtgatccgcctgccttggctcccaaagtgctgggattacaggtgtgagccaccacacctggcctgtttattgattcttttcccctcgagggtgaacttttgacttttttgttgccgtttctccagcccctagaacagtgcagggactcagtaactattagatgaattactgagtgaggaaaatccaggaaaccaaaataacgtaagataaagtagccaatgtacttttggggcagtgtccagcctcatggtcagccaagagaatagaaatcaaagccacaaggtgccattttacaaaattgggtgtgttggaggtcacttaagatgcctcacagtggagaagttagaaactgtggtcttctgactcagtcattctatccccaagagaaacaatggggattcctcgcttggggaaacaaagcttatcccagctttgtttaaagtggaagcccagccacgcagtaagacaagggcatccccgggagttcctgtcacattagacattacaattaggaaagctggaggaggcagtgatgactctgatacatgaaaaatgtatttacaattccagccacgctgtgcaagaatggggatgtggactgggggtacatggaagaatgcattttgatatattaccattcagagactttgaataaatttttatttaaaaccgggcgtggtggctcatgcctgtaatttcatcactttgggaggccaaggcgggcagatcacctgaggccaggagttcgagaccagcctggccaacatggtgaaatcctgtctctactaaaatgacaaaaattagctgggcgtggtggcacacacctgtaatcccagctactcaggagactgaggtgggagaattgcttgaacccaggaggcagaggttgcagagagccgagatcgtgccactgcactccagcctcagggacagggtaagactccgtctcaaaaaaaaaaaaattttttttccctatattatgaagtttttagttgagaaaatgtctcagcctgtctagtgaataatggaatgtgtatggaatgtgtaataaatgtaaggctcataatactatttaaacatcaaagaaaattagccaggcgtggtggcgcacagctgtagtcccagctactcgggaggttgaagtgggagaattgcttgagcccaggagttcaaagactgaatccagcctgggcaacatagtgagatgctgtctcttaaagaaaacaaaaaaggccgggtgcggtggctcatgcctgtaatcccagcactttgggaggccaaggtgggtggaccacctgaggtcaggagttcgagaccagcctggccaacatggtgaaaccctgtctctactaaaaatacaaaaattagccgggcgtggtggtgggaaccagtaatcccagctactcaggaggctgaggcaggagaatcacttgaacccagaaggcagaggttacagtgagctgagattatgtcacctgcaatccagcctaggcaacagagcaagactctgtctgaaaaaaataaaattagctgggtgtggtggcacacaactgtaatcccagctacttgggaggctgagacaggagaatcgtttgaacccaggaggcggaggttgcagtgagccgagattgcaccattgcactccaacctgggcaacaagagtgaaactccatcttaaaaaaaaaagaaggagaagaagaagaaaaagacaaaaatgagtsgggcatggtggtgtgtgcctgtaatagctcccctagagcctgaggcaggagaatcacttgaacccaggaggcggaggttgcagtgagctgagatcgtgtcattgcactccagcctgggcaacagagtgagactccatctcaaaaaaaaaaaaattattttccaaattatttatctaaaactggatgttgatgagttgtgcagaaaaaccatgatctttttagggtgttcaaaataagcattgcagattattmatgtatttcaagagagcagtagtgatgagaaccgtaagtcctcgcctaagtatcctacttggggatcacagcataaaaatygaattttgagggcaaaatctatggtccagagccttttccagctgggctgtgtgtggtggaccaagcccccgggaagggataggcagcgctggggcactcatgtcaacacagagggactgtggcccctgtgggacgtggagactcaagcgtgtgaaagcagtggcccaagagggatgacagcccaacagtcgtaggcacaagcatgcgacagctgagcaccagcctctcaggatgacttctcagggcagaggctcctcacaggtgtacaggggatcccgtgggatcttcgggtctgtttcctttggtgaaacatgcatctaaygattggctttctgtggggtggggcttgtcgcagaccataaagcagatgcagcagcggatgctggagctccggaagactctgcagaaggagctggtgagtactcgcatgggagctggccccacttcccagcactccccctgctgcctgtgcccggtcctcctgaggtccctcgccgcctgactatgctccctccacccmctaattaattgcaagggatcgctgggcaatccaacgttagctggtgggacagcctgccagcctgcatgcacctctgaagcagctccrtggctacagccctgttcctgccttctctgagcctgcatcctcatctggaagtggggttgcctgccacgccagcgcagtgatgctctaacagtgtgtgtgtgtggcagagtgcttggcctgatgcgggatgcgagcagcttcaggccccagggacrtgtgttcttgccatggaaaacggaatgtctgaatttacccaaacgatgtcactccctcctcaagcctmcctggaggtgcttccttcccaggtggggccctttttgccctacgatagtgatcatagtttggaccaggtgaacctccygtgtgattttttccacctgtctcagagggttcggtgtagcatctttcccactggtttttcagaaaatcagacccgataatgagctcttcgaagtccgggagaaacctggacctgagatggcaaacatggcgccttccgtcacgaataacactgacctgacagatgcccgcgagatcaactttgagtaccttaaacatgtggttttaaaattcatgtcttgtcgcgaatccgaggtaaagggcttttgaggtgtcttttgggtattgaggccccgccctacagtctgtcctgcagggacccctgcccagcccctttctctcttttcctcgtacatcctggtttgacgcccytgtggtcacccagtcatttctcctgctggcgttggcctgcggagtgagcggctggcgggagaggccgtgcaggaactggctcctggtgggagacataggctccacttctaaatcctggcctgggtgctgaggccagaggccggaagccgggaacggaatccacccatcgctcctgggtcctgccawagggtagggtagctgctggggcagttcccttaagcctgccaggcccccgaggatgcaggggaagaaagaacctatcattgctgccaaacttcagagtgccagagcgtcacccaccacctggtcctgctaaccaaagcaagcaggaaatgccacgtagctcccccgaccccaccccgcctcaccttcaccaaggcctatggcagcaaaacttactgtgtttcaggcttttcatcttataaaagctgtgtcagtgttgctgaacttttcccaagaggaggagaacatgctcaaggaaactctggartataaggtagggttctctggtctactgttccagcttccaagatacgttgtcagttatcccagcagtagcagtgtaagaccccttagacccacacccgagtgtaggcaccagcacagctgcatgatcagcttggctgcttttggatgaacttgatccaagcactttttagcgatgacatcctttgtgcccaaatgtctgtgctgtacttgaccaacaggccacgtatttttcaaagcattttcattgatagcgctttatcgagagccccaggtctggctcrgcactcarattccaaaagcgtctgcataaatgctctaataggaaaaaatacctgcagttccactaccttgttcctgtcaactcagtgtttttctstcatttccctcctgtactgagcacgggcctgcagactggttactggcaccatcttcttgctctgctcagagccagaggcaggatgtgtggggggcaggagtgacaggctcacgggaggggaggggcggttcagtttccctggcaccaagtccygatttgcatctcagaagccttttctgtttcaaatgcagatgtcatggtttgggtccaaaccagctcccaagggcagcatccggccgtctatctcaaaccctcggataccatggtcctagaggggactacccaaggatggagctccgtgggttgacactttttctgtgaaaagaacactgacacaccagtctgggtgggtttttaatcactgtaactgcagtattttgtacaagtgtctaaacattgtttacaagactaaggcccacttccctgcaggctgacctgaacctcagggggtagctgatcctgtcattctggtcaccaaacaggagggtcctggcactacccagatttccacagtgctgctaatatcccagctccagccagcaccccatctgcacctgaatcctctaacttcacggtagcacttacagctgaagccatcagcatctggcaggcacacctgagtcaccatgtagcgctgctactggaggtagagacggccctttgagatggtgcccagcaggccaaacccacctgcctctgccaggaacagccaactccatgggaactctatgggagtggcttttaaaaattcagatgagttagaagctttttatcccttcctctcaagaaaatattctttcaccctgtctctcaaaccacctagaactttagaggatccatctttaagggycggtgtggatgaatgagaaaatgcacctttctgacagtatctccactttacttaagaaaactagcaaatatatgaaaagacccttagtaccaaawacactcaattgcctttttaatgaatgtacttgtcttggataggttgctggtaaaccattttaaactattttttatagctgaagttcttcactactataaacatgtcttctgtactataaawtccatttaactggtgttcttaaaatcagagcgtccagaggaaattcttcctaaaactaggattcctgttcctttgtcttctcactcgcactctggcactgctccctctgaagtgcagtgggatctcgtgtgctttgtcttgattctgtgctgcgctgccgctgggcgatgcagaccacctgtcttctactgaaggacagtccgctgtctccagtgggggcagcagctgtcccccagcctcgatggagacaytggggcagtctgccttgtctgtggagctgctctctctccctcatcccaccccaaatacttaaaatgacactacacccagacggcgcccagctggctgcagcacttgtagcatgcacatgactctggtagtaaccaacaaaaacttgttttatggattcctcgtttactgaggaaagggaacatgctggttctggaaaagccacaatattgaatctaaaaggaaaccgtttattgtttgatgaaagtttcactggttaaataaaaaactaaattaataactggagcctctaaatttattatccattatccagtgatggaaagttgtatttctcaatcatgcttagggccaaaataggtatataaaatgtgtcacagaaaaacacgcatttgcaacgttaacctaacgaaatttccatgaagaaccaagtcagggcagcatctccttagtcccagctcaggctctctgccttccagaggccgcttctccagtgactaacctcctcctctggctcctccttgcagacagttatcccttgtttagaacacgaatttccatttacctggtgggaacacgaaacaggagtctcttctgttctgcaagtttgatgggtaagaggtagccttttttcaaagtaggatttcctttttcaactgttccaggaaagaatctctaagactgggtagctcacagccagccaaaggcagctacatttccacagaagcccrtccgctgcctccgtggcttctccagccattgaactggtcccacacgcaccccaggccccactcctcggcagtttcaggtgtagctgtggggcccgttcctaggtctgtactcactttagggaggcttcactgactaggctttcctcctgcatgttgaatttccttcagctttaagaggaagagtggaataaatattctaagtgatttaatgcactttgacttgtataaaactttctgtgttagcgacggtatctatagccctttatacgagygatggatcttgagctctccttccatgttgtaaatagggattgtattcttgaaaactgctgtagcaaattcatctgtggtgcaatacactttttgattaaagctcttcaatccagatgcaactacaatggattttactagtttggtgtgtcagtatttctttgactcattaaatctggtattttgtgtctcatatttaacactccaaggccaacctcaagggctagagaatgtttgtctttctttcagaaagaaccttcccagactggatttgggtgaataaatatacgtaatttaatgaagccaacagccccattctaccccccccaagaattgcagtggttctgaagagggactgaggaggggagagctgtggaggggaggactgtgtcactttggtcaaagtctgtatccaaaggctgtatgacccagaggagcttctggagtgtgaatggggccctaacctttaacagaatgcaagctgcagtcacatgtgctgaaaaggaaagaaaagcatttttgcccttcagagaagctctgttattggttatggggaaccaaattataccatctatttgctgattgattgctccccatttctgacgtttagttctttaaagaaagcttgtccatgcagcagtgattctgcagcacagccaacccagcatcaggagacgtgaccaggcacatctgaggccccaccctcaaaagattccaagtgcaatcccacaaactgaagacttttaaagcctagatcaattattaaatgtttggcactttattaaattaattaaataagctccaaaattaattacatacaaatcaaaggaataagaaacaataaatagtttattcagcaaacacctctctgcagcagccggcagctctgaggccgaggctggcgtcctgtggcagagggcctgtggattgccatgctcgctcccaggggtggctcaacagggacacaggtctactccttccacatcgggtttccggaacaacaactgaactctcattcattaccatcccattcattaccatttttttttacatacacgaaacacaccgcaatgtatagactaataagccaagagctttattgatgcagcaggcactttacaatgagcccaagagtgtccaccttctctgggaagacaggatgtctgtacaaactcttgggtttttttccacttcaaaaacacaagctctcccgtttaccacagcccttggatctgcacctgcccaaaccatccctcccccagtgcacacaggtgcatctgaccaacaccagccgccacgctggtagaccgtcaaaatgtcagttctgcagtactcggagacaaaggcatagactatcagatcctaaacaggatttaggaaacagacgattttcccctccaccttgaaaataaaatacatttcagcagatacatgtcctgaaatagtttacttgggagttcctaggaagatggtccattgtcaatcccttcttcaccagcctgggcatccagaattcttctcaaggtaacatgagtctttttattttttttaaacagtctttcttgctgtaagaactcttataatggagcctagtcctcctactgctaaggcctgtgggggcaggaaaagaaaacgtgtcagatgagacctggctggccaaggggagcctggcttgccagagacaggggggacattccctgacctagatcccgtcacagatcctcgaaagaggattcctgagatagagcacattctagggaaggagccctgtcctggagccgtggggtcccgagagctgttggctcttgggcagaactggcttgagaacactgtcaccagcacacaaagcagagccctcgagcttcccttttgagatggggtctcactctgttgcccagatcacagctcactgcacagccttgatgtcctgggttcaagccatcctcctgagtagctgggaccacaggtgtgcaccaccaggcccggctaatttattttttttgagacggagtttcgctcttgtcacccaggctggagtgcaatggcacgatctcggctcactgcaaccctgcctccccagttcaagcgcttctcctgcctcagcctcccgagcagctgggattacaggcgcccgccaccacccccggctaatttttgtatttttagtagagacggggtttcaccatgttgcccaggctggtcttgagctcctgacctcaggtcatccgcctgcctccgtctcccaaaatgctgggattacaggcgtgagcccaccgcacccagcctagtttatttttttgtagagatgggttctcactacattgcctgggctgttcttgaactcctgggctccagcaatcctcctgcctcagcctcccaaagtgctgagtttacagatgcacacaagcccactgactgccgcccgctgaggtgactggcaggcaccaagctgccttaaagggacgagaggtcctggcctccccatcatacagaggacttgtttacttccttgagcccaggagaggggaggccaaggaggtgcagcacacccgccagcagacctaaggccacaaccacagcccagcacccacaccaccttaaggactggcccactgtaaaacccctctcttccaactcaacactgagcctctgaggaaggcaggcaggttagtaactcctggtctgctttaatggtgggcgtgcttactgcggcactaggggtgtgcaggggagggtgtgggaggcagccccagtggtacaggcacgacacaggcttgccaaaggccttgctctcacacggacccaagcgaagggcagacacagctctttctgcttcacctggacgaaggccatattaagtgaggtcaaggtttctgcccactgctcactctggcctgctaaggctgaggccagggcaggaagcccttagagctggctggaggactctatttctaagaacccccaacagctgcctccaccactgcaagtatcatgaagccccaaccaaccagcaggcccccttcctacctagactccctgaccaccttactatgccatgttatctgcccacatgtcctgtaccaagggcaccctgtcttgcctgacataaatcggcagctaaaaagcaaaaaagtaactgcaattaccacagacagcaggtccctaccaggagcttccttgggagagggaagtgatgacatgtcccaggttggggctcgtcctctgaccccacacgcctatcagaccgtcctacgtttgttctggaaaatctggcctgctgatcgaaccccaaggcaagccaggtggctcactggggcgcgtggcagcgttcacataccttttcgtgccactggagtaacactgcgctgctattttctgtgggcttctcaaagcctttataaatgtacttcattaacaagtcaacgccgtttctgtccagtgactgcacagcctgctcaatctcactgctcttgaagtttgtgagcactttcagcaccacgccctgggctcgctcctgcagacgaaaaagagcaagtgagtcccagagctgcgcaggcaccgccatgccatgccccacaccaaagcaaggacacagatcaccagaaacactgcccagtttctaattcgtccaggatggttaaaataagtgggttagaacgtcttttgtggatttaaatttcaaagtatcttttatttatgccaacaagttaccctacttattttgggggagtaagtagtttactaggacaagtatcaactctgagagagagagagagagagagagaagagaaaagagggagagagggagggaggggcagggtctcgctctgttgcctgagctagagtgcagtggtgcaatctcagctcactgcagcctctcccaggctcaagcaatcctcccacctcagttagggctacaggcacatgccaccatgcccagctaattattttttttattttttaatacagacaaagtctcgctatgttgcccaggctggtctcaaactcctgagctcaagcgatcctcctgcctcccaaagtgctgggattacaggcataaaccatggcacccagcccatcactattttagatgacaccaataaggccttattatactccacaatggtggtggactattaaaaaataaaaataaaaccaggttgactcggctgcagcgtccctcttgtgttcacacccagaagggtggggccattccccagaactctgtgaaggtgcagccactggtgacatcaagatgctgtcacagctgccagaatcccagctgcagggagacccctttctctgaaccaaattttagacttggtgatgcagtaagcacaatttagtttttagaaggtaggaaagcgtacgggtacttaaaatcctcaggcagacaaagcctatttaacagtctgtgggagcataagcaccacaggtgagcgaattcatccattttcctcatcagccagggccaggctgacttctcagcctacgaggccgtgagcaggagtgaaggcttctgtggggaggttctcgtatataaacgctgacagcgttgatgtcagagaagcctcaccacctagggagcgccaggaggcttccctggaagccccgcccagtgccaactcactccctctgatgtggatgaaagctcacactcgcactgggcagacacccacagccctggtcccaacagcacccagcagagccgcagcgccacccctttaccttcacagcttgattcttggtgttgacgggagagttccgcaaggctgcatggaatgcccgaagcatgtcccctgtgcatcaccaccagttaaggatagctaggctcaagcacatccatgccgtcatgaacaagctcacttcagaaacagctcaggaacagagtcagatgggatctcatccataccacccaccttccacggcttccaggggggcagagacggtttacagcctgcacagggaggctgcagggcacctctgccaaccatgcaaaccctcctttcaactccctctctaccttccacgtcaaagcaactgtcctggaggggtaacttgatgtaaaattggattgtgctcacttgcacctgcttggtgctgagcactgtatctcccctactggatcctcacagcacccgtacatgtgaactggaggtcgttctcatcttctcattctaaaaaagcggaaaatgtaggtacaaagggagacctcctaactcttcatcaatgctcttcatcaattaaactattaaggaaattaagatgtgctagaacttctaagatctatcgggatcaatgaggtcccaactgttacctggaaagagtttatcaatctaacagaagcttttgccaacaatgagccagtctccacccttaccccccaacctcagttgcaatcctgacaacacattctttgctgagttctgaatacccagcatgcaaaagaaaattacaatctgggttaggtccccaaaggtgacacctattttaaactgaattacatcagccaactttcatttcctcgtatgaaacactggcttcagccaaaaagcttcaaaaatagaacaaggaatggcttctgcccaatcgggtctctactcctcttcatgcagtgatacccacgtgcagacaggaagggccttcggagcagagctgaatctcctggcttccccagtatgagatccatcttgagtgagctgggtctgcgccaccaggcaagccactcccagcgctggttccccagctccctgcttggctctgatccaccttccacactcaagaggcagtccagtccctctgtctttcagttctggagttccttttccccatccaaacaaggccagcctgatatcagccactgataacctctactttgtaactcctttttttttttgagacggagtctcgctctgtcgcccaggctggagtgcagtggcgcaatattgcctcactgcaagctccgcctcccaggttcatgccattctcctgcctcagcctcctgagtagctgggacgacaggcgcccgccagcacgcccagctaattttttttgtatttttagtagaggcggggtttcactgtgttagccaggatggtctcgatctcctgacctcgtgatctgtccgcctcggcctccccaaagtgctgggattacaggtgtgagccaccgcgcccagcccttgtaactcttttctaatgt

SEQ ID NO: 7046 - DNA, 12559 bp, Homo sapiens
  misc_feature (1)...(12559): n = A,T,C or G, or insertion/deletion polymorphism (see Tables 1-2)
gtataaccaactctctccagtacacttacccctaaagaaaaaaaaaaggaaaaaggaaaaaataataaactgaatgtcttatcactggaatgtacctactttcgctattaaactacctacaaacattacaagtagctgggcgcagtggttcatgcctgtaatcccagtactttgggaggccgaggcagatgaactacttgaactcaggagtttgagaccagtgtgggcacctctacaaaaactacaaaacttgtatttaaaactcgtctggtcaaacaaaaataaaatacaaaatacaagttagccaagcatggtgtcatgtgcctgtggtcccagctactcagaaggctgaggcaggggaatctcttgagacagggaggtggaggctgcagtgagctgtgatagcgttactgcactccagcctgcatgacagaccaagaccttgtctcgaaaaaaaaaaaaaaaaaaaaacaatgttaggggtaattattccaaataaactaatgaaactgaagcatacatttacagagcagcaacttttgtattgttagttgcaccaacaaaagatcagtacatattgtcacaatttccagaacgccatgatcaggtagtgttaccatgtaaggtaataagaactatgtgccatcactggagaccagctcacaaaccctcagtggagccagctgcgtaaagtgagaagtgacaacattgtgacggtggctaagaaagcaccagtagaataaagttcttggtttttttttgggggggggggttgtttgtttgtttgttgttgtttttttttgagacagagttttgttcttgttgctcaagctggagtgcagtggcgtgatctcggctcactacaaccccagcctcctgggttcaagcgattctcctgcctcagcctcctgagtagctgggattacaggcgcgagccaccacgcccagctaattttttgtatttttagtagagatgggatttcatcatgtcggccaggctggtctcaaactcctgacctcaggtgatccacccgcctcggtctcccaaaatgcagggatcacaggtgtgagccactgtgcctggccgaataaagtttattttaaattctagcagctaggcatagtggctcacgcctgtaatcccaaagctttgggaggtcaaggtgggaggattgcttgagcccaggagtttgagaccagcctgaggaacatagggagatcctgtcttcccaataaaaaaaaaattctttttttaattggtcaggcatggtagctcacccctgtaatcccagcactttgggaggccgaagcgggcagttcacctgaggtcaggagttcaagaccagcctgatcaacatggtgaaaccccgtctctactaaaaatacaaaattagctgggcatggtggcacatgcctgtaatcccagctactcgcgaggctgaggcaggagaatcagaaggcagaaactgcgatgagctgagattgtgccattgtactccagcctgggcaacaagagtgaaactccatctcaaaaaataaaaaactaaaattaattaaccgggtgtggtagcacatcccaacctactcaggagactgaagtgggaggacagcttgagcccaggaggtcgagactgcaatgatccctgatagcgcaactgaactccaacctagacaacagagcaagaccttgcctcaaaattcaaattcctaggctcaagtaatctgaccgtctcggattcccaaagtaaaatgtgcatcttctatgtgtaaagtaaacatggcaaaatgttaacagcaaatctaggtgaagggtatatgaatgtttactgaacaacccttctgtaggcttacaatttttcaaagagttgcaaaaacaatatttagaagttatggattacaaaaaaacaaagcctgccgggtacagtggctcatgcctgtaatcccagccctttggggaggccgaggcaggcggatcacaggagttcaagaccaggcttgccaacatggtgaaaccccatctccactaaaaatacaaaaaattagccaggtgtggtggcacgtgcccatagtaccagttactcaggaggctgaggcaggagaatctcttgaacccaggagggggaagttgcagtgacttgagatggcgccactgcactccagcctggaccacagagcaagactctgtctcaaaaaacaaacaaaaagaaaaaaacaaaacgaacagcagaaaatagggaaagatacaaataataatttagcacgtatattctgcctcccagaattagctgttgtcacagtagtgtctagtctcaaaaaaaaagtatagatatcctcaaaagaaattatagataacgggctgcgcgcggtggctcacgcctgtaatcccagcactttgggaggccgaggcaggtggatcacaaggtcaggagatcaagaccatcctggataacatggtgaaaccccgtctctactgaaaatacaaaaaattagctgggcatggtggcgggcgcctgtagtcccagctacttgggaggctgaggcaggagaatggcgtgaactcgggaggcagagcttgcagtgagccaagatcacgccactgcactccagcctgggcgacagagcgagactccgtctaaaaaaaataaaataaaataaaataaaataaaataaaaattagccgggcatagtggtgcatgcctataatcccagctgctcgggaagctgaggcaggagaaatgctggaacccgggagacggagattgcagtgagccgagatcgcgcatttgcactccagcctgggcaacaagagcaaaactccacctcaaaaaaaaaaaaaaattatagatatcatcccctttgccactacctcccattcataatcccttatagacgtgaaattatagagtacgcctatcttcaactttactaagggctgcaaatactgtcttcaaaagcagctataccagtttacactcaaccaacagttttttttttctcctcctaacagtaaccggtagcagtttctttttttttttttttttataaattttttcttttttaatagagacaggggtctcactttgaggcccaggctggtcttgaactcccgggttcaaggactcaagtggccctcaaactccaaaagtgctaaaattataggcatgagctaccacgcctggccagtagtttcaaaattaccatttttgccacatcttcaccaacatttgatatcgtcagacatgaaattttttttttggccgggcgcggtggctcacacttgtaatcccagcactatgggaggccgaggtgggcagatcacgaggtcaggatatcaagaccatcctggctaacacagtgaaaccccgcctctactaaaaatacaaaaaattagccaggcatggcagcgggcgcctgtagtcccagctactccggaggctgaggcaggagaatggtgtcaacccaggaagcataggttgcagggagccaagattctcgccattgtactccagcctgaacatcgcaccaagactccgtatcaaaaaaaaaaaaaagtcactgaataaataatagttcaaatagtaagcacatttgggaaaaaccatgatgttatctgaagattatgtatgggaaagatttttatataccgatgcctacactttggcagaactatttttttttattgtgcacatacttttcctcagtgttttttttttatttttgatttttaatttttttttttttttttgagatgaagtctcactctgtcgcctaggctggagtacaatggcacgatctcggctcactgcaacctccgcctcctgggttcaagtgattctcctgtctcagcctccatagtagctgggattacaggcgtgtgccaccacacccagataatttttttnnnnnnnnnnnnnnnnnnnncaagctccgcctcccgggttcaagggattctcctgcctcaagctcccaagtagctgggattacagacatgcaccaccacacctagctaattttttatttttagtagagacggggttttgccatgttggccagcctggtctcgaactcataacctcaggtgatccgcccatctcggcctcccaaagtgctgggattacagacgtaagccactgcacccagcccagacatgaaaattttttttatcaatctgatgtgaaaaacattagatttgttatcaatctgaaatctcaatctgatgcattttcacttattttggctttcacttccttgattactaatcagttatactgattataattcaatgttaattctagcaccaatacccctttctagagctcctttgctttcattttgacagaagcaaatttgtggccctcaacatactgaataagagagcaattaagaaacaatgcagctgggtgcggtctataaccccgcactttgggaggccaaggcgggcagatcacgaggtcaggagttcaagaccagcctggccaatatggtgaaaccccgtctctacaaaaaaatacaaaaattagccagccatcgtggcacccgcctgtagtcccagcccaggagggagactgaggcaggagaatcgctggaacccgggaggcagaggtttcagtgagccaagattacaccactgcactccagcctgggagacaagtaagactccctctcaaaaagaagaacagaaaaagaaacaatgccaggtgtggtggtgccgacctatagtcctagctacttggtaaggctgaggcaggaggatcactcaagtccaggagttcaagtccagcctgggcaatgcagcaagaccttgtttcaaaaaaaaagaaggaagaagaaagaaggaagaagaatgaagagaaataaaacaacctaggatcacacagtaaaaggtaaaagaacctcagcaaaacaagaacttcacttacagactttcccttttattacctcatacaaaatgatgaataatcaaacctatatggcagcatgtactaagaatgattagtccccatatgaaaccaaatgctcacaaaagcacaacatagtgctgggaaataattttttgtcttttaaaaaatgtaagatggccaggcgcggtggctcacgccaataatcctagcactctggggggccaaggcgggcagatcacttaaggtcaggaggttcgaggccagcctgaccaacatggtgaaaccccgtttctactaaaaatacaaaaattagccaggcatggtggcagcacctgtagtcccagctacctgggaggctgaggcaggagaatggcatgaacccggtaggcagagcttgcagtgagctgagatcgcgccactgcactccagcctgggcgacagcctgagactccatctcagaaaaaaaaaaaaaaaatccacctccatgatttaaagaaaaccagcaaacagtaaaatttcttttctcaggcttacattagagcttacagagctgcaatcccttggaagtggggaggtgccttaatacaaaaatttaaaggccaacatattcacttttctttcttcttccgattattttgttcattccccattaccctgaatgaaatatctatggtctattctttcaaaatgactactctgggcaggacgcggtggctcacatcagtaatcccagcactttgggagtccgaggcaggcagatcacctgaggtcaggactttgagaccagcctgaccaacatggtgaaaccttgcctctactaaaaatataaaaattatccaggcgtggtggctggtgtctgtagtcccagctactcaggaagctgaggcacaagaatcgcttgaacccaggaagctgaggtcgcagtgagcggagatcatgccactgcactccagcctaggcaacagagccagactccgtctcaaaacaaaacaaaacaaaagactaccctgatcccatccaaattttttatctccctgattatgaaattctctttcgtctacactgtcatcctgtctgccttcaatgattcaaatgttcttctaaagaaccagattgccatttatgaactcctttttaaggagggagtcatggtggccaagaaggatgtccacatgcctaagcacccagagctggmagacaagaacgtgcccaaccttcatgtcatgaaggccatgcagtctctcaagtctcaaggctacatgaaggaacagtttgcctggagacatttctactggtaccttaccaatgagggtatccagtatctccgggattaccttcatctgccccccggagactgtacctgctaccctacgccatagctgtccagagaccggcaggcctcagcctaaaggtctggagggtgagtgacctgcgagactcacaagaggggaagctgacagacatacctacagatggagtgctgacagacatacctacagatggagtgctgtgccacttagtgccgacaagaaagctgaggctggggctgggtcagcagccaaattccagttgagacggatttggtcgtggacgtggtcagccacctcagtaaaattggagaggattcttttgcattgaataaacttacaaccaaaaaaaaaaaaacaacagttcttctaagtagacttataaatccaaaaaaccttatttctatttcaggagtttttttgttttgttttgttttttgagacggagtctcgctctgttgccaggctggagtgcagtggcgtgatcttggctcactgcaatatccacctcccgggctcaagtgattctcttgcctcagcctcccaagtagctgggattacaggcatgggccaccacacccaactaatttttgtatttttagtagagatggggtttcaccatgttggccaggatggtctcgatctcttgacctcaatgatccgcccgcctcggcctcccaaattatttcaggagttcttaatctttttgtgcacggacctcattggcagtttggtgaagcctatggtccctttctcagatttcttttaagtgcataattaaatacatgtgattacaagggaaaccaattatatggaaatattagcaaaacaacaaactaatatggtcataatatatgtacagccttattatcacattaaataacaatgtctaacggcgggtctagtaacaccagaaattcaaagaagtgttaaccataaatgatattctgagctatctgcaactgtaaacatgatgcaaaaatatccgtaatttttattgatcacaaagtcataggcgctgctaatgctactctggcttgttgtccacattcgtaactgaaggaaataataagtttcagttagcagtcaataaaaataatgatgtcattttatcctccttctagtgaaaggacccttctaattctatccatcaatgaactccagtttaaaacccctctctagttcaaagtcctgctcagaactgattttcgtcataaatttaaaaataaaaacactgattcctcctttgacctagttctcatctgaacctatcactatgtctccctgtttttatgcacatttatacacagaaccctgggtgtacttctgtggtttgcctagccagcactcactacaattttgccagtcaataaaaggtgaagttaaaagaaaagggatggaaacaaccaacagctccctcactttcagacctccgacagcaagtggaaagatgccaagtacagtgagtgtctgtgttaggtgggctgcccccagacccgtgtgtccagcttgtcaagcttccctgcagcacgatatctttatcagcgacactcagaagacattccatttcgttctcgcctcctatactcagttccctacctgccgggcctctcgtctctggcccccacccgaggccgccccgcggtcctcctgtcccttcccatcccatcccccacgcgtctctccctctcctcagccccaggccgccctggctcctgcgcgccgccacatctctcccctgggtctaacccagtgtcccccgacccccacctcgcccgacactgacgggaagagcccaggaccccggggtcagttggacctgacggccgggcagtcagagacaggctgcggccctaggccggagcaacccggccgcgaggcagggagccgctcacagcccgcggactaaatcgggacgcgtactcaccaagggggtcatgcgggggaggacacggaggactctgtcggaccgccactcggcctcggagccgtcgccctagccggtgactgcccccgccgccgctgccgccaccttcgccactcgcctgttggcttccctgcgtcctgcagcggcgctgccgccacgccagcgcgcgtgcgcagcgccgcgggggcccctgggagctgtagttccgcccgggcggctaggggctcccacttccgccttaggcagccctaggtcagctgccccctgaggctgtcgtgggtgtccgggtccggaatcgtcttccggaaggctgttcaccaggcctgggccctggtttccgcctgcagtaatgctggacgtgaagaatccgactgagcaagtatgtgtaaagcaaaaatgtagagcgttttatgctttctgtgacaacgctcagttgcccaggacacattattcgcatgaatgactctctctcttctctgtttctctctcacacgtacgcacacactacttacaaacctcccttccctttttttttttttttcgagacggagtctggctctgtcgcccaggctggagtgcagtggctcaatctcggctcactgcaagctccgcctcccgggttcacgccattctcccgcctcagcctcccaagtagctggaactacaagcgcccgccaccacgcccggctaattttttgatttttagtagagacgaggtttcaccgtgttagccaggatggtctcgatctcctgacctcgtgatccgcccgcctcggcctcccaaagtgctgggattacaggcgtgagccaccgctgccggcccctcccttcccttttgttctaagtgccattaattggtttggatggtatctggattttcagtgtaaaacctgccttcccacttctcagtttctaaaatcttgcttatcataaacttcaccatgcagttattttaggtaagtcaataaatgaactgtctaataatttttgtaacaccataactcatatattcagaggtcaagttagctgagttgaacagtctagaaaccttaaaattggaagatacctgcttaaaggtcactagtgcaactgttgcccaggcaggaattccctcctgtacattcagccagatggtcatcttcctgttcaacagttcaaatttcagggagctcactccctcaagtaatgcagcctgctccactgttggacagctctaaatgttagaaagttctgcctcctgctgagctgaaatctgtttccctttatttccttccattgctggtagttaggctgcctggagcaatacagaatgtcttccacttgacagatcttcaaaaaattgagaacaatgattatatcctccaatactgggagtctccaggcaaaaaaaggaaaaaagtaataatcatttccccagctatttcaaatgtcaatcaactcccaaactgctttctatctactcacctctcttgatgtcacctttaggggcatggtggcatatgcctataatcctagcactttgcgaggccaaggcaggaggattgcttgagcccagaagttcaagaccagcctgagcaacatagtgaaaccccaactctacaaaaaatacaaaaatcagcgaggcatggtggcttgcacctgtagtcccagctactagggaggctgaagtgggaggatcaccaagcccaaaaaggtcaaggctgcagtgagctgtgatcatgccactgaactccatcctgggcagcagagtgaaacctgtctcaaaacaaaacagcaacaacaacattgacagaattgcttcatatttattgccttgttttatgactacataggtagtaatagaaccacctatggtaggctggtcagatgttattgctatcgtgctgccattcaactcattcaggaattcaatcagctctgttacaagacattactcaatgcaccgctggcatgaaataagcaagaggaggccgggcgcagtggctcacgcctgtaatcccagcactttgggaggccgaggtgggcggatcatgaggtcaggagatcgagaccatcctggctaacacggtagaaacctgtctctactaaaaatacaaaaaattagccgggcatggtggcaggcgcctgtagtcccagctacacgggaggctgaggcaggagaatggcgtgaacccgggagacggagcttgcagtgagtggagatcgtgccactgcactccagcctgggcgacagagcgagactctgtctcaagaaaaaaaaaaaaagaaaagaaataagcaagaggatacaatttacaatctagggtaggatgaaactgccacagattaaggatcatcataataagccaaggtacaaagcattctgagattctcagagagaatggccttttcaagttgagggttcatgaccttatggaagaggtgacagttaggagttactggatggctggatttcaagacaagagatggcattcgtggactgctaaggaagaactcagccttagcaaaaccacattcacagtgggctctggaacactgcgtctgggtaggctggagcacccaggccagggaggaagggaaggagaggccccaaaagttgcaaaagaatcttcagggaagctgcattgcatgtgagaagtaaaaaaggaactagaatggtcagttaatcttctgagccctgttctgtcacctacaaatgaagaacttgaactaacaagcaattttcttttttttttccagtcagcacactcaaggaattcaaatctcctgctagaactatggatcactacaacagtgattcttgggaaatatggaataggtattattttcatcccttttacaaatgggaaagtaaactcaagaggtgaaaatttgctcaaaatcaataagtagtactcactgagggcagatcactgtctccctagaacctggcatactgcctagaatgtaatgtttgttttttgttttttaaatgaatggatgaatacacagtaaactctgtccaaagcccctttctttccatacacaactcagtcttccctgacatagaaggatatgaagttacttgttcatagtcacaaaattcatactggaccttgtgtagagtttagttcttcagcctcccaactccatactctattaaactactctgccttagaatcgcaaaacattttttttaatgttctttttccttctatgtgtacacagccagtcttagaagtaagccaagaaagcagatgctatggccaagtgatttaaggggcctctggcaagtatttctggacaaaaaaacactttatccccaggtccctcaaaggcccccaaacttcatcacttatattgaatcacaaatgttaacttgaggtgaaaatttaaaccaacacatagtccctgagggcgcagactccatcttattcaccactgggcgtactgcctagaatgtaataatttgtctacatttttgttttagaaataggtcttgctatgttgcccaggctagaatgcagtaactattcacaggtgctatcgtgagggctcaagggatcctcatgcctcagcttcctgagtacctgggaccacaggcttgcaccgctgtgctgggctcgcctgtttgttttttgttttgttttgttttgttttgtttgagatggagtctcactctgttgcccaggctggagtgcagtggaatgatctcaactcactgcaacctccacctcctgggatcaagcagttctcatgcctaatcctcagctgggattacaggtgcacgccaccatgcctggctaatttttctttttctttttcttttttgagacagagtttcgctcttattgcccaggctggagtacaatggcacgatctcggcttaccacaacctccgcctcccaggttcaagcaattctcatgcctcagcctcccgaacagctgggattacagttcgggccaccatgcccggctaatttttttttttttttttatggagtttcgctcttgttgcccaggctggagtgccatggcgcgatatcagctcaccataacctccgcctcccaggttcaagtgattctcctgcctcaacctccagagtagctgagactacaagcgcacgccaccatccctggctaatttttgtatttttagttcagacagggtttcactatgttggccaggctggtcttgaactcctgacctcgtgatctgcccgcctcggcctcccaaagtgctgggattacaggtgtgagctactgcgccagcaaattttgtatttttagtagagacggggtttctccatgttggtcaggctggtctcgaactcccaacctcaggtgatctgcccacctcagcctcccaaagtgctggaattacaggtgtgagccatccatcaagaccaaaaagtaacattgtttaagttacaatacatctacac

SEQ ID NO: 7047 - DNA, 34760 bp, Homo sapiens
ggaggaggttctccggattaattattttcaaaaggttaccttgggggaaaactgtgaccttgtcctctagaaatatttcaccacatgagagatcattagggctatggagtccataagggccatctagtatgcgggctctcaaatttggctgcccattagaatgatgtggggggggggtgtggggctttacaaaatcctgatgctcagatctcactctgaccccatgacatcagaatccctgggggtggggcctaagcattggtatttattaaacactctgggtgcttcccggtacagccaagtttgggaacctgtaatctagacccttaccattccaagtgtgatctgtggtgccgtagcaccaccagagataatggcatttcttattagacactcacattctttactgtaatggtagacacatgccattatacatttgttcaaactcagaatgtacaactccaagaacagccctaatgtaaactatggactttgggtgatgatgatgtgtcaatgtagcttcatcagttgtaacagatgcaccgccctggttgaggacgttaataatgggggaagatatgtatgtgtgggagcagggagtatgtggaaaatctttgtaccttactctcagttttactgtgaacttaatattactccaaagataaagtctaaaaaaaaaaagaaatgcatattcttgggtcctaccatagacctactgagttaaaatatgcattttaacaagttaccaagagacctctacatgcattcaaatttgatttttgcttttcttgaaagattgaaaaatctggcaacaagggtcccaaattctttctttaaaactatcagctggagttgtatagtaggtgtcctctttaagggagatctccacactccagttcgcctcagtttcacaacgggctaggttcattaacttctattacctacctgagcccagagagatactgagttttttttaaattgtggtacaatatatataaaataaaatggaccattagtgacatgtggtacattcacaatgtcgtgcaaccatcaccaccatctagttccataacatttttattgtctcagaaggaaaccccttatctattaagcactcattccccggttcctcttcctttcagcccatgacaactactaatctgctttctgtcactgtaggtttgcttattctgaatgtttcatgtaaatggaatcatacactctgtggcatttcatgtctggcttctttcacttagcatcgtattttcgaggtttatccatgttgtggcatgtgtcagtacttcattcttttttatggctgaataatatttctttgtatggatatactatattttgtttatccattcatcagttgatgggcagttgggtagtttccagcttttggttattgtgaatagtgctacgtgaacgtttgtgtgcaagtttttcttcacacacctgtttttagtcttgtgggaacatactcatgagtggaattactgactcatatggtaatcctatgtttcgtgttttgagggacaaactgtttttcgtggcagctgcactagtttacattcccaccaataatgtatgagggttccaattttttttacatctttgccaatacttcttttcttttctttcttttgttctttttttaaattctagccatcatcattaaagaccataaaggccactttgattaagtctctttgggaggtttgagggccatcttctagttttttaagtttctttcagacgttgggggctgactgggaaatgaagtgtaaatgggtaggtagattctgcccccattggtatcagggcttaaggtggtataattagttatggcctctgaaatgcgggagaagaaaagagcagggttttcattggggccttgagtgatttcttttatcttttcagagtttacagccttaagggcagctttatccatgccagctaggaggcatgatatcatatagcttcgtttctgtctgtctgaggaaactgcttcataatcccaattggggtcagttctggggacagctagggtccctataaggttatgggcagcatcttgttggtggagggtgtctgcatgggcctgggtggttgtctggatacattccctgtcatccgggatgagggaggagtagaggatgacataaacgtcatgccaggtaaggtcataagattcagtgacatacagaaattccttgtgggaggagctggggtcggtggaaaaggagctaagtctctttttaagctgggagaggttggctagggagaagggaacatgaacttggactatgccttcggccctaacacctttctcaagggaaggactttgtaagacctttggtagtgggagtgacctttggcagaagggggttgggtgcaagaccgggtgtgcagtggagaaggaaggttgggatggaggaccaggataagggggtgggggagcggagccgaaggagaaggaggaggggatggtggtgggagggggactgagagagggggtttgttggcagggttgaaattacaggaggaaggcttgcctggaggtgtgaagtggtatctcactgtgccttaatttgcatttccctaatgactaatgatgaatatattttcatgtgtttgttggccatcagtacatcctcttcggaaaaatgtcaatttaagtcccttgctcatttttaaattgggttgtctttctgttgttgagctgaaagtgtttgttataaattctggatactagacccttattggatatctgatttgcaaatattttctcccattctgtggggtttttaccccaattttcttcatagtgttctttgacgtagaaaagttttcaatttttttttgacctctgaactttttattggcctcctgctccccaaagtgtaccctgcttctgctggcttaatgtctcagaactttggtgtcgttggtcagacaccactttgccatccactatccggcgggtggtggtcttttggatggtttgcatggagttgctgctgtccagggcatcaccaagattgaagtccttgccatcttccagcaggcagcagtaggcagtgctctcagcctccagcttgaccttgatgttcagcagggccttgtactcttgagcctggcactgtccctctgcccgggtctgtgccagctctgactccaggtgcagcaggatcccgttgagctgctccctctgcaaggcatagcgggcctcgacctccctcaggctgttctccaagctggccttcagatttctcatggagtccaggttgatcttcaaggactggactatacatctcagctccgtgagcatcatcccagcagctccaacctcggtggactgcgtggtgaccactgaggtgctctcctcaatctgctgagaccagtatttgtccagctcctctcagttcttccgagccagctcatcatattggggccggatgtctgccatgatcttggcaaggtcccgagactgggggcatctacctccatggtcaacccagagctggcaatctaggcttgtaggccttttgtaatgcccaacctcatttttcctttttcacctaggcttgtttccacctgaacagactctcccttagctaagagaaccagacaaactccatcttggctctttcactggcagccccttcctcaaggacttaacttgtgcaagctgactcccagcacatccaagaatgcaattaactgataagatactgtggcaagctatatccacagtccccaagaattcatctgtttgataacgcccaaagccctgcatctataaccttgtaatagtcttaaagcccctgcatctggaactgtttactttcctgtaaccatttatccttttaactttttgactacttaacttctgtaaaattgttttaactagacgaccccccctttctaaaccaaggtataaaagttaatcaagccccttcctcggggccgagagaattttgagcgttagccgtctctcggtcgccggctaataaaggactcttaattcatctcaaagtgtggcgtttttttaactcgctcgggtacaacacttttacttcctcttcgtggttcttcttcatgaagagcagctcctccttgagagcttcgatctctgtctccagctgcagccgagtgacactggtgtcatcagtgacctccggagcccatggatgtggctctccacagactggcgcatggccagctctgtctcatacttgactctaaagtcatcagcagcaagaccagcattgtcaatctgcagaacaatgcaggcattgtccacagtatttgtgaagatctgagtcctcaggccctcaatggtcttgaagtaatggctcatctctgacctggggtcccttcttctacaggtgctcctggattttactctccagcttccagttcttggcctccaggctcctcattctgtccaggtaggaggccaggcagttgttcaggttttgcacggtctccttcttgttctggatgcctctcattcctgccagacccctggccatccccgcggccaggcccccggaacccatgctgctcaggtagctggtggagcgggacatggagatccgggaaccagagcccccgtgcctgtacagacgctggctatgctgctgaccagccggacaccgtagctgggtgcctggacagaacccagggaccggtagttggtggagaaggtggagcgagtggtgaagcttatgctgtccagggaggagagtgagaggacaggactcaggctttgccgacgactttaatttttttttgagacaagatgttattgtgttgcccaggctggagtgtagtggtgccatcacagctcactgcagccttgacctcctgagatgggttcttgttacattgcccaggttggtcttgaactcctggtctcaagcaatcctcctgtgttggcctcccaaagggctgggattacagacatgagccactgcaccttgccaattattattattttttaatagtgacagggtctcactgtgttgcctcagcttgtcttgaactcatgacctcaagtcatcctcctgccttggcctcccaaactgttgagattacaggtgtgaaccactgtgcccagcctagtttttaattttaatgaagtccagctttttttcttttgttgcttgtgcttttgatgttatggaatttgaaatagtttcacctgggcaagattgatgggtagggagaaagaaggatctgaggggaagggagatggggatggcttgagattctatctccaattcaacctaagatttcagcaggtaactgctttatacgaggttttgcagctttatgtatatatgaccgataaattagaacactgaattgtgtttctgaaaggttaaccattgaacattagtgggaaacatcagtgtgtgaggttgtctttctaaaagccagtcctaaatggtacatgtagtaattagaagttaatgttttctggtttcaattaagcattatttgtaacaaagggaaagcatacatttttgggaaagcctgctatgtttcttttgttacactagccacacttttgggaagtcaggatatttggcccagatccaaacccactgtctacctggcagtagctcatcctcactgaaggaatattccatgggaaagatagccaaccttatgcatatcagccttggagcaagtcctgcatttgcctgaggtcacacagcaagttaactgggagtttcaacccaggtcttctcattttaaatctaaggctgtgtctctaggccgtgtatccaacataaaatcaggactatcatctgttgggctctatgactggcactactactactcactgttaccattttttgaggtcttctacgtgccaggttattgtcctggcaatctaatcctcccaaagactcggtaaatggttccataattatcctcattttaccactgaagaaactgaactctggttaaataacttgcccaaggtcacacagactttaactgtcaagagctcagacttaacccaggcctgactccaaagcctatactctgaatcaccaagcgagacctattttaaaggtgaccaggtcgtgagatatgatctcagcayggacccttctcccggatgacaagagagcaggtagttaggcgggtactccgtgtccgcgcatacccagactccgcccagcgcccgggcaggccaccccgagccccttaactgcgcaggcgctctcactcagaaaggccgctgggtgcggggagcgcagaggcggtgcagggcggctggctcgcctcggcgtgcagtgcgcgtgcgtggagctgggagctaggtcctcggagtgggccrgagatggcggcggccgacggggctttgccggaggcggcggctttagagcaacccgcggagctgcctgcctcggtgmgggcgagtatcgagcggaagcggcagcgggcactgatgctgcgccaggcccggctggctgcccggccctactcggcgacggcggctgcggctactggaggtttgggccgcgtccgcgctttccccttccctctccccgcctccccggtccccagactggctcgtgcaagccgagtcccggggcccgggggtcscgtcaactccgctggcgtatgtgtgcagattctccccgagtcggagagggaatccgcccagccagccgccttgtcaaagcgtcctgtccacgaccacagagcgttcctctgtcgcacgcgggcctcctgacccccagccccgggccttcttcgctgcacctcggctgctggcagcttcgatttttcgtttagggatgcagccgccccggccgggaggtgtcagccactgccaggtgtcagggcctcagctgtcccggaaagaggagttagactagttcttgattctggcctctatacctagaactagttgatggaagaggcagatcttggtgtttgttagggagagctttcaacaattagagttgccaaaagtgcaatggattgcttctcatgagcttcccgttactagaagcgctcaaataggaactggaagaacgcttacttatgtggaggagaggagattcagcaatcagaatctcctactcagcaatcagaagaagggactggatagtaaacctttaagattctaatccatagattccatgagtctatttcttggacatgtgacctctgcgatttcttggcaaaaactagttgctcaaaacgtgtttattgattgaagtaaattaaggactgatctctcattgcagattattctcttatagaatttgccactggggtcaactaataatctttaacaggatacttaaaatatagtttggttgacaggcagttcttcagggctgcctctataacatgaagtacatgtgttcctaaagctctatactgccctttgtcgagcacagtttagagctgtattactcttttttatcagccagatgtagtgagagtgagaagagtctgaggctggcagcatgtcttgatgttcatactaacaccgaaactgcaaattccagctacttttgatggtactggtctcatcctttctactttatagtggttaccttttattcctttctaaacttgaggcacgctagagtcagacagaaagttcatttgcactgattaattcatagtcatgattccataaaggtttccaggtctacgacatggctgtggaacggaaggtgcaaaatagcaaaaactgacattaaattaaacttttgatcatggaaagcaaggtagaatgaacattctttaagatttcttaggcagttccccaagaactgaactgtattgtagcattgtgtacaacccaccatgtttcaagagttaggtaagtgctgagatttttatctttgtgacacttttatttcatggtactatacaattttctttttctctgtgtgccatgacatatgccatgaaagactgaaaaaacttgcttagaatacgaagagtggtgctaaggtcctggggaaacagcaaggcatagcagcagagagaaatcggactttgttttgggcatgagttagcattgtttaggatcctgctcaagtcatgggctcgactactccagctttccctcttcttaattctcattgtgtttactgtcattccattcatttactttgctatttatattacatattctggtaggttcattcatttctatccatccagttggtactcatggaatgtttactatttgtcagaagtatacaagtaaaggcactcagtctaatgaagggatacagagagatgaacaggcattatagtgtgagaattgctgttaacagtggaaacaagtttataatctaatcctttcatttaatagagggagaaattgaggccagagaaggggagtgactgtagcagaataaaacatattaatctgtcttaataaatggaggtgtaacatactgtaaaatgtactcatctgaattttacctatgtgaatgcttgtgtaaacaccatcgtgatcaagacatgtacacttccggaaccttagaagttttcctattgcgccttcctagtcggtgtccactctctactctcagaagtaatactcttctgaccatttgattggtattacctatttccaaacttcatgtacattgagtcatacagtatctggctttttttgcgcaacatagtatctgagagattcacacattttgttgcgtgcattggtagtttgtgcatttagatgttgtatagattcttttgtattatgccacaattttttccattttccttttggtggctatttgggttgtttccactttggggctgttacgaatgaaacctctgtacacattcttttttatgtattttagtggacatacacactcacttctcttgtgtatatgcctggagatggaattgctgggtcataggagaggtgtagttatgttaagctttagtagatattgccaaacggtgattatatcagtttccaatctcaccagcaaaatggcagttctggttgttccacatcctcacacttggtattgtcagtctttttcattttagacattctggtgagagtctaatgatacttcattatggttttaatttgtattttcctaatgattagagataatgagaaccttttcatgtgctttttggccgtttggatatcctcatttgtgaagtgcctgttcaaatcttttgcctgtttttaaaagttgggttgtcttttactgacttagaggattttattatgtattctgaatgtgagtcctttgtcagatatgcatacgttagacctcccttttccaaggtttcactttctgtggctttagttacccacaatcaaccatggcccaaaatatgaaatggaaatttccgggtgcacacgtgcgcacgcacacacacacaacgcaccccactgctggagttctagctgagatcaccttgcatctttagataaatttgtgaagaattgacgtttttataatattgaggcttaaaatccatacacagtatatttctccatttaagtcctttttgatttctcttagtgttttgtagttttcagggcagaggttgtacacatctcttcctaggttgttatttcttaattctaattgtagattcttgtggatattttacacacataattacatcatctgtgaatagatgctgttttacttctttcttttcatcctttatgcctttttggttttcttgctctgttagactagctgggaccttcagtataatgttgaatagaagtagtgattgtggacatccttgtgttgtttgagatatattgaattcaaaggaattttctatttatgaacaaggtaacatacaggcttacctacttcaattgttgactgcttttacttacttttgtaggcatggctaatgtaaaagcagccccaaagataattgacacaggaggaggcttcattttagaagaggaagaagaagaagaacagaaaattggaaaagttgttcatcaacyaggtaaagtgagtttttcaaaaataagtatctagattggttattttgagtaacatgcataattctatgcaaagtgatgctaaataatgccataactactttaatcagtgagtacattatctttataaaagtgataaagtttggcagttttgctagtagattaaaaaaacaatcaaagaaacagccatgcatatggaaatgattatttaacttgtggctgatgtacttaggggttgctgctctctgttgttttataataggcagggttagccagtatattgattggtagaataaatactcaaaattatcttgataggctgaaatgaggcaccagaatccaagagataacatttaggacattcttttatttatctgtggagaaagaaagcagcttacaaagtataagatagaccagcataaaaagaaggatgtaactatgatctaaggttagtgctttggtaaatcacttatatgtacacatatcttcacagtgagggtactttcacactctttgggaaaaagatagaaacactttatttgttcataagtttggcagccaacagtgcaatataacagctttttattwwaaaaaaaaaaaaaagacctattccagtctttagttgcagctacagaagtgttgtgcattcatcaatgtaggtggttgctctgctttgatctatgtgtgtctatattgttgtttgcagaagctgagacttgaaggattaaaatatttgtttttatttgcatcagggactggttttgtggaagacaaaacccagggtggggttggggggtggctggggatggtttcaggatgattcaagcatattacattttattgtgtactttatttccattattattacattgtaatatataatgaaataattacacaactcttgcttatggtagactgccagtttctgagtggtaaatgtaaaagggagtgacagtttgaaaattatcattgtgtttatttaggaattcccattataaagaatattttaaattagaaaactgcacattttaaatgttttgattaataatgctatgtaatagcttcctaattggtatttctaccacactttctcttcattctaatgcatcctggtaaatttttcaaagataccactttgactatcactagccttgttccaaagtttttagttttccttttgtctatagatatgcttctctaatattctacaaaaaaagcatgatttttttgtttgtttgttttcttaaagtttggagattagtgtgttataatgaaggaggtaagggaaggcagtgataggaatattttgaaacaaacaattaatgacataatgacaattccccttttcttttttttttctttgagacagagtttcactctcgttgcccaggctggagtgtaatggtgcgatctcagctcaccgcaacctctgcctcctgggttcaagcgattctcctgcctcagcctcccgagtagctgggattataggcatgcaccaccaggcccagctaattttgtacttttagtagagacggggtttctccatgttggtcagctggtcttgagcacccaatctcaggtgatccaccctcctcggcctcccaaagtgctgggattacaggcgtgagccactgcacctggccgacaactccttttttcttcttgttggaaattgtggcagttctgagagttggagcattcagcctaaagacttcttagtaaaatttatttatttacatatatatatatatatatatatatatatttatttagaaagagccttgctctgtcgccagcctggagtgcagtggcatgatcttggcttactgcaacctccacctcctgggttcaagcgattctcttacctcagcctcccaagtagctgggactacaggcacacactaccatgcctggctaattttttttgtttttgtttttgagacggagtttcactcttgttgcccaggctggaatgcagtggggcaatcttggcttgctgcaacctccacctcatgggcacaagcgattctcctgcccagcctccagagtagctggaattacaggtgcccgccacccagctaattgacacctggctaatttttggattttttttgtagagacagggctttgccatgttgaccaggctggtgtcgaactcctggactcaagtgatccacccaccttggcctcccaaagtgctgggattataggtgtgagccactgtgccagccttactagtaaaatttaaagacttgctgggagaaacagttcttacaggattaagttccttagctaggcatttgaagtccttaaataatctagctttaccttacctagagtggtttttctgtgctgggagttgaggatacatggctgaatacagcctctccccttaaagagtttataatccacaaggtgagacagttgaagaagctatttgctttgttggtaggggatagaatggagggagacaaaatttttttccatttggaagtgaattctgttgttgtctctcttctattaccatgctgtttattgctttttcttgtgcaatgttggtgccctgtctgtaagcagatccctttttgccctaccactctgggactaatctcttttgtactttcagcagtgctgtggtgggcagaataatggcccccaaagatgtccatgccttaatcaccctggaacctgtgaatatattatccttatcatagcaaaaaggactttgcagatatgattaaggttaaagaccttgacatagggagaatatcctgggttattcaggtagacccaatgtaagcacacaggtttccttaaaagtggaagaggggccrggcacggtggctcacgcctgtaatcccagtactctgggaggccaaggcaggtggatcacctgcggtcaggagttcaagaccaacctggccaacatggcaaaactctgtctctactaaaaatacaaaaattagggctgggtacagtggctcatgcctgtaatcccagcactttgggaggctgaggtgggtggatcacgaggttaggagatcgagaccagcmtggccaacatggtaaaaccccatctctactaaaaatacaagaattaactgggcatggtggtgcgtgcctgtaatcccagctacttgggaggctgaggcaggagaatcgcttgaacccaggaggtgaaggttgcagtgagctgagattgcaccactgcactaaaacctgagcaacagagcgagattccatctcaaaaaacaaaacaaaacaaaaacaaaaattatccgggcatggtggcttgcacctgtaatcccagctacttgggaggctaaggcaggagaatcgcttgaacccgagaggtggaggttacactgagctgagatcgtgccactgcactccagcctgggtggcagagcaagactccatttcaaaaaaacaaaaaaagtagaagaggaaagccaagagtcagagggacatgtgattatggaagaagtgggtgatgccrtgtgagaagccaccattgctggctatgaagatggaggaaggggtcatgagtcaaggaatgcaggcagcctatagaagctggaaaaggcaaggagatggattcttgcctagagcctccagaaaggaacacagccctgccaacaccttgattttagcctgctgagacccatgtcagaataaactagagatccgtgtgataataaatgtgtgttgttttaagtcactctgtctgtggtagtttcttataactaatgtagcactaatacaagtaccttgtacatggctgggattcagaaatatttgtggaattgctacgtttttttctttatgttacttccttttcttttttcctctttaatttttttttttagataaacataaggtcttattttgtcttttacttaaatgtatttatgtcaggcattgcatacatgctgataagctaataaaatagaggaaaatatattgttctagtcataaaaaaggaaactagagttcattttccttttcttaggacctgttatggaatttgattatgtaatatgcgaagaatktgggaaagaatttatggattcttawcttatgaaccactttgatttgccaacttrtgataactgcaggtacttattttagatggtgttcttaattgctaatgtttatgtgtaggtttagggcaaaacaagttatatctgtttggatttgatattttcttagtaattatgaatttcattttgggtgtttcctaaaatttctatggtttctattttgccaaatactgtaaatctgtgcttattaaagcttatgatataccccataaaataggaaggatgccgatggttctgccatagaaatttccttttctttttctgctggcctgagtttttttttgtttttgttttttaacgtctctcagtagtaggctgctaacccttctcttcacccagccctaatgatccctctatttcttaattattccagggtgtgttacatcttggtcagaggagtggggccttcagtgaaaggacagtagctccgaatacctttttcattcatcttttgctaccctcatagagagaatagatgaggaagaactatattcttccattctttttcttcttctagactttatcctttttttttatatcacccagaataacctttctcacttcacgtggttctcctatcactactgtttactcagccaaatgctgtgttgatatcttttgcacattgaaggtcttatcttggaatcttagttggccctcttacctgttccctgtgcttactttgtccctacagtcctaaatcaactcctcacctgcctgaaggacctgccctttcagagtccctgctgcagacattgggagccatcatgattggcttgttgctgagcagaatccttggtagatagagagggagatgtggtccctggtctcatgatcagatacatggctgggaatgctctggcaccacagctggaactatagattacaaactcatttcccaccgacacagtggttaaagtccacagtattgtcgtcattcttaaaggccagtatagcttttgggaactgaaacactacatagaattttatttccaagagaaaatggaagcaactcttgtaccagtttaaagaaagttgtgaatatattaccttgccatagcaaaaggactttgcagatatgattaaggttaaagacctcgagatggggagattatcctgggttatccaggtagaccgaatacaagcacatgagctttcttagaagtggaagaggaaagctgagagtcagagggacatgcgattagtgaagaagtgagtgatgcaatgtgagaagccatcatcactgcctgtcaaagtggaaggagggggtcgtgttcaggaatgcaggtggcctctagaagctagaaaaggcaaggagatggattcttacctagtgcctccagaaaggaacgtggtcctgccaacaccttgaaaagtctggaaacattacacttttatatttaatcataatcaggaacacagtcctccattctttttcaacatcatcaaagatgatagttttagtaccatatagtctacatgtctcctgttagtttatacttctgaattatttagcttttgtatagctcttcccagttttaacttttatgtttttgtgatagaatcctctgatagaacctttgatttctcccctccctgatctgtacctgctctttagtgtttaccatttcagtaaagccagcttcattcgctggctatgtctccactctcctgtgtgtattaattccaaacctgtttggctctaggttcaccatatcctgaattcatcggcatctcatcctctcccactgctgccttagtytaggccaccatcagctcttgcctggaccaccgcagtagtgttctaactggtctctcccccattacccctttcgcacccctagggtctccttttcatatagtattttgctcaaaaccttctagtggtttctaaccattgtcttcaccattgcttgcaaggtcctgactgtctctgactgtatctcccaccactcctcaccatcgcttacttcaggtcttctagttacactggtcctcttgctgtaagctctctttgcaaaatacacccctgccctagagccttttcccttgctgttccctttgctaggaatgtttttttctctagataatgtaacttaccagaataagtaaaagataaagtatttttctgttagaattcttatgttgctaatttaaccatgagagttgcaggaaaaagtattttatatgtcctttttgctgtgtgtgcccctaagttgctgggctatttgcaaacttagcttatttaaaataactaatttatataatggacttaatctgttttcagagatgctgatgataaacacaagcttataaccaaaacagaggcaaaacaagaatatcttctgaaagactgtgatttagaaaaaagagagccacctcttaaatttattgtgaagaagaatccacatcattcacaatggggtgatatgaaactctacttaaagttacaggtctctaataagttgtatttattatttttcactctggtaaattcttaataacaaactagtcataattggtttggcttttgcttacagagtgtggaaaaactcttttccctagttttgcatatgcttcacagtcatgtataatgacatttaataacatgttttctcattttgcttttttcttttcttttttcaaacaataaggtctcactctgtcactcaggctggagtgcagtggtgagatcatggctcactgcagccttgacctcccgggctcaggtaatccttccacctcagccttctgagtagcacctggctagttttttgtattttttgtagagatggggttttaccatattgcccaggctggtctcgaactccagggctcaagtgatcctcctgctttggcctcgcaaagtgctgggattacaggcatgagccgccacgcctggcctcattttgcttctaatatggcactttgaaagaaacctgttgctattgggtgatgttaagagtacaatttggaaactaaaaaaggttggaatgggagtcaggccctgtttccttaccctctttcacctccatctcccaccaaaaaagaaatattttaaaaaaagaaaaatttcaagaatttcataaatacctaaaatctaactctacccatctggaatgctagcgagtgtccatatagctctataatctcagagcagatcgtctcaactccacttgctgcagatgggttataggtgtgccaagacggtgatccacttagtggctaggactgctagtgcccaggccagtttctttgagtcacaagcagcctcttgtatctacctcagagtggtacaaatattgtaatattctttttgtgctgttagcttaaaatattgggaggcattgctttagagcacagtttgaatatatactatactagaaaatcccatatctccaaataaaattaagaagccatattgtaaaacaaaacgtgtactgaatttcattaaatactaagattctgttgattagaacattcactattgttttatgtaccattaaatatttttaaatgccgctgattaaaatcaacatatgctttcttatcacttgatgctttttatacttggtgaaatagtgccattagactttattatagtttgtcatatatcacgacttttgcacacataaaagggaaaatgcaagtgcaaaagacttatgaaggtattcctaaactttacattcagagtccaattcttctgcaccactttttgactcacagttgttaaagtaccattaagtgcattggtgatgcagcattttcagggatgttaaattgcggaaaacgtgatgtctcagaatatacgaaatatgagtgtatcacttgattatgttaaatttgagtttggctatgctgattaatattatggtccttttaacatattgtgagaggtatcctgagcataattcttagtgtgtaaattctcttaaaatctaagtaaatactataaagagtaaaggtatataatgtaaagttttaaaagtagaatgaagactttttacatcatcttggtaccaaaattaaaaaaawatatatcctgcagatcagaagtcaagtcgatagagacaattattgatcttgaaggagatgagtagtagtaattggtaatttcctgcggttggagatttttggagatgacctcatatttaggtctgatgtggctaatctgtcaacaaactgtttctttggtgagcccaccacagttgatcaaactcactgaccacgtgtacttttgattcctgtgacaatacagtcagaggacaacttttctatttataatctaattcagcatacgtttactgacagtttcataggtttagatagatgttttattagagttgtttctgakcattaatatttaaaatctttaaatttctaataagtatttataaatttatacttgagttagmtcattctttggtacctttggatttgacagttataactataatatttcgcaagtctgaatcayaacttatttaaatatggattttgtgttgtagattgtgaagaggtctcttgaagtttggggtagtcaagaagcattagaagaagcaaaggaagtcygayaggaaaaccgagaaaaaatgaaacagaagaaatttgataaaaaagtaaaaggtagatggccacattttatatcgtgaaggattgtgttttaccattttgcaaaaagcctttagctagattcttcctgtttaatgtcaccaatagattggaatgtgttttttagaggttgaaaaaaatgacttacagtttgccctcagtatgttggtcttcaaggcactaagctcaaacctcacagtacgacatttctgaaaagcatgtacgtcatcatcttaaagtgaatcatgtttttatataggaacaatgtgaggatcaggagtggtatcactggtcaaggatttggcatcaattaaatcttaagtatgatcaacaggtgtgttataaaaaacacacctaccaacaatcccctctaattgcttaaaatgaaaagccatgccctaagtcttagtcatctaattcagcagctagaaggaacttttattttatatatgaccaaaagacccagaaaggtggagtgacttgttatgtagatagttattggcagagttgggactggaagcagggttttttgactgaaagtctccatgaagtagtcatttctctatccatgcatctgtctttgcatgcattcccttgtccatctatcgctgcattaatttgtccctgttatccatccaggtatgtatgtctgttaagtctgtctgtatgttcatccatccatccatccatcaatacatccagtatttactaagtgtcagctatgtgccaggcactgtgctaacataaattctggagtcagagtttgtcaggagagaaacttaaaatcgtgcaagtgtgctaggtaccatgatagtgatgaacgtgcggtgctgcaggagcacagaggtcactttgtgctctatcacagaatccctaaaagagtcttaaaaaaggaaacatacatgttcttcatgcagtaattatgcagagtcccattgtagtgtacagtgtgtagagataacacatactttatgtatatattcggttttatatatatactaaattaattcattgaaagtgaacgtcctatccatataattttgctcatgtttttaggattcataagtggttttggagagtgaataaggtcagatgtcttaaaaacaaaaaagcaaaaccaaaaattgaatgtaagccttccttgttgtgaggaacacaagttgttgtaatccttctcattgtgaggatttgtttttcctttgtcattacaagtgtaattcagttacagtgcagaaaagagaattacaaagagctcttattgcatgattttcctactcagagacaatcatcagcaacattttaatttttgctcttcctgttcttttctatcctaagatccttaaatttttttttwaaataaaaatggaagcactgtttgacacgaagttaagcaactccatgatcaacatccttatacacatctttttatatagttacttagcaattcctgaatcacaaggtaaggcacacattcatggctttgtagagaggtttcctgtaataagctgtgccatataagagcatttcattaaagaaccttcccaaaattagccactgctgtattgagaggatttggaaagagttctgatgaatttggccctttaatcttttcagtgctttacaccagtccttcctctgtagtagcaaggagaaccctgaaagataaagtagtgaaaaggcattttaagaggtgcgaaagggaggacagagtgatagattagttatatactagcctagggttttttgttaactccagctacctgaaatcacctcaactcttacctctttgctgcctccttaaaccatttccaggtggtattttggtgcagataataatacatggataaaataataagtattaattaaaaacctgtatctgcaaagtgatgaaatattttttaaaacgagggctgtctgtactttcttagatactaattctgtaatttggtcagtgtcatctaatggtaactaaattcctgtaatttgacaaacagattgaaagatgatggcatccatttcatcacatgctttttttaataagaattctatgtggcatatatattagtagtatgaacagaactcttaaaagatttagttttcactggtattactttttaaagaaatataaactttaatataattagctttttttctcattacattaaattgctgctgttaatcaccagataagctactgtcaattgtcctcattttcgaagagtttgaatttgccctgaagtttttcatagagttagacctcttgggtctsgtttctttttcagttcgcttgttatttgaatgaaggatgtcttttgaggacattttccaaagtggttacatgagtgatatattttccaagtgtctctgtaaatagaaatgttttactgcttttgtgcatatgaatacctaagttctgtaacattactccactgtcttctggtgtttaatgtgcagagaggtcagtgtgatgccttctttaattatggcttcttgttgatttactttagaggttgttcccgccttcctgaataggccacaaagggctgagactggagtagacactgtagagattagacacaaggagcttactgtgcagttttctcagaaggctcagaacagagaggaataaaagcaagtctaaaagtattttagttgaaaagaaattggaacctggttcctcttggtcttctgattttgatccacaaagaagctgacacagtttacttctttatgggaaggtaagagattatatttacctgctttgagaatatgatcttctactttagcagtttgagaattgatcttactaccaaaaagaattttacagtttaaatagtataaggtgtgtatagatagatagatagatagataaaaataaggtgaaagacaagaaagtgttttcttgttagtgaattcaaattgttctgccttgttagatacaaggcagaaactgctgttcagtttttttaactggtatcaaaactctgtatcaaaatattcaaaggaccgatagagagtatttggagagttcttttgaatttggccttttaatcttttcagtgccctacaccagtccttcctctcttcagtagcaaggagagccttgaaggataaagtagtgaacaggcatcttaaggagtctgaaagagaggactgttacacattacagaaatcagttacagawtatagaaatgttttgatttcaaaacttcaggatgcacaggccttaatattagatgggaacgttcagctggttcaaatgtacagaacgttttgggtttgcatgtctactctataaataaggtagagataaggcatttctttagttataccagctttctcttattccatactggtagaggttacccttctaaaaaaaggaaaataaattcattttcattatttattactatgtactttcctcccaaaagaggtaggtaagaaatctcttatgggggtcccaagtttgtggacattgtacattgtgggcctgtggttatatttatgactctggagtcatctctcaagagagttcgggagactcagttctctgttactctgctttagtttatggaggactaaagaagaccaaagcatcatattgtcattgtgtcttttccttgtaattttttttcctcctgttaacaaggggcaccatgagtcaatacttactgtcctaccataaagtatttagaagtatcttgtctctcgcagctagttgtcttttaaatttacctcagaagcagcattgggtttccatgaatacagaccacctcttttgcaaaaccaagatgttaaactgaatacaagttttagattggtataaaataacattttcatttaaaaaaggatttaggagaattttttcgtctgtaaaaagtataagcagtccctgaatatatcagtaacaagactgcttacactgaaaattgttataaatttccatgaaaggcagtccttagttaatagcttccagcattgtgaaattctaggccaatggaactaggaggttggaacgtggtaaaccactgttttgtctccagcttcaattaggccttcagtactgcgtaggacctgcacccaccccaggtttcctcagctccccgaaagtcgatttcagacctacagaccttttttcactcttctaaagccttaccttgtttttaaaactacctccttctcattctcagcagtaggtagttgatttctgctttcctaagttttaagttgttaaatgaagtaatgtgaaaaaagtatttatcttaaattttttttatttacctgatgttgacatttgccatatttactttttctttcacacacacatattttgccaagccatttaagttgcagacattgtgattcttataaacacttcagcatgtttctcctcagaacaatggcattcgrctgggagcagtggcttatgcctgtaatcccaacacttctgtaatcccaacacttcaggaggccgaggcgggtagatcacctgaggccaggagtttgagaccagcctggccaacatggtgaaatcttgtctctactamaaatacaaaaattagctgggcatgatggtgtgtgcctgtagtcccagctactcaggaggctgaggcaagagaattgcttgaacctgggaagtggaggttgcagtgagctgagatccccccattgcactccagcctgggcaacaagagtgaaaccctgtctcaaaaaacaaaaaacaatggtgttcttctacatagctaaagaacaacgatcatactcaagaaacttagcattaatataatgctgctaccttgtgtataatttaatattctccagttgttttggtgtcctttacagctttttgtcggatccaggtgttattcaaggatgatgcatattgatagctgcttttaaactagtccctcagccttttttgtctttcacgacattgacattttgcagtgcccaggccagctgctgttcagtgtgtccctccattcagatttgttagctgcttgtttcctcagttagactcaggtcraatgtttttggtaggaatactttcaaggtgatgtgtttgagcatttatcagtagacacatggtaccagctctgtcttttaagggagtggtagtttgactgcttagttaaggtggtgtctgccaggtttttccattgtaaaggtaccctttatcctttgtaattagtgagaaatctaatactatgtgaatatctcattccttacctttcactcagtggttttagtacacagggctgagtcttactttagttattatattggatataaatggtgattttctatttctttcactttctgtaattgttatttggcttttggaaagaagagcttttcttctcttagaaactgatttttttttaagcatcagctggactgattgtttcttattctgaagtcaatgtattatagtccattccagtcatgattcattttggtgttgaaattgtccaaaatttgcccagtagaatccccttcaaggtagctcctgtctttttaaactattttgtttggaaatatttcaaacttataaaaaattgcaaggataataatacaaagggccactcatatatcctttttccagattacctactgttaacactttatgctatttgcatcatcatttgcatgctctttctatacatacacagtatttatttttttccgaaccatttaagactaagttgtatacatcaccaccmtttacccttaagtattacagtgtatatttcctaatagggatatattttgttacataaccaaagtatattgttaacttgagtaaatttaacattgatttagtatttatgtctaatctgccctccatattctagttttgttagttgatctaatgttctttttagtaattcctttctagaacagaatccagtctaggattgggtattggctttaggtaccaagtctttctaaacttttctgggatatttacacagctcgtattttttatgacattgacatttttgaagaaaagtctgcttcccctgccctgcccttcaaaacatgcttctcacttggggcagtttctggtgtgtcctgctggttggatgcagggtatgcatttcaggctagggacagtaagtgatgtgcttttctccgggcctcatatctggaggcactgatgtctatcagccctcagtggtaattctgattttgatttgataagcaaaaagaaattgtatccccctagatttagtgtccatccattgatggtgcttgctagaaccagtctttagtatgatggttataagaactgtcttctaattccagcattccttctgcatttaagcaattggcagtcagcattctgcagcatcctttgccccatttacttatcattggtatgaattcattaatttctgtttttctccagtggctttggttcatttctgtccttactttgttgctcaaatggtctgatttggcctagtgactagcttttgtatcttttgacatgtcatttccttactttttttatttacttatttacttttgagacctagtattgctctgtcacccaggttggagtgcagtggcgcaacctcagctcactgcaaccttcacctcccgggttcatgcgattctcctgtctcagcctcccaagtagctgagattacaggcatatgccaccatgtccagctaatttttgtgttttcagtagagatggggtttcaccatattggccaagctggtctcgaactcctgacctcaggtgatccacctgcctcggcctcccaaagtgctagaattataggcgtgagccaccgtgcccagccttatgtcatcatttcttgagcactcctttctgctttctagcacaacacatgtatctgtatttctatgtctctgtctataaatatatgtaaaccttgagtttacactgatacatccagttttaaaatttcatggttcattttagttttacttatactggctttttggatgatgagaaacctggtggctcccatgatccttaatatagtgacttgatcaaagccctatgtgtgactaattcccattactgttgctgcctcctcttctggagggagccctttttcttgggctctctcaccctcctatggatgcttgcttgctccataggactggattgttcagaaagggaaagaagggtaaaaaaaaaagaaaaacccaaacctatccatttttaaatactttcttatgttctgttgtttttttctttgagacagtcttgctctgtcacctaggctggagtgcagtggtgcaatcatggctcactgcaggctcaaactcctcggcttaagcaatcctcccacttcagcctcccaagtagctgggactacaggctcatgtcaccgtggctagctaattaaaaaaatttttttaattttttatttatttattttaagagattggggtttcactgtgttgcccaggctggtcttgaactcccaggctcaggtaatcctcccaaagtgctgggattacaggcatgagccattgcacctggccccgaatactttcttactttctggcacaagtttttctaggaatgtctagtaagtattaaagatatggctttattctcaccattatatagcctgacatactggctgaagagtggggagaaaaagtcaaagtcaatgtaaaaccttaggttcaattatggctagacagacagacttttactacaagtatttttttttagtattcagaaaatttttctttggtacctctttttaagtacacataatattcaaattaggcagagaagttagtttagcatgattgcgctgcagtaaaattttgtaggattttcagtgggataaggtggccagatgtcttacgtgagaaccaagttgaaaagcaggtattagaattcaagtaggcaacatcttccttacattatctgaaaccagagggcatctgtggagttctggttagcatatcattttttatttagaaaatatcctaagtaaaatttaaaggaaggagggcattccagatctatatctagaaaaaccaaggtcttcagaatatgagaggatgctgaaagaaatgaagagtttggatgaacatttttttcttccagaccaaaaactatctagaggtatatgcactaaaataatgtcaaagtacttttcatgctagaggtatccatcaactatataaccttgagcaacttataacttctctgtgccttggttttctcatctgtaaaattggagtaattctacttatcttaaagggttgtgaggattaaatgcatttaaagtggtaagaacactgccttatacatagccctgtgttttcatcctcataaaagctgaaaataaggttcaagtagtattttgatactacttatagatctaaaatggatcagggaaaatatgtgattacttgatgtatgttatttttatagctgagattatacaagacagctatcataatctcccttaggtaatgccactgtcaaagataatgaagaactgggtggatcactggtgagaatagaagtgtaaagtgttgctttttattaaaatatgatttacttggttgctttcaaagaacccaatataattttctttgtaaaatgattttgacacgaagtagcagaaaaagctccaaacattagaatatgaccagtgtcctggcttcacagttaaactatctttgctcagtttccctacttgcaaaataaagtgaagtaaaatcaaaactctgtggttctttccagctcttaacattctgtgattcttatttttagccctctcctaaaataatgctgtcatcttataagaacttcaacagacttgaggtcttattgcacaagcactttttctaagatgaaaacataccagcatagtggtagagttctctactttctagttttcttgcaaagcttgacttgatgcttattgacgtagctcctaacaggaacttaaaaacactcctttttcttaattatttcagctgactccttttcctactgtggcattctgttatctgaagtcaaacgtacctgaatgtgtcctattgtgttactcaactcacttctgaatatggttctgttttgcataccaccaacccacataaccatttctgaatctcttgtttcacactgctccagtgacaacttgattcacaggccgaactagtgaggtaagaaagtaagtttgccaagtttgtataatcaactttgttataaaattaaggtaaactatatatggtttaaatacacatagacacacacacatgtacatggcygaaagcttgatggagttggatttttggattcacctgaatagcaccactgaaaagatgactttaaaatttttttttcagaattgcggcgagcagtaagaagcagcgtgtggaaaagggagacgattgttcatcaacrtgagtatggaccagaagaaaacctagaagatgacatgtaccgtaagacttgtactatgtgtggccatgaactgacatatgaaaaaatgtgattttttagttcagtgacctgttttatagaattttatatttaaataaaggaaatttagattggtccttttcaaaattcaaaaaaaaaagcaacatcttcatagatgaatgaaacccttgtataagtaatacttcagtaataattatgtatgttatggcttaaaagcaagtttcagtgaaggtcacctggcctggttgtgtgcacaatgtcatgtctgtgattgccttcttacaacagagatgggagctgagtgctagagtaggtgcagaagtggtaggtcagctacaaatttgaggacaagataccaaggcaaaccctagattggggtagagggaaaagggttcaacaaaggctgaactggattcttaaccaagaaacaaataatagcaatggtggtgcaccactgtaccccaggttctagtcatgtgttttttaggacgatttctgtctccacgatggtggaaacagtggggaactactgctggaaaaagccctaatagcagaaataaacattgagttgtacgagtctgatcatgttttctgtactcttggggcctctattgtgggacttaacattagtctagatagctttttaaatgctggattaaaatggaaaagagctgttttcatggttgactatctgattgttgatcaaagaaggcactgatgtttattttaagtagtgctaacatttactgagcatttaccaaccaggtgccaggcatgcacctaagtgccttaggagtatgttcatttagtcccaggcttgcttccatgctgctttcagacttctaaggaaaggaaggtgaagtctcacatcaccgcaggcatctgcatcaactttagtgaaattttcctgtagcttgtcaaaagaattattgggtctatgcattattttttgacaaaaacaaattccagttagttaaaataacctgatattttcaaattgtttgacatgacattttatcctactgtacaaatagaataggaagtttaaacatttccatttttttttctttaatggagattatgcttggagaaaggctaagtcaaaacaagtcatgtccaaataattcagactacacagaaatgtttgtgtatttttcaagtttgatttttttttaaacaccttcacactcaatgactaatacgtgctatgctaaatattacagcttagtaaaaattgattctgaatgggcagcaagatgtctctggggaaaaaagctttcagcttgatgacaacagatgatgacaacagaataactaggggttcaggttgttgtaagagcattatgggggcggggaaggagctcttgggccaactggatctaggttcaaattccacttactagctgtggaccgtgggtaaattactccaaaacctgtttttattgtaaagttttatctcaaaggactgtttgaagtagttaatagggtgaacctatagcacctggcacataataaccactagttaatgagcatgtattaccaaggccactatgttacagaaaatagatttgtctagttaagggatgcttctattcaccctctacacccttaccagtttaagacaatcctggtatccagaaatcactaacagctaaacctgctctacataggttggcaaggtcccttcctcatctttcattttcaagtacagttataaattaggaaaacagtatgtttactttgacaaaagcatgttaaattgcaccagcacaatttaacagaatatttattgcaaggtatgatgtacagtgacatgccatcttttgtctgtatgaacttcattactggggacagcaactgttgaatgtttgctcttacacctttatttcttcaaaactcaattcctagttcaatttttccatacactaaagctgctagactgggacagagcaggaccacatcagcgaacagctgttaaaagcaaccattatacatgaagagaggaccaagagaaaagaaattaaaacctacaaatttctctagaatgtggatcaaacataactagccacacttttcagtacattgtgaaaagattacaaagcagttttgagtcaaagttaccaatcccttaaaggttatcctttggttttttgagacaggagtcattttaaactacagttgacccttgaacaacatggggttagggatgctgacaccccgcacagtaaaaaatttgcatgtaacttttgactcccccaaaacttaaccaccaatagcccactgctgacttaccaataacaaacagttgataaactcattttgtatgttatatgctatatattttttttcttttttgagacagagcctcgctccatcacccaggctggagtgcagtggcacaatcttggctcactgaaacctccacctcccaggttcaagcgattctcctgtctcagcctcccaagtagctgggactacagccatgtaccaccacgcctggctaagtttttgtgtttttagtagagacagggtttcactgtgttagccaggatggtctcaatctcctgaccttgtgatccgcccgcctcagcctcccaaagtgctgggattacaggcgtgagccactgcgcccagcccatatgctatattcttatgaagctagagaaaagaaaataaaatcataagaaaaaaatatatttactatttaataagtagaagtggatcatcataaaggtcttcatcctcatcatcttcacgttgagcaggctgaggaagacaaggggctggtcttgccatctcaggggtggaagaaaacctgtgtgtaaggagactcacacagttcaaacccatgttgttcaagggtcaactgtaattatatataattacatagtttgtgctgtgcttaagcaatgggaaagataaacagtataaacgaaaacatttagccaagaacctgggttttagtcctttactaaccagccacgcaacctggatttttctggatattttgtattttgtcttaaatagtatggtatttaaacattctaggaattcccatttattaagcagactacattctgtagccactaaaatgtatggtaaaccaaagcaaaaatatatcaaaatatgcaaaacgcttaatgcatcataaacttgggatgtaataagaaaaaattatacctattttgtgcaaatgcacaacaacactaccagtagttgtaggattactggtaatttttttctaaggtttaatgaaaaaagtctaaaaatcctcgaaatttggaatgtcagacaattcctcatatttgtgtattattttacaaactgctgtcatcttatttcagcatcagtactatacaggaaacaagctcaggacttcgtagttttttggatcaggttccatataaacaaaatctaaactcacatctaattcagggtatagtttcagtcaatctgaccacttctacatccactttagtattctgtaactcactacaagaccttggacaaataaccccaaggctagaggaagtgagtagatgctctaagataatggtgaccaaacctggaatcacctggggaaactttaaggattactgaggatgtctgcgttccacccccagacggtggtttaaatttcaaaataacttgaaagattcccaggtgatttacattaagacaaatttgagagctactcttccaactagtaacacttttattactaacaagtcatgtcttaaagatactacttaaaaatactttgaagataaaatttcaaatggagaacaccttcagtaagaaaccaccagttttagagtagagtgagatgataaatcatgaaatgccaaagtttaaaaaccatacttttagttttatttcagccatgttaattcatccccgagctgtgaaaagttatgctactgggtagctgggtaaacccatcagttctatatactatgtaaggttgacctctagtgtttcacatacctcaaaccaattattttgtgccttaaggagaaaaaaaataacaaactgatcacagagaatttgtatctgtcacatatataatatatcatggtcatagtcacattactgccgttaggaagtatttgcttttcagggcaattaaaagtaatgccatgttcattcactgtcctcttcccctttgtttcctttaagaagtgaaaggatactacaagaaagcaagcattcaaaccatcaaaaaataagacaaattattttaagatatcaaaaaaaaccttgacatgaggaaaaaatgacccttaggcctgcagggcacagaactgctggaacacggccaagatatgagggtctaattcagcagtgaagagaaggttctccagggtcaccatgtactgctggattatttggtgatgctgtggacacacaaaagggggtagttaggtcaggaaaaagcatataagcaatcttgtggaacatttccttcagcagcccacccatgctgcagaatgatgaaaagaggaaggggaaaaaaaagtgctgataggaataatggacccctgaaaatccccaacattaaaaaaataaaaagggaaatgaaaaaaatggatgctcaatagctttttaaaaaatccagttcttaccaacttctatgtaaacagaattcatgattcaaggcagtggcagcagtgcctgcttgctcctagtactattacggactaggctcagctagctctctccccagtcagggcataatacattgtaactttttaaaaagcagccagacggactgacaggaagataaacagtcagaaaacgaaatactcttgtctatgtgttcctctataagccatgaatactctcagagattcttataggactagagactgttaaagcttttaaaactggcagtaactataaaatcagagggaattcctatttggaggctcaaagaattgaacttagagtgacttctacattaatcattcttctagaatgaacaaatgaagatttaggggagtagtgtccgaagatacaatgaattagctccactctcctatatacctttaacttaaatctaggtgagaataggtgccggcattttgcttttgcagagagaccccagggagcttaccttgattctgtggacagtttaccacctgcacattggataacactggctttttagggacttataaatccaattactgtcctcttgatatttttgtcctctacattttatattacagctaggatccccagcatagaaaatgataattaggagactgggcaccgtggctcacgcctataatcccagcagcactttgggaggcggaggcctcctgaggtcaggagtttgagactagcctggccaacatggtgaaactctgtccctactaaaaatacaaaaatcaggcaggagtagtgacgggtgcctgtaatcccagcaatatgggaggctgaggcagaagaattgcttaaacctaggaggtggaggttgcagtgagctgagatcgtgtcactgaactccagcctgggcaacagagtgagatgccatctcaaaaaaaaggtggggcggggggttgttgggggggtggcaattaggaatctaagtggtacagaatcagtttaagcctaaatattctgatgagcaatggtagcagcaaatggacatgaactaaagggtctaacaggtactatataacctcctaacaaatttgacaaggattttttttaatgaaaaatctttgtggctgagaatagtgttattacctaatcgaagttccccacatacctgtaggaagatctgctgcagcctctctatacagttcttataccatggtgttaatacactggtcccatcagtttcgcatcgtactaggtgctcggtcaagatcatgataaaccgctggaaagggagaagaagttaaggtagtactacagacagaatcttatactttggaaaaaaattcatgacaaagaaaccccaaagtattgcctgttccaccctgtctttgtggtgtgtgtgcctagcttccattattcatgaagtcaacctagaagggcagactggtaataacatgagttggtacattcttcctggcaatacataaagacctttaatgtcttaaattacttatcctagtaatattacttcctggaatctattctaacgaagtaatcagaaattttaacaggaatctatgcattaaaatgttcatggaaggaaaatgatcagcaatgaggaataattaaacgagacatatataaaaaaagcaacccacaattttttttcaagcatggagaaatgctcatgcgagaatactaagtaaacagcagagaaactcagacatacatggttgcctctgagtagtgaacttttatttccttcctaaatttttgtatttttaatctcttctataaatgaatgtgtattccttttacaatgaaaaataacatttttaaaaactaaaactaaagaaatgtattgtttccttttatgtataaatgtcccaagccaagatacctgaaatataacgaggaaaagattcttttgttcactctgagcagattccactttttcctgaagtcgttctat

SEQ ID NO: 7048 - DNA, 330926 bp, Homo sapiens
  misc_feature (1)...(330926): n = A,T,C or G, or insertion/deletion polymorphism (see Tables 1-2)
gggacttggagaacctttatgtctagctaagggattgtgaatgcaccaattggcatgctgtatctagctcaaagtttgtaaatgcaccaatcagcactctgtgtctagctcagggtttgtaaatacaccaattgacactctgtatctagctaatctagtggggaggtggagaacttttgtgtctagctcaaggattgtaactgcaccaatcagcaccctgtcaaaacagaccaatcagctctctgtaaaacagaccaatcagctctctgtaaaatggaccaatcagcaggatgtgggtggggccagataagagaataaaaggctgcccgagccagcaggggcaaccggtttgggtccccttccaccctgtggaagctttgttctttgcaataaatcttgctgctgctgactctttgggtccacactgcctttatgagctataacactcactgcgaaggtgtgcagcttcactcctgaagccagtgagaccacgaaccccctgggaggaacaagcaactccagaggccttgccttaagagttgtaacactcaccgcgaaggtctgcagctgcactcctgagccagcaagaccatgaacccaccagaaggaagaaacgccaaacacatctgaacgtcaaaagcaacaaactccagacacgccatctttaagaaccgtaacactcaccgtgagggtccgcggcttcattcttgaagtcagagtaagaatccacgaattccggacacaatggcagctacaggaaatgaatatatactcacattttaaaatgaaaaacaaaaacaggatcggtgcggtggcccacgcctgtaattccactttgagaggccgaggtgggtggatcatttgaggtcaggagtttgagactagcctggccaaaatgatgaaaccccgtctctactaaaaatacaaaaactagccggatgtggtggcacgcacatgtagttccagctactcgggagggtgaggcagaagaattgtttgaacctgggaggcggaggttgcagtgagccgagattgcgccactgaactccagcctgagcgacacagagagattccatcacaaaaagaaaaaaagcgagaagaggagtgcactgatttacatttttggcacatttctttaacagctgattaagacaggtgggttctcgtatctggttctgcattcagtctgttgtgataccacctgttacagtgtcattggaaaactccactgtacacacaggagagaatgtaagaaaagcaaataatttcccagtattgtaataaaaatagttttgacttcatggacctcctaaaagggtcttggtgatccttaggggtcccaagaccatactttgaggatggctggcgtaggaagtcaacagtgtttcctacattctccaaaagaaaaagctttccccccccgcatattcttacactgaacttgtttggccctaaggtcttcagatcaatgcagtgtaatcctcttgacatttcttcattacttcaagtaatacttaaaagagtttattttgtgcctggcattgttttatgggctgaggctatgtaagtgaacaaagtcctcacttaacggtgtcatgcttaggttcttggaaactgtgactttaagcaaaacgacaataagcaaaacgcattttaccataggctgctataaacaagcatcctgcaggttatttctggtcacaaaacatcaccaaacttctaaataaacacccccaaatacttctaatattgaaacattgaaataaatgtgagctatacatacacttaaagattaatacaattaggataattaagtttttttttttttttcaagacggagtctggctttgttgcccagggctggagtgtagtggtgcgatcttggctcactgcaacctccacctcccgggttcaagcagttcttctgcctcagccttccagtagctgggattgcaggcgcacaccaccatgcccggctaatttttttgtatttttagtagagacggggtttcaccatgttggctaggctggtctcaaactcttgacctcaagtgatctgcctgccttggcctcccaaagtgctgggattacaggtgtgagccaccatgcccagctagataattaaaatatttacccagctattccagttctgaggtgcaggtggctggagccaatctagacagctcagggtgcaaggcaggaaccaaccctggacaggccatcagtccctgcagggcacactcacacacactcacaatcactcacactgggaccatgtggatactccaatgaacccaaggggcatatctttgggatgtgggaggaaactggagtatccagagaagacccatgcagacaatggggagaatgtgcaaatgccacacatacagtggccctggctggaatcagtttttttttttttttctcagccttgtaacaaaaggacgttgaatgaaacgacattgaatgaaacgatgttattcaaggacctgcagcacagttgtttcccttatggagcttccattttagttgaagaaaaataataaatatataaactaagaagacaatttcagatattgataagggatagaaaagggatacaacaataagtaataacaggaagtatgaggggtgttttgagtggtgggccaagggctatttaaactagagtctgcagaattgctattagagctgagatataaatgataagaaggaatcattggaaaacttgggagaacactccaggtagaacagcagggacaaagagcaggaaggagctttgcaagttagaggaacagaaaggaagccaatgtgacttgagtgtagtccaccatggtaatgaacaaatggtataaaacagtcgaaaaagtcaggcaggtttagataattcaggtcttgcaggatacaaaaaggacttaaggttttattccaattgccatacagaccgctagatgaaatgagactatggaatcctcttaaatgctaggctttgcttcctcctgtaaattcttccaccttctccaagtgctgctcttcagcctaacacatgccccatttttatcatgatgactctccagaaaggcatgagatcccaaacagacgcatcttgcctcacataaattgtttgttatgctaacgtcaaaaacagacagatrtggaaccaatcaggggaatgtaaattacaggtcgcttgatgtggagtaacttctgcatgttggtcagtgtaggtgcgcagccaaaaatgcactgtgtgaatacaattgtttggcaattgctgatctgtcacttgtccaaagcggtaagtgtgtgaatggatttgtataggtaatgattctgaaattagcaactagcttttctcatctctccatgatgcaagaaaaacatactggaacttggcccatttctggaaaattcttgtgatgatcctcaatttttcaaaatgcacatttggtcatcattatcccttgtgtaatcagtttctgcaaactacaggatgatgttagttatgtttagagaataagggaacatgctctacaccttaatcaaatcatttaaagatgagccttcttagataacacacatttaaatatatatatatatagatggtcgttgggagatctagtctatactttgatttatgctgtagtgagagaagtaatcttgtctttcattggaaacctgcagatgcaacctgtccccagaactctaaggtatttacgataaataatatgcgagaagtgtttaccacacatttttccacaacaaaatgatgcacagaatccacgaatgcagaaatctttgaaagggccaggaaacagtcaggaatttggacccaatcagtatagggaactgcaagtgcgtgttaaaaagctggatccacgtgaataataagcctaatcccattttctttctttttttttttttttgcagatggagtctccctctgtcgcccaggctggagtgcaatggcacgatctcggctcactgcaacctccatctcccgggttcaagcaattctcctgcctcagcctcctgagtagctgggattacaggcgcccgccaccacagttggctaatttttgtatttttagtagagatggggtttcaccatgttggtcaggccggtctcgaactcctgacctcaggcgatccgtccgcctcggcctcccaaagttggattataggcgtgagccaccgcgcccggccacctaatcacattttcaagacagctgtggctacttgggactctcatcagcggctcccgaaaaatttaaaaaaatcagttactgtgaaaatttatattaaactaagaccggactctgcaaagaaaataaaaccatgtaattccaaggctacatattttcaaaggaatttaattctgtyctctgaatgcaattaagtagtctctctctctctctctctccgtttgaggaagagagaagggaagaagggatgattctcacttttcactaggaaccggtaaccatacctgctgttctgccaagtcttcgccgattctctgatttcttagtgctcagggagtatgcttgaaacctatgccttcctcccatgttagataaccagaaagtttgctgtagttatgataaatctgcataactcggagatgtttttggcacaaagtgtacgttagttagatgatgatgattaagctccccccccacccccgccccattcttgcggccggggagtgtgttttgcctgtatttaagaaatatcgttcagctgcaggcgtgtgcgcgcttaggctgtagtcggcgtttctgagtctccagggcagggtgacttgggtcggctgagtgtcacccacagatgtgactgttctttcccccgcgggcgcgacagcctccttcctctccagcccgaggcccgcggcccagaccacgggaaagggaaggaagccctcgccgcaagccggcgtctgggccggcacaaaacgctccgccaccagaaaaacttttttcccccagctgcgcgcaacttttggccttttctcccagcacgttcgcgtcccaggtttctgtccgctgggttttcctccgcctcactcgccttctccccagcggcgcgcggaggagctgggctgagagggtcgcggggagccgggtcggccgcggctgggacgctggggaaggggcaggggaggagggggcgtgcggggctggggaggaggaactggtcaaaggggacagagacgcccgagtgcccgaaaaggaaagagctgccgcggtttgctgcagtcggaataaagttcgcgccctttcctcggcgtttcgcagcctcctctccttgctccgctccccacccccgccccgcaatttttttttgtgtgtgtgtgacagctgggcgctagcggccacctctacctccacgcccgcagctccccgggggggggggggcgccagggttgtttttccatccccacaaagttgttttttccatccccagaaagagagagcaagaacaacccaaacaacaaacaagcccccaaagaagtcacggggcggtggggggagggagaaacatacatcctccttccccaagcccctggacctctgaggacaaacaacacaacgaccgacttttattttgcaaaagggaagcaacattgtagtcacgacaattctgcagagagaggaaaaacttgtggggcttgcacggccgccgaggtcacctcgcccgccggtcccccgcctcccgcgagcagggcagccccctcccgggacaagccgttccctttttttttttttttgtcccgaggaggagccggggaaccgtgccggctgggactcggggcgcgagcgcgaccccggcgcgagtgtaaatcagtcacctgagcgcagaggggccgcggcgagggcgcgcgcgggcgggcggggaggcggaggcggcgagagcggaggcccggaggaactcggagggggagggagagaaaggccgagacggagggagccagcggcggccgaggggctggtccaggcgcggccgctaagaggagaccaagaggcgggggctgcacttgacaaccagcatgccgagatggtaagaagtttccaccctccttcctcttttattctagacttcctcagaaatgacccccgcgcccgagcgccaccggggccgcccgggggccgtgtccgccctccggcccgcggcgtgaggggcaaggggcgctgaggagggcgggccggggaccagaaccccggtccgacctgatccccgctgcgctcccagtggcctcccctaaacttggccccaagtttccgaggcgagctctaggtgggagggtgcacgtgagagggggcttctcaaggtcggccccgctcgcggcttccgcgcgaaggtgagcggctggctaggggaggctccagggcgttggggacgggctggggggacgaggtggaggggagtgggggatgaatggagcgctggcaggagctcggggaagagaggaaggcggctgggacctacgggaacttttacaacttgccgccgagtgagggaccggcggctgggcgtgggtgccgggtgcgctggggcgcagccgcccgggcccggcacgttgactcttcctctcccctcgtcttcacattcggaatcttcccgtggtaaatggagatgggaggaaatgctcccgcaggctttacggagaaggtgcagaacgcagggcaggaaaatcaaccttgcagagacggctcttttcgaagtgcaattctataggagccgatttgttttacttgcacgttgactggagggtgggatttggggcctggggagggagcagaataaaaaattatatatgctgaaaaaccctaggtgaaatctcctgtgaagtgagtttaaggttgaaaaaaagttccaagtgcaagtggtggaggagatgggctggctttgccaagcgagactccagcacagcccctctacgagaagcgacttctttgcagcgaggaagcgtgcaattagttcgcctggtgatgagccgctctgtccgctttcggggaagtgatttgttagaaatggggcttgaccactcccttctttttagtttgcttcctcccagcgtcgctattgttacccccacttggggatctgacatggtgtattccgtatatagagggaacatatgagaatacaggtgagatagcgggttggcattttttcctcttccctgctccctaatgtgacatctcttgtttcagtgatcaaagtcacaactggagtgtaggagatgggactgtcaaatgcaggggcgcgtacacacacacacacacacaaaagcaagagcccaggactgtggttacagtaacgctgacagaaattaaagtggttttgaaagcagcgtgcgatttatgatggttcccatttaccctagagtcaagctgttgtaaaactgacgtacaaaagacatcataaaataatcctgtgtacccaggattaaagtggcagaaagtggcctgttttattatttttttatatacttcgtggacacttggaattgttgaaagccgtgtttaagtgagacrtcacaacaatattaaatatatctgtttagagcttgagagtttttcttctaacgggcgttttacacaagaacactgtaaaagccggtggcaggtattatttttcttccctttaccctagcctatgttaactatttgtctacacatgtattcctatatcctaatgactttgaactgtggctaagcctgtctgccttccactgctttgtattstgcaatttcacgtgttactgtccacacgcatacatgctttaaatgggaggaatttatttctggcacgttacttagtgtgtctgatctgaagatgtaccctagtagtgagaccttgtacaagttaacagaacatttactttttggacaaacacacacacacacacaatcccttgtgagcctttagagagtatctgtgttttatatttgtagccgtttcatgtaaactgttcagtcttaatgaagttcttagttcccagagtgcgctgtattaaaagtccagattgctaatcactttaccaaagtacaggagtatctttacctgagggaagtaataacgagcttgaacctgaactttgttttgagtatcttttgagaaaggtctgaaactttttttcctcttgagaatattaagttgggtggtgtttgcatgtaagactttgaataagaataaactgtgcattatattttacaattaatattaggaaaatgttaatagcagtacattcctactacctgattttttcttctatttgagatgtaagatatctgtcagatagagatatgtgattacaaaaagmagcagacaaaagcagagctgactattgctatattaaaatgtaagtgttacagtttgaattttcaagtgagagttcttgagttcagtgctttacataacattttgtcctaatcttgcttgctgtcagggatgtttcatggttgtgcaattgctgcagtcaagaatgccaatttgcattccaggagtgtcatttgattacttttatctgcacagctccaagaccggcccagacctctcgtttcatcttgccatgtcacgagtcaatgctgtgtcgtcttttcaaaaatctgcctgatttagacaagaaagaaaagtactttcatgttgcagccgcagtcccctgctaacttgtcagcagcaggatatgattcacttgggcccagaagaatggaacagagaggcgggttaggcggttcaataaagcccacggacaggtagtgtgtgacatccccagagagccgcagttaatgaagaacaggtctgcttagttctccacacgctgacctggtgctgtccccacagttttctcatttgatctttcccagcaaattgatcttttcttgtatttttttgccttccaagttagtccttgtgggactgaaattagcagagcaacttaagttggataatacagctgttcagaaaagaagaaattggacactggctcaaaaaggggtgggggtgggggggtagagggagctattctttttgttgttgttcctgggaatatttcttatattaagggagtccaaaatagatgatgacttgaagttagtggtttcctttacttttaattttacagttaagggttcagcacggttttaaatattccttaagtatttgaaagatggccttagtgaatatgaggagttcaatttagtactgttcacattcacttgtttgagatgatttgccagttgacaatgtggcttttatggttattgtaagatggcatacttcaactgtattatttatagtcttctaaacaacctacgatccccaaatatccaatactaaattgcaggtaagattaaacaataaaaaagtcattatactagtattgtgtataaatactatggtacatgaaaatgttttctatactattagcatctttgttttatataaaccccacagatacagttcatgaagtgtttttttcctgaatttttgagattctgcatttaaatgtagatttttaaaactgagaccagaccacaagtttgaatttctgtggatgttcatacatgttgttgttttttgacattaaaattaattttagacaggatgggtaaatttatgtcgtatggtttaatctgattaaagtttcactatagaattctgtacataaagcttaggttggaagcagtttatagattcttaacttgataaatatataaggagcaacgctttctgatttactcagcagatggtctcatttaccatctacatccttacaagaaacagagtggaaaacatttcttgtggaaggggaggtagcctcctcaaatctttcctgttggatgggaattatatagtatcattggttagtaaactcccctctgaagagctagagggagcctcatgattttattagatatacttaaggtttaaaaaacactctggccatcagaatgttgcacaaaaagagtaggtaatgaatactggctcagtgttgaggctgggaggtgctattatggttttttttttttttttttttttaaagtgacagaagcaaaagaactttctacaagaacagtcaaggcgtcagctaagctttctaggcttttgcctttcaggtgatttgaagatcaggcaaaatgcaaccagatactatattttaaatgttttggtttgactaactactgtttgtagtttttgtcaactgagggagttactctcgttttaggaggccagtcttcaragttctattaaaagtagcttcctacgaaatcaccgagaagtgggttaacttcttttagtttatgaaggacaaccccttttctgtaaatgatggttttggagtagttctacatacaacttctgtattccagagagaaattttctttaaaataaatgcttcctgttataagcataaatgttaaactatttataaacctgacttattatggatcaaaaaataagttaaagaaataggatttaaatgatattacattcaataattgtcatttaatttcatatttaccactttccattaacatttgtgatacagttatgttaaagagtcattgatcataattgcactttaatatttatatactagtttttaggagcattactttagacaaacatatttatcatttaagtaaataatataatccagtgagataaactacccagatttgtccttcttaaaatcttttgcacagtagctctcattatgttgctagccaataaaagtctttatttgttgcttattagaaccctcagtacactcaagagttcagctataatttaatttggctgttcaaagagcctcccttgttttgaaatatattctcagtatgcttttaccatttgttacgaacccatattctaactcaatgcgtaagaacctatattctaactcaatatgygtaagaatgatattacagatatatcattctttaagtttttgctatcgtcataacttttttcctttaaaaatatccgtacataacaayatcagttttgttctttttgctctattttctctttgacattctagagtatttttctcttggtgatttaaattgttttgctgttataatttaaaataaacttcctaaggaatacaaccttcccttgaggtatagtgagaagggcaccaaaaaataataggttcgataattaagaattctagctgaggccatttcacagttgcaatcacttacaattacaaaaagtttgcctggtacttcacaaattgctagtaactgctgtgaagtttttcaatgagtagaaggtggctttgagagttttggttgtatttgtaacaaattacgttcactaaagactagaacttgactataaaactctaataagatgagtatcaggaattcttccataaggaaggcagaatgtgaaactcctaaatgactcactgtgtatgtatcttaccagtgggaatagcatcaagccagccttctagatacagtatttaatagttgtcaaaatgtacagtattgtcttggaacttgtggttcatgagttcatagtccctgcttttttgtgtttattacaaagatgtaacaacctacacaaaacatttttctcttataatgaccttacatttgccaaagtgccccatgctgaaattccttttcagtgtctttttttttttttttttcagtccaaagccagacgtgtacccagacacaaaagcctctgtgtatagcaagctgttttaaatattgtgactcgacgatgtgctgtcctttctctgcttgagccaaggatctctgctcagtgtctgtggattaccaagctccttctttattgtacctcttgtcaactattcctattcatttaacctttcattagtgtctgtgcagcttcactgtctggaaaggcaaggaaaaaccgaaaggccccactgtcacagttattagatttctcggttacatcccagcaaccgtaaagaagtaagcgtcgagactattgtcgtgcatgctgctgtcctggggtgcagctcttctgtgcatgtcaaggacatgtgccacatgttgatatgcatcccagggataaatgcacaacatgggggataggccgacgctggcagtaatgagctttgtaggagttattgcaaagwccaacagtttgtgaaggaattttgcttaacaggccaaggagatagacagarttgagggttgccaagatttgcctgtgcggggcttgtcagtcacattgttttcatccaaacttcatttgaggggaaaattgaatacatttgacagcaatggaaagtcttattttcttttttcaaatctttcagaggacaaaagcagtatttctggtgactaacataactatttttagtactgactaaatcatatatatgaatggatctattagcagtttatctttttccatatctagagaataattaaaagatatttcatagatgtcatatatatgttttaaaatctatgtaaaaataatgtagcctattaattttcctttgctcttttcctcctttgattttcctctagcatagcctggttctttagaaatacatttgcttaattggctagatgcagaggagaaaaaggatgataatgtggtcattttcaaatcataaataaaayaagtatttgtaaattttgtattggaaaatattattttaaaatcttagagatgaagagaattacctttttaagaattctgaaaacacttgaatagaaaatggtacattataatacatttgtccctctttacccaaaagtttgtctttttttcttttttaaactaggagaaccgtttttactgagggtaaataaaatatttttgtctcctgatttcaacagattttgtcagttttccaaactcttttggggttctccaataacttttcaaatatgttaatgacttattgccaaatccctgtaaagttatttttaatttttcttgaccttacctcttttaggcaaggctttttaacagttgtactttctctgttaaggttttttttgaaacggaatctcgctctgtcgcccaaactagagtgcagtggcgtgattttggctcactgcaacctccatctcctgggttcaagagattctcctgcctcagcctcccgattagctgggactacaagcgtgcgccactgcgcttggctaatttttgtatttttagtagggacaaggtttcaccatgttgtccaggctggtcccgaactcctgacctcaggtgatccactggcctcggcctcccaaagtgctgggattacagtgtgatcccacagtgagccactgtgcccagccacctctattaagcttttcttagtgtcttgtgaaagtatgggctaagttatccttgttttagggagagagagttatttttcatagtctttcccccaggtgggatgctaaatgcccagctatcctatcctagggctatgccccagccttttggccagcgggcggaagtactgtgtagaatatattgagatggggcagggcgtggtggctcatgcctgtaatcccagcactttgggaggctcaggtgggtggatcacaaggtcaggagttcaagaccagcctggccaatatggtgaaaccccgtctttactaaaaatacaaaaattagctgggcgtggtggcgggcacctataatcccagctattcgggaggctgaggcaggagaatcacttgaacctgggaggcggaggttgcagtgagccaagatctcgccactgcactctagcctgagcgacagagcaagactttgtctcaaaaaaaaaaaaaaatctatctatatatagctatatatagatgaatctgccgtggtcatctaaggctggtgaccttcccacagaaaaagcatgagtgtcttaacattcctttttctaacagtttcatttccatttattatggtttgtgttgggagtagtagaagagaaaagagggacttgtgaagatgaaggccataattttaactcttcccctggcaatgaaaacccccaaattagracaaaataggttagtgctgtgtggtaattaaagagagaggaatacatggcagtagctactctctgcaggtatcctgcacttgttctttatccagtcagtatctctacgcaggtgactggctgtttcttggaaggcagttgtactgttgcctgttagagactcagaacagcgctgggacsgggtatctatagaggccctgttctattccacctacttttgatagcctgtgttctctcatttgtaagtcaagtgagtttggtaatttctaagtgcctttccaaatggtacatttcatattttatataacactatataatcatagcagtttgctagtattagctttattgagatataactcacccacttaaaatgtacattaatattccattttatggatgtactacctcttatatatccattcaatgaaagcacatttgggttgtttacactttttgagtaatgtggccctgaacattcatgtacaagtttttgtggacataatgttttcatttctcttgggtatatgctcaagagtagaattgttggatagtatggcctatctacttataactttttgaggaacttccaaattgttttccaacgcaactgcagcattttacttttcaaccaatagtgtataattcttccagtctctctacaccctcctcaacacttgttatgtgtcttttttttttttgtcttttgagatggagtctcgctctgtcgcccaggctggagtccagtggtgcaatctcggctcactgcaagctccacctcccaggttcacgccattctcctgcctcagccttctgagtagctgggactacaggcgcccgccaccatgactggctaattttttgtatttttagtagagacgttgtttcactgtgttagccaggatggtctcgatctcctgacctcgtcatcctcccgcctcggcctcccaaagtgttgggatttcaggcgtgagccaccgcgcctggcccttgttattgtctttttatttttacagatcttagtgggtgtgaagtagtatctttttatttgaatcatactagtgactatgaagtgatatctctgtggttttgatttgcatttgcctgatggctagtgatgttgagcatcttatgcactttattggccatttgtgtatcttttctggaaaacagagacatgtctccattggccatttttcacttgggttatttgtctttttattatggagttttaagtgctgtttatatattctgagtacaagccctctgctaggtacaaggtttgcaaatactttatcctattctgtgggttgtctttatttatttatttatttttaaagagacagggtctttctagttctgttgtgcaggttggagtgcagtggtatgattatggctcactgcagccttgaactcctgggctcaagaaatcctcctgcttcagcctccgtagtaattgggactacaagtgcaagccacgatgcctggttaatttatatatatatatatatattttgtagagatagggtattaccatgttgcccagcctggtttcaaactcctggcctcaagcgatcctgtttccttgaccccccaaaattctgggattacaggcataagccactgtgactgtgcgcagctgtcttttttttttttgagacagagtcttgctctggcgctcaggcagtggcgtgatctcagctcactgcaacctccacctcttgggtttaagccattgtcctgcctcagcgtcccgagtagctggcattacaggcatgtgccaacatgcccggctaatttttgtatttttagtggagatagggtttctctatgttggccaggctggtctctttaaactcctggcctcaggtgatctgctggtcttggcctcccaaagtgctgggattactggcatgagccaccacgcccagccccggctgtcttttgactttttgatggtgccttttcaagcacagaaatttttgatgaagtctaatttatcaatttttgttgttgttgatgtttctgtccttggtatgctatctaagaaactattgtctaacccaagatcatgaagatttacctctgtgttttttttgataagtgtcttacagtttgagctcccacagggtggattcatagatctttaatccatttggattaacttctgtaaatagtatgaggtaggggtacaactttattcttttgaatgtggatgtctgttgttcccagcactatttgttgaaaagacagtttttctccattgaggtgtctgggtacccttgtcaaaaattaattgaccatgatatataagggtttatttctggaatttctgttctattccattgatctttctgtctgtccttgtgccagtaccacactgtcttgactactgtagctttgtattaagttttgcaattgagaagtgtgagtcctacaacttcgttctgttcttctttttcaagattgttttagccattcttagttccttagaagttgactttttaaaaagcaatttggattgtggtagaaaacaacgtaaaatgtatcttgttaatccttttttttttttgagatggagtctcactctgtcgtccatgctggagtgcagtggtgtgatctcggctcactgcagcctccacctccctggttcaagcaattcccctgcctgagtctcccaagtagctgggattacaggcacatggcaccatgactggctaatttttttgtatttttagtagagatggggtttcaccatgttggccagactgttctccaactcttgacctcagcattctgcccgccttggcctcccaaagtgctgggataacaggcgtgagccgccgtgcctggcccatgttaaccatttttaagtgtacagttcagtagtgttttctgtaacttaacgtacagcagatctctagaacattttcattctgcaaagctgaaattttttaacctttgaataacaactcccgtttaccttttcctcccagccctgggaaaccactattctagcttctatttctaagagtttgcctactttagatgcctcatagaagtggaatcatgcagtacatatttgtctttttgttccggcttatttcacttagctagaaacttaatgttcttaaggttcatttatgttgtagcatacaacagaattgtcttcatttttaaggctraataatatttcatcatatgtatataccacattttctttatccattcatctgtagatagacatttagtttgctttccacctcttggctcttgtgaattatgctgttgtgaatataagtatgcaaatagctgtaaaagatactgctttcaatctttggacatatatgtagaagtgggatagctggatcatacagtagttcttaattttttgaggaacctccatactgttttctataagggcagcatcgtttacattcctgccaacagtgcacaagggttccaatttctctacaacctcacagcttattatttcctgtttttttttttgatggtaaccattcaaaaatggttgaggtgatatctcagtgtggttttgatttgcctttccttgattcctgatgttaagcatattttcacgtgctttttgggcatttgtatatgtcctctttgtggacatatctattcaagtccttcacctatttttaaatcaggctttttttgttgttgttgagttttaagagttgtctatatgtctataccccttatcagaaatatgatttacacattttttctcactttctatagtttatctcttcactctgctgattgtttcctttgcttttgcagcacagaagtttcttttttctttttttcttttttttttgagatggagtctccctctttcgcccaggctggagtgcagtggtgcgatcttggctcactgcaaactccgcctcccgggttcacgccattctcctgcctcagcctcccgagtagctgggactacaggcacccgccaccatgcctggctaatttttttgtatttttcatagagacggggttttaccatgttagccaggatggtcttgatcctcctgacctcgtgatccacccgcctcggcctcccaaagtgctgggattacaggcgtgagccaccgygcctggccagaagtttctaagtttgattcagttccatttgtctattcttgcttttgttgcctttagcagtttacttttaaagctcagatatgtctgatcctcagaagagtaaaggctacattaaaaaagtacattctattgtttaggtaaaaaagtcttggtagtactccaggggacaagaaatatgtcatttggtagccaaaaaatgatagctcctggttccctgtgaaacaccctggttttactttgatgtttcttaattatcattgagtttaaaagcattctaggtgttccgtatgataagagacacacttcatgccctgaagggtggaattaagtacccagaaataattgtttttggttttataaatacctcaaaaggaaagggggaagaaaaccattattgagaaaatttgtcttcctagacatcccgtcatgactagaaaaacaccaacagagataaaactaaaaattattgtatgatytccaaacccaaaataactggtccagtgaagttttatataaataaccatgttcaaatctggtatagcatatttggaaacatgagcttgctttacagtttacctggcaaattttgtaattaaaatacctcatcgttgaattagagaaacttgagagcaaatgaaaggtaacttaatttagaggcagctatattgcttcattgttgaattaaaagaaatattcattcccttacagttctaattttctctttattcatgctaataaaggctgatatttattttcatctaagtaattgcttttctagtattctgatggaccattcttcactgcattgtctgtttctggccttttgccagttattttagacaaaagtttcattatttagtcagcatcaactattaattagatatgtaactgttcaaatttatacaaagcgagtgtgcattttttcatcataagtgtttacgtacataaagagtaattatccaatttaaaatgatatgatgtattttaaggataattttttttttccctaggggaaacaattctgtgaaaattctgtagaggatttaaaatcacttctttttttttttttttttttttttttatttgagacagagtctcactctgttgcccaggctggtgtgcagtggcacaatgtcggctcactgcaacctccgcckgccgatttcaagtgattctcctgccttagcctcccgagtagctgggattacaggtgcctgccaacccgcccggctaattttgttttgtatgtttagacggggtttcaccacgctggacaggctgatctcgaactcctgacctctggtgatctgcccacctcaacctcccaaagtgctgggattacatgcgtgagccactgtgcctggcctgaaatcacttctaaaaattgttacagtaaaaattttatgtttaccagacgtaaattttggttacatatacatttatcccaattgacacattttattcatactgaataaaacattaatgttacttttctattttttatgatgtattttgacatgtgtttagatgtatgttttatatgtatggactgacaaaatcatatatgctattatttggcatcttatgtggttggaggtcataaagaatgtaagtaactgaaacaatacatttgctcaaagaaaggccactcaattctctgccctgtggtatctaatytccctgtaatacacawttcaccatctaggattggagaagttcattctatcaacacgartgctaacaggtaggcttctggaagtacaatgtgatagttcagatctttctctgattcaaaatggtgatttaaaagaaaacatacttggctgaattggcttttgatagactaaaacattaatttgccttaatgtgcattaacgctaaaggatactaaaaaacaaaaatttttttaaacccagaaattctaccaggtctggagccatatttttcacccagtaaatgtcccttgtaagaaatatatttacacgaagggctgggtgcagtggtgcatgcctgtagtcccaactatttgggaggctgaggcaggagaatcattttgagtctagaagtacaagtccagcctgggcaagatagtgagatcctgtctctaaaaaaataaataagaaatattttcgcttcaagaatttatttatatctgtgcattggtctttgaagcttcccttttgtctgtaaacagcaaccagtcgctgacatgacatatttgtgtacaaaggacagtgataattagatatgctggaatttgtgtgtgtgtgtgtgtgtgtgtgtgagagagagagagagtgtgtgtgaagaaatatggatgagaaactggtagtttgctgcttccttatgggggagggtagaaggcagaatagaaggtagaatagtatagttgactgaaatttttttggaggggaagggcagggtttaccattaatgtactttcattttgcaatagataatacttgatacattgttttttgtggtttttaacatatatttatggatggcatggatgaatgttgagtgtcttacttactgttttactagtatgactgtcaaattgcattcctgaagtacggatatgctaaggtaataaatctgctagcagccagcaagtaaatgtttacttactatatatagaataacttgctgcagatttccatgaaacaacattagacaattgtgtactgatttggtaaaaataaaaaagatgtggccgggtgtggtggctcacgcctgtaatcccagcactttgggaggccgaggcaggcagatcatggggtcaggagatcgagaccatcctggctaacatggtgaaaccccgtctctacttaaaaaaaaaaaaaaatacaagaaatcagccgggcgtggtcgcgggcgcctgtagtccyagctacgtgggaggctgaggcaggagaatggcgtgaacccgggaggtggaggttgcagtgagccgagattgcgccgctgcactccagcctgggcgacagagcgagactccgtctcaaaaaacaaaaaaaagatgcttttaaaaattgttagattttgatgttcaagctgtacatttggtgtaggcatgggacttctaattgccttcatttgccaaagtataacaacctttttttattttagaatacaacaatttaacaagcgtttgaatttctatgatgtatgtgatactctattaggtgccataggtattacagatgaagtagaagctgtcatcctaagagagagcacaaaattcactggtaaagggatattcattatcttaaaagaattaaccatagtccatggtcttcctctggcatatgaagccttaggaacctaattttgttaacataccattgagaaagatcaccttttcatggatgcattcagtttgttcaccagctgaggagtggagatcacacacacacacacacacgccatgtgaacatgtatgtatctgtataccatatgaggtggaatactcatgtactcatattgaaatgattagtacgtcttctccttggcaggcaaatttaaatggggagtcagattataatccaaatgttgttcatctctttatggggttggaatttcagcagagaatattaagggtgggatgggggcctgagggtcttctcctcctatagagaaattctttccagtgacctgtgatgttcacggtgcacactttggactcctttcctgggctgtgcttgtaagagtattgacrgtgtttacccctcttgctttttttctgctaccattgcccttgtgatagacaaatttctctttctttagrtacgttaatattctcaagcagatattaggcaactgtcctgggagctagttgttaaggtgactttgcctctctttggttttttatggatctaatgcagatggcagtctcatttcactcgtttcaaattttcttgggggatacctcatgctactgccttacacataacatgttttgtatacggataagtggaaatggtggaaaaaaagatatatattgcaagaaaaaaaagacttagaaactagttattaaatacctggtagagaaagtttcttttgttaaatgccttatagagaaatatcttgatctgaaattgactttatatacaggtggaataaactgctctagaaatcaagagggagtatgtgtatttaatctctgtatctgttttctgtgtctcttttccatcctaaaataagggttaagattaggttttaaagattcttaataattctgtacattgtgtgatgcccaccatctatttgtggtattattttatggaccagaaagttaaagctgtacctttaatttcacattggttaattctagcagcttcccaattagtgtcatttttttacctttcaatctttccttccttttaaaacacttgaacatcaagaataatctgctatgggaagagaaagtagaaaggaaagacactgaacaaacatccacttgatgttaggcagcaggacagragttggtggtccagggagcagcctgccggcctggtgtccttaggctccagtctgactttagaagtcccatgtctatgaacttacatccataagttcaggcgacatgtaagtttccgagcagtcatagtacaagcatgtaatgtgagaattttattatttaaacccgcagagcttaatgaactccaaattttattttattttatttttttgagacagagtctccctctattgctcaggctagagtgcagtggctcagtcttggctcactgcaacctctgtctcccaggttcaagcarttctcctgcctcaccctcccgagtagctgggattacagatatgcactaccacgtccagctaattttttgtagttttagtacagacagggtttcaccatgttggccaggctggtcttgaactcctgacctcaagagattgacccatctcagcctcctaaagtggtgggattgcaggcgcgagccacagcgcccagctgcaaattttaaatttgaaaatgtgtctgaaatgaaaataaagtgaggggaggtgttggagagaatggagaaattgcacaggaattgtagaacatggattaaaatgtaattagaaagttacgttgaaaatcaaagaactagttaaaatgagtgtcattatgctttttttttttttttttgagacaaggtctcactctcatcactcaggctggagtgcagtggcatgatcatggctcactgcagcctcgacctccctgggctcaggtgatcctccaccttagcctcctgactaactgggcctacagctgcatgccaccacggccagctagttttttgtagagatggagttttgccatgctggccaggctggtcatgaactcctgaccttaagtgatccgcctgcctgggcctcccaaagtgctgggattacaggcgtgagccactgtatcctgcccagaatactattgtatcttctaagtggcctagtacttctatgcttgcctctctcctcccactactcctagaagactatccacaggttgatcacttcttatctcacaaccttccagtgacttcttatcatacctgcagtgaaatcccaactccttaccatcactgaaaaggatatgtaatgtttgtgacccagcccaactctgacgccgtttcctgccactgctccctctaatccagccttgctgattttccacaggccatagaactttgctaagctggtacctacctcagccctttgcatggggtttttctctgcctgtgaggttcttttttttcacacttttgcagggcttcctccctcatttcactagagtctcctctggaatgtcagtcctttaaagagaccttcctgccaaccttccctcctrtgtccctatcagtgtatgtttctttggtctcttaccctgatttttttcttcacagcacactgccgcttgaaagtatatttaatttttttatttacatgtagtttatcttcccaccaccatgaagccccataagaacagggtcctttgtcttactaattctgcatttccattacctgtagcaacactcaacaaatatttattgaatgaatgaatggatgaatatctcacatatgattgtccttgtgaatatgaacggattctttatcaatagttatcaaaacttatttattataaccattgagagttctttggcatctgctgctgaacttttctgaactgcttatgcttagctcagttggaatagtggtttccaggatagatgtaaacacttcaaggggtatgcagaaatcatcctttacgatttgggggaaaatatattagaaatttgatttatcttgttcacctatttttgtgttttatagtgtgcatgatatatatataaggggaacattgtgctgtcaaaaaaactgagactggatagagcatgatctggacaggatggttaactttgtttaaagcaaaatgtatctctgtagtcaggctattttacagattttgtgcttttgtataataaggcggtgtgactgcgggtgagagtgtaaaatctgttcccactcttcaaaagatcacacatctcatgttgagttgaaagtgaaatattatatatgatattcagcatgaatgtgtatatctatatgttttatttaatattcatcctctggtggaatttacaagtctcttcagttcagggtatacctgttttggggtcctttgtacctgtgctaacatatgtgtgagaagtatgtgagctctttcagtgactgaaaaaattattacttgattggtctgttttggcgtgatctgggcttttgattaatctttgaataactttttccttcatttttaatagttcaggcttgttaatgatgcttcactggcttctttgggtatctgtgacttaagtttttaaaaacagttttattgagaaataatttgcataccatagaattcattgctatgaaaagttttacagtaccattttataattacatgtgattttcaagacacaggaaaataaagaaatggtatgcttagaatttggaagaaagtctagttatgttttcattttatttttatttttttgagacagggtctcaccctgtcacccaggctggagtgtagtggcatgatcatggctcactgcagccttgacctgctgggctccagcaatcctactgcctcagcctcctgagtagctgggactacacgcatgagccatcatgcctgggtaagtttttttttttgtagagacaaggtctcactatgctgcccaggctggtctcaaactcctgggatcaagcaatcctcctgccttggcctcccaaagtgctgggattataggcatgagccactgcacccagccactgtactgattttaaatactttttaagtgaaatgagattttataacatttgaagaacttaaaatgtttgacaggattaataaatttgaatgaagcattgaaataattactatactaatgaatacactaaggaaatttgaaaaccacaaataagcagttacaaataagtattattatttataaaatagtcaccctagaagatgatgcagtgatggtgtcatagcttaaaatgctcttggaggtcttcattttacattgatttcagacagcctgtgtctagttcttctaagcgtctttggtgctagcaaatcttccatgacataagctttgattttctgaatcttcaaaagtcttttggtgttaacttacttggtgggtgttaaaacaagataattctatttttgattttttttttttatttactttttagaagcagagtctccctctgtcaccctgaccggagtgcagtgatgcaataataactcactgcagccttgaactcttggacttaagcgatccccctacctcagcttcctgaggtattgttcaggctagtctccaactcctggactcaagtgatccttccaccttcaccttccacagtggtggaattacaggcatgggctaccacccccagcctatttttgatttagaaaaaagacaacattgatttttcacatatagtttacaagttggccctagaagtatttacagatgatgagttctagaaatattttgagcaatggtagcattgttggaagaagtacagtgtcttaagctgacaattttgacattgattctttcctcccactagttatggagcttctttaaatctataaaaagccatttcactatataagaattggtatcatattttgtgcacttatagattcatgcgtaccatacatgcatgcttataaatatcattccactgaccaaagtgtgttattattttgtagccctttgtagccagctctatgttttaagtgcctgataaattctactgtagagtgaattttttctattctaagtaaaattttggagcctgagaaggcttctaaaggcaaaggatatcaagaaaagttttaactaagatgtgagactgcatgagtgcttcatgatacgaaatggttttatatataggtcttagataagaaattagagaggttgacagataacctacctagtctgtttttttagttgagcaaatctgtgtgtggggggcataaacaaatactagtgacattagaaatcagaaagctagtgaagtacaaatttgtgcacataacactgtttgtgggacagccttattcatactggtctttgacaaaagtcaaaggaaaaagtagttgccaaagaggaatatgacttttttttttgtactttagggtttgtttttgaatttcagcaagttatggtttgaggtaatactaatcagtttttttatgttgactttttggttatcaattaagaaaagcattagtgctttggaaaaatctgtgttrttgaacttcttccaatttgtatacaacctcttctccacagcgtaaaatgcaaattttgcatggggtcaggtgcggtggctcacgcctatagtcccagcactttgggaggcagaggcgagtaggtcacttgaagtcaggagttcgggaccagcctggccaacatggtgaaaccccatctctactaaaaatacaaaaattagtcgggcgtggtggcatgcgcctgtaatctcagctactttgggggctgaggcaggagacttgcttgaacttgggaggtggaggttgcagcgagccgagattgcgccactgtactccagcctgggcgacagagggagactccatctcaaaaaaaaaaaaaaaaaaaaaaaatcttttgcatggaatctgcagatctaggaatcattttattgttaaaaatataactagcaattttgaaaattcagtctgctttgtgaagtcagactctagaaagtttatagatttttttggtggggggaatgagagttcgggaaataaaaagaaatgaaataaatttgactccaggaaagctaattttacatttgtttcttcattcctccctggggctctctgaaactctggaattttctcatttaaaagaaagctagaacaacctgtgttggacatacaggttgagcctctggtatttgaaatgcttgggaccaaaattcagatttattcagattttggaatatttacatttacataatggggtatctcagggacaggacctaagtctaaacatgaaattcattaatttttcttatatattttatacacatagcctggaagtaattttgtatatttttacattttatgcctgaattaaagtttgtgtacgtggacatcagaaagcaatggtgtcaggtgtggaattttccacttaggacatgttggtactcaaaaagtgtrggattttagagcattttatgatttttggatttaggatgctcagcctgtaaacttgagggtcaaacttttcttgygttagttgaaatctcctgggtgctttcttttaaccaaatcccaaagtcttttttataactaatatgctagatttcctacattgttttatgaaggtagagagggtccttagcaggccttgttttcaggtgtaaagttctgctggaccaaaacctgagggcgtaattaacagtgtctttggagggactgtttgtgctgtcttcatggaccatttggctcataagatgggatttggttcataattcattgtcatgtactgtaactcctgtgggagtataacgtctagctgttttgcattggataggttctgaatgctttatcttgttccagggtggattattatactcaagaatgcacttaattacaagctttatgtttccagcacccattcacaatacctcctcttcactacacctgacttcatcgatggaatttcatttgtagattgacttgggagatggaagctgtcagacttgaagtctgcctcctttttttggtgccttctctttactttgatattttgaacctttctaacttaaaatttgtttttaggttaattttctcagcaaaagaaatttatgtttgataagatactaagggaaaaggcagcatttattaatattggatgtttcctaattagaatatcttaagagtttgaattttgttgtgttttcataagctactgcatcataggtttcattgtctttgaacagagacttagaaaagggatgctttggaatatttcttgtttcagtcttttgagattgaacacacaggtttcttacaggatttgttttttatgtatttatgtaacctgtctctccagtttcctgaattcatgcttcatatgagcttaatcatactttattttaaataatcaactgtttacacatctaccgcacatgctgctccgtagattctcaggtgtatctttatggtcttttcatttttctgtctttatcaaggaataaatgatcctaactggatcatgatttacttgtggatttattcaatagttttgtgttttagtttttaaagccttgctcaatggttatggtttggggatatcttgatatatctcggacaagcttttaattgtcaaaattaagttatactgccttgtatattttagtcttagaatttaatgttctattcctgattgaaaaacctgtgactagcacttcaaaatttcctaaacgagaaatcttcagagagatgtttaaacaaatcaaaatatacttaaagtgtaaaaaaggtaatttgatgtggcaagttttaaataaataaaaaaaataaaggcacacactccataacctttctttgagtcttggtttaagttctctgtcatatagtgccaaaaactttgttttgagctgcgtgtgtgttgaaacatgtatgcctgtcctagtgtcataactaattatatctcttatatgcttacttctagtaattggaaannnnnnnnnnnnnnnnnnnntattttaaataatcaactgtttacacatctaccgcacatgctgctccgtagattctcaggtgtatctttatggtcttttcatttttctgtctttatcaaggaataaatgatcctaactggatcatgatttacttgtggatttattcaatagttttgtgttttagtttttaaagccttgctcaatggttatggtttggggatatcttgatatatctcggacaagcttttaattgtcaaaattaagttatactaccttgtatattttagtcttagaatttaatgttctattcctgattgaaaaacctgtgactagcacttcaaaatttcctaaacgtgtttggtcaattcttttttcctttttaaccaaatgaattttataaagtcaacttccttaatttgtaatgtaggctcagtgaaagcttcagggttgttgcccgccgcccccccccccccccccgagaaatcttcagagagatgtttaaacaaatcaaaatatacttaaagtgtaaaaaaggtaatttgatgtggcaagttttaaataaataaaaaaaataaaggcacacactccataacctttctttgagtcttggtttaagttctctgtcatatagtgccaaaaactttgttttgagctgcgtgtgtgttgaaacatgtatgcctgtcctagtgtcataactaattatatctcttatatgcttacttctagtaattggaaagtagacctaccgcagcatacatcttcacatttagttttatcttgaggacctgctacagagatcattttctaccatgcagcaacttgacattgtgaacagatattactattttaaatatattatctactttgtgttttgcagaaatagtgtactttcagggaagttaagtttcgggtgtttccaaagcacatctgtctttaccagtaattatacactaatactgcctttgcagttttgactgagatatttcatctgtgaattggaaattgatggcctagtgctgtgatagcaaaattttataggatttctttttactcaaagttttcaaaagattgtggctgatggaaaacctgctggtgctttggtcacttactcttcatggattggtctaaaataatttggggcttcttttgtaaaagtgtattgtagaattttcacaaacttagaaatcctgtcttagatatgcttatgactggggccgcaaactgtttctcatatgcaccagcttgtatgaaaatatgtggtccttgtccatgcctgctgaaagagaaaccctaccagtcttcagtttctgagctgcagccttgtcgaaattaaagtcttaggactgggagcagttaatgctggtgatagattgtggtatttagcgctgtgctgtgttgcgtggtggacttacacgattctagtcagaacttgggaaagaatataccacagaattggtgacaaatatttttcaaagagaaatacgatgacttttcttattaatgagcagaccttttgggctttgcttaaggaaatagtgaaaagattgtrcagttctgttattgataatggtttagaatttaacactgaaaatgctggattttctttcctctwattaagttaatgtattactttgaagcatcttttctttttttacagttagaaattcaccaaaactatatttcaaacgtagctctttttaattttatactaaattaattttttttttttttttgagacggtgtctcgctctgtctcccacgttggagtgcagtggcgcgatctggggtcagtgcaagctccgtctcctgggttcacgccattctcctgcgtcagcctccggactgcaggtgcccgccaccgcggccagctaayttttttgtatttttagtagagacggggtttcaccgtgttagccaggatggtctcaatctcctgacctcctgatccgcccgtctcggcctcccaaagtgctgggattacaggcgtgagccaccgcgcccgggccactaaattagtttttataaattctgcattgtttctgtcatatggtaacttaagtatgcagaggcattgaacttgaacattttgtgttctggaacgtggggtttggattcttggtataattttcctattttatttttatyttattttgagacggagtcttgctttgtcgcccaggctggagtgcagaggtgcgatctcggctcactgcaagctccgcctctcaagttcacgccattctcctgcctcggcctcccaagtagctgggactacaggcccacgccgctacacccggctaattttttgtatttttagtagagatggggtttcactgtgttrgccaggatggtctcgatctcctgaccttgtgatccgcccgccttggcctcccaaattgctgggattacaggtgtgagccaccgcgcccggccaattttcctattttgaaaacccaactaccgtggtttctttctaatgcgtatattatgacttgtagcatttgaaaagctccatggtctaggccatgtgacttctgaggactgtaactgtaaaaaagctggtgttgaataattaaaaactccctccattttaaaaaaatgcccatttctcttagaatttttatggtgtcagtcaaattaatgcaggtatgtttggttttaagaataacatgatagaaatccgaatttacactgataggctgcctaagagaaagttatttcaaaacatggggcatcctggcagtgcctgggaaggttggcccccagcccgactgataggaacttcctactcatcagttcgctgtgaagtactgacaggtggagggggtttaggcttctttgggttctgaacctggtgatgctactacctacacagtgtttggaaatcttgggcgatgttttgtttgtcacaaatgactcaattggggggctgcctcctgctatttagtgggtcagggacactgcagcatcaggattgcagaacaatttacatacagtgatgagttgttctgccccaaataccaataatacctttcccagaaatgactggatagttattgatataaaaaaatgaaaaatggctgggtgcggtggcgcatgcctgtaatcccagcactttggccaaggcaggtggatcacctgaggtaaggagtccgagaccagcctggccaacatggtgaaaacccgtctctactaaaaatacaaaaattagccgggcgtggtggcatgtgcctgtagtcccagctactcgggaggctgaggcaggaagaatcgcttgaacctggtaggcggaggttgcagtgagccgagatctcgccactgcactccagcctgggtgacagagcgagactccgtctcaaaaaaaaaaaaaaaaaaaaagaaaagaaaaatattcgtaaaaatactactcttgctccccatccctagaattaccacctgacatcttttttttttaaaggaatgttgattttttttaaggtgtgtacttgattgaacactgaattctacttcttaacgtttttaagtaaacatgatttgtaaaggcatatggatattttatgcagttggyatattaatagtatttagtcgtaagcccccaactcaaacccagatatacccgtttttgcaaacacccatcagattttatgtcagtgtttggtaaactagcacttaaaatgtgtgttgaaactcctgtctgtaatttttttttgtaacgtaaaaaaaaaaacttatgagaaattgctaaactcttataagatttattattattatttttgtagagatggkgactcactatgttgcccaggctggtcttgaactcctagccttgagctatcctcgtgcttcgtaggtgtgagcaaccgtgtctggscaaaagatttttaaatgaacaacaacaacaacaaaaaacctaagagtaaaaaccagaatttgataaaaacagatatttcacatactcgttgcatcctcatggcattatcagttctggcattttgacttggaagaaaaattctaacatgaatttctgcttgaattctaacatgaattctgcttgttttcaaatactattcaattgggagtaactgtttgatgaaaagcgtagtacctaaacctcttctccttccacacacatttgtagtcttacatggtaaacctaaagtagctcagaaacatttactaaaacccatttacttggtaatagatttttcatttataaaaaaggagcttaagaatatgtaggctgggcatggtggctcacgcctgtaatcccagtacttcaggaggccaaggcgggtggatcacttgaggtcaggagttggagaccagcctggccaacatggcaaaaccctgtctctactaaaaatacagaaattagctgggtgtggtagtgtgcacctgtaatcccagctactctgaggctgaggcagtggaggctgaggcttgagcccgggaggcggagcttgcagtaagctgagatttttgccactgcactccagcctaggcgacagagcaagactccgtctcacacacaaaaaaggaatgtatcttagtgtacacctttcgaacgaccataaatgacatctcagtactatctagtacaaacagaattataaccctgccctttttaaagagtattggctttggagttgtaaagacctgaatttgaatactgattctgctactgaatatggtagaatcttgggcaaattcatctatctctccatcagtcaattatctatctatcaaatctatttttaattatagtaaaaaacagataagatttaccctcaactttttaaagtgtacagttcagtaatgttaaatatattcatattgttgtttcattaaaaaactttkaattttgaaataagttcaggccttcacttgaggttatgagtttgactccagcctggccaacatggcgaaaccgcgtctctactaaaaatacaaaaattagttgggtgtggtggtgcacacctgtaatcccagctacttgggaggctgatgcaggagaattgcttgaacccaagagacagagattgcagtgagccgagatggcactgcagcaagactgcacagagtgaaggagactccaaaaaacaaagtaaaacaaaacaaaaataaaataagttcaggcttacacaagagtcagaaaaaaaaaatacaatgaattcctatatatcctttaaccagatttcccaaatgttaatgtttgccatgattgttcagtttttaaaatggagataaaattcaccattttcaagtgtatagtcactggtttttagtatactcacaaggctgtggaaccatcaacactatttagttctagaacgctttcgtcactccacagagaaactctatcctcaacagtaaatcctccattctccctccccagcccttagcatcttttactttttgacccactgttttctataaaataggtataataatatttatgctggagtgtttctgagatgacatatgtgaaaattcctagcatggtatctgtgtaatgcaagtgccaaacacccattcgtttctttttcctatcacagaaacagaaagtatcatacttatatctacatgaactattttggaaattctaatgccagcatcttttctaagtgaatttctcttactagtttggtaggtcaacagtttgcaagatactaaaaatcatagtggaggttcatatgttaaaataacataaggcaaagcagcttcaaaactccaaaaaatatgtgcattaaataatgtcttgcaggccgggtgtgtggctcacgcctgtaataccagcactttgggaggccgaggcaggtggatcatctgaggtcaggagttcgagaccagcctgaccaaaagtggtgaaaccctgtctctactaaaaatagaaaattrgctggacgtggtagtgcatgcctgtaatcccagctacttgggaggctgaggcaggagaatcacttgaactcgggaggtggaggttgcagtaagctgagattgtgccattgcactccagcctgggcaacgagtgaaactctgtctcaaaaaaaaaaaaacaaatttgataataatgtcttgcagacataggcttgggaaatacatcttttgcaatgggcagtcatcatgcatgcagctcttttcatggattaatcttttattttgaagtattttatcttttttttcacgttttaagtgtttaaacattttcaaactttgtatttttgattttataagaaggcayggtgaataccacagtgcagtgaaaccactcaaggatcataagggttccattgttaacttaaatgacccacacagaccttatgccctgggtttgattagcttttgatgatatgatggtttgattatggacatacagtttagccaggatatctacattttgaggaataattagttacagttctgatggcctcacaacatttttacaaatgttttctaagtatttatagtgtagtggaagtagcataggcagtgtaggtatagaaagcgtcggagtcctgagattgaatcccaactatgctgtgggaagtttgacaagggacagaatttctttaagcctggatttcctcatttttaaatatggagggtaataactgtcattgcttagggttggaatgagaattcaataagacatagtttgggtaaggatcagcacagtgcctgacaaacaaaaactcattaaaacggtggatatctttcagatttgcttatgtgttgtttaaagaaaggactcttttgcccattaatttgtgacctttttatctgcctagaacattgcccatgaggtcatttctgcccgtgaagtagagaactacagtgttcaaatgtggaatcggaagaacaacgaaaatactaattaccctagctgagaggttatagtggtggaactggtgggatttcagtcaaaaaagctgattttgttagatacaatattatctacagttaggcctgtttattgtggagtggccaaaatatgttatggtatttaaagagtagtgaagatattttccaatctgagtgcatacatgtggtaacccttctctgatgagcagttgtaggctcatttgacattagaactgctgaaataactatgattgaaatgtttatttggtgtcaggtttataaacattgtacttggtttctgtggcaggtaacaagcataggaataccaattttacccagtcccttgacctggtaattcttttttgcttttggtatatcttaccatctaagttcttgagtcttagtgacaaaactgtatagtgtttgtcacagatgtgcgtatttggaaaggcatacaaccactgcagtatttttgccatcatgacattaaaggaaaaacacttgtgatagggtgaataaatacttctgagcagaagyaaaggtcmagctttagagtgaacttttgagtgacagctagtggcttaagggggagacgccatgttaactatgggcattcattaactgcgtggatatgaaatggcagtaagttctctccccttttatgccaggggcattggattctgtaaaagcaaaagggagaggagcgtatgtggctgccaaaatgagatggtaagaagttaaatgatcaggacacagagaaattaaggaatagtaaggtttagtgggtatgtgataaacattgcagataggctctgtggtatggaccagaaggcacaaggtctggattttttctaacccagactctgtcactgactgcctgtttgatctttgtaacttctttggtacttctttagacctccttatctgaagttaaagatgtaaaacagtaaagatgtaaagagtaagttaaagatggaaaacaggtttcaactcttatcaatattgatagattggtaaaggctattgagaagagaatcctgcagctgtgtcttgcttgggtcattggaaggagttctgggattagtttagcagtttctggtgactgtcatggggtggtggtgggtgtgtgcttgcaggcatgcatgtttgtacgtaggtacatgcaccacaccgcattggttgactaatcatttgtaaaaatccttttcaattcagtctatatattggaaattacgtttttcttggctgtaaggttgagaggatcttctaatcagcctttaatttttctgactgaaagccagtgtacttctagttttgggagagaattacgtgctatagagctggatgcctaataggcatatagtgatggcgcctaagaaggaatgaaatggttggtccgagagctagagagtgcgcagcgtgctttagacttgcatggggttctcttctaacctgcatatctgtgtgagtcaaacatagtaggtcctttcagataggtaatcatctaatgagccacagttaattaaatgtttatcattgcttaatatttggtatagggcattttatttctattctaggatagctttcaaaactagtaatttgggcagtattttagtactacatagaaggaagactggtacaaaatgggtgatggcgtgtaacttttaccgtattgatacatagcataatataaacatggcattaaaagatgcatagccttagcaacgagtgctagttatgattggttgagcagtattgaaagcaactaagattactttcagatatgtatattatatacaaactgttgcagaattattgcttcacttttaaggaaaagaatccttaagtttctagtgtcttttatctgagaaaattatccagaattgttaacagtttaatccactatgttggaaactctgttagaaacttttatgtatcagctctttctgcaaggaggaattattaagagctaacttctgttagctcacctctactgactagtgaaattagtagttttctttcacgtgtgttccttaagaaactgtatgtagcaaccacatttgtggcacacatagaccaatacaatagcctttttgtatttctttgtatctttctcaagtactattaatgttgtccttactgtgggtcaggagtcatgttttactcatgttggaatcacccaacctagcataagccacgcatacaataagtacactataaataatgttgaatccatagttgaaatacaattttacctaagagcaactgtgagctaccaggtgaagatcatgtctactttgaagtctaagttggggaatctgaaaacactggatttaccattatgcagttcatatgtggtagtgtgatgtgattctgtggtgatcagtttttacagtgacatccacagaactaaaacatttgaggtaacaactcgcatttcttttttttaacacggagtttcgctcttgttgtccaggctggagtgcaatggagtgctcttggctcactgcaacctccgcttctggggttcaagcgattctcctgcctcagcctcccgagtagctggaattataggcatgcgccaccacacccagctgattttgtattttttctttttagtagagatggggtttctccatgttggccaggctgatcttgaactcctgacctcaggtgatccgcccgccttggcctcccaaagtgctgggattgcaggtgtgagccaccatgcctggcctgctttgtttttcctgtaaaagtctatctagaattaaactgtcagtatgtatttgtacatggaaaaaaattccaaagaaacatttttggttaaaaatatgtggtaggttgaaacttgtgtacagtgtaaatatcgcattatgtatgccttatttaagtagacctaaatacctggtagcctgagccatcagacttgcatagctccaaagggcagtagtgatcttgttagggtttggcatctgaatgatctggttgccttttccttttggcgtttttataccaggtatcataaaatacagaaagcagagcaaaagtgaaagagtagaaaccctttgtttttttttttagacagagtttcactcttgttgcccaagctggagtgcaatggtatgatctcggctcactgcaacctccacctcctggaaaccctgagctttttaaatgttgaggcagagttgatagtaatagaaaagcagtagcttaggagccctaagaccaggctaatttgatagctctgaagttagggctcctcatctttgaaatggttcaagaatacctgtcttatataccttcagaggatcacagtgtgataacatgtttgaaagtacttcagataattctgaggttttatttatctcattctacaaatataatttgagaacctcctcttcaccagacatcgacttcgaggctggagatggaagaacttggcagtctaccaaggacttcccagtctggtagaattatggttttctttcttttttcttttcgggatggagtctcgcactgtcgcccaggctggagtgcagtggcgcgacctcagctctctgcaacctctgcctgcaaggttcaagtgattctcctgcctcagcgtcctgagtagctgggattacaggcgccygccaccacgctcggctaatttttgtatttttagtagagacgggatttcactatgttggccaggctggtctcgaatgcctgacctggtgatccacctgccttggcctcccaaagtgctgggattacaggcatgagccaccaagcctggccagaattatggttttctaagattatgtttcatagtgtttcaggtttatattactgagatctttgttgtgggtccattttttgggttcaaaaacatgaaaagatagcattttgaaagtgttttgttacttctctatgcttataaaaatttgactcttagaacttacctatgtagtcccccacctgagataccaggacagtggggagagaatttatgatgtggtaaattttttttttggcagagccaaaatattgtaacatatgttgaaccaggtgtgtaagttgaataccttttagacatgtagttgtcactgttaatataagtggcctgctatcactcaatgctgtggacagcccaagggccttttctgaatcttttataagcaggaagtttaatttgcctatatatttttctttcttttttatttttttgaggttggttcttctaccaaaaactgaaaaaaaaagtattattagataatttttactttatgggatttsttagtcccagtctttgtagcaatttcactttaaaattcgtgattagcagaatgtcctcttcatttctgatgactttctgtggtgaggagggttcacttagaacctgggacaaatgagagttggttgagtaggatcaaacttaataagaatyaaggagacattaaatatattcttgaactggttttctaggattcttttttttttttttctcctgaaaggaagagctgggccaaagttttaaaaatcaagacaaactagaggtttcttcacattcatggccatattattgtttgggattctatttaattttcatatacccctttatgtttctaagaatatgtttctgatggtctactttatatatgcattcgtttgactccagctatagtaataattgattataccctaaaaaaacgacctctgattcttcatttaaatcagaacaaattgtttttgaaagcagcgccatgagaattaccttgaatgaccatagacttggcccacaaaggaaaggaaattatgaagaggaggaagccatgccgttggtcttcccaaatcctaatctgggaaccattagcaggaccgtcttgctgtgaggcacattcatagcgtgagaggcaatttctaaaactgctaaaatcaatccctgtaggcctttagagattaaactcactacctcgtgttataaccagatgaaaataattatgtactgyagcctgctgagtggggtgaaatagatttctagtgccaggattcttaactaggtgggatgggtgctgtgttttactgaagactccctgcagttgaaagatttatcctattagagcaagtctcaaactggtaagtctgggaaaaaacaattcaactttagacgccaattcttctaaaacctctttaacttaaatctgtttttcttggcaagagagttaaacctcatatttaaaataggataccagaactgtgccttgcacacaatagttttctgctagatagatattaagtacacgattttttattttttctgaaatgggagtcttgctctgttgcccaggctggagtgcagtggcgctatctctgctcactgcaacctccgcctcccaggttcaagtgattctccttgcctcagtctcccaagtagctgggactaaaggcatgtgccaccatgcctggctaatttttttgtatttttagtagggacagggtttcaccatgttggtcaggctggcctcgaactcctgacctcaaatgatctgcctgcctcggcctcccaaagtgctgggattacaggcatgagccaccatgcctggccaagtacacaatttttataaccacaaatgcagtgaggtttccttctctatcaaataaggataataatggtacctaactcatggggttgtagtggtgagaattagatgagtttactacatgtaaaatgattataaacatacttaacaaagaaaaatcaatgctattgattgaagatcaatcagttgttaaagtattaaactattttgacatgcagaaaagacgaataatgtttgctattatatgaagttgctgttcttaacatctcatctgtatgaattgtttctctatttgtgtggaaggacagtgttgatatttgcacaacactctgtaactcagttcttcttttgaacaatttgtgatactagaggaatgaagccactataagtgaatgaaactcgctgactagacttttcttaagtacccgtggatatccatgaccgactggatcccagtgaacactgaattctatgaaagaatagtaactagtcatacacaggggagactgctgaagatgtattaccctttgtaraattattaacatctcacttaaaaaaaaaagcaaaactaatatgcggagatgggggaatctgttttcatactgcactatctcttaatccatttatttaaaaactctttgttgagtgcttactatatataggacagacattatactagactctggggattcagtgatagagaaaaaagactaaaaatcacttacttgtagggagttcacaaatgggtgaggagaccggtattattagataatcaggcaaaaatgtaaaatgctaattgtggaaggcaaacattggcttcaagatgcatgtctcctgagtactctaaggaagtagcattgttttcttctttctacagaagagtgactgggcatagagaaggtagtggatttagctatggtcaggcagctggtaatagcaaggtctgacttatagtctgactctaagcctggtgcattttttgcttttctgcaactgtctgtcattgctaccaacacagggaaaggaggagtattaagtggctacagttttcaaaagtattgatctgtttttggagtgtttgaaataaatgaacattgaccccaacaagtggatttggggtttgcttccaaaaatctgtaacactgaattttttattagtatagttaagagtagaaattaaatactacaaatatcagaattattttgcttaagggatttttttttttgactggccagtgatggtcaaagtttttttgagctttgagaccactcttcatttttcagatagaatattactcagaatccaaaaatacaaagcagtgaccaccaactggagtttgtggggtcagagaagatttctctgaagggttgtttgagctgagatctgaaggatgcagagaaattaactaggttgtctgagggcaaggtagagggtgctgagtattgcaaaaggactgaaggcctgagattagagagagcttgcttgggacattggaggtgtggacaggccattgtaattggttccgagagaacctagtagagtaatgctggtgagctggtatcagactgaagggaaggaaggggctaggaggccatgttaaggaccaagagttactactctaagtgaaatgaggaggttttaagcagggtttgagttcacatgattttcttgaagggcttgcttagccacccgtcattccctttggagtggtcttccttctggagtcagggacaccatttgtcttaagtgcagtagtaataattccttatggcaagtggccaaataaccagcaattcccagcatgtgaggcccccataatgggcctgcaaggacagtaacacttgaaaaacatcagagagaaaaaaaaattgctctttgcccttagtgaagtaaggctaaaggaaccataaaggaatatagtcaaccattactgctctgaggctaatgacctcgaagctcttggcttcccaagctagttttttttctcttccttcttggcatttcattgcttgagaaaactgttccaggaaatggaaaaagaatggagttcagactcaaagtgggtctttactttttgacgatcctggtaaaatgcttacagggacagaaggttgaaattgtcaagaagagtgtttttggatttgttaatcttggtcctctttgaaggcagagtgcttctaagagaagatcttattcatcrtctgatgaataggtcagttgtcacttgggaggagggagcgaaattggtggtggcaagagaagggtggatttgtaggaagcatatcactttcctgagggttttgttctaattcttctccagatacaaataaacgcaacattgggtgaattgatttacttctgtaagactgattcctggactgtaataagaaggaatttgggtagggcgggggggcttacacctgtaatcccagcactttgggaggtcagggcaggcggatcaccaggtcaagagattgagactatcctggccaacatggtgaaacctcgtctctactaaaaatagaaaaattagctggttatggtggtgcgtgcctgtagtcccagctactcggcaggctgaggcaggagaatcgcttgaacccagtgggcgggggttgcagtaagccgagatcgcgccactgcactccggcctggtgacagagcgagactccatctcaaaaaaagaaaaaaaaaaggaatttggattcagggacttttctcaggttttgttcagctcttaccactttgttctccttctacctctaaatgctatatggaaaaatatgtattttgggaattaacgtgctgtatgttttgtcttgaggatttcacagacccttgagagaatattctgtgtttattatagaacttgggttcggattcgttgattcacttgttttacagtcaggacacgagtggggtggaggtcttcagaaattaatgtcatctattgcctacactgatgacatgatagtaagcagatcaagtcttgtagctatgttcttgaaaggaactcttctaggcctctaaaactgggcaaaacatattgtgttctctgttctgtttcacagattgcctggttttctctggaattctgtgcttcatggcttcttttcccttgataacatgacacatgactgatgacgtcaaagaaccttctagattttctcttctactggtatttaactacatgtaatagtttcatatttttcctttgaagactaccttgtagttttaataagggcgcatgaatgaaacctactaaatggaccgttgaaatatcctacatccaggaagctgcattgcagtattttactcatagccagctggaattctaatagattggcttgctgattgtcctattagtttttgttttgttttgcttgaggattcaacttttctggctttctttaacttcatagttatggctggtctgtaaacctgtagataaggtcaaaaaattatgggtaaactcttcaaagtttcctagatcttggttgataggagtgcaaatctaatagcctgtgcatgttataaccattgccattatttgctcagtggagtaaaacagaaaagcattagggagagtctctatggagcttgatgcaattggtgtgacattgtctaagaaaagttggtggcttgaggaaccataacccaggagcacttgaytgagtttttaaaacacacagtagattaaggacagaagtgtgtcgagttcaaccaccaaatctgttcatatgggtatcttataactcttggaacttgaatacttcctatgctgactccaggtttaatttcattctaaccttgtgatgctgttaataaccaacattgcaccacccccaaaaagcccaaaaaacaaacaagaaaacctctcactgaaaaaccattattttgaatttgacatgagagtcaacgcattatttgccatttttctcataaaagttagctgcaagttctgtttaagaaattttaaataagtaaatgtcacacaagtgaatacagatatattccagttctttgaatatacgtgaactctttgcttattggttgaatgccaagatcaaggtgaatgaaaatggtcattgaagctcatccatcttttagacatttggcacttcattgtgcaaatgtgcacattgataattttggcttaaatgtttggcattttatttggaaatctgttagcccctttgaagtcttttaatttgggagtggaggtagattagactggaataataataaagtaggctctgcaaataattgcaaatacacagattatttcttttttgtaggttgccaacagattttatatattggaccttgacactgattgttttaggttgtctaacttgtcaggaagtacagtttctgttacgaggaaataatgacgttttcgttgagaggatgaaacattttccacgaccatgaatctgttactggcttcattcagccagctgccagtggaatccaatttctagaaggcagaagcagtgccattcacccttgctattctttcattcctcaaattttaagtctttcagcctccaagaatccttagggtattcctctgccaggttaaatgtgtgaattacagagtaaagagtaagttgaagatttcttccatttcctgctctcaaataataatttttcatgtttttcttttttctgtttccctttggtgatctactttcagaatctgagtcactaaatgagttttatcaaaggagaaaaatgtacttagatacttagaaatggaaacaagatttgtaagttggcaatcaccttgaatgaaaatacagttggccttctgtatccatggtttctgcgcccgcagattcaaccaaccgtggatcaaaaataatgcgaaaaaatccagaaaatgttacatcgttgctgatgtttcagtatagaatattttcttgtcattactgcctacacagtatagtatatcaaatatttacgtagcatttacattgtattagtaatctagggatgatttcaagtataagaggatgtgtgtaggttatatgcaaatgctacaccaatttttaagggatttgagcgttcgaagattttgctatcctcagagggacctgcaaccattccgtaccaccctgatactgagggacagctatactaggtgaatactgccttgccttagccaagctgataactgtgtatgttatagagataattgccctccaatgcagttttgttttttgtttataccatgttggaaaaccgttagatattttattgaaatataattgtgtggagtttttgaaagaaaatatggaatatgttgtttcaaaagcttttcacatagattgtaaatttctttacagaccttctaggcttttcacagatataagcatttatagcagaaatgtagtgaatatttttatacatagtctctaaaacttaagtaaggcccattctacaaatgattggagtagaaataggcattaaaatgtggtggattcatgcacaagtaggtggtttgtgtcctatagtgtgaatatagtgttttctattttctttaggggggcatttctgttcccctggggaaataaacttcctatttatttttcttaagtatttttaagcttggttacttatttttttaagtaatccctgccactgtttatatgtagaacccaagtagcatttgtagttgaattttgtacattaaaaatattttgatcagcaaatatttaacaagtgcctactgtgcgttaagatgtttgtagaattgccgttttgtttgtgaatgttagcactgggcatagatctaaatcctcctctttgcaaacacccctgagaataggaactaaggtgagaatgtgttttggcctatatcgtgttttctagtcatttctatgtattttattagaaaaatatttttaaaaaatgttttgggttagggaaccaacccacttgtccaacttgtgaaagtctgcggaacaccaccaccatcaaaaaagacaacatattcggatcaggaatgtaatcacccagtcacctaataaaaagagtgcttgagtatgcatatggaacaaaaaagcaaraccattcatttggtaaagggtgagtaggggccaggagacagccctaccctgaagatagaatgctttaaaaacatgttgccattaatatttaagacagaaagcgttttgagcccgctcctctcttctacccttcctcagcattcatgttgtagtttgctccctaatgctcacaagtccgtgccagacggaaattcgcagaggccgctgcagtcccgcagaggccactcaggggagggacgcgggcggaacagtcgcgctcagtcctcccaggccgccccaggccccaggtcccctggtgcctcgtgccggctcctggctsgcctcccttctgctctgcccagcccaccccgccgcccccctgctcacacatgcggcctctcccccrcgccccagcctctggagtcgcttcggggccatctagtcatacgctgtccatcagatgtgtttacttttttcctgacagccgacacatctggagcacatattcaggttattccagtgccactagacacattccacaagatcatttcagcggttgttatggcgatcttcctccctccagtgattttcaagttgcatgacagaaatagctggagctaaccagggggacaaaagtcaacgggatcaggaagggcttctttcacagaatgaactaattagtgaccctgctttcttcacagggcaatgagcatatggtttaataaagtgagtctgtgacactttttttttctctgtaggcaaagctgtcactggctgaaaactttcctgtttttactggtgggaccgtagtctgctgtctttcaacagagtttacttcacaagtagaaaatgtttgctcctgagagttaagcttcagaacgtattcttggcttcatactacctaactatagcaggtcctgtaacttaaagagacagtattaattttatattcatttcatgggaagggtttatgcttactcaagactaagcattttcagttagggttttgtaagtattatgaattgatacctggaagttcaggtaaatataatgtgttgtttgctgtggtttttctataaaatataatcagtatttctcactggattagttacaaatttatttgaacctgtgatttttttttgggcacagttatagaatattttggtattaaaagatttgattaagctactccatttttatcacattttaagtagcatgcagatgtctggttatgtctgtcaatttttttcctgaggtactttttacattttgtgtaggattttggatgactttatagtgtgaacatatcattgcagacatggaaatttagacctgagatcatttagtgttagtagtagaaatactgctttcagtttataatggatatataaggtaattctataaagcactgccatctttgatcactttatgaagaatacagacatgcctcaataaatgttttttggatgaatgggcatatcatatggattcaaacaaaatacatgttgccattaatcatgagtctgagatttataaattataggggcccattttcttttttgtttttgtattcctgtactgtaattcagtcttgaaaaatgtagccagctatacatgtttcacacttcttcccatatgtaccatgatactcttttacacacgtgtgcacatagaatctcttaatctccttttcttgttctttcaccagtactcacaaattccactcctttgcacgcaccccatttttaggttgagacccaatgcacttaagtcaccatgaacaacaaagtttatagttttcctttttgatcgaattactcatgtgttgactgagttctccggattctaggaatatgacaatgagtgacaagtaggagaatcagagctggactcacccaagcaattgtcttcatctttctccatcagtacaatacctctttcctccactctcagtcaaattcctgttcagtgggtcccactgaggctggtcgcagctgctctggagtacctgctctcaggaagactagaagaacactgaaaggtcacataattacatgtgaatttaattcacagagacctgcttgtcgcttttccatgtgtttctcctagttacacattattaactgtggtgccttgtagggcttcaattacttgggcaaatatgtatcgtgcagagactgagcacaagttagaatgctgagagtggttataaaattatgttttcctctccagatgtaactttacagtaattaaacctaatgcaatgtaagcattatagtcagtgctgtggtagctatctccaagtctaattggtaacatcgcttaaatcatagcacttattgctggttatctgggaactggaataaaccaaaaaagttacatacattaacctttggtttttctgcatcaggtgaagtggatagcttgtcccttcatcaaaatctgtcatctgtattatatggaattttgatagcatttagaaaatttttttcttatttagatagctctgtgtattcatccatccatcgatcatccatccatccatctatccatccatcatttcatctgtctttaggctattttccatagtttgttgccctrgatttggagacttgatccagcacagagctattgtccacttgggttattggggtttccctttctaagtagatgatcaaaatccatggtgaaaacatgcttgccttccataaagggctacttgtttactatatttcagtcatttttctgccaaaagtaaaaagtaaaagagtccaaaagatagaaaagaatctcaagtttaaaattttcttttgcatttattatacccaagaatatggcaagcagcttaatttaatcaagcagcaagagtgccagacagttttcctgcatgtgagagctaaataaatagtggacctccgtatggcagtgataatcgcaacttagagggttttctcagttgtgaaatgtttgtgttaaggatgacttttttgttgtttttgttacagtctgacagctgaagatgcttttaaaaccttctagttacttagagcagagctatatggcacaggcttggtggttctaaaaggcaggtcctatccatcacagaaacagcaagtctctgggttatgggggaagattgagcsggggggagtgaagtaaggagaaaggggggctgttgtgtccagtttacatttgtcaccagtgactagcttttaaaaaatgtattagctgtgcatggtggtaagtaagatccagctgcaggggattatggctttgagtgggtcggggagcttggaatgcattcagttccatcaggggatttgtgtccctcrtcatcagccttaacattgctaacacagtaaagattaggaacagaccagtgtcacctgccctgaactttgaaaaaccctggaaccattaaacaaaggggtttgctagtttagaaagtgtcccttctctctgtccaaagtgtttttcaaatgacacatgcaaaaaaaaaatacagttatgctcaggtgaaagactgtctgtggttgaactattttcacaatttaatgaacatgtcacaatcataatttctaatgaaaaacaccttccacaaataacgttcagttaatgaacatttttgtgaagtgatttccaaatcaaaatgaagagccagtagttaggagggaatgtttctgagctttagtctcactccataggagaaaaagattttgcttggtttgggtgaccctcccctcctcctcctccccaggaagaaagttaagagaacaccacaaaggtttacttttttcagggattttgaaattcagcatacatgccagcaagcagtttagaggcaggaagtcttttctagtagtgcagtcatgaactggtaaactagaagcatctgtaaaaatttagagggaatatcagctttctcaaagctccagcccaagtgtaatgaggtgcaaatgatagcactgcataacccttccccaccccaattgtggaatgagatattgagacaaaaataaagaggagaatagggatttcagaactctactgtactgaaataaattttgattttcagatgaaatggcttttgggtgactaaggatagccccaactttgacggttgatgagtagaaaataaatgattttcagctcagcatctctaggtaccatctttgaaaagtggttgcatttgggctgtgagtgcataaatgacatacctcctcattcggctgagtaaattaacgagaatttttagtrtaaagtaaacttccactgattcgtatctttggcaggcacctctctctttacagaaagaaaaaaaaaaagaggggtaagaaaaaagatgtgatttgtttgaaggaacacatctggggtgtgatctgctatatcttaacaccagatggcaggtttaggctgacaactaaacccagtttagcctggtcaaacsgtatcttcgtatgtccttttccccctcccctcccaaacaatctatgcacaggaagtagaacaattatttgcactccaggctaacagtcctcttgtatctgtggctttgggttctctttcactgtgcctctgctgtttatagacaagtttggcttcccttggcaacccctgaaacaggttccctctgtggctcatacttttttcagaggtatgttttgtcgaggcagaggtgtggtgcctttaggtggctggtgcttgtcatgacaggcatggcattagctgggcctagcagtgactagaagtgacagcattggttcgaggtgcctgggggcctctcagtcatcactcctgctggagcattgagaatatgaaagcacctgagagcaccactgcttatcaaggagataacagtttgggagaacagggccaggaggtgactgaggacaggcaagtgcctttccctccctttattttcttgtagtagattttacytgaaagagtgtcatatatgtggcctttagaaagaaggcatacaaacaagctttgtccagggccacaaaagaagggacctttgaatttccagaagtttcaagtcttttaatttctgtcattagacttacagtttctttgtgtgttgtatcataaaatgaccaaacattaaaaaaccaaccaaaaaaaaccctttaacacttcagggaaaagagtcaataaatagtatattatcctcctcactgtcgttagacacattacctccttagtgataatggtagcggtcacagcctatttttatgactgattatcaaaggaccatgtcagaagtttcttatcactcctaaccattgggttcctttgtagattttccaggaattagttttagattctcactactgattaatggacatatgtgtaatctatgcaaagagctacaaaatgtattcattaatccattctacaaactaagattaattataattgtctgtaggcatcttataaggtcacaattctaatataatttgataggagctgttagggatttgaatgaaatttcaaaatcacctccacagagaaggaaaaagacctttagagaaagtcagtgaatgtttttattgggcagagcttgaagttacttcctgagatttctcttctttcatagttctgctttctgggtagtcaaagatcacctgtttaaaaaagaaataattcctggataccaaatgttactatagttatcaacatgaaggcaatcaaaatttttctgagtagattttaaattgtttttgttaagttacacatttcagttgtaattcttttttttttttttgaaacaggatctcactctgttgcccaggctagagtgcagtggtgtgatctcagctcactgcaacctctgcctcccaggctcaagcgatcctcctatctcagcctctcaggtagctgggaacacagggacatgccaccacacctggctaattttttaatttttttttttttttttttgtagagacaggatctcactatgttactcaggctggtcttgaactcctgagctcaagtgatcctcccaccttggcctcccaaagtacatgagccactgtgcttggcctggcaggtgtaattcttacatgtcactatagaactattttatatataatgtttgacctataaacttttctacttgctattttagaaaaagaatttgttggttagaaagtcactgaagagagtttaataagagtactgtttgttttttaataaactatttactgtggttcttgtaaataaaacaaagcaacttagttaattctattcaggaaacttagctcaatttcctagtatgaagaagactgatttgatagcttggagtagtagagacctaatatggtttcaatcattgtgtggaggaggacattacattgatgagacaaaaccattttctaggttcttgaaactacttgaccaattacagtaatttgaagggggcacttcctaaataatattaagttcaattcatagtatgaacttttgagttcaaggcttctgtaatttttcttggcttaaaaaaatattyaaatttatagaatagtaatgatgttggaacgtttgattagattttagtgttccacrtagttgactataataatttctgaactacaatagtttcagctagaatatttccatttattcaacaccacattaatctttacttacttgtcacacagcttttaaaaaaatctgatgtgaatttgctttattgcatttgacacgtttgggcaaatgacaacaactttggtgtttttaaaatgttccagttccagaaatcagccttcaataagcttcaggcagtttcccagtaagttgttaatggattgccatctttctgcctctcttttaaattttttccttaaaggccatactgggggaaactaactagttcactctagatggctgtactaaccctactttaaataccactgagagtttaaaaggctgcgtttttgcatctagactcacttggatttgaataactgatctctgaccgtgggcaagtctcttaacttctgtgtcttgatttcttctatttaaaaagaaaggcctattttaggtatgtattagggtaataggaggtaatgttagaaaacagagtctagtatgaagcctaatatatagtagaggagggtacaatacttaataattactgttgttataacctcttcctccccgcagcctgcgcctcccaggctcaaacaattctcctgcctcagcttcctgagtagctgggattacgggcatgtcactactaccccagctttttttttttttttttttttttttgagatggagtctggctctgtcgcccagggtggagtgcagtggcgcgatctcggctcactgcaggctccgctttccgggttcatgccattctcctgcttcagcctcccgagtagctgggactccaggcgcccgccaccgcacctggctaactttttgtatttttagtagagacagggtttcaccgtgttagccaggatggtctcgatctcctgacctcgtgatccgtccgccttggccttccagaatgctgggattacaggcattacccaccgtgcccagccccacctggctaatttttgtatttttagtagagatgaggtttcaccatgttggcccagctggtcttgaactcctgacctcaaatgatccatctgcctcagcctccccaaagtgctgggattacaggcatgagccaccacgccctgctgggttcttcttaattataatactctttcccaagctccttgcaacttctacagtttagcctgatatgttgtaacctcttgctgtttacactgtccactcttgtggaggtagctaagacactgactgccagggcatgttttatagtcatataaaatctgtacaaaagaaagttaattttcattcaagaagccaatagcttctggatcattgccttgcattggaaataatttttttttctctgtagataaaaggtaagcattattaagttattaaagcaaacaaataactgtagtcatcctgccactccaagaacaacaggatctagagtataaaagtaatatcaaaatttcagaggcctgcagaccctgttgctgtttatcactttatcattctatttcctccttgaatcctttttttttctttttttttttttgagacggagttttgttcttgttgcccaggccgtattgcaatggcgtgatcttggctcactgcaacctccgcctcctgggttgaagtgattctcctgcctcagcctcccgagtagctgggattacaggtgcgtgccaccacacctggctaatttttgtatttttagtagagatggggtttcaccatgttggccaggctggtctcgaattcctggcctcaagtgatccacccgcctcggcctcccaacgttctgggattacagtgctcctgcctcggcctcccaaagttctgggattacactgcgcctggsctacttgaatccttttaagccatcattgccctggttaggggttttcccattgctgtttgattttcagattcattaattgaatactaatccactttaaacttttagtgttttttttttttccctttatacacttggcctgtttcattttaatgttgaacagttgtttgtcaacttcaaaaaagaccacttgtttatataacatgatctctatttgtgagaaatatttttcctctaggaccgtagtaaccttactgagtcttaatattcagatatcatcagtatggaataaaatatgacatgctctgagagtaacaagcttcccacttgggaagtaccttttcctggtggcttttaatgagaggaaaggcatagttatttaagcctggttgtggagctgaataaacctatcatttgaatcttggttcttctgcttcctagcaatataacctttggcaaaaccttttacttctctgggccttattattgctttttttttttggaacgaaattttgctcttgttgcccaggctggagcgcaatggtgcgatctcggctcactgcaacctctgcctccttggttcaagagattcttctgcctcagcctcctgagtagctgggattacaggcacctgccaccacgcccagctaatttttgtatatttggtagagacggggtttcaccatgttgaccagggtggtcttgaacttctgaccttaggtgatccacctgcctcggcctcccaaagtgctgagattacagatgtgagcgaccacgcccagccctttttttttttttttttttttgagacagtctcactctgttgcccaggctagagtgcagtggcatgatctcggctcactgcagcctctgcctcctgggcacaagcgattctcctgcctcagcctcctgagtagctgggattacaggcacccaccatcacgcctagctaatttttgtatttttagtagagctggggtttcaccatgttggccaggctggacttgaactcctgacctgaagtgatcctcctgccttgccctcccagagtactggaattgtaggcatgagccactacacctggcctattgccatttttagagataaaaaaaaaatacatatctcacagagttgtggaaattaaatgagatgatattttcagagtgcttggtatggrtacctactggcatgaaacataaaggtagtcttaatagtatatgatcttttgaatttctgtggatattggtttggactgcatatttctttttttttgagaaggaatcttgctctgtcacccagtctggagtgcagtggcatgatctcagctcactgcaacctccacctcctgggttgaagtgattctgctgcctcctgagtagctggaattacaggcacacaccaccacacctggctaatttttgtatttttagtagagacgtggtttcaccatgttggccaggctggtctcgaactccagacctcaggtgatccacccagcttggccttccagtgtgctgggattacaggcatgagccattgtgcccagcctggactgcatatttcttattaatgattccttttatgcttgctgacattagggcatcatttctgctgctatggtagactttattaaaaacgatgacasatttccaactagtattttttaaatagaaatggatacaccataatcttatacctgaattaataaaatctgtcaaataccatctctactatttgcttttttctttgaccgtttgttgtacagacagcttataggttttgtttgtttgtttaaatacagatgcagagggttgacttcacctcacttcttaattcatgactcagttttgtcattggttcatgcaatgtccctcttttgttcactaatttttgttagattacttgtttgattttctgatggggataagagatgaagggacttttttttattgccaaggttctgaggtccagtgaagccagagtatattgttaagataggatgtaagaaatggaagagatctgcagtattctctagctaagtacttcttaaccgctttaaaaaatgcctcactcctttaaatgaattttttttaaaaattcattccaggcactgtggcacgtgcctgtaacctcagctacttgggtggttgaggtgggaggctcacttgattccaggagtttgagaccagcctgggcaacttagtgagacctcatctcaaaacaacaacagtaaaaactagttcagactcttctccattaaaattcatagatctagtctgaacttttttgatgcttgagaaaactgagactcagataaaagacacagtaataatcaccataataatggccatcactttttgaccatttattatgaatcatgagctccttgcctgtgatcgaaatgtcatctctagagacacttaagctcatgcagctcattgtggacttccattttggtattctctttaaacttccaaaccggttctctctcccttcccttcgtttttgggtttaatttttttttgagacggagtctcgctttgttgcccaggctggagtgcagtggcgccatgtcggctcactacaagctccgcctccaaggttcacgccattctcctgcctcagcctcccaagtagctgggactacaggcgcccgccamctcgcccggctaattttttgtatttttagtagagacggggtttcaccgtgttacccaggatggtcttgatttcctgacctcgtgatctgcccacctccgcctcccaaagtgctgggattacaggcgtgagccaccgtgcccggcctaaattttttttaatttttattttatagttgcagttgcaggcttgccatttttgcttgcaatttcacattgtattaattttggtccatctccagcctcttccccagtcctgccttttctatgacattttagcttggcattagactaacaacacaaacaatgcttatgaaccatgcttgcatcaaatgaatgagatgagtacattgtcatattgcttcctttttgagaaaatttgctttcaatccctgaccctaaaacataaaagtaaatcaaatttcaagacggcagacattaaagaaaatatatgccaagtgtcccaagcagtgcctggcacacactgaaaactcagtaaatgcttattgagtgactaaaagtctccagtatgagcaaaagctgtaaatcctggatctacttctgttgctggcctagttctttctgatttgtttaaggcacgttaaaccatactctggcaagggagaggaatgaaggagtatttgagaaacaccttcagtgtgccagatgctttcatcaatactgctcagtttatctccacatcagccttgtgggtttatgcctcttcaccttttttattttttgaatgaagaaatgggaactcagtttaaacagattgtccaagatgtttgaatttgaattgggatctttctgactctagacccttatattttccagacatccatagcagtataagaaatgattaattgctgttactatttttaattgccatcatgatcatcatcattatcacctttagattttacaaagttgtcctcaaatggcagcctgttgcctctaaaaagggtgggacattactttgcgaggagaggagaacattaatggttcaggcagcagtgtttctagatcctcttattccttacagcacaaatctacaccagtctcttgtgtgtgtatgcaaatggctacctgagtaagggtgtttgttacctgagatcccttccagctactcaagtcaaagagatttttaagttggaatcagagtgttctgcctatgtaattttgatattttagatggaaaagtgagctggaatgcaggaaggttttcctaaatggaaaggcggctgcctcttcaccctctccactttctttttctttgtcagttgctggagagagatggccagtgacacaaaagtccttctaaactttggggagtcctagatggctggcagatgagatcacttgattccagtgaaacctaccagctgccttaaattcactcttccagagcaccatactttttattactagattgaattataggataagaaaagtgctttgagcatctttagaccgcacatgtaagactacatacttgggcctgagcctcccartttggagtagggcctcttaaggaaaaaagaaaaagcacacgttatccatgtttgtgtgtgtgtattgtgtcctgtttgcccttgagattaattttttaayaagtgccgtgatttcccagtttttcttagattatatttctaattgctttaatattagatttgccatttatttcacctatccttgttttcccttgactttttaaaatctgctgtcattgttatactttgtatatcttttttatggaaggcagcagaaaaatttggaggtttgtctagaacaaactcagttcagtcaagggaaggctgcccagcttggtatttaacagcgcagaactggcctgtgtttgtattctctactgaagagagcgtgcacacctacatgcccctgcattgagcttcgtttccttcatcttgaagtggtggtgtgaagaacactcagatttcccacataaatcaggaaagagggttcatcagaatcaacactggttaaaaagaggtcttaatggaagtgcctaagtattgtccaaacacgggggataaatgygttctgctttacttggccagaacaatgtctcaagctagtgattaggctttactccagctttaacctcaggcaaaatttatgcagctctgctaccgtttgtcaggtaattaaagggaaaaaagggaaatgtttgcttaaagtagaagtgttttttaattaaacatgaaaaataataaataaacacaaggggcaaataggcagttgggaaattgtttttaactttccagttaaaacatgaagaacttcaagcaaaagaccaatattttaggcatggctggtagtttattccttacagagcattattcagctgtgctagaaatccaaatttgagattgttccatctttgtgtygaagaatgtaaggcatagttactctgtcttacttgaaagataatgccccttaccagtttttgctaaccactaactatttacttggtaggagaagagttcttcaaagtcagaacctgatagaaagccaataaatagtagtacaaatcttgatgtgggaagcacagatatagcaggaagtttaggctaaaaagaaagggggaaataacctcttccctattatggttaaccagagtattagttggattgtgttatgtccaaaatttatgttaatggatccgccactcatcaccaaaggctgaactctatcatcattgacttatctttagatcccagatcttagggattctgcatctatataccctcattcttacctgctatattaaagttgactgtgaccattgcagttgcctgcctcaactctttgaatagtagtatccttacaaacattccatatctaatctctcctactgctgtccatccttcctgttgctgccagggagattttacctaaagctcagttttgatcatgctactaatcttttcaaactttgcacagcgtttgagttttccatgccatggtccttagacagcttaccatatctgatctatgtttaccctacactccagctgtacttaatctagtttagctgttctttcaacacaatgcagggctcttttcctctatctccttgactttgcttttggagtgctttattctacacttcttaattaagtcctttaatttgggcagctgcttttcaaaggctggtcaaacgagtgtaagtcttgctgattatatatcattattatataatttcctagggtcttccttataatttcttttcatggtagcttattccttacactgaatatttatactttgagggtttgggggtggcaagttagagataatcatctgaagtgtttgtttccttggagatcataaggtaaagtgaataacattatctctcttgagtgtcttagaactaatagggaagaaaaaagcacttgtcaatcccaatggacagatgtgatttatcttggtatgtctttgagaggtagaatcaccataatgtataggagcccccctagatatttggtgggtgtggcatttggcacattatgttgaatttccctgcttctcttcccaacagtaatccttgagccattttttgttgtttgaacagtatctagctgatatctgttatctcaaacattgccatttagtggtggtcatctgtttacccataaggtgaaatgttactgaggacacttccaaaggtagtttaactgtgatctctttgtttgggtttgcatgcatttctgaatatataaatacaaacttggataatttaggggtaattacctatattagcaaatagtggtttatgaaaggagtaaaatttcttttaaatagtaaggcttctctaggccctttgaatatttgagttgcaaaatactgatcacaacctgaaggaaaacgtctgttgtataaagctaaacatatctatatatctatgccaataaagacatattgagtgcctagatatatgaaagggagagtgtgtgtgtatgtgtgtgtccctgtgtgcactcacgtgctggcccaccaactatataaatatgtaccctcctgtattctttaccttatagacaaggcaaaaacatttatcattgctcttgcctggagttatgtccaccttcatcttactgcaagtgtcagagcaacctacaaaatagtagatgaggagatgaaacaagtagggccagaaaacattgtccacagcccagtggtccgtgtcaccattcttctgcttctagcatatattgcataatcaggacagacgagacaagccaaatccttttagtacaccgtgtctggggaggttatggagtctcagagattagttgtcattttaacagtctcgattgtgacaagatcttggaagtcatctgagaatgtcatgaaaaccatattcccattgcttttatttctgctggacacttactgggtggggaacatgtttgatatatataaaacaaaaacaaaaaaacaaaaaaccaaccaagtgaaaaacctatgttctttgcattgaggtcacattaagaatacctcctcttctacaattcaaccaaagctcttgcaagaaaatgagtttgctttatttgtatttataatgaatcattgtaattgcagctagaagctttgtagttatgattattcatcccctctttccattctcacagaaatgtcaggttcaggatagatttttaagactctaaaaataatggttttttggcygggcgcggtggctcacgcctgtaatcccggcactttgggaggctgaggtgggcggatcatgaggtcaggcgatcgagtccatcctggctaacacggtgaaaccccgtctctactaaaaatacaaaaaattagccgggcgtagtggcgggcgcctgtagtcccagctactcgggaggctgaggcaggagaatggcgtgaacccgggaggtggagcttgcagtgagccgagatcgcaccactgcactccagcctgggcgacagagccagactccgtctcaaaacaaaaaaaaaaaatggtttttctgcttgcttccgttatggtaatgttgtgggtatatagacctttaggagtttttcttctttttgagacggagtctcgctctgtccgaggctggagtgcagtggcgccatctcagctcactgcaacctcggcctacagggttccagtgattctcctgcctcagccttccaagtagctggggcgtcaccacgcccggctaatttttgtatttttagtagagacagggtttcaccatgttggccaggctggtctccaactcttgacctcaggtaatccgcccacctcggcctcctaaagtgctgggattacagacgtgagccaccgcgcccggccaggaatttttctattttgaaaatttatattgtttttcttgaggtaaccagagacactaaaatatactactaagtgtgtgttttgttagtattgtttttgtcctgttaattagcagttttatttttattttatttttgttgcttaacatttttcagaagttatagctaaacgtattttgaatgaatccaactggaatgttagtttttaaaaataaattttgtttcaacctgtgcagctgtagtttactttccaggcatgagaaatatctattttattaagtcctatgaggaatatgtgtcacacacatttaagaaaaaactgtttaagatgaaacactccaaaaatgacttccccctggtgtgaagtaaaacaaaagcctcaattgcatctctgcctgtggtaatgacacgaggtgacaaactgcaggcaggtgaggtttgtggggatgatctcacacctgcacctcgagcttggggaacagatgggtttggagctggcgtctggccttgctttctttttgatacgagaccagctctcaggctgggagcccccacatttgcacagaagactcccaagtgttttaacataggcagatgggactgctggtggataatattccctggttttgtgaatctttttcttgggatggagaggtgaagaagccccagcgcaagcaccaccaacctccaagcccagagcccttacatcaagccagagctttgcctgccaggcaggtttcacttcagaaacccagagactgaggatctgtgccctcttcagtcttagttctgtagccaggcaggtagcaaaaggtgaacccagttgaagggttccttccctgccagtccctgcttcattcccctgcagctgatcagcagaactctggaagcagttaaggctggaaaaccttgtgggcaggcagagctctttctgcagtagcactcagagatgacttctgattaattctttttcacacctccctaaagaaatcaggtatgtatacctctgaagggaaggtcaaggtagatttctgtttgagacctccgctgcatcatctaacccaactcaagacagctttgtagaaaccatcaggcccaccaatgttttactgctttgcccccttcactaaggccattcactaggggctcttcttttcctttcaacactagtgttgtcttggcaaatgcgtttttggagtgcctccacatgcatagcttcccagggacattttgcagaaaggtttgcactcctttcttaagagcagttctgctgcctcatttctgtttacatatgtactgaatagtcagtccatgtctagccttcacatgggtttgattttccctgtacactgtttttttttttttttttttttttgagatggagtttcactcttgttgcccaggctggagtgcaatggctcgatctcggctcaccgcaacctccgtctccctggttcaagtgattctcctgcctcagcctcctgagtagctggcattacaggtgcccgccactatgcctggccaatttttggtatttttagtagagatggggtttcaccatgttggccaggcttgtcttgaactcctgacctcacatgatccacccgcgttggcctcccaaagttctgggattacaggcgtgagccaccgtgcctggccccctatacactgtggtttttttggtttttttttttttttggtcttttgagacgaagtctcgctctgttgcccaggctggagtgcagtggcacgatcttggctcactgcaagctccgcctcccgggttcatgccattctcctgcctcagcctcagtcccagagtagctgggactacaggcgcccgccaccatgcctggctaattttttgtatttttagtagagacggggtttcactgtgttagccaggatggtcttgatctcctgaccttgagatctgcccgcctcagcctcccaaattgctgggattacaggcgtgagccactgcgctggcccctgtacactgttttaaaagagttcgagccccttttaaaaaaaatttggggagatttcatatgacagctcagagttctggtttctcttgaaaaagagaaggatgatctagcaactggagggtctagcaacaccttgtctacattcccatggaactctgaggtagggtatctggctagcggcttttctctttggatcactggctttaagcatttttgacatagacatgtgcatgaacttatccttactatgtgtgatgcattttgttcagtttcatttaagcacaaatggttaagagccactaaaatgattttcaccatccascaatgcctgtgacctgcagtttgagaagcagtgcttgggatttggctgcagggtctgcttgccagggccttccccatgaatgtgcatcactgcttaactcctggcctgcagcggcagcatctggtttcacagactcattgtcattgtcattcacatgaggtaaacaaacagctctgtgggacgcctagcctgtagcccctatttaggctgtgggtatccaggtgaggactggtcttttcacgactccttggttttgcaaggctgaaracaaaggcagagtgaatgcctgtcttgtgtctcacctcagcttctagccccacccctgccaaggtaaatgaacggggagaaaatatgctgtcytgtggaagactacactaagcctgtcctatggattgcataacagtgggccctagtagacaggtcagggacaattcatattataatgatattctttttataaagcaaagcaagtttttaaccataagttaccttagtggctttacatttgcattacagatttttaagtactgtcattaattgagatgggtcagtaggcagggggcagaaaaagactaaagagcttctttaatcatacctttgcattttatcatcctagaggggaggcagagaagcctcttactcatcaggaccatcaatggaccatggccatcaaagcattgattaggaaagatgaagcatctttttatacaatttaaataatacattcttattcagccattcaaattttattcctttatcatatagaaagaactcagaattttgagtcagaagatgtggcttcttgttctgggcacactgttttctttttttgtgtttttgagacagagycttgcactgtcgccaggctggagtgcagtggtgtgctctcagctcactgcatcctctgcttgcagagttcaagcaatcctgctgcctcagcctcccgagtagctgggactacaggcacgcgccaccacacccagctaatactcagtacattacaacgcattcggtcttggttcaggagactcctgaattgctgtgcattgagtttttaggaagggaattcagcaggtacaccctcgtttgacctattgaaagctggtgtggaaataaaagtatcacatatttatttgcataagtctgtgacagaagcaaaaactggaccgagagagttcttgctcctcatcccagggctcttatcctaacactgaagttattggatttctgcaatcgaaggcatttttttttccataaaaaaaaattgagctttctgatgttttcaaatctctcctagccctaatgtgttgagtgataacacactgtagaccactgaaaaggtcatcagagagtgatccaggagggggcttgtttttggctcttatctcattgkcaacagttcttcctctagcggcagctcccatcacatgcagcgctgagacaaggcccttgttctgacaaagggcacttagacccaggccatttaagcctcagccgaaacaactgatctactttagaatttgatatgaaacaattctggtatctaagaagttgcctgggaaccagtgttgtgcctggttccaagtctgtgaatgagctgttgtcagatggcagagatgagcctctcttctcagtatggctggtgaaagaggaggtggagctctcttctttaggggacagccaagtacattagtacctctgttttttggtctgggaagtaggagatttatgttcttttcctgtcccagtcaccagcttgcttgccttgggctagttgctttcagagtctctgggcctcaaagcaattcacagaccttacagtgtttattttgctacccaggttttagatctttattgtagctactcttatttttttctattttataaataggaaaattgaagttgaaataaaaaaaaaagcttgggcaacatagcaaaaccccatctctacaaaaaaacattggtcagttgtggtcacatacgcctgtagtcccagttactcaggaggccgaggtgggaggatcacttgagcctgggaagttgaggctccagtgagccgtggtcacaccactgcagtacagccatggtgacagaatgaractctgtctcaaaaaaaaaaaaaaaaaaaaaaaaaaaaaagttgcccaagatcacacaactaggatattgatagattcaggcctggggctcaggttggtgtgattccagggcctgacagctgttagcctctacctctaacttttaatttgagggatccttctaatgggaatagcacaggattctaggctctgctgtttgtcaaataaattttaatgaaataaaccgagagaataataatgaaaatggtgggtaattagcctaacaaaagataatttgctgtcagtattctattagtgtgtatttcttattgttcatttattcttcctgtgtttaaaaaattttaaggttgaatattgaaatacgtctaacacttgtagctatcagaaacatactctgaaattttgttattctttaaataggtgagttacacatttttaatactcatataattaacatatatggcccacctcctttttgccaggttctgtgccatgtattattattcttattttacagacaaggaaacttaagctcagaaagttaattatcttgtctgactgccacataggtagccatgctaggatttgcctatgttcttttattctacaaagtatatttataaaattctatttttggatattatgagtttatctgttaggaaatttttaagttcatttctcactccagagtgagaaaaaaggcattctagacagaaagataattttcaggtgtcagaaatcactttctaactggaattttttatattttagataacaatagctttatgttaatcaatgaattagttacaggtctttatcctcaatgggttcaattaaacaatttagtaatgtaagcaggaattaagtgtcttctgtcactcttttacttccttcccacagatagtgtttagaacgttttaggtccctctcttcatggagcatttccctgttgacctcccctccctccacctccttctcattttctttcttcattttgctgtaaccttctccccagtaaaacttccatcttttttaattgcatgaagagacaattggtgcatattgcaaaacaggatatattttgtagactgatgtaataatatggtatcttatttctttttgtgatcatgggaagatttagaagaagatttgggttaataaaatgatagtttctgtcctataaaccttgttttcatggaaattgatactawgttgtgttctgatacttaaaaataactttctgtagataacatttaatgcatttgccattattcttattcattctagtcataaagagatctgtggtgttgacactgactttttattgtcccagaatggtaagttgtcaggtggtttcaaacaagaaggatactaaaacttaaaaacacttgcataggaaagagaaatataactttgcctaatggaaattgttagtcatagataataatcatgatattagtcaagaaagtataatctgcttaacattacattgggtctaacctgaaaaaaaagagaagaaagtagactatttcttatcaaagttaaatttatagcacacctctactataaagcctagtgagtgctgcactgacaaagacagattctggatggtctctttctggtcagcatgcagagctggcaatctggggagagagtttctattctcagtttaattcaaggatagtttctgacacctgttaacttcctccacctatgccaaaccaggttytcagtctgattaggggayaatttagaatcttaaaacatgttttgaacccatagggagactgtagtttcttgttgagaactgtaagataggaagaactaatatgaagaagttacattaaggctgttacttaagcagagatgttataaactgtccttatttttctgggtctttctctgatttctccaacaccccttcagacaaacatatacaactttgcctgggtaattagaaaataaaaagcaacactttacttatggcgtaatttcccaggattattgggtattgacaacaagttttaatcaagctaaactttgcttaaattccttcttatcattatgttccaagtgaaccttcaaaatagcactccgttcctctgcattatttccttccttctttcttttcttttcttttttcttttttagaaagaaactaagcctcactctgtcacccaggcaggggtgcagtggcactatcactgctcactgcagtgatcccaccatgttgcccaggctggtcttgaacccttgggctcaagtgatcctcctgcttttgcctcccagaacgctgggattataggcatgagctactgtgcctggcctattttctttaaatatttgagtatttttatatcaccccctgttaaagctttagccaaggtcatttacaaaaaactgatttaatatctgtttaatcttcagtattctccccttttaaatcattttgggactggtttgagactttccctcagtttggtcacacctttccttctttaagggcattgcttctctctgcttcattggggaagcaaatcatttgtactgtttgcttcacaaactatttcacattagaatcaaaatatactgttacactaaaaatttgtaatcagttaccaatataggtaaaatatatcttaatgtatcagtatttaatgcctgagcatcaaacttttcacattcccatctgtgttttacatttaagtgaattttatttttaagccattaggtttttttgcccctccctactaaagcagaattcagaagggacactgtgtttgcgtgtgtgtgtgtgtgtgtgtgtgcatgtatgcaaattatacatgtaagtactttaatttgttcattgcagtttctcatgcagtttccatgtagtttaaaatgaatttcctgccaggcacagtggctcacgcctgtaatcccagcactgtgggaggctgaggcaggcggatcacctgaggtcaggagttcgagaccagcctgaccaatatgatgaaaccccgtctgtactaaaaatacaaaaattagccaggctgtggtggcaygcgcctgtaatcccagctactcgggaggctaagacaggagaatcacttgaaccgaggaggcggaggttgcggtgagctgagatcgtgccattgtactccagcctggggaacaagagctaaaccctgtctcaaaaaaaaaccaacaaaaaaataatgaatttcctttgaatgaaacaatagccagggaattcatgtgtttggctacattcacatagaaatttgactgtgcttatgtagccttgcagacctttgcataaagtcttccagattctaaagatggcatgtgttctctgacaaaccctactatgtccatggattatttataatgctcatttgaagattcgagatagttttatattgatccagtggtgttacctaccaaacagatccccacaccacttttttttcttttgagacggaatctcagtctgtcacccaggctggagtgcaatggcgtggtctcggctcactgcaacctccacctcccgagttcaagagattctcccacctcagcctcccgagtagctgggactacaggcgcatgccaccacacccggctaatttttgtatttttagtagagacggggtttcactgtattggccaggctggtctcaaactcctgaccttgtgatccgcctgcctcggcctcccaaagtgctgggattacaggcgtgagccactgcacccggcctctccacaccacttttaaaccacaccaggatctcccccaagcagtgaaaatacattttctgacatgtgaaataaatgcaccatttgcttgcaaatactaatatttgagtggctgttcattctgtgcgtatcatactccacttcgtgttccagttggtttttaaggaattggagagatcctctaaaaacaacctatctccaggacatgcagttttattttgaaaaattgaaagggaaataacctctgttttcatgagcggtcatgtgctgaggcatatatctcatgtccagcatatgtgcttgtgagcatctgcatgtatatgcatgcatagagtatagcatactaagacagtggagtctagatttggacttgatactgcagctttctagctgtgaccacgaggaagtcagttaacttccatgtgtttcaatgccctcatctgtaatttggagacaatgatagtacttacatcaaaacgttctggggattgtgtatttgcatgtgaaatatttagaacagttagccgataatgagtgtttaatcattgtgcattacttttagaataaaattattttatgatgcyttattgacaagaataataactcatatgcamatctttcctcaaagagttaaattttatagctagcggcaaactactgtgacatttcattttgtaagtatagttctgtacatcattttctttagcgtggagcaggcagaagcctgaaagagttaaaagtatttccttgtttttcaggctttaatttaggctcattgttatacaaaaactgttagcctgggtaaagctgcaccttgagcactgatgtaaactgagtttttcaaagtacattaaaatttgccatagtcttcccttgacgattgagagatttgcatctggtagcgattcactcagccgaatgcaagatcgcactccttagagtgctgataagcggacacatgacatttgcaaagagcagtttgcccactcgagtgccagggcaaactggagaaaattctgtgcttccaatttcatcagaaacgtagggaatattgcaaatgacactaccaaatcaactgtaaatagatgataatttgattgacatctggaaagctgtcaccggctgagtagcccataacaggaacatttactgagtgcaaaggcagctttcaagtaaatcactttttgtccagtggggcccagccagattataattgcatgtccttcccttcattgcaaattccccattaccgttaccagcagtgtctcatttaaaggaaggttgtcttccaaatattcacaatgtctcatgttaactcgtcacttccctccttgaaggcttgctatgtgctggataatccagcccttgcctcccttcgttgtaataaaactcattaactttgctctttttggggcagaggtacgtattataaattagctgttaggtgaaatatagcatgactaaagttgagggctaaaacatttccagcaggatttcagcactgtcctcagaattgtctccactgtcacttttgaataaatgttttggcactgatgatttttgaaatggcagcatttcacaattgagccaaggagtggtgccttcctgctttgttggaaacacacaggatacatctagagctggtgttcattctgggtccttctgcaagtccaaatgtttaggaatataggaaaactacaatcactaaaacagatggccatttagaggttcacttgtagatagattatgaagtgagagacacttggggagaatattaagtcartgtctgtgtgatggtctactctatyttaccaaccaaatatttgctacctggttttaaaaatgcaatagcttatgaataagtttgccaagtagtacaaagttgcgtgtctttattccccaaagttagtgaccctccatttggtcaagaaaatgaagggaaaacatcatacttgctttgcctatttccaaatccagagaacattctctggtcccagcagaatctctaggtctgaaaatgcttcacatgtggagcacatagaacccaccatgatctcagtcttggaatttcaaatagtgtgttcttacaaaaacccttcggtccttgtctatgggcttgaaaagtgtcttgctagagatggacaaagaatgggagagatgagtaatgtgaagcaagttgtctctactctaggagttgtctctcttgtataaacataagacctgaagcttctgttgctgaagcaagaccartgcacatttgccttgcaggaagggctttagatctctgtgtcacaaacaatcaagaaatcatttcttgctgtacaaatgtagcagcttattgtagcaccagtgaatgggcacgggagtgaaggatattgctaattgtactgagcctggctgcattgcaagtgtcagatgatttgataggactgacatgcagctaaatggaataggaaaagacactgcagtggactgttggtccattagtttgctcgggcatcttgttttactaaggagccctctaatggtttctcggcaataattactatctctcttcttcatgctattcaacatgacaggcacttgctgaagtcgcagctaatatatttgcactcttaactggccccaatgccgcgtatccttgagcatgtttggctaagaartgaatgatagctatgtttttttctttgagaaaatgtttctaatgtggaagacagtcgttttattttggatacgaagcaggcgtgtggcataacatgagtgcttgtgaaaaaaattgatgcattagctgtggactgccccattgcatgtctcctgtatactagttgatgatactgaaacgggaaaaacttttatgggctgttttacttatataatgataacttcagacttgagccagaaccacagagaaggagaagtttacatagaaakgaaccttcacacagctgttttgaagctatacagtaagggattatccctttgtttcaattaattaacttacagttgagaggcagttttattttttctgtgtgtgtgtktgttttttttttttaatttaagggggtgtcttagaataaaatatttcagcttcttttggcatggctttctcactcctttgtaaagtatggtcagttttgcttatagctgtattgctttttaaaagtaacttgaaacttctaggttaagtacttgaggtttagttgaatgagcttgtttgctaaagtacagcatttaaaggtgaggaatggggctggccacggtggctcacgcctgtaatcccagcactttgggaggcygaggtgggtagatcacgaggtcacgagttcaagaccagcctggccaagatggtgaaaccccatctctactaagaaaaaaaaaaatagaaaaattaaccgggcacgtcccagctactcggcaggctgaaacaggagaatcacttgaacccagggggcagaggttgcagtgagcaatatcacgccactgtactccagcctgggtgacagagtgagactctgtctcaaaataaataaaaataaaggtgatgaatgtattatcaatagtactatcattattatttttgctaaagtctttgggagatttgaaggtcacaaaaagacttacatgtgaaaaaggaggaagaaatcagaaatasggagaattgtgtaggggatatactttggattttgaagtcttgtttagaagtgtatatacttgtggggcaataattacaatcattttgggttcttttttcatctagtcaggttgaagatgtctattttgtgtaatctttcttttgggaggaatgaaaaaacattagcaacaacttaatttttggttattatttttcccttttgcttctaaaacacgtagttgcctgatagaatagcttcccttttttttctacatcagaaaggagagaaagacaactatcttagaaacatatttaaagcacatgatgaaaaagaagaggtttttaaaaactgttgaaaatayattttctttgtaccaggtaccagatgttgatgttggcagtgcctcagagggtcacagggcatttaaaatcactaggctgtagggagtaaaattccagatctcttgcactgaaaattatttaaaaattatctttacttagcgataagtagtacaagagtactttttctatgaattcctcttaaataggtaccttagaaatacatgatcaatgaaattgccagaaaaaaaaaaragttccagtgcctcttcgcattacaaaagtagtgcttttactggttaagtaactggttgcatttaagtctctattttttttgatatgaaaagaatatcccctcaactttattagacaggatttgccttacttttgagctatccatttcaaattagagaggacagacgctgtgctccttggttatatactatgcaaaaagacatgtatatggtactkagatagtatttcgtttcttctagaagtgtaattttgagaaggaaataagactgtttttccatccacctgccatcccatgccacccctttctacatagtttcttttctttttttttttttgagatggagtcttgctttgtcacccaggctggcgtgcagtggtgcaatctcggctcactgcaatgtctgcctcccaagctcaagtgattctcctgcctcagcctcccgagtagctgggactacaggcrcctgctaccatgcctggctaatttttgtatttttagtagagatggggtttccccatgttgtccaggctggtctcgaactcctgatctcaggtgatctgcccacctgtgcctgtcaaagtgctgggattacaggcatgagccaccgcgcccggcctctacatagtttcttctctgtgtgagccaaagttccttttgtcactgataagataattagggttaatagtttcagtgcaaaaataggattttggaaggtaaaaaagttctgaaaaaacaaaatctgacaaggttaccgcttatattcactatagattattgtttcttctggttttgtgggtgttccagtagaaggacttgggtgattaccttactgggcttttccagaggattttcatgcattttttatgtagttagcatcaagattttactggggaaatttgagttagttctgtaaatacaatgggattaatttttctttgggctattttgcccttcttgttattgcctgaagaaagtaaatgctttctgatgccaaggtgggcagattacttgaggtcaggagttcgagaccagcctggccaacatagtgaaaccctgtctctactaaaaatacaaaaattagccaggtgttgtggcaggtgctggtaatcccagctacttgggaggctgaggcaggagaatggcttgaatctgggaggtggaggttgcagtgagctgaggtcctgccactgcactccagtttgggtgagagagtgagactccatatcaaaaataaataaataaataaaatagaaagtaaatactttctgcagaaaaggaaacaatgtttttcaggaaaaaaaatgactggaaggaaataggtcaatattatcagttgttgcctctggagttatgactaatttctgcttctttatactttgttacattttttatattttctacagctagagtgtattacttgtagaatcggaaaaaaaaaggaaaataacgtgcattataactgattttgacatgcctaaggagacaagcactggccattcaaattgcagatcccagaaccttggttctgagccataaaaactacaggcttgttgatgtttgtatgactctcagagccccctgacatttggatagatagaaagtggtgtatttagctgtgggccaccttcccatggggtttgctggtgaccaaagtcagcaattgtgtttacagcttaagtggcagaaagggctcaccattgttgccattacttgtgcgtgattgtttaccttctgctctctgtgggcatatgtttattatatttatattgcccattcagtgtagttgtgcaatggaaatggacttacagggtggtggggagcataggggaataatttcagtatttcctctataatttctacgtagtttagtggagaatgaaaaatttacctgcctgctgtctgaatggcacttggtaaagtccttaatgtagttttgaatgttaattctggttggaggaactcctttaaatcataagatactaccatacttgaaaaaattacttagaagtctagtgtttggagtcaagagactgctttgtcactttgatcttagggttagtacttttaacctctgaactttgtcatacttgtctgcaaaatggggatacaaataatattttcctttagggtagttgtggggatatgtgaaaatcttttgtaaatccatatatatttaatttattgactaagctaatcttgccaaattacctaaattagaatggtggtgatttggataaagtccctgagttcacagcctagagccaaattgcatttgtccattctacttggaaggtgggacatcaaagatatatggttttaatcttatttttgtgagaggctgtgcctattcgaatctgcatagcttccattaaaaaacttgaaaatagttcattttctcttcctaattacttggcagaaatttagaatagaaagacagaagctagtaacaaccaacttttccttcacacttccagatcaacaaaagggattcttgggtcctagagaccaaagaaagaatcagcaggaatgcccagggtgaactgatggattgcagagcctagctggtaattactttcactgagctaaaacattaacttaatacatgggatcagagccagatgaaaatcagaatttggatctcttcctttcctgtggatatcccatactttccttctgaaggcagtcttctcttggtgggataggcctgcttcctttcctaggacatggcataaattttcatgccacactggtagactggagttgtatcatttgttgccctgggcaacttttggtggggatatgtgactacttaggtctgctggtttctagggtggcaagaaaccccagtttcttttaagacttttcagctggataccagatattgacagactcaatctcatcttggtgttcaaattttaagttgccaaactttagcttttggacttgtgtgacactcttactagatgcatacctagcctccagctaggtgatattgtgtcatccttaagaggccaacgaggtttcattttaaaagctagctcatgttgattgttagtaacttcctagtgtgttgtgctgtgaaagatggtgaagtcrtaatgagattcactggcatgattgtttagtgatgtgtgtttgccatggattgggaggggcatatatgtattttcagagggatgtcaaatctatagtacagrggagctcatttaatctacagtgcccccaacctcatcctttccattgtatagtggagaagttgggtatctagaaagatgaagctatttccagcttattagagccaagtgtggacttgaactcaagttttctgagttcaacttgcttgttactttttggggataatagtagtagctaccttatgggatttagagaaggttaagtaaaaaaaaaatctatattaagctttaggaatagtgacagacactgagaaagatatagtaaatgaaagctgccattattgtcatcatcatcatttttacttttatcattcctgttgcactttattactaccaacaccatattttgtgaggtagtcaggtagctaccttaacaaaagctacctcttgttttgtgccatatcgtagaagccccacttttgctaacagactgaagcaagtrttcaacttgcgacaatttaaggaaaatttgacagtatttgaccttgtacagagacccacaaaaggcattagttgaagataaataaatggtagttagcaatcctaatttgaatttttgtacacttgtgtgtgtgtttatagataatgtttcccatttataaagatttgtcaaatacgattctactcaagtacattctcttgaaacagcaggaattctatggaataaggatttctttctttctttcttttctcttcttttctttctttttttttctctttcctttcctttccctttcccttccctttccctttcccttcccttcccttcctttccttttctttcttttttttttgagacggagtctcactctgtcacccaggctggagtgcattgacgtgatctcggcttactgcaagctccgcctcctgggttcacaccattctcctgcctttcatgatttcttattaagcagtctcctatacttccttgcttcctgagacttcttcattaaatatgtactatttcaaatgttttaaatttcctagtcctgtcagcacagggctttaagttagaagacatcagttatgaaatctatcagggtgtagttatttaaaggactagacttttgtgaaatttttaattatatgggattatacttatgctatattaattgaaaagaaatggatgtaaaactatataaagtacttacgaaagaagccaagttaattgtgccttggttagatagtgaatggttaatgccattttgtgtcatactggctttgtctctgttttatgtacctgctgtctcactaacagtgttgcttagtagaaggagtgtgggctttgaagtgagatgggtttggggcttcactccattgtcttcatttaagagctttgagactgcgtaaattgtctctctgagccttagttctggttagacttggatgctctctcctttgcaaggtttctttatcctgaaagtggcttgctcttggaggtgcttagtaaatgttagctctttttctcttcctaaccatgacctttacctcccatcctctttccctggcattctgcaaggattagttcagggattaaagcaacttggaaacgttttagtttcatactgtcatttttagtgrtttgccttttaaatcatctctttactgtaaaagtcttggttcctataaatctcacacccttgggaaccaaactcatgacaatcatgaagtgtcttacttcaaaggataagaaaaccaagcaaaccaaaatcatgatatcctctctggagcagtgtgtgtgagcctgggatcagcctgggaatgttggttaatggtgtcaccatcctcctctcgctggcagtgatgtggagggtgtggagaggacatgggctgagctagggtttataattgcatggccgtctggccttccttgagcattctttcccttccaggattcctgtaattgtcatcagatggctcagtctcccaatgtttccggtattgcaatgacttctggagtgtgtttaaaaaaaaaaaaaaagccagaattagcagttagcagtcatcatttgtttgtgtcagttctgttgtgtgtagaggcgtgcagattgggcgtctctggactgtagaaagaccagtcacatgtggagttcgccttactatcttgtgttgaaccttcctacttcctttgcttattcttttccgcctacactgctttaaaggactccctgaaaaaaaaagtgagaaaagatgcaggcagtgttcctgttttcaactctagtcagccttctttttattctcattgttctggaaacttgagaggattgcatctttcttggatctgctaaaggcctagggaggttgagagttggactggatagtgagtgaaccctgtgaagaatgattccaagtcttgggctgttcgtgggcatggaggaggagagagtatttgtattttcctttatcatgaacttatcactaaaggcccaaatataggaatatatcttgcatgggttttttttttcccccatcagataagctgttgtaatttgagcctgacacttcttcttgaggaaggggaaaattgtgtaaatgaaaaaggacagctaattttttgaaaaacaaatctggagtgattgagaggtctaaacccccaaaartgtaaaattgaagagaactaatatggttaattttgcttcatggtgttagctgaggaattgtgttttttaaaagccctttgatttactggctcttactcacctaatgggtaaagtattatagttcattgcattctggtgcctttgtttgtctaatggtggagtgtttttcttaagttacagggacccaggcctagatgatgataatgactatagtgcatctttacaaaaaacagcccttttacagttgtcatacggatcttttagaataattgaggtgaattttaatgccaaccctgttaatgatgtctatcccacctctctcttcccaggtggctgggggtggcggttggaaacaggagagccttggtcttaatgaacagacaggagatatctcaagattaatgtgaaaaaagckcagtcatgataattgcattcccctcggcagtgattggtttacgagcagtcatgtgattaagttctgaccaatactttgtaagaggaagtctgctgggggacggtagtgagagtttcccatctggaataaaaaacacatcactgcttgaaatgtggctgagatgcttacagaggagatggaccttcttggccagcctgaggacaataccttgcagtgagaaaggcagagccatgtcactgatacccagcactgggtgctacctctcacttgttttataacctataactaagtcacacaatccaatgtatatcatttaaataattttctgtttcaagatgtgaaaggcaaggcccggcgcggtggctcacgcctgtaatcccagcactttgggaggccgagatgggaggatcacgaggtcaggagatcgagaccatcctggctaacacggtgaaactccgtctctactaaaaaaaaaaaaaaaaaaaaaaacaaaaaccacaaaaaacaaaaactagctgggcatggtggcgggcacctgcagtcccagtcccagctactcgggaggctgaggcaggagaatggcgtgaacccgggaggcggagcttgcaatgagcccagatcacgccactgcactccagcctgggggacagagtgagactccctctcaaaaaaaaaaaaaaaaaaaaaaaaaaaagatgtggaaggcaagtacccctttgggtgggatcgaaatctagaattggccaggcatagtggcacccacctgtaatcccagccacttgggaggctgcagcaggagaatcccttgaggccagcctgggtaatgatgtagtgagaccctgtcaaaaaaaataaaaaggacaaaagaaaactagaattgatccttcccaaagaaaatgttcactggcttgttaagtcatatcctaaccatgtcattttcaccactggcagaaccttgatgaaaggtgtgatggggtaaatacattcgtgtttggtttgtatggtttatattaatttaatttgtttctgctgtttatagttggattttctttgcttaggtaactgatttcggctttggattgttatgattgataataagagaaaaaagaatgtaaagtgttgagaaatagtctaaaaaaacattgtattgttggagcagttattcagttttcacagtattcctttgggcaattggatttgttttggtgtctgactttgttgacaatcctgttgttatattaaagctgtttcttgcagtatgttttcccttttagttaagaaaactcactttatttcctaagatgaattataattaggactatttggtattgagaatcttttctcacttaatacccctaatgagatacaaatgttctaaatgtatccttatgagtagattatatttagagaggaatccacttattttagttaactaatccctttgcttttgtatcatacatccttattaggctcccacgttcctattccatatggaattccttgtgaaatcagacctcagcaaacaatgttattaactttcagggtcagtgttactgaaaatgtcaatgaagtttgttggttttacataccttgtttttatagcactctagcttttttatacgcttatgataaatacgaattctttccctcttcttgcaaagtaaactttatttcttagttggttccccccgctggtatttatgcttctactcactagaaytgaaggaattgaatgtatttgaactattcttttggccccttctgcagactgggaatggtctttctagcttctcagatctctgcatattgtgcatccttgttcttttgccagaaacctgaaaatttcccagcagaactaactggcaatgatctttgaattatatgaatcaggtttgcctggcttctaggagtcaatattatacccttctcaatgactgtatccttctttctgaggaaagcagataagttagtgatgaagttttgaagaacttcacttacggagttacacttcctgagttcaaatcctgacttcactgcttacaggttgcatgcttttggacaagttatttgacttctttatgctttggtattctgcaaaatgggggttataatgcaactgatcacgtaggttgtcatgaggattstaagtgaaaatttgtaaaatgttcttaaaatagttcctggtgcatactgagtgtatagttggtatgatggtatstagttgatttttttttttttttttggagggtcaaggtcttgttctatcacccaggctggagtacagtggcatgatcttggctccttgcaacttccgtctcctgggctaaagggatccctccaccttcacctcccaagtagttgggaccacaggcacgagcaaccacacctggctaatttttgtattttgatagagatggagttttgccatgctgcccaggctggtctctaacktctgggcttaagtgatccacctgccttggcttcccaaagtgatggggttacaggtgtgagccgccgtgcctggcctctagttgaatttttaaaagtactttttaatctattttctcttttggtcctcacgccaccctgtgaagaggtagtrgtattacttattttatagggcaagtcatagaaacacagtgtcagtatgtgactttgttactagtaacagtgttcgaattataatctagatttctcctctcatctgttatagttgactgtgaatggggtctttaggaagttgctgtgattctgtgatgttatcagtcagaaggtgtaatgggaagggcatcaatctctgtttcttaaatttggcccagtggtgagccagttcattctaaaataatttgtatttgctaaatgcagatatttctcactttgcatgattttaatatacacaattttcagttgccatggttaactaaataatactagtccctcaacacagtccaagtttcagttatcatgttacattaactataattgtggccgggcgcggtggctcatgcctgtaatcctagcactttgggaggccgaggcaggcggatcacgatgtcaggagatcgagaccatcctggctaacatggtgaaaccccgtctctactaaaaatacaaaaaattagccaggcatggtggcgggtgcctgtagtcccagctactcgggaggctgaggcaggagaatggtgtgaacccgggaggcggagcttacagtgagccgagatcaygccactgcactctagcctgggcgacagtgtgagactccatctcaaaagaaaaaaaaaaatctataattgtataaaatcccatacactagcacttcctgttattttgttcatcagcggacagcaaagcatgtagtcgtgttgccttcttgtctsccagtgayagayccatgtagcatttcataaaaatggataattaaaggggagaattgtcaaagatcaaagtgcatcaaataaatgaagtgttaaaattggattaaaattttagctaattgtaaacagcattcttaaaaaaaaaaaaaaaaaaaaagcttaccaagggaatgtcaactcagccagtgttctagaggctctatatatttagctaggagcacttagtgaaagataactaacttatcaaagtcagttatgaagtggttgtgatgaaaaggatgaagatgtaacagaggaaagatgctggcaaaaaaaatcatatgagaggaactctcacagatattgyataactgtgaaaacacaaaggataaaatgttggaagcaagtctgaacttagaaggaagtatacctatctaccaaggcatggaaaagatgcttgtttagaattgtaaattagcaacgagaataaggcattcccattgaaactactattgacacagttttttataaataaataaaacaattctcagagtttctgatgttttagagtactaaataaatatacttttcattttcctacacatttatagctgatagacagtttttactgttttgacaaaaaaattaaaggtcatagaacaatcataatatttctgttgattattaaaatcatttcatggccaggcactgtggctcacgcctataatcccagcactttgggaggccgaggcgggcggatcacgaggtcagtagatccagaccatcctggctaacatggtgaaaccctgtctctactaaaaataaaaaaaaattagccaggcatggtggcgggcacctgtagtcccagctacttgggaggctgaggtagaattgcataaacctgggaggcggagcttgcagtgagccgagatcgcgcyactgcactccagcctaggcgacagagcgagactccatctcaaaaaaaaatcatttcacatgatttcagcgcgcatgatcacttttgtggtattgcattatcatgcaaaatgaggactacctgtatttattgagccaagtaggcactcttgtaagtgatgagggtataccaacaaagtagacaggccaaacctgcctttaagaaacatttattccaataaaggcttattgagtgtctgcagtgtgccaggcagcatgtacacatgtgaatgaatagtagttcgtttctcagagaatttggatcttagttgactggtgagagacaagaccattatactataacatatgcctataacatgtataatacatttctgtgaatgaaataataatgaaacaccaggcattrtaagagccaagaggacacctatcaaacacatagcctgagtgtatgagaggtgggagaagcagggagacatgcctggaggacttaggaattaatctggaaaagctgcgttgaagaagggtacagtggtgagatgcttctgcatggaaagcacaggacattttaaaaagttgagtgttgttgaagtgtgtagggtaagatatgggccagatcaggaatgccatggaacttgtaggcaatggggagggtctatagggttttcccctagtttcttttaaattaaggtataatttatacacagtaaaatggacccattttattgtattgtttggtgtgtttgatataagtgccatggccaccgtgacaatcaagacgaagaacatttatattactccctaaaatcccccagtgctcctgagtgactaactcctcccacccccagtccctagcaaccactgatgttttctgcccctatagttttgtgtttctcaaaatatcatgtaaatggactcatgcagtatgtagtgctttaattctgtctctttcctttagcataatacttctgagattgattcatgttgttgcatgtaagaacctttgggttttaagcagaattatctgtgagatttgattggaggatggatttgagaggagcaagactagagactttgattgtattacaatttaaccaggtgctaatggagtagagggaatagagatgccaaggaggagcttggtttgaggtaggaggtggaattcgtttcaactaaggtggggaatctagaaggaaaaacaggtgggaaagaggaggccctgcatattggacatgttgaggctgaggagtgtgggattgtcctgcaagtcaaccttggcagggtgtgaggcatatgaaggagttgatttctctccttccttatcctctgatctttgccaggatcaaatttgctaggcactgatcttgttaattaaagggctcccttttctctttatcctaccatatcaccaccaagaatttgctcccaaggccttgccttggactgtagactgtcattgaatcaacttgtcatgtttaaaaggaatgacctcttttttttttttttttttgagaaggagtgttgctctgtcgcccagggtggagtgcagtggcgtcatctcggctcactgcaagctccgcctcctgggttcacgccattctcctgccttagcctcccgagtagctggaattacaggagcctaccaccacgcccggctaattttttgtatttttggtagagacggggtttcaccatgttagccaggatggtctcgatctcctgaccttgtgattcgcccacctyggcctcccaaagtgctgggattacaggcgtgagccaccgcgcctggcccaggaatgacctctttatggagtgtcatcagccaagtcagttcatctgtggttacccattgtttttcactggtaacgtaaaaatatctgcggagatagctatggtttgcttggtccgtggamctggaagtcagagagttcagttgtcacaaatccaggctggagattctcttctgtaaagatcctggacatcctttccaccagaaggagttttctggaactgtatgtttgagggtactacatttgaaccagtttgaaccaaatgtgatggaattagtgatgaagggacacaatattacccatatttaggatgtggctgactcatcttgtgtgctatgattcagtgattctaattcagtaacggttctgaagctgcatcctggctaaggaaataattctgtgcttgattaatattgtctaagggcagggcgcgttggctcatgcttctaatcctagcactttgggacgctgaaccaggaggatcgcctgaagcaagaagttcaagaccagcccgggcaacaaagtgagaccctcgtctctacaaagaagaaagaaaatattatctaccttttgcctaggaggggaagcactgtaggaagcrgtggccagagtagttaccctctttaggtgattcaccacaaaaatacactcaaaaggtaccggatatagaataagcccactaccgtaacttcagctaacagatcatttcatcatcaggatagctccatgatgtaaagcatgtyattcttgtctcttacaagtgaggaaattgaggcacaaagaggtcaagtaacttgcccagtgacagacagctaattctggcagagctgggatttaaactcaggcagcgtggctccagagtccrtactctktcatgcacatcatgctgttttcagaattctagaatgctagcaccaggccgacttaggaaaattattttgtttccccgttcttcattttacagctaataggagtaaagtctagagagggctctgagatgactgactcaagatcacaggtgatggtggatggagggagaactagtttccccctgcccagggcttctgacactcttggaagttttgtacctttgtcttggttgcttgtcagtttcacatcagtgaagagagatgttgctgaagtaggcagactggcaaaattggtgtttaattccattctttactttggcctcagctctctcttgcctgggaatgtactaattggctctcttcctgtcccctctgccatttattattttcaagggagcctggaatcactgttactcgtctctagcctgtcctgtttaatcactgattgtcagatcttttgctctttccagtyccttcccactaagaagtaggagaggggagaayctgcccaaccacgtgggtttggggtgagttttgggatgggggaagggaattagactgttgcagggtgggagttattgtgccgcagatcaatgaccttcccttgaggatgccactctttgtggttttgctctttctgccccacctgtatcacagtcatcctgtgggttcccagcaggactctgccccccacatttggggcagggcctctccccctttctgcagttggggttcagagctagagagggagttctgacgaaatttgcttgccccatgcatgcattctcatggaaccctgattatatggtatccgggacagaaaagggtttacatttcatatctgttgtaactttattttgaagagccacagtttgggggataaagtaattttctttaatatttgttgatctttctcttaaagtctcgtgtgtaagcttattcaggtagagactgactttttttttccctccgtttcttctgtactgggtctttgtatgtaaaattctaagtcctgttctagtcttcttccacctacccaggaatgaagttgaatattaatgcaccatggtcaccattctccaatggctcagtctttctycacattttctataattaagactgtccttcccaatttcaactcaaaatacctgaaaagactccttgtttagttaagagaaagcaaatttccccaggtaagttcccatatgttttctgtaaaaactagcgcacactttctttgtattttacctctgtcaaatgagattcttagaagagtaatcagccattctaagccrctccactcttttgacttatattttcatgggtaattktaactctttgggtgctgtccagaaagtttactgctgcttctcacaagggaaggtgtctgtggttcccgagactaccctcttcctgccttcctttcagcttcctcagaggaccagcaagctccagttcttctaaataggtgcacaggcccasaggtggattttccttcaaggccctgggaaaaggccccagcaatgtgttcacattgccatttgtttctgtcaagtttttgtgtatttttatttttgcatacttttttttttttttggagacagcatctggctctgttgcccaggctggagtgcaatggtgcaagcttggttcactgatttactcaagaatggatgcgcccagcctgcatccattctttcgtaaataaatacataggctgggcgtggtggctcatcccagcactttgggaggccgaggcgggccgatcacctgaggtcaggagtttgagaccagcctggccaacatggtgaaacctcacctctactaaaaaaaaaaaaaaaaaagccgggtgtagtggtacaggactgtagtcccagcaactcaggaggctgaggcaggagaattgcttgaacctgggaggtsgaggttgcagttaggcaataacgagccactgcactccgacctgggtggcagagcaaaactctgtctyaactaaaaaaaagaaatacatagcaagaatttccatcaccttaagtagtcacctgatccccttactttccccgtggcctcagtttttgcagtggtgatatctgtgaaatggagaacaactgttcatccacactattaaacaggaggtgaaggccctcgcacaaacctgcccagtgggatactttaaggcttgggcagtcttgtcttgcactgcaatgagagcataaatgtggacacatattaacctcgcctagtgggtagttgggttcagcacaggtgggtttaaagttcccgttcttttctacaaagtgcaaacacattccctttccaaaaggtacactggaagctgtctttataaaatgctttgtagcataagcacatacagagaatactgtattcatactgtattaatcagcctctgtaagtgtccattctctgggtctcacgggcttaaaaacttgaatgatcgtcatcttatttcttcttccactcttgtcatttaccaagtcctggaagtagattgttttagtttgcattgccttctggaacagtcctctccttaaaagaaaaagtctcattattattgctccgcagttggagggcaggggagtggtttatactgtgagttcacatcactcttttaactccttttcattcccactgacctactataggcttgttgcagtacctgcccactttaactttagactttctctaggatactctagtsattgagattggaggcttttaaaaacacctctgactttgccagtgctcagccccaaaacttcatttattgcagactstctgtattcagagtaagcccttacctctgtgctcagtatccctccttgagtgtaggcttgcttacctttctacctccatctctttctgacactcttttgatattgtgtcctatccatattgtttcccaggaatacctcttattttgcagtctttttcttaaggcacttattactttgtcccttgtgggacaattatttgtacatttgtatagcgctccaaactagatttagaaattcttgaaaatactttatttacttttagtagtggtagtatagtagtagtagtggtaaatagttaaaaaagtagcaccagactactgcaaagaccttagggcaacatcccctgaatactctgaaccctaattatctgtttgcacagctgtcttccctgctacattgtgagcaactccagggctgggactgtgctcccagaatctccagtgctacagcagtgtggcaggaaagtctttttgactaaaaagatagtcatgtttgtttcttattcatgtgatgctttcctccattccttgaataggaattttttttcttgttttaagcagaaattttgcctttttcccaaattcactggaaaaatcggatgstattccactgttaattgaggtgtcactaattactttgcttgaaatttcaattattctaaaatcttccaacattttcatatatgtatcgatattttaaaaatataaaagaattttaaaacttacatttggaaaatttaccaatacagttttggctaattgggttgtcagttagccaaaggttagggatgattgatctagtttaaatatagctttgcgatttcattgaaattacttaagaaaaaatatttctagacagcatggaagaaaggtgaatataatagtggtttaaatgaagtagaggtttaatttgtgaattaatttttgagattgttatagagatactgtgatcaagtgctaagtcaataatgtaaagcagtgcatatcatttgaagctgttcccaaatatatcttaaagctaaatcaatattaaaactgtcctaaatagtaaaattgtttaatcattagacaacctgagctttatgtaaatttgtagactcttgaaacttgtcgtatgcagaagcrtaagcgtagctataacataagcataaaccattgtgatttgcataatttatctcttcagcataaatattgtacttgtagagtaacatttttgtcctggaaatyagattttggttgtctgagtatttgtgggactggaggaggttttaggtttatgtttgtgtttagattaaatttgaatggtgagttaagatttatggtgagcagtgtgcagaatgttttatttactttttcaaagcttatgaataaaagcaacatctgaatctgatctttgggaaccaagttcaggaaawgtggtataatctattttaattgtctcccttaatttcaacttacttctgtttatttgcaaattgtgtatttaagacattaacatatttaataccctgwtattggatatatttaactttctactagcttcatgctttcagagttttgaactctgaaaacacaagcagcattaagacctgtcttttgcttaaagtactgagtgattacactccgatgttttcattatatgaaacacccctgctttacttcagagtaaatgcttctaagaattaggcatgcctagcttctaaggtagactattcacttactcactcattcattaatacattcactttttccaaaaatgaatattccatgttcatactatgtgctaggaatgatagtggatatagtagtgaacaaaaggtagacgtttctggccttcagagtatcttagagtctggtaggggaggagaatatgaaaccaggcaaccacagtaccacgtactatgataaatggtgtggaacccctaagcccagagttccatcggcacatatgtgagtggtgcccaaagacttcctggaggaagtgacacctctgcctctttattcttcagagtcagccagtggaaggggtctaggaagggttgctacaaatgcttctggtacaaagaacaacattggtaaaagtccagagaaaatagagaagtcagcacattagactagtatgtaaaaactttaggcaactagaactcaaataactagaactctcattttggctcagaaaaattttcctctgcattttacttgatgaggagatgaaaaatgactacaaacttattgatttcttaccccgatagaaatactcatttattctaaaaaaatttaattatacaaaattattattattattatcattattattatttttttgagacagagtcttgctctgtcaccaggctggagtgcagtggcacartctcggctgactgaaacctctgcctcctgggtcccagcaattcttctgcctcagcctcccgagtagctgggactacaggygcacgccaccacgtccagataatttttgtatttttagtagagatggggtttcctcatgttggccaggctggtctcgatatcctgagctcgtgatccgcccccctcggcctcccaaagtgttgagattacaggcatgagccaccacgcccagcctatacaaaattattaaaaattgaaagtcataataatattatatagataatcttacttgtcattttgtaaatatccttaccagttttctcctttccatctttggttttataaaattgagatgatatcaaatatgctattttgtaactgatattttacagttaacataaaaagcacattgtgttcatatcattggaagtatttgtaaaatatcaattttaatggctgtataatattctatcatcaactattattcatttatacatcatttattatatattttccaatatacttgtattggaaaagtagattgtttctaacttcttgttgttttaaaaattctgccacgaatgtgtttatattgaaacatttaattaaatctttcatatttcctttcagcactttgggaggccagggcgggcagattgcctgagcttaggagttcgcgaccagcatgggcaacacaacgaaaccgcgtctctactaaaatacaaaaaactagctgtgcctggcggcttgcgcctgtagtcccagctgctcgggtggctgaggcaggagaattgcttgaacctggtaggtggaggttgcagtgagccacgattgcgccactgcactccagcctgggcaacagagcgagactccatcttaaaaaaatatacataataataataataaagttatagcctttcttctgtgcccctgcttttttttgtaggtatgcattgtctgccacctgcctccaatatcagtccagccctgataacatgaggtcttgaatccagatcttcagacctttggtgcaaatttgaaaatgaatcttttttgtatctgttcaagtaaaagcatatcagctgaacaaaatgttacgtggctggacacaaaactgaagggtaatgtcgttttgcattaataaaaacatgaaacaattagatcccatttttttagagtgcccactctaaaaaaaagaagtccctggataaagcgttttatctggagatagcttctctctctctttttttttcaaacaaaggaattatatcttatagagaattttctttaagtgcatgattaagtactctttttggttagtgaattggaatagatctgttattaaataaatacctctgtagagttaagaattaaaagaaaactggacttgtttcttaggtaaagtaaacattttttttcttaaagatgtcaaggatgtttcccacataacaaggtattctatcttaatactagaagccacttggtttacaggggttttattttttgcagattttttgctcttctggggctgaagtcctgttgttttcatctgtttatcctgtgtttgccttactgtccagtacatcatagataaccaataagtgttaaaaaagcccaatactttttaaaaagctttattgaaatgtaattcccataatatacaattcacctacttaagattttttttttttaaggcggagtcttgccctgtcgccaggctggagtgtagtggtgtgatctcggctcactgcagcctccgcctcctgggttcaggcgattcccttgcctcagtctcccgagtagctgggactacaggcgcccgccactacgcccagataatttttgtatttttagtagagacggggtttccccatgttggccaggatggtcttgagctcctgacctcatgatctgcaagcctcggcctcccacagtgctgggattacaggcgtgagccaccgagcccagccaagatgtttttattagtttcagtagtttttttttgtttttttttttttttttttttgaaacgaagtcttgctctgtcacccaggctggagtgcagtggcgcgatctcggctcactgcaagctccgcctcccaggttcgcgccattctcctacctcagcctccctagtagctgggactacaggcacccgccaccgcgcccggctaattttttgtatttttagtagagatggggtttcaccatgttagccaggatggtctcgatctgctgaccttgtgatccgcccgcctcggcctcccaaagtgctgggatcacaggcgtgagccaccacgcccggccagtttcagtagtttttagtatattgtctaactatcactacattcaattttaaaccgtttttattacctcagaaaagaaacccgtaccctttagctttcaccttcctggcccccccacaacactgccattcctccagccataggcagccaccataatctactttttctctatggattgcctcttctggacatttcatacaaatggaattatactatatgtggtactttgtaactggcttctttttatattttcaaggttcatccatgttgtgccatatatcaatattttattattttctttgcctcttaatatttcattgtatggataggtcacagttttatttatccatcagttggtcaatcaaatacttttaaatatgtaaatcagcttgggtggttgtgccttataaaggcaaaaatgaaggtagaactgaagttgtgatatcctaaattggaaatgccttcagagcttgttagtcgttaaggtatatataagtatgtttagaattaagcttatatgttgttgggtttaagataatagcacatcaatcagtaggatcttgtcagttttacctcttggatacttcttaaatctgctttcttctacttacctctggtaactatctaatcaaaatctttttttttttttttttgagagagggtctctctgtcacgcaggctggagtgcagtagtgtgatactggctcactgcagcctccaccttctgggctcaagctgtcctcctacctcagcctccttagtagctggaattacaggtgcacgccaccatgcttggctggtttttttttcttttcttttcttttctttttttttttttttttttttacaatttttgtagagatggagtaacctaggttggtcttgaactcctgaccgcaagcaatcaaccatccttggcctcccaaagtactggsattacaggcaggagcctgacatctaattaacatcttttgtttgaacattgcattaccactgccatccccaaaagaaggcaaaaggagcatttctaaaaatatcgttttatgttaggggtcagaagtctttaacataacctgcttggctgccttcacatcagaccgttgctgcctttccccttcctctgccctcctattctttaatacttgttttgtatttaacagaggataatggagtcctttctgaagttgtttgggcatctgagatttcagcttataccactttgagaactatgcattaaggatctcgtttgaagccttgtgcagtggaaagagctcaggcttggaagtctggtaaactaggtataggctctgcggtccaatgtgcactagaagtgtgcttgttccttttgagccttttatctgcaaaatacagatgctaccttgcaagttgttgtgaaagagaaataatgtgaaagtatctgacacataatatgtgcttaatagattgtcctttctgtttcttttttggattattgttttgaatgaagtggcttaggtcatcatgtttttttggctgaaaagaaggatttatatatattatgatcattgttggtagtttgggggttttttcttccaaagtttgtgtctttgtctcagaatcctgttttcatgaagactctggaattttgtcactgctctaatacctctgccaggcagcagcactcctttgggtctctgccaatagagaacatcatttattgccttaaaaagaaagtatttgtgtgtatgtatctttacaatatcctcattatgagagtaattgtagtatttgtgtgtatgtatctttacagtttcctcattatgagagtcattgtttttcatttataaaataggaaaatgcagaaaatagagaaaaggggaggagaaaataaaattcatttgccatttagtcacctactgtggccattctagtttatacttttctagtctttattctatacacatctacatacatatatgttagtgtggctttggaagtagaagttagataatagtatgtgttttgtttaattgctgttttctcattgccagtatagatattttcagtgtttagtaacatggaatgtatataatttttttccggtctcagagaattccattgtatgggagtaccatacttattgtcaccacttctctttgggaggacatttaggttgtatccaattttttgttattataaacagtgcttgctttgattttacagtcatgcgtgattctgacatgctttttacatcctaacagttctttttttttttttttttttgagatggagtcttgccctgtcgccaaggctggaatgcagtggtgcaatctccgctcactgcaagctccgcctcccgggttcacgtcattctcttgcctcagcctcccgagtagctgggactacaggcacccgccaccatgcctggttaatttttttgtatttttagtggagacggggtttcactgtgtaagccaggatggtctcgatctcctgacctcgtgatctgcctgcctcggcctcccaaagtgctgggattacaggcgtgagccaccgtgtccagcccctaacagttcttatgaaataatttccctgaggtttgatgataaattcaattcaaatttgctcctcatgtttttcacaggtcttttgaatattacaactcatgtggcagaatgtccctgttctcctttttgctcttcatctggtactagttttctaatgtgttcatacccccacatccatttaccttggctaagactcttcttgcctttgtctgccccaaaccactgtcctatcgtttatttatttatttatttacttttattttttaatttattaattaattattttttttgagacaggagtctcactctgtcgcccaggctggagtgtagtggcgccatctcggctcactgcaacctccgcctcctaggttcaagtgattctcttgcctcaacctactgagtagctgggattacaggcgtgtgccaccatgcccagctaatttttgtttttttagtagagatggggttttgccatgttgaccaggctggtctcgaactcctgacctcaggtgatccgcccaccttggactcccaaagtgctgggattacagatgtgagccaccacgcctggctgccactgtcctatcttttaaagaatgattccttcatattcgtttctttcaattgacccttattattaacttcattaatttgtttccttcgtgttgcccatcatatcacctcaaatttggaattacttaagtgtttaattttttaaattattctgaaagagagtgcttgctttctttcacataacagaattagtggagtggtttgtattatgcattacaattaaaattacgtctttacaattaattggctgttgctctaaattgggatatttctgaagttattttaaatccaggactgtttttctttcctttgtgtctgtttcttgcctacagctagttgattatatccttaaggagtactagccattttaaataattttaatctgaatttaaataaatcaaggtggctgggcgctgtgggtcacccctgtaatcctagcacttttggaggctgaggtgggcagcttgcctgagctcagaggttcgagaccagcctgggcaacatggtgaaaccccgtctctactaaaaatacaaaaatagcagggcgtggtggtgggctcctgtaatcccagctacttgggagactgagagaggagaatcgcttgaacccaggaggcgaaggttgcagtgagcccgagatggttccattgcactccagcctgggcgacaagagcgaaactccctcttaaaaaaatatgaataagtaaatcatggtgtgtattctaaagccatagttataaacttgaggggtaggtaatacggaggagtttcctgcaggtccccgtggctgaaagtcagcgtagaagtgcctgacctggtcggggttccacttctggtctcagtcctgctgaggcagcagctgcgttggtcaggtaggttttggttttggacacagtggcccaccgccgctgtacattgcaggattatttcagttcaaaatgaactgattgctgagctcctctgcagccttcgtgttgcaaggactacagtttgtggaggcccggcaccaccagcctcattgaggacattgacaaaaaatacttggtcctgcttcaagatggaaggacacttaatagacttaagaagtattgatcaatttggacttggaaaatgagartgacacacccctccagcaagtatccattgaagaaatcctagaagaccaaagcgtggaccagcagaccaggctggaagtagaggaactgaaagttcaggcccactgggatcaaggtctttccattccttgagcagatactcttgatgagtattaagtcctctgctcagaagctattgctcttgaagagtaagggctgtcactgaatgaaactgataccctggttacctcacacatttgaccagggactgtagtgtttctgaaaaatcatttttagttttaattctagcacacatacaacatgaagaaatcatgggagtttttttttttttaataacgaaatcagtgtttaaggaaacagtggtatggactccttcactgtggagccagcagctacttctgtatattgctcttcttatcccaaattagagtttataggggacattcttcatttacttataaataaaatataaatctcaaaagatgccatgaatctcaaaaagcgattaaacttgagcatgcatcagtatcacttgcttgtcttgtgtaatcacagattgctgggcccctacccccaggtcttttgattctgtagtggtcagggtctgataatttgcattcctggcaagttcctggatgatgctgttgctgctacttgtgagacactactttgaaaacaactgttctaaaggaacctagaaataatgtttgcattatctgtattccttgtaattacatgtattttttctctttactgttgtacatgacagatataactgagcatattttagtaaaagcaaaaacaaataaaaaacgcttcattggcaaaatacaagagggtcactggataacagatatacagtcttttgtgggataggccagcagataaggcatccagaggcttaaagcactcagggtcctgggttgttcagcccaaaacaggtttccttaaatattttgtagccttagtttttttgtagaaaaatggcgactgctaccagatctctctggaccctttaactcctaaatctgtagtcagatattcagtatgtttaaacaggcttacaatactgcaaatatcttgattaagaaatgcttgtatgtttttagtaaatgttcagagtaatttaataaaagccttatttgtaagttttatcacaatggagatttaaaagttggatgaggaaataaacattgaaatcatagatattccaaatgtctttcgaagcctgagctacagcacaagctatggtctgtatgtcaggcctgatagaatgtaaggttgagcccagaaaaaaggaggtggttacagaaatttttaaatggaatcgaaactgtcattggatgcatttggttcatcagatccagattcagttcgatgtgcagttctggttccttatcagatgtaacgaatagtagttgtacttattagtatactggcaatttaggccggacacggtggctcacgactgtaatcccagcactttgggaggctgaggtggggccgatcactcgaggtcaggcgttcgagaccagcctggccaatatggtgaaaccctgtctctactaaaaataaaaaaattagctgggtgtggtggcgggtacctgtaatctcacctacttgggaggataaggcatgagactcccttgagcctgggagacaaaggttgcagtgatctgagattgtgacgctgtactccagcctgggcaatagagtgagactgtgtctttaaaaacaaaacaaaacaaaacaaaacaaaaaaacatactgtcaatttggacctttgggcttgaagttttttctatatgacagctgagattgggggcgtgggataataccatctgcaacttgttggcaagcacattatttgtattcaaatagaaaggacgtactgttagaaaatgcgcaaagggaaaaaggcttttgtagaggtcatttggcatgtaggtgtatgaaaggtgaggctacagcaacacccagcagctgataagaccatacacagtgtaagatgaacggaaagtttcctccaagcaccttgggctctcatgttaagacttggtaaaaaggttgctgatgcttcatttactgtagcgacaagcccctttatctcagcggctgtcaatgtgagttggaatttcacatctttttaggaagtcttttggaccattttaaaattattattattgcactgtccctcacctttttttttttttcctgattgcatgacgtgtagtcctcttttcttgtcagcaattaggagaaaaatctcaacagaacgagaaaaccttgtgacgctgaaaagatttgcctgaagtgttccatgtaagcagtgggaatggacatacactgaaagagagaggggaaaaaaggctttttgttgagagtgacaggcaggcaggatgagcaaagtttaacctaaatcctttcattgatattgcaaagtcataagccttcatatgacactgccacattcaactcactgtatgatctggagttcagtagcttgtaccatagtgcatgtgtgtgtacagtgcaaacattttatgaactgcagtgtctgatccatccgtctgtctgggcaagagtgtcccttgatagtaaaaagaacagcaatcaggacagaattggtcaatgcggcatgtctaatagtgggaagatatttgaaggactcactatagacacagtagtctctctaaatagcctctttgcacccggagtcttattgcaaacaggttcattaaggagagacattctgacacacagcatcacagtaatgaaagtagctctgtttttctaatattgtatcttgccacttcagttaggctgctagtacaagatttcccttgtgttgttgtatgtttctccagaaaaagaatcagtcttcatagaatatacaattattttgtacgggaatgtataactcctacctaagatccagtcttccctgttkatgtgcactagtgcaaaaataattggcaaacacatcctccagaccaaaagattccagcaccttcaatttgttgggcttgaagacgttgaaccagttataataaactttaaaaaaatgtgtaatgttcaaaatggatttgtgatcaatcataaaagacaaaaaaaaattagtacagtttcccatgaggtgtgaggttttttttccctaggttttagccaacttcatatagtatcagttcaaggagggggaaaatgcaaaaggttttcatctactaagctttacatataactactatatgatgacttaagctattggattttctgcctgttaatgtacagcgtgaacattatgaacaaggaaaaaaatgttatattggtttaaaagtggatatggaaaatttaatgtgctcaagtgggaacaatggcatattaaaaaaaaacactcatgacacagatctaataattcacttgcccctgtaggagaagggtatcaactctgatactggctcacagtttatttttatatacacccctggtccctgcagtataccccgtgtgtgggttccagagaaaagaaagaaaataacctgtagggaaatcagcctggaaacctttcattaaatacattgtactttgtattgtgtctttcacagactcttcaagaaataaaggaaaaacctgttatcagtctgcatgtgtaaaatattgtatttgaatactatcatttgttttaagattaaggctgaggctgcagacatattagttattattcacttacatctggtagataatgcaacagggatttaaaaattctttttccatttatagtccctgccatcctccccccaccatgaactgtaaagatactactttaacttaaaactgtgcttgctaaaatatttcaatgttggaaatgttgcctctttatagaggattagggttgtgagggtaataaaatcagtcttgaatttcttggcggagtttatctgtcatttagcaaaagatgcctttctagggaaaattgaagaaagtgttaaatacattcttttatgagaaaaaatataaatggtaagagtgtaactgtgaatagtgacacctttatcaagttgaatgtcctttggagtgaggctttgtcttgtcattatagttcatgtattgctgttggtgggcttttaaaatctgtaaacgtcttatcttttttgctgactattcatgcaggatatgctaggcaagccaactgtgacacatactctgcctatacttgtagctgcctcttggatgaaaatgaacacatatcttaaaaccaaaccttgggtgccatatagcagtatttaatgaacttctgggattgcagacagtaagagccaagttttgatctcacatacctgggaacacattgtcctacacaatctgttgaaagatttattatttctgaagtagcttgtgttaaaaaccttgttttaagtatagagggttgtaagcctatcagtctcagcaaattgataccttttttcacgtctgttagactcagtgccacctcttgtcctgaggacagatatagcacattccactccatattaggtatccttgctaagaattctttttttgggggacagagtctcgctctgtcacccaggctggagagcagtagtgtgatcttggctcgctgcaacctctgtctcctgggttcaagcgattcttgtgccttagcctcctgagtagctgggattacaggcatgcggcaccatgctcagctaattttgtatttttagtagagaggggtttcgccatgttggccaggctggtcatgaacgcctggcctcaagtaatccacctgcctcggactcccaaactgctgggattataggcgtgagccaccgagcccagcccttttcttttctttttgtgacagggtcttgctttgtcgctgaggctggagtgcagtggcatgatctcgctatcttggctcactgcagccttcacctcctggggttcaagcgattctcccacctcagcccctgagtagctggctctacaggcgtgcactaccatgcctggctaatttttgtattttttgtagaggtggggttttaccatgttgcccatgctggaaaaaaaaaaaaattcttgaatgacttgagggtagggtttttgaaaaatagaggtgtgctgttagatgtagaacttctcaggtgaaacagcccctgggtgattggttaccatggtcattgtgggtaaactcctgatttggaagtagttgctccagtattcatatgggtcattttggttcctttctggcttcagaagcctgtcaattgagttcttaagccaaagaccaagttaatttagagatgtcgatgtcagtaatttaccttctgattgtcagtgaattatttaagaagtatcttactatttttctaaggtgaatgagctttggggagaggtttttcataaccaccatctctgttttacctgaatagaaagagcacaatcagcccatatctgtgactacacagggttggccctgatcttagggtggcagtggrtgagcatccactgtcaactctcctgtatctctgggtgttcagtgcctygcattctgagatttggcccataccttccaggttagcattgagccatgggactatgttagtttcctctgctgttgaactgctttaggaagaaaagacctccttgtttctggcggtgactgctgggccttacattcattttgggtcaagtaattcattgagcaaaaccgtaggctgtaggttaggtatacagcttctcctccccatagggtttgtgtaaatttcccaaggcctgggaaayttctctgtaattccggagggctccacttatcctggagcacccacttagagcctgaaaatgccacaggttggtctatacttcacagcatcagggttttctcacgtttgcaagcttcaatgacaagctccacscacatgaatcttgtaagtggtggcagagcttgctgttatccagtgcttattgtgtgccaggcattctgctagatgctttacatccatcatcatttgctctttacattaagctggcgacttggagactacttacctcattttgtagatgaagaagcggtgtgactagtaaggggcaggcagcactgggatttttagatccaagcctggtctcattcccaggtccgtggcctttgacatcacatcctttaagctgcatggcctccctgagctctcctttccgttggctctcatgcctgtgcaatgattccgtccctgatttggggtcctgtcacgtgacccccatcacttattaaccaggtgacactgttagtcttttcactgactgagtggcattttccctgtcagtaaaatgggagagaatgatccttcttctttaacctgttgttgtgaggagtaaatgagataatgtctctgttatttattagacacctattttatgctaggcactgtgctagaacttccagtacagcagtgacacgaacagacgtggtccctgctcatgaagcctgcagacctgtaggcatggcaagacacttaaacaaaaagcgcacttagttttgtgctatatgtctgaatcatatatagttgttaaggcccaggaactttgacttcaagtttaagctgcagcctcagcaggcactatgcttttccagggtcctatttgtaattcttacagaagacccgttgctttcttttatgttgcctaatcctcttccattgttccccatttcaggtctctggaagtcagaaacctggaagttccgccccctacctacttctcagcttcttcttcccctcttctattctcctgccactgtctgcgccatttgtctgtttcttaaggtttcctgctctgctttctgtctttctctcgtttctgaaccctgtttaaattcaacgcttgatttaataagatcttagtctagtctccattatttcaagtcatatatcgcttttgataaattgtctttttaagcacttatcctaattttgcatttgtttatgtaggcagtttttctgtttctccaattagactaaaagttccttgagggtagggaccacttctctgtctctctggtacctatcccagctgcttgtctgttttcaaatacttactgagttaggttggattccacccccctcattctcttctctggatcagctctttctctttcatctctttgcctagcattttcatttattctactaacatgtgcatttggtctatcaaattgaacatatcccaaactaaacacatctccccaactctgcattttttccttatttccaattcttgttaaatgtctctgttgccattatccaaatcccttttgcctcagtttcttgtaacactcccgttttctcaccatcttctgaataggaagattgatttaaggaaagattccttggcatctctcataacttccctaccttcactgccactacttggtggctcttactgacttctgtgtctgaattgcatacagtggcctgtcatggtggttcacgcctgtaatcctagcactttgggacgctgaggtgggtggatcacgtgaggtcaggagtttaagaccagcctagccaacattgtgaaaccccgactttactaaaaatacaaaaattagccaggcgtggtggtgggtgcctataatcccagctactcgagagactgaggcagaagaatcgcttgaacccaggaggtggaggttgcagtgagccaagattgtgccacttcactccagcctgggtgaaagaacaaaacttcatctaaaaaaaaaaaaaaaaaaattgcataacctgcctcttcacttcttgccctgatagatttgagcatgtcggatcttaaaagtctttgatagctactgaagtattcactagtgaaataatgtcatgttttggattttctttaaaattatccagtggaggagagagstaaaggggattttgggagaggtgaaacaagactgaccatgtgctgataattgttgaagttaggtagtgagactcacagaggggctattatactgtttacgtttgtataatacatgtttgaaaacttcaataataaaaatttgaaataaaacacagcaaattttggctttacactgtctatagataatatatgaacctcttggcagagcatacaaccctctcatactttttccccagtgcctcatttggcttctaatctccctcaactctgtgtatacaggctgactctactctgaagccatttctgtcctcagcattgatctccggaaaggctcagctctacaaaaaaaatcctccctggcctaatttactagcctgatttgagttttctctcccatatcccttagcatgtaccgcccttaggggcctttcacattgtatgtaattgtttccttgtgtctctctgagcactgacccccagccagttttatcccagtactgaggactgcccaaactgagaaggttctccccagcctgccagtatttcagtttaatactcattgcatgcctactgagtgttgggcacttgatgaatacttgagatttaattgactggttgcttctggtctataatatggagagagtctaccatctggctttctgggctgacgttggctgtacatttcatccctctccctcactcttacgatcttcctagattctcctttgggaatgaagtatataatgttcagagatgcttaggtagactatgccatgtaaggtagccagatagtgattggcatgtcaaaaccctttgtccagtctcttcttaatggtgactttaaaaattgttaggctctgtatttacacttgttaagtccctctttcctctctttggttcatctttactccataaaactgggtaggggagttgtttttttgtgtggggagggcaacctccagccagctttttgtgagagcccactctaaagcccctacactagactcttcaggaaaagcaaagtaaccttcccaaaccatttaattcatttcacttatttctggccatttgatgattccaaactccaacaggacctgtagcccagaggtaaaagtagaagatgtttaaaagatttgagaaatgaactaatttttgtggtctggagaagtaaagaccaaggtatgagttaatcactgttttcaaacacatgaaattattttgcatggaaggtagtaccagctgttagccatttgagtgaaaataaacaaaaggacttagattgcagctggagggattttagttagatagaaatttttcattaagtggttctgggtgggaactgggttcccatcccagtagattgttgatttaggtccagattggagggcagtggggcagatttgaggaatttaagcatcctgaaaatcagtcctcatgattaaaaaatcagcagctgcgaatgctcttcgtgttcagagctgcagaatgaggattcccctcatccctcccaccttcccccaagttgaaagaaattaacctcaattaaaggaaacagtgatggatggttgcagagataagtatgatatatcacacaggaaaaactacattaaaagcacattaaagttgagacagaaagcactaaaagtgaagaaattcacagttaaggttgaaaagtgatatcgtttacatctctgctaatatgtagacctaacagggtacacttaagaaattatgagtgccgggcgcggtggctcacgcctgtaatcccagcactttgggaggccaaggcgggcggatcacgaggtcaggagatcgagaccatcctggctaacatggtgaaatcccgtctctactaaaaatacaaaaaaattagccaggcgwggtggcgagcgcctgtagtcccagctactccggaggctgaggcaggagaatggcgtgaacccgggaggcagagcttgcagtgagccgagatcgtgccactgcactccagcctgggcgacagagctagactccgtctcagaaaaaaaaaaaaaaaagaaattacgagagtgccctgttgtgctaagaagtaagttttttgacttcacatactaagcttaatacacagtttcattgcccagctttaattaaggcatcattcatgactgattatagcccatggaaaaaaacctgttacttttaccaaaagagtttggggttggttttaaaatttagctttggaggggaccaggtggtgattctgtgactctgtgcatttcattacctaacatatttcagcttttctaaagtcaaattatttcwgcttttctaaagtcaaatatttctatttaaaaggcactagttttgactaaaatgttaataataacagatttaataatattgagtaatattgtttccatctgtttagaaaccaaaatttagcttttatcccttcatttcaggggtggatttttgcttctccaaaatagatcttaaatcttaygtgtatattttaagcaaattattattgcattttaggagtcttagccagaataaaatctgattacattttcaattcataaaattacattgtgaccccagaaaacatcctctaattgctttagtttttacctaataagactgtctctttgtgtatgtttaccatattagagacaaaaatccctcaaatgggtctagaatactaaatatttgtgtacgatagagtgtggatagtacaaacgtccgtccttagctgcttcatcccttgtctgactctaaagagttgttacttcttcctaaaccaagagccaagatggaagatataaccttccaaaaaatcagagtatatgccacagcgggtttcgtatccttacagaagatgttctctctctccttcttttttcttccttcccttcttccccatccctcctccctccttccctccttctttccctccctctcatttatttttgggataattttgagttctttcattgaccataagcttattgtgaagaacaaattcagtttatcaaatttagctaccaaatcttaaaatttgatttttaaagtagaaagataattgcttcttattaaaaaaaaaaaacagacaaataagtaaagttatgtcaatttgtataattccacattaatgagctagtacatgggttaaaatgttatattagtagtttcaagaaaggaaatgtgagctataattattatatgttttctatttttgttacatttaaggtgagtcttgtaaaagggccaatgaaattgccttaagtaaaatgattattaaccaatacaatttatggcatattgacttgggtaatattaatttgggtacatgacaggatatatactcatggtctcttgtcacagatttttaggttgggttacttaccagatgaatgagtttgtgtttccacttaatttttttaaagttcaggaggccaacaatttgacagatttgaaaataaaaatgaaattgaggtcactttttttctagtggctactttggtatgccgtgcatagactctgtttcttaatgcagaaaatacaatctttatgcctgtttggagtttcaaatgtaatataaatgtcatgtatcatcataagtatgcaaacatgttttaaaacacagaattgtatggaagcaattactggcagtgagtgagctacacaccccaagggtgggttggggccaaaaaaattaaagttcctaaacagaattacttttgtgtgggtgggaaagagagagcaatgttaacttttattaggaaccaatcccagctcttattttaattctcgtcacatacttggtaactcaaataaataggtagtaaagggacattaagggactttgtgttaggattagttttccccccacttgctatagtcttccggtagggagtgattagtgttcagcaggagggcctggtggacaccagtgcatatatagctctgtagttttcaaacactaggtgttggttaaagatgatgttgccaccctttgtgacatggtacttgagcattcttttgcggggtgtgttgtgttcatttttagcagaatgaatgggatgtaggaaggttagattttatcattggaaagtaacatgctatgtagttttctgccactcaccactagcctggagaagacctgaatgatgggttctccctcttgaccccttcatgctgtatgttttatttgtttcctaacttcatataaaatcactatcatctgaaggtgatgatggtttttttttgtttttttgagrcagggtcttgctctgtcactcaggctggagtgcagtggtgtgaacacagctcactgcagcctcaacctcctgggctcaagtgatccttctgcctcagcttcccatgtagctgggaccacaggtgcatgtcactatggccggctaagtttttgattttttgtagagatggggttttgtcatgtttcccaggctggtcatgaactcttgggctcaggcgatactcctgtcttggcctccaaaaatgctgggaatatacgtgtgagccaccatgcctgaccctgaaggtgattttgcattgtactattttgtgggggtatggaccacaaaaatggagggsaacggaattactctctataaaaataaatttatcttctgacattctctggagccctttgctaacaaggtttaaatggatcttttttcyaaagcccttatcaccataacctctcagctagagagccgttttgggttcaactgcaggttgagctgagtgaccatctaagcagcacagggactagcagccccttaactgtgatcagaacatcactgtattgataagtgagtcttggtcaagtcacttaacctttcttccttgattttctattatgtacactggaaatgatagtatctatctgcctttgatctcatagggatgcttcaatccattaaagtcattaaagcactttaagtaaggtataaggcactagatgcaaggcctcttcattgttgttatcattactgttattttattacagtgctgtatacaaagggggcactttttaatgctaaacagtcatctcagaatatgttctgtggaatccagaagttgacagaggaccttaagcggtcaggttatctttctctttcttcttgaagccaggctctgttcctcgttgtctctgtctgttactttggagaacaaatagcaaaaccaggaacacaaaaatgaaaatagaaaattgagacaaatggggtagctgtagtctacttcgtgttatttcctgggaactgctgttggtgttgggtytcctaaagtgggaagttcattgtgcctctctggatactgatctcccctttctgtaatgtgcacatccaggggttttgaagtggattgtgggctttgattcattcccacttgcaactttcattttctttgttttttcgaaatactgttttactaggaaagagaaaaacatttgggggtagggtgggtaaagatctctggatgtctttggatagtgttcaaaggcattttgtacgagatgattgtatttcctacatcagccccttctggcatttcatctcaaatacttcctcccttgcacctcataaaaaattccagaaggtgaggtacttccatatggccttggatggcaccaacttgatgatgtccatgaaaaaatagaggatcaacgctcaccttccagagtgaagagtttgcttcctggagcatgggttcttttgatctcacaaatatcactattctaaagtaacctaccctgtcctttatcttaacattctgaarctgaygttggtgactctattggttcttcttggctaaaaagttttgctactttccatgttcattctttttaatttttggtactttgagtatcatgataaattttacttctgttaccttatttgtggactgattactctgctccaccatttacatgtaacttggtagcattttcaatttcatcagctacagagcactaattcctcaaacatgggcctttgtagttaggtggaacttaagacagttgagtgtcatggtctgaaatgtaagttatttctgttcatcaaaaatattatttaagggagccctggaataattatgagtactgaataattaagccataaataaatataaattggtaaagacatccatcatttattatttggttttccaacttccataactagaatcctgaacttacgagtatgttgctttataaattaagtagaatggtttgcttttctgactccctctccccgcaaaagcataagagtctaacaatggattttctggtattgatttgtttgtttgaaaaatcttagattatatcatagttttgtattttagaatcagtttcttgaagaggaagaatacaattatatgaaattgggattgttgtggaaaatcagagacgtatgtttgctataggtataatattagtttttcagcatcaagagtaaaacaagtgraattacctctgaaattgcagctaactattgctacctctataccagaaatattttttcatcttttcataccacatgtgaaaactttgttgttgttgtttttttttgttttgagacggtcttactctgtctgccaggctggagtgcagtggcacaatcatggctcactgcaaccttaacctcccaggctcaagtgagcttcctgccttagcctcccaagtagctgggaccacaggcatgtgccaccactcccagctaatttttgtattttttttttttgtagagacggggccgctctgtgttttacaggctggtcttgaactcttgggctcaaacaatcctcctgccttagcctcccaaagagctgggattacaggtgtgagccattgcacctggccctgaaaattcttaagtggggataagggataacagaacttcttggttcattgttacctacttttcttttttctttctttttttaaagaaatgctgcagcactcattattttttcccctgtttccctctcctccccaaatttcctgtcagcaactttgttttctrttcattagaattcaaacacaatttaaattaatttcccttgccaccttctctgtggttagatacacctttggtgagttcacaaatgactcattggactatgatgatttttgttgatttcttacatggtccaactgggttatccttagagatgccttagaaccagtggaggtgttggctgtaggattagatggacttaacgcagattactggggatctcctggtattcatatccctgtagttgctaaccaggcttggatttatcctggattggacctttttttcactatcagggcctaaggagcctttttaggcattttatccaacctcctcccagccaggccctcattacatcctaagaataagattttgtctggcagggttgaactttaaaggaccataaaccgttgtaatatctaaattttttcacccctattgaaaatgcatgatttagacccaatatgtggatgcacaaattattaaatgacttagctatttatattccacccaatagtgtgggtacatttttctgagagttgctgaacagcagtggtattttgaaaaatactactcaccttgaggaggttacattgaatttgtcttttttggcttagttttaaaatgaagctgattacttggtggtatacttagatggtctttgataggaccctctcctgtcctgccttcccccatggaagtatcattatagctatttcctatacattctcactgcaaataaaattcagaaaatacttagctcgtaagagtttctgtctctggccccgcgcggtggctcacgcctgtaatcccagcactttgggaggccraggtgggcggatcacgaggtcaggaaatccagaccgtcctggctaatgcggtgaaaccccgtctctactgaaaatacaaaaaattagccgggcgtggtggcaggtgcctgtagtcccagctactcgggaggctgaggcaagagaatggtgtgaacccgggaggcggagcaggcagtgagccgggatggtgccactacactctagtcagggcgacagagcgagactctgtgtcaaaaaaaaaaaaaaatagtttatgtctccaaaaattgaggtattctatgatatttatgtgacttctaccttcagttgtgattgtagaatgccttcacagatttaaaatagataccaataaaatggaattatatataaatggcatggttaagaatgattgttctcttgatttgttttcaagctatgtttagtattccttttttcttcctatgtattttgagggatttaacactgagtcatatagatagtgttaattttcatttcagtttataaacttctatcaagacaataagatttcagtgtaaaaaaaaattaaggaaaatatatttggtggttttcctcctcctgaaatcttaaaagttaccatactttccattaaagttctctctaatatctatacagaaaacatactgttcttgaataaaacaaaattaatttgtggtccttgacttctgtggaaaaagacccttatcataacaaagtacaaaaatagtaaaagcaattagtgaattaagcctcaattccaattgcctcgattttttgtatgaaatcatatctttcttattatagaagtgtgarattatagccagctgttggagtagtaacttgtaatccatttctgtacgttggtttttggtgtgaactgaaaatgattaccatgaagttaagtgttataacctactttaaatgaattagtttcctggaatttattactgctaaaaatcagaacaaatttccttaggaatctgtgtttataacaaaaacatgaactttgaccgtagaatacttttcccattcaaatgaaagataattwaaayaatattttttaaaaggttgatttaattttacatctgtgagtataaatacaaccagttgattcttcaaagatttttgattgtgataataagattgatggatatattgtgccttagccttatattaaattggcagatttttaaataccrgataattagaaatgctattaattctcagtgtagartgctaacctaacatttttgtatgtcttgtgyggtcaatagaataatggccacccaarcatgaccaacttttaagaacttgtgaatatatatyttacataagaaatgggactttgggctgggcgctgtggctcatgcccgtaatctcagcaccttgggaggccgaggtggacagatcatgaggtcaagagtttgagagctgcctggccaatacggtgaaaccctgtctctactacaaatacaaaaaggagccgggtgtggtggtgtgcacctgtagtccyagctacttgggaagctgaggcaggagaatcttggaggcagaggttgcagtgagtcaagatggcaccactgcactccagcctgggcgacagagtgaaactccatctcaaaaaaaaaggaaagacaagggactttgyaaaygcggctaatgttaaggaccttgagatgagggagatawtcctggattttctaggtggacccagtctaatcacatgaatcattaaaagctgagaacttttcccagctgtggtcrgagagagatgaccatggaagaatagtaagagagctctaacattgctggctttgaagatggagcatctgggccctaagctaaggaatgctggtggcggatagaagctgaraaatacaaggaagcagattctccttttgagtctcttaaatggatggcagccctgctgatatcttgactttagcccagtgagacctgtcaggcttctgaccawtataactgtaagataagaactgtgtgttttaagccactaaattagtggtaattttttagggtagacatagaaaactaatataccttgctttgtgtttgtaatttcttgaataaaattatcaccaaactctctaaatactgtaaaggaacaaaaagctatttgcttgcatataaaattgtaatttataagactttattataatggattgttacaattaattttgcttttaaataacagaacgaacttgatgcgaccttgcaagtatgctttttttttttcctttttaaaatcaagggttgctttgctaccattgtaccaggaatatagtaggcagtcaataattgttggaaaagtaaaattacatagtcaacattttcattagctattgttaatgttgttgttaacaatggagttttgagaaaggggcttaaggaaatgtaggaatgtaagtgtgttaggtcttaagaagtatctccaaacttttgacagatatttctcacatttcgatttctgtcatgttcgacagttgtcaagaaattgctcaagggtttattggactcaagcgccagggcatgagtgagtttatctctgtcttgataagctggacactgatggtagccagaaagtagtggtgatggggagttctgattcttcagataatcgtttcctatttagttagaaaatgtcaggattcaagatgttgtaccatatagcaagagatttaagatcactgtaaatacgtataataaattaggtaaatctacatgcttttaaatagcttttaagctgcttgtctactttcatggctagtatgttggaacattcagtcagaagtatttattgagtctgtctgtactaggcactggggatataggttcaaagagtcctgccatcatggtgcttattgacccaaaagaaagatagaaattaagtaattaccagtgttggaaagtagtacagggcgctttaggaataggtagttaccttcttgggtctattttttttttttttttgagacagagtctcgctgtgttgcccaggctggagtgcattggtgtgatcttggctcactgcaagctccgcctcctggattcaggccattctcctgcctcagcctcccgagtagctgggactacaggcacctgccaccatgcccggttaattttttttgtatttttagtagagacagagtttcactgtgttagccaggatatttttgatctcctgaccttgtgatttccccgcctcagcctcccaaagtgctgggattataggcgtgagcccctgtgcccagcctaggtctagtttaagaaaccatttctgaaggcaaggggagaggttcaggaatgaggaaagaaaaaagctttaaagcaaagaaagaatgtctggagcagagaaaatctgagatcactgtgagaaggtgataagatggttaggttggcagagatcaaatcttacagggtcctcttaaatgattttggaacctcagctgcaatttgaagaatgtattggaagggagaaaaaggtgactccaagaagctgaggtaggaggctatttcagctgtcaaaatatgagagtctgtaccagagtaatagagagaggaatggaggatagatccagagayagttaggagataaactagaaagatttggaggttgactgcatgtggggtgtcagagaggcagggagaggtagttggggaaataaaataatcatgccaacaaaaaagacatattatccacagcgaagagagagagaatataatttattattgagtaggcataaaaagattttgcaggtatgtaagatatctcaaaagtggctatgaagttggggacaaaatcacagttaatacagaacagcagaagaaagtatattcttaataacttctcatccctttgagagacaaagaaagggttgtcccttttgatagtcttctgtacatctcatgagagacacytgagttaatcccagaggtttgtttttcacatatctagcgttggtttggcacatgacttagacgtatctctacattgtaaaaactggagactgaacttaatccttagagagatttatctctgttccaaaggttagagtaaggactcagattcacaatgtctccaaggaaacactcctaagaaaagcggagaaggataaaatggtcttttataaatggagaaaatcattttccaagccctcaatagcagatggtgccatttactgaggtaggcagcgctggaggaggagcagatttgaggagtaataagacagacacttgggaagatgtcaagtttaaagtttctattagacactgccccggaaatgacaggagtgcattcatagtggagaagggagatctaggctaaatatagacatttactagccgtcaacaggtagtactgaaccctgggaatgtactgggtagcttagggacatggaacggtgggatggggaagaaaggatgggggggtcatctcttttgtcatataatcgcatagttagcatagtgatattaccctaatggttaagcgcagcagtggtcgacactttcatcttttgactacttttcctggataatgtagctaaaagtttacatcacctactcttgtaatctagactcctgcccttttctgttaatagggtatgttctgaggyggtktccccccacagcctcctttccttttgttcactgattatgcattctcttcagtcccctgggtctcctgtggactgttttcctgcacccagtgtgcttctgcctccctccatttgaggccatgtgtcttctcatgctctcttgctctctctttttgaactgttgcttatttggaaatattttcagttatttccacacataacttctagatgtttatacctttytacagagtcaggtatcctttttctggtgtatttatttggtctggaatgtgtcaggttttgaggccacagcacagatgctttsctctcccataagtgtgggcratatgtggagaatggctttgtgtggattggaagtggwggtgaagggggaagtatcttgttgggaagaaatagctgactgtggccytcaagtgcttcttgggtggatgcatttaataatgatcttagtgaatcagttgctgcatattgaaaacaagatggctggggccgggcgcggtggctcacacctctaatcccagcactttgggaggctgaggcrggcagatcacctgaggtgaggagttcgagagcagcctggccaagatggtgaaaccccatctctactgaaattacaaatattagctgggcatggtggtgggtggctataatcccagctactcaggaggctgaggcaggagaatcgcttgaacctgggaggtggagcttgtagtgagtcgagattgtgccactgcactacagcctgagcracagagcgagactctgtctcaagaaaaaagaaaaaaaaatgrctatttgaatctataactgaacctataattggaaaatgaaatatggggtgggggaaagaccctcccatttgtatttacaagaacatttagatctggattaaaatagcagtgacctttgctctttattatatcggacaggtcagtttgcaagtttgttgggttggggcaacttttctgaatcagactcatgtactgataaattctgcacttggtggaggaggcaaaggttcttatccagagacactttagggaactctggggtttggcaagtaggaaaataggtagaaatggcgctcagggacatttcattttgtgatgactgactgtgagctgaagataaatacataaaaaggtaggcagtgatgccttggacaaagattttaccaactggcagtgtgaaatattctgtagaccaccagttctaatgagtttatcttagacagttctgagagtgtcggttaataatttaccctttctgagagacagaggcagcaattacaggctgtaagcgrgcacyctgaggcttctygctttgctggagcccatctgggctggagccatggaccccattggttgtgacacaagtaccaagtgtctgcactttggcatatggaggcttcasagcgctcagtaaggcatagacattcagtgtgattcacttcaagtgatatctaaagtaatggattactgtaactacccatctgctccacatcaaaaagaatagaactctgtatagatatttttaaagtttattttgaagtaggatggtgttctatatagaagagagggtggtggtggaaaaatagattattttgaagaaatatttatgaagcttcagagaagggacatactgggcttgctgattgatacctggaatatgcttttattgtctaacaaaatattggatccagctgtacatgtaagacttacccgttggcagtgtgattgatactgttaaaaacttgagtctgtttaccccttgccatacaatttgttttgatgcaatagtgaacacaactccactgtagatttaagtactatttatgtgaattttatttccctgtttagtcactgaatcacattgtagtgttggcatggtaagttttgtaatttgctttcccgtgtgaagagtgcttttcttgaaccaaatgttgacttctgcatacttttaaaagttaggctttatgtcattacaaagatttacagttatttaataatgatttattgcagtaatttattctgccagctgtggcacattttcactggaatttgtaaatcaaatttatatagaaatttaccaggacatgcatttcaggatttaataaaatatactctaaaatctttttgaagaatgtagttttatgcttacacatttgggattaagctttaccttaacagccatttkttactattcaaactgctgtgtttgtcccacagtcattgaaaagaagagtcaatgagatctgttaaaatacacagtttcaggtcatctactttgcttccagacctttagtgtcatgttatatttgacctgggatattcatatgatgttgagggacatggaaacatcctgacattaggctctgtgcagttctgtaagttttaatcatattaaactgtgcatccagaatcataactgagagtgaatgtagtgcactgtattcatttagaaaccctaagtgtcagattttctctccctttttcaaaacttactggctaataaccatgtggratacatttagcattggctgcgccagctcacactcctgtagtttctttggaatgcacaaatacggcaagttattgtattttctttcttattttaaaaaagattgttgcgattttgtttacttgatgatatatatgtttctagagagagaatctagaataaaaagaaaactatatacagattattttgtaacttgtgtgtcattaaaaaatctagcaatttgagaggctgtatttaaaatgtgtgattgccaagtaatttgtaagaatgacttgttctctaagactgcgtaagaattttacttctaagattaaactactaattcacagcttcagtcagctggttattttgtgtacaacagcatgaaacgtctcatttgacttaactactgccgcccacacaacattgacttcattgatcagttgttttaatattgtgaagatacagtctgaatgtgccctgaagctaaactttcaggttatagttaattgtatttaaagcagtaggctttggactatctaaaaaggaagtgaaagcatttgcaaatattgtagcctttaatttttcatagtagtttgtttattatgttcaagcactggtaaaacataacttaacaaaacaaaatgagccaaaacagcttaycatctgaaatgtaaacccagtttatcktcggatctcttattttttaaaagacgtaatttcttaaaagaaattattagaacagtcttcagctaggagttcaagttaccgtacataaaaaactggatctttatcttattaagatgaaaatatttttgtttttagagtcttgctctgttgtccaggctggagtgcagtggcgtgatctgggctcactgcaacctctgcctcccggattcaagcaattcttttgcctcagcctcccgaktagctgagattacaggcgcccaccaccatgcccaactaatttttrtattttagtagagatggggtttcaccgtgttgaccaggctggtcttgaactcctgacctcaagtgataaaactgcctcggcctccaaagtgctgagattacaggcgtgagccactgygcctggctgaaaataattgttaaaaatctttaattttatatatacatacatatatatacacacacacatacatatatatatatacatacatacatatatatacacacatatatatacatatatatacacacatatatatacatatatatatatacacatacatatatatatatatttgtgctggggacagcaactttatatttctagaacaattgtaataactttttatatgatttatgactcttcacagtgtttgatatttacttttattttgagaaaaattaatctgcaatgcaagggaagtcgagagatagggagatttcttgaaagggagcaaagataagactttttcttgagagagttcattgctgatctcttagatgtgatactgtgttttccttgaaagcatgtaacatttgtgtgctgaatggatcatggagaacgcatgagctccttagtttacatttactcatccagtactccagtgctcacaatatactagggttttttttttttttaaaccattttcaatgcaatttaagagaatattttagaattaagttttcacagttttgtagttttttttatttcacagttttgtagtttttttttagacttcagtgatgytttaaatgttttccttgtgcttacctggaaaagctttttaaatgataccaatttggaatgttaaaaaaggtataattctgggatgacagatatatttaatcttgtgggtgaatttagactgatggttggtgaatgctttgagagtctgaggtgggccagagaaaaaagacacaactctgtacttggttagcaatgcctgccattgccgctgaagtaccagtcartggaagcatctcctgaattcatctccctagcccagaaacttctgtgttactgtaatcattcatttattcatcttgtgttcattcattcacccaaatttttcaacatttctgaatatgtggcagcatgccaagcatggtaggaatatagtggtgaagcagacatgaatttgctttcaagccttgatgagtgggaggcttaatcgttcattaacaaagagttgaaaacagggtggcagcggttttggcaagaatgtgttacggtctaattcagagatactgaacttgggacctaagtaagaaggatwttctgttgtagaaatctggcagattctagagtttgtttgagagatctcttgcatttgctcattgggtatgccaggcattctggagggatgcccattcccatctgacaggatagatgatctactggtcaaatgtatagatgatgtctaacatctccgtaatgcaaggcaaaagtaggttctgtaaggggaatgatatgacattagtttagagatgagtggtaaagccatatgctgttgggtgtgatgccagtcagtagtagatggtagagaattgaagacagagcataattttagtgttcagccatttttaatttcagaaaatatttttaggtagaaatattttaactgtatagtacatgtattggtacaaatataagtatcaaattatatttctaccttcaccattttttccaactagaaatcttataattatctttagcttcttttcccttagagctaaaattattttaggtatcagttctcgtagattctttaaaacagaaaacaaaactctaaattgttaatttatttctcacaattacctagtttaggtcctcatgctctgtgatgggctgtccatttcctattagtgtctactatagtttcaagtgtaaatgcatgcagtgtaaatgaatataaaactgataacattcctcgttcttagagcttatgttctgggggaatatttgaatacaaacaaatcccctaatttaatacttctgttttctgctgcattcaccatccctagatgaaacataacttctgttacttaactactgtgttcagaaatttgaagtccaaatttcaaggcctctacagtttgcctgtatatacgctttctaatgtcatgtcttattaattaatatctttcagctatccaaggaacagtgcatctttacatccttacactatttttttttttttttaaagcacaggatctctttctcttgcctaggctggagagcagtgtcacgatcatggctcactgcagcctcagccttccaggctcaagcaatcttcccacctcagcctcctgagtagtwgggaccacaggcatgtgccaccacacctgggtaatttttaatttttttgtagcgatgggatctcactctgttacccaggctgatctcaaacaaccgggctcaagctgttgactttcccgccctggtctcccagggtgctgggattattatacttttattcgtgcttcccccacccatttggaatgttctcttctctttgccttttgatattctccttagtctaagaatcttggctcaaattgctcttttaaccaaataacgtatgttcctggatatattataactaacaacacgtgtactgatttgtagacttctacttttgtaagagagtgcttatttacatcttttatttaacttgtacatttacatatagtctctccagctatactgtaaatgatgtgaaatcagaggactttgttttaaatattcatactgggctaatatgagcacagttgaaaagcaggcaggaactgtgctttgagcatcctggagaatgaaacaaagcttacaagctttacatactgaatttctaagatagtcattcccccatatattgcttagaatctgaaaattccaaaactctctttggttttcagggccatcattatatattaatttttttattttgttaatttcatatatatatatatatatatatagtataaaaagtgaaaaaaagtacagaagcttacacagagaaaacaaatggtccattgctttttttttttttttttttttgagacggtttcgctctgttgcccaggctggagtgcagtggcctgatctcggctcactgcagtctccatctcctgggtcctagcaattctcttgcctcagcctcctgagtagctgggactacaggcggctgccaccatgcctggctaatttttgtatttttagtggagatggggtttcaccgtgttggccagtctgatctcgaactcttgacctcaagtggtccacccaccttggcctcccacagtgctgggatacaggcatgagccactgcacccgggcaaattctcctttttttctgtttactggattccttctttttaaatttttaagacaatgtctcactctgtctcccaggctggagtgcagtggcacgctcaggactcactgtagcctcgaccaccccgggctcaggtgaccctcccacctcagcctctggagtagctgggaccattggcacgtaccaccacgcccaactaatttttgtattttttgtagagatgggttttgccatattgcccaggctggtcttgaactcctaggctcaaacaatcttcctgcctcggcctcccaaagtgctgggattacaagcgtgagccatcatacccagacttatttgccagatcctgaaaggtatttctagcaatagcttagccccattttagaagtatttgttaccccctcagtttttcttttctactctctctttctcctgtttttctctttctccataaatgatagtacacagtatttactgttctgcatcttgccttttactcatgttttgtttggagatgttgtttatctgtatttacagttttttttccattcttcttaatgastacttaatattccattggaaagattcatagtaaaataaaatagcaaattctagaactgggaagaaggcaaatgttaggcaaacaattaataattataactaactatgaaaggataaaatggtagatagttgaatttaagaaaacagagccttcccagagctcctctttcccatgccaagtcaaataggaagccctaagcacttagaagcctaaagatattaccagatattaattgatgtttaattatcaagaaagatatgtcctgcttaaaacagggtaataggcagcaccttttcagaaaattcttgtctaaartggtagaaacctggagaggcaatgctggatatttggatgagcacatattttgaaatcagaccaacttggtcttgaattcccagtttgacmcttaatataagacttcggccaagtgactaaactctcttagcttcgatttccttattggtaaaatgagaataataatacctatctcagaggacctgtgaagaatgaatgaaaaaatcttttatgttttgcatagtacctggcacacaacaggtgctcaataaatataaagttccatctccttgactctgtgcccttccagaatgattaatttcctaagagctctggatgctgagattttactgtaattgtatcttttataaaacttacaatgtcttgtacatagtaagaagtccacatttatgtgtagatttattctgtaattcttaagagtctggcttggttttcttgaaacttttcatgaaatttctcaaatctctagaagcgggtacaaggacaattaattatttatgtaccctgtgaagatgcctaacttggccaaatgtcaacatctcaagcagtggttgtgcttgtaaaattttaatawtctgtactttcgtagtatactttgtatttctttgcgtggtgtgatattttgtatattttaaaaatgggaagaatttcagatgttttaatatctgttaggtggaaagtataattctttttcaattacmtggattaatttttttttttttttgagatggagtcttgctctgtcacccaggctggagtgcagtggtgcaatctctgctcactgcaagctctgcctccagagtttacttcattctcctgcctcagcctcccaagtagctgggattacaggcacccgccaccacgcccggctaattttttgtatttttagtagagacaggtttcatcatgttaatccaggatggtctcgatctcctgacctcatgatccgcctgcctcggcctccaaaagtgctgggattgcaggcctgagccacactgcccctggccgaattttaagtttaggccaggcgcggttgttcacgcctgcaatcccagcactttgggaggctgaggagggcagatcatttgaggccaagagttcgagaccagtctgccaacatggtgtgaaaccctgtctctactaaaaatacaaaaattagccgggcgtggtggcacatgggtgtaatcccagcaactctggaggctgaggctcgagaatcccttgaacccaggaggcagaggttgcagttagcagagattggaccatggcattccagccttggtgacagagcaagaccctgtctcaaaaagcaaacaaacaaaaaacaaaaacgagtttaataagrttcatagggttaaatgtggggggctctgacactgattgcagtcaggttcaacatggccaatatgaagtcaactggcttgtaagtttcctaaaaatttaatagtcagttctcacaagtcgcaaagagtaaatctggtatactactagattatcaacctcctgggtgactgctttgagctcyggtgtaaacatagttaggagaaccaattcrtgaaaaatggtccaggctttgctaccagtttattctttgactttgcctcagtttccttgattgtatagtaaagcaatgggattagatctgtttcctaagattttttggtatgaccttacaattstgtgtgtgtaaggctgcagaagccaaggrgcccaggctttatacgacttgtctcatattcacaatatcaatatttttttcttttcaaaaaaggtctcccctagttaaagcaaatatatttgagaaccactgttactgaaaaaatagctctctcaaagcccatgtctgtacttccagcagggcccctgatacagtcacatgtaatgggtttacttattccttatatatatactacagtaaacaatctagggtttaggaaaacgcaaaagtaatggaatgcaattcagtgttatttttatcagagacaggcataatagaaaacattttggtacttgatactttatttaaatatgactttcatttatgtgtgaatgaactctccatatatgctaatggatgcttgtaggccaggcatcatgaacttagatggcaatagtggccaggcaagtaaaggaattgcgagaacctggtagggtataaaatgaaagtacrtgctgcagagagtagtttctactcctcccttgctgattgttgtcaggaaggaacatacgtttctgttaccatatctttaattctttaacgcctcaccttttgcctctccctgcccattccctcagcagctgaatatccatattttaatttaaaatttcttgtgttttacatgttggtcattaattaaacatatgcacactcatacacactcacttaggaggagccaagcaaaacacatctgaagccaaacttggcctgtggtcttctactttgaaatgtcttttcacacacgtacctacgcagcaactgatactttagtacttgtatgctaggcgcttggctacaccttttgcactaataaaaatgtttaaccttcacaacaattctgtgaacaggtacttttatttccacttyagagatgaactttggataagtaacttgccaagatcacacaattagtaaaaggttctgcagttattcaaacccaagaaattgcgctgcagaactctgacacttaaccacttggcaaaattgatttcctggatatgtttcttctatatatgctctaagcacacacacaaaatgtaaataacacgataaaggatgaagagaaattgtttactattagttcattcatgtacatatgtttgcatatgtgggcatgatgtgataaagcactgaaatgctataagctttcacattttacrcagtttttctgataaagctcagtgagaccagtgtaaaaatttcacagggagtttatatttctccttgccacaaactagacatcctgagctttggggccaacgttgtctgtgtccaagggcaaaagttctctttcttctcattgtcatatttaaaccccacccatggaaatgctccaagtcctgagtgatgatcacttcctctgggcaagggtatgaagaataaaagtaaatctagcaggaggagtaaatcccagaagacagagataagtacttgaggtcagagactgygtcttttatagtttgtctacataccaaactcattaatatgaataatcatcttagcagtactggttgtagtagcaaaagyaatacaagaaaccagtcttctcctatatttttacattagcattcattatttgtaggatttgggaggtctttttgagaaagtgatgtgaaactaagtctctcccacgtttttcctttagttccactttttcataccgacataaaatatttttcaaccttaaaaactgcagtctaggccaggcgtggtggcttacgcctgtaatcccagcactttgggaggctgaggcaggtggatcacaaggtcaggagattgagaccatcctggctaacatggtgaaaacccgtctctactaaaaatacaaaaaaaaattagccgggcgtggtggcgggcgcctgtagtcctagctactcgggaggctgaggtaggagaatggcgtgaacccgggaggcggagcttgcagtgagcagagatcgcgccactgcactccagcctgggtgacagagcgagactccgtctccaaacaaacaaacaaacaaacaaacaaactgcagtctgtaggaataaaagtataagatggtaggggaaaaaaaccgagaatagtgtgaacaaaatctatgtatttatccatttaggtttttcccctggggtattttggaataccctttgacaccataagcctctttatggtttactcacttggtatggaatgggggagaaaaaaggagccagtccatctggcagtattcctctcaacaccctatacccatcatgtgaatggaaagaaccccaaaccttcattttcagaactgtatctcagcctctggctcctgaagaaaaccagtgtggttcagatgtgggatgggaagagtggtttgcattggcatcagccctgcgggtgctttggggctggagcacacacagctgtgggttacagatgcttgctctccggtattaatgtggccaacatgtgaaaccatgacacccacaatactacacaaaggtccacgcctctgatagtttgagaaataactccttctgaagaaattcctttttgaagggctagaatacattctagaatggaaggtcctcttacagaggggtagaaccaggaaagagatgccttataatgttggacagagcacagggtgtctgtaggcttaggagctttaaccaaacatggggaaaaaaaaaagtaaaaagtctgctctaaaccttagattaataaattcgaaattctgtgctatgcatgtagcagaaagcttgtacactcaagtcatcgtgtagtttctttggagatgtcaaatgcaagccattgttggtggttgtcatctggcctgactcagggtgtgttagaaatgtttccaccgatttttatttccctgagctgtctccaaggatggtagaaccagaggaatctatacacaagagaaaagaaatgagcatgggttcttggtaatttaataactaggactcttttcagggtgtggggattttgtcctttctcactcatgaggtccatgcttccttctgacagtacacttgagagagctgagatgtttccatcccccattcagttagtgagacagttttctcattcaggtacaatttccagtgaaatagtagcttataagtatccagaagttagtttattgactcttattgcacttctgagcacctaataaataatttattagtctgatggatatgtggctacctaactatggggcatgaaatatgcactgtttttctaatatactgtagggagacctgtttataaagtatttagtattggttttataatgcactgttgacaacaggagaccacgaagctcaaagatcaatctcattttggcccacagtattaatgctgctttataaagctctatgacaggtcacttagatagtggtcttcacagaaaggactctgttaggaaggcaggctgtaggggctgctagtatagtagatgaatgtctttgtctgtgtccctaaggtgactctggcggttgctgatgttggccaggtgatggaacccatcatttccctgctctccagagggattctggactagaagtgctgagttctgctaatgcagaccttgctaattgggcagaaagctggtgtgactttggaccacaattgcagttctggagacagaaatcaggcaataaggagtggaacttggctctcttcagctttgtcttatgtttattaatgaagtgaaattattccacatcttttatgcctttgttcaaatcacataggtgacatagcataaagtattttgatttttgttggctttggggaatttcctagccagaaataaattcatagacattagaccactacatactaaacacttcgaatttgggaaaacctaaacaaagactaagtaatttcatccaaaatcaattctcagtgttttactttattttcttcataagaactatacactatgagaatgctgcataatgacaatgatttatatcatactattgcccatcaaggtatacgtgttgttgtcttttttttttttttttttttttgagatggagcctcactttgtcacccaggctgcagtgcagtggcgtgatctcagctcactgcaacctccacctcctgagttcaagcgattctcgtgcctcagcctcccaagtagctggaactacaggcgtgtaccaccacacctggctgatttttgtattttcagtagagacggggtttcaccacgttggccaggctggtcttgaactcctgacctcaggtgatccacctgccttgtcctcccaaagtgttgggattacaggcgtgagccaccgcacctgtcatggtgyatgttttagagcaaggtatttttctctttgtgtccagaactccttgctggttctaagtatttcacttcccaaactgggaactctgagctatactttcttggacccagtcagcttgtttattatttctcacgcttttgtgggaaccaggctgagttctactatttgccatttctgttactcatttcttactgattcagagtttcattttttttttttgaaatggagtttcgctgttgttgcccaggctggagtgcagtggcgtgatctcggctcaccgcaacctccacctcccaggttcaagtgattctcctgcctcagcctcctgagtagttggtattacaggcatgcaccaccatacctggctaattttgtatttttagtagaaacggggtttctccatgttggtcaggctggtctcgaactcctgacctcaggtgatccgcccacctcggcttcccaaagtgctgggattatagcagagtttcattttaccctttccagttggacccaatgttttcttccttctagtactcctygattccttcctatcaygtctcccttagcagatagccccatctttaacttycctcagatgattattytgttcatgtagctgttrtttattgagcaccctgttagaccctgaattrggaaagataaattctgtctcttttaagaagtgtacagtttagtggaaaaaattggtaataaattggttttctaacatgagcagttttaatatatgtatttcttaaccmcagattttttttctgtatctcttacctttggtttctgagggaaaaaaagggtttyttttttctccctccaggggcacccttttcatttgtgctcttgatcatattctctcctcggaccctttcataccattttycctctggcttagatcttcaatatcgttttctctcttggcttcatcccctttgcctgtgatagtctcttttttccctgtagtgaaaaacaaactgccaacttatgaacacaacctgtctgagctcctctaacttttcagaccacgtttctcttacttgttttctttgcagaatttctccaaagaatgttttatcttttctgcttctttgtcttcacaatttgcttacttcttaactcctctgcaatatggattctgtatacctatcagtctacaaagacattcactcttatgacacaaagcctaataaaatattttagccacaaatatacatgaatgttatgttgaacactcattgacccgagtttaggaactaataatgtacaaacacatctgaagactagagttaccatttaaattatactgtgtcagtcactgtcaatctccctatctgcctttccccattttccatccttaagcactattctgattttggtatttattattcccatgccttttggtttgctcttactgtatttgcttctacttactatttcacttggttttaaccataccctaaatataagtcttgttgttctagatcatttaaaactctcaagcatcctatcttctgtcarctgttttcccttatcaggtggaacgttggamaatcacgatgctcctgttaacgctgttccttctgtcttttcccctaataaccatggatatcccctgagatactaaccttggccacttgttttatctcttgtttcaggtctgtgtagatggctgctggatgtgataacttcagtatcagtctgtttkctaacatttccagttgcctggytatctgcatgatctgctgttccccccatactaaacttrmtatatattctcacaaactagttcatccccctttctgttgataatgctaccattttcctgtgctcagactattagaactttagtgtcattgttgacacttctcatttgttacagtcattctggtccccttrattttatcttcacagtatcttctgtatcttgtccttttttttttctccagccgtattgccagtaatttacccagattattgactgattgattgagatggagttttgctcttgttgcccagggtggagtgcaatggcacaatctccgctcactgcaacctctgcctcttgggttcaagtgattcctctgcctcagcttcccaagtagctgggactacaggcatgcaccactacacctggctaacttcttttgtatttttagtagagacggggtttcaccattttggccaggatggtctcgaactcctgactttaggttatctgcccgcctcggctttccacagttttgggattacaggcgcgagccaccatgcccggcctattttaatgtcttcctaattggaccctgcttttgtcttttcacacttcagtccatctgtcatactgttgccagataaatcttcttggagcaaaataatgatcagacgttactgctgttgagaagcttttggtagtttggactgttggtagataacaggctaaatagcaactctttgtagtggagtatagggcccttacttttataatagttcctatcaaccactgcatccatttcattgatggttcttctatgtacatcttcccttatgttccagtcaaactgtattacttctctaggaatataatctacgctcagtgtgagagtgcctcggtgtagaagcttttttttttttctaaaccatactggctggaagggatctctaagttgtatggaattctgctcttgtttcttttcctattctgtttttgttaaggttgttttgttcatagcttatctcctgtactagattgtaaacttgtgagcaaggagtatgycttaacttttgtgttctccacagcttcttatacttggcaagggagcggggcggggggctggggcgggaggatgggggtgggggtgattagtatwccctaacagcagttaaaagtgtcatattaagtggaagaaaagggagtaagaaattgagctaggcagggcaaaagtgtatccattatcaatcagcaaattattcagttattcccactttgttactttagttctcaccaaagtttatttagctgttggctactatcagccttagaaactattaactcttaaaaaatgtgtttagttggtcattggtgtgttatatttgcaatttcttaaaaaaagttttgatgtactcaatgcttttaagtaatactgtctgggcatatgtaatttcctttcccaatctctcaataggcacaccttgggcccaccccacctccacatagccttaattacaaatcagaggacaggcttagtgagcaagactggccagcatatttcaaggtcccatgttgtggggttgatacatctcaaattgaggtatgttggttttttttttccccctttaagttacttggacacacttgcattctttgattacctagttaagatatatctctcacctcttctttctgccactcttttactgtctttcatacttatcctcattctatgaaactcaggtatttatttgcttcctaacacttcttgcctctgaagaaataattgaaagtagatttaatgatggttatttgaatgattttgaacgtgataaagtatctgccttctattgtttctctccctgcacttacttctcttttcctttttctattctttctttcctattgttctagggctagtttattgttatcactatttttaataataatactatattaatagtgttagtagtaaacttttaaaactgaagtttaacatacttacagaaaagtgcacaaataaaagtgtatagcctgataaattttacacactgaatatacccaggaccaccaactagatggagatacataacactacctgaaccccaaaagtgtcccttagcccagccactattctccatcaaagccaatcactatgcagatcttctaagggacctgttaagtcttcgtatttttaacttgccattaataggtttctggcatcttttgggtttcttcatttggaaaacaatctctaagttcatgaacatttgctctgtttcaacatttttcgatttaaatatgtatgtatgtaaatagtctctatcaaggccagtagattgcttgagagtaggagttcccagacttgcctgggcaacatagcgagaccccatctttaaaaaaaaaaaaaaagccaggcrcggtggctcacgcctgtaatcccagcactttgggaggctgaggtgggtggatcacgaggtcaggaaatcgagatcattctggctaacatggtgaaacctcgtctctactaaaaatacaaaaaattagccgggcgtggtggcgggcgcctgtagtsccagctactcgggaggctgaggcaggagaatggtgtgagcytgggaggcggagcttgcagtaagccaagattgcgccactgcactccagcctgggcaacagagygagactgtctcaaaaaaagaaaaaaaaaaaaaaaaaaaaaaaaggccaggtgtggtggctgaggtgggagggttgcttgaggccaggagtttgaggttccagtgagctatgattgtgcactgcactctagcctgggcgatagagcaagatcctagctcttaaaaaataataggccgagctgggcatggtggctctygcctgtaatcccagcactttgggaggctgaggcaggtggatctcctgaggttgggagttygagaccagtctgaccaacatggagaaaccctgtctctactaaaaatacaaaattagccgggcatggaggtgcatgcctgtaatcccagctactcgggaggctggggcagtagaattgcttgaatctgggaggcggaggttgcggagagccgagatgttgccgttgcactccagcctgcacaacaagagtgaaagagctaggcaggccaaaagtgtatccattatccatctcagaaagaaaaaaaaaacaataggtcgggcccagtggctcatacctgtaatcccagcactttgggaggccgagagaggcggatcacaaggtcaggagttcgagaccagcctgaccaacatgttgaaaccccgtctctactaaaaataaaaaaattacccaggcatggtggtgtgcacctgtaatctcagctactgaggaggctgaggtagaagaatcgcttgaacctgggaggcggagattgcagtgagccaagattgcaccactgcactccagcctgggtgacagagcaagactctgtctcaaaaaaaaaaaaaagaaataatcataataataaacaataataataataataatagtctctgtttctataaaaatttttgaaactttaagtatactgggattttattttttaagtttatttgttaggtttgtaaattgcatatgaaggagtatcatttttagtgttgctttttcctgtgataattctaaaggcagtgttgagtttctcaataattttgtaaggtactgaactctgccttgcaatatggttttcttttttctttctttcctttttttttttttggaaacagagtggagtgcagtggcgcgatcttgggtcactgcaacctctacctcccaggttcaagtgattctcctgtcctcagcttgcccgagtagctgggattacaggcatgcgccaccatgcccggactaagttttgnnnnnnnnnnnnnnnnnnnnatgcccgcctaagttttttatttttagtagagatgggattttgccatgttgcccatactggtcttaaactcctgtcctcaagtgatccacccgccttggcctcccaaagtgctgggattacaggtgtgagccaccgcacctggcctgcaacatgattttcttggatgttggtgaatctcaatcttcttttctgacagtaatttaaaccattattatgacacctttactgaggctgcaagcttcttggtccacagactttagaaggaagtaaataaagaaattaacattatcttggctgggcatggtggctcacccctgtaatcccagcactttgggaggcaaggcgggcagatcaattgaggccaggagttcaagaccagcctggcctggtcagggtttggtgaaaccccctctctaccaaaaaatacaaaaattagccgggggtgatggcacacgcctgtaatcccagctactcggtaggctgaggcaggagaattgcttgaacccaggaggtggagcttgcagtaacccgagatcacggcactgcactccagcctagaagacagagtgagatcctgtctcaaaacaaaaacaaaaaacaaagaaattaacattacctttataattcttgcaactttcatgttcatgttaatttcccrttgtgtgcgcccccagcctgtttttttttkgttttttttttaattcatttaagtaaagccatcactggttctttccttctagattttctcataaaacattgaatataggtttggtataaagaagccactgttactgtttggacttgagagaagattaataaagtcacttttctttttttaaaccaaaacaaggtaggtaaaatgtttgaccttttgtaggcacaagattcatgctgacctcagctgcttttattatctgcaaatatcttgagtctaaggattcatcatttccctaacattttgtaaactacctcatctaccataccctactcaaatccttttattttaaaatttttgtagtgcatcaagggattatggcttttggatatttccttgatgtgtttctatgaaactgagcccctgattaggctgtcagcagatactgtattacattgattgttttagttggtacagacacacgtgtcagctagagcagtttctcccttttgctgagaagggtgaagcttttagataatatttagttatggaggatgtttgtgccactgtttaaagtgatttgaccctgtgtcctcctccaaccttaagttagaaggcctattttcctctattggtctaagggcatgtaatgaagtcttcagcacacaagctttctccctccctgtaggtgagtggttattattttttcttttgtcacgggcttggatatcatgttcttatgtgtaaacactggaccatatagtactcamaatactttggcaaaaaccaaacyaactgaaaactgaaggcatgcctttatgtcttatttccaacttggaccatgatcttgccccttgaaatcttcaggctgttttgatgaagccttctgtatgttgaaatgcccagtcaaggtggccagaaccatctggagaaggtagagttgtaaatatgaagtgacatgtataattctaatggactcttwtaatgagagaggggccagtgattgaggctggcaatcagagatgacacaagctttttccttcctatttgaatctgtaaagacccttaagagcactttgaatttgttcatctrtaagctgttaacccaaattcatgtcccaggtttttaagagaataagcaatagaatataggcgtttccaaagaggaagacgtacagaagcagataggtgtatagttcattcattcacagataggcactaggttagatccagtagttggcgtgcatgyatcaacatgttaatcggaattaaaggctgctacatttaggcttggctagatcatctataaattgaaacccaaaagagaattgttaactaggaaagtagctgtccaggttccttaaagtttaaatacagggatccaactagtattctccaaaatttttcaggaatatcagactttactgctgtggaacacttggctgttgtaagaggagtgtttcatctctcataaggatgtaaygaaaggaaattaggagccagtgggagagtgcagggacttaggtgtaaatsataggtgaatctttttttttttttcagatggagtttccctctttttgcccaggctggagtgcagtggcgtgatctcggctcactgcaacttccacctcccaagttcawgcgattcttttgcctcagcctcctgagtagctgggattaccagtgcctgccaccatgcctggctaatgataggtgaatcttaattgtgaagatgagtacctttatsagtagagatggcttcatatcagaactttatcttrcaagctactctttactcttcctctttctccccgctccatgccaacagagttaatgtaagcatagtagagtaatatttcatctttgtgtgtgtagttttcttttttttttgggcgggaggaggtgaactttttactgtctttccatctatttacatatgtgagtccagggaaaacaggcagcttaaattatgatataattttttacaaagggaaaacctgaattgaaattattgttttacttcttttctrttcatttctttacagtgagtcaaaaattttttccccttaacttcacatagaaaatgaaactttacacaataaagtaaggatggcaggtttcacaagggaaaaaggttgctgtcaacttctttcctcaggaatatggaaatttgggtggattatcttttcagaagaggtttcctttattacttcttttttcacttaagacatctgttaacatttcacacagcccaacagatgttggagagcaagtcccatactttgttctcaagaaaaatgacatttccttagttggttcccccacttctgtgactgagtccagcctgctgcataatttgcatatattaagttatataccttaatgccatatgaatttgtatcttcagcattatttttacatggtaaagtctggtttgattagaaactagtttacatgttgctgtagaattaagagagggcaaaacattttaaaactctacttcgagaatggcaacctgagtccacatataagattggatagccagtttttaacatttttttctataaaataaatgaattacaaaagcttgagttgtttcgccataaggaagtgctgattgtcatgcgatgtggagcgtcatttttattattttggcaagaacagggacagttttgtcttgacaagccattagatgaataccagcgtgtgtcacatgaaaaaccactgatctttaacccagctctgtacttaaccaagccttgaaaatgaatagtgaataaaagaagagcaaaggcagagcacattacagattatagaatctgttaacagttgctgaactcaacccagggaattacaggtattgttctgtgaaccagcagaagttctagagatgcttgttaaattgtatacaaaaactacacatttattttatatttgtgcaggatttacattgttggagacagaaaaaataaaaatcctagagtactttctcagtgcagtaaatgtatgctttcatcataaaatcatatatatttacatagaactcaatgaggtttttttgcctgcagttacataacttattttatgaaagcaatgtgcttttaaagaaattaagtagaaagaagaaaacataggttatatccccttcccctcaaagaaaacaccctacaaacatacatgcaaaacaaaattctttgctcacttgcgttttcatgtattcattgtggctgattttttacaccaacataggttttttcttttttgtttctttttcttctttttttttttttttgcaggaaatggagggaaaaacccaaaacccaccataatactcaagtactgaaaagatcagtaacattttaaacggttgtgggaattattgcttacagagctaacaagaaagaacacacttttttactctgctggtggaattgcattgtgcctccctatagtcttgttatcccacactaactgaaatgcaaattttttgtaactaattggatctcattgagggtacatgcacagtgtgtagttatatgcaaaaaggttttaaaaagtaaaattttcctgcaattacaacttttaattactatccaaaacatggtacctatagcacaggtttagaatatatatgtctgacttttttacagattactcaaaaacatgagctatgaaatgcttaataaggtgtcagctcgaaagttacagggaaaatgtttaattacagcartctataaattgaattttactatagttatgtgaaaataaagatttctttttaagttcaggatttagtgtattagagccagtatatgaaaggcatgttatagtgcattccttttcttggaagattttaaacgttaaaacatcatcaacatcagaagtcactttcagagccattgcctttttttccccttcagttctccaatctattttaccattgtaaaatgcttttgagtttcttactttgtgtmagtatatttctacttatgtggtgtggtgtgggggaagtattcacattcacacaatgtctttaacttggatgcagtgaaacctagtttggtggacttcataatttccatggtccatctctcactatcagtaaatgtgggaaagccaacagatggcctttaagtacttctgattctttaacctgaaatactcagaatcagcagcaaaaagcaattattgtggaagtgatacttgtcttcttccttctagttttaaataattttcatataaatgattccagagagttattccataattgtcagactatgtagccagtgaaaaaaactcagaagacatatttgtgccttgtaggtgtatttttttgtacctgtgtctgtaaaacgatacagatgtcccacttgctagatagaaattatcctaatgtcaaatgttctacayagtatgttatatgtggaagttcagatcatgtatcttggggatttatagagggattaaatgttcytttcaaatatttattttaaaatgagtgttagagaaacttaaaatcttatttattattgagtctggattaattgttgtctctttttgtaacagagcttgtcctcttygtaaatttgtgttacaaagtagttaagattttgtttgagcaaatccatttagcaggtgcagtactgtatatttatgaaaaaatattttttaaaacttagaaagatatcctgctgyttttaaggctcgtgttgtggcagtaacatgttatattgcagacktgtttcagccagggccacctcagtccatgatatctgaaggagctcagtttgcctayactgggtagcattttgtcagaagactgctggctgggcagactagatttggatgtattagctagtcagcctaataaccctgtacagactgtattgattttctaggagagagtttatgaactaaataaacttggggttggtgtcttaataaactgcttctctcagtctgtcacatttagttacggagctgtgcagtttagggggaaaaaaggctaattctgttacagattgttcacagcagggtctccaaattagccctttgttttgtaatgccaccttgcttgggcttgctttgagcacatttctcagttttgccctaatgagttgcaacactgataatgtggctgatgatctttcattgatttcactatcacttgcttgtctggtaattgatccgttgctgagcctctagttaattatatcggctttgacatggcccggtccacggggaatttcaagtcttgcagaataacagttttaataaaagagtctattactgcaggtgcttgctgctgcatgccagttgatttttgtgttgttagtgtgtgtgtggggtggtgggtaggatacctgggaaagaagaggactgcaggactgagaaaaaacggggtgggggctagaaaaagaggaagagggagtgaaggagggggagaaagagacaaggagagggcgagtgagaggcgagagagaacacakgcaaaaacacacaggcaaagcgatacaacagagcctgagtggaaggaggaggaagcttgctattgacagtgtccttaagcctcccacaaataacagccattagtgggaaggtcaggagctgagcaggcagcttgactgaggcactgagtgccacttcagaaatcaagaggctagcaaattttagagggagtttaagtgggtaatagctagcactaaaggtacagtcactgttgacaattgactcgtaggggattttcctgccctcccccccagcaagaatatttttattgaccacaggtggacttaatatattttaaggcaacaattctttgggttcttgtttgtttcctctcagatattgaatttgcttcttttgagacttttttgtgcttaatggtggggaactggagggaagtttaacagaaaagctttcaggagatgtcggttctagaggggaaggcacatttgtgtcaacatagtgtacgttttctcatcttttctcattgtccactaatgacacagagctgccattgaagctcttttctgtttcttttgttgtttcagagagtaaggtttattgttattcttgagttaagaaggaacaaggagagtggtacatttgtcctcgatatttgtaggtggttgaagattaatgttccttacatgttaagtttaggaaggatggctttttcctgctgactacttttatgagatggcatgaatttagctttccattttgaacttactgtttatgtacagtgcattttgttcagtgctgcttttccataaataaggcagacaaatactatctaataaataggtgaatagttttaagacttgtttaattaaaaatacgacatgttatcaagggtgtatttcatcaggcaggaaaacgttatagaattttccacagagatcttgaataaaaaatggagtttttatattcattactttttgcctgaaatgggacaggctttttttgtttatctttttcttttcttaacgatttgaaaggatattgcagatgcttcatctaggaactttaacaaaggatttttttctacttctgagctttaagaaaaggtatacttttttcctttgccattcagtttctcattagctaacatccagtttagtaattaatagcctgaggtactagatattaaatagtatatatttatatttggcaaatgtttattgtgcatcttctatgttataaaaactgctaggcttatttkcttactctttagagtataaggtcacatctctatgtacgttatttaggagtttctatgtggttataaatagcccagcacatacgagatgactttcaggagctaacatttagaccataactgagccaactttacattctcttacagctgaatattttactttcttcagtgtaattaaaaaaaaatttaagkatcacagttttacaaatgttaaagccaaagactggtgtcagatattatgtgttatatcagaaagcattgttgagaaaaattcccggggaagggccctagcttccccttgccctgtgcaccgtgattgtggtgctgcctggagtgtgcataagtgtgtatctatctgtatatctggagaggggttagtgcagggtgtcatttggtgcctgacagtggaacagtgcagttgactcttagctctgctatccaatgacatgcagtggctgagagtttgaagctgatggttgggtctccagtgccgcctgcacacctgacaggcagctgttaaactgagcaaaggcaagcttggggagtcacaatctatgcataaatgatagggatatctgtgcagaaggtgcgaaagaagctctgaccccctccctcccccaaatctcccccttcccaaatgaaatgcacagttcagccagcttcttaactacactacactcctgctactggctgccaagaggctcaaaaaatccaccttcacttttcagtcagaagaggcagaagtggatgtgagagaaagagagacacagagagacagagagccaaagagggcaagagacttgactttaagagactcctgtactgacaactccatgcagttcggaaccagaacgactacggctgaaccagggttcatggggacatggcaaaacgctgatactaacctcttattcagaatgtcccaacaggtaagttactttctttcttgattttttttttcttttttttaagaaaccttgaattgttatgggcacttttgtttctggtgtttttctttctaaataytttttaaaatgtggtcacttcctagttaggctcttgttttgtcataactgtgttactggaatgtgcagggttacttcayggtttccctaagggcgtcttaaaagaaaaaggggaaaggataccgaagtaaaagaaagcagagacattgttgaaaagtttcacagtacaatctgggtcaggggaagacttaatttatttctttgttttctgttgagaatgaaaaaagccacctcccaacaaatgtatctatcwatatgaatcacttcgtccaaagtgtttgctctctcggagtaggttccgcaacctaaaaaacagtcatcaaatctcggggcccctcagaacagccctactgacttcatgtggctggaggcagcttcgttcagacctgagaagagagacgaggctgtgcaggcttggctgccagcgccgagggttgctggaggagtcggcgtgcgtggcgggctgtgctgctcggtcctcgctcctccgctccgctcctccttgccagccagccctctgcgcccgcccctgcattcccttcgccggctccggcccgctctcccgcccgcccgccggcccgccggcgcactcactcgggcgcagcctcggcgtcttccccagagccgctcctccgtcccggccgcgctggaggcgttcggcttgctggctctgctgggaaagccgacgtggtagcgcgaggccatcggttactgataattaatcaccggagccggcggctcgtaccatgcgctccgtgatacgcgccctgtgcgccggtctcctcttgcacaattgctggctccttggctccgcgggggagcgagggtgagaggaagcgaaggggacacmacccagaaactttcatcttggattgtgctcaagtgagggagggaagttccctggtgcctccctcctagacacgtcttgcttttccaaagcctacaccaaacccacacaaagcaagttagtttgatattatcatccacacacaaagcaagttagtttgatattatcatccacacagcacgaaagtactattgacaaatatacttggattttaagttgacggcggttattaagaaatgttgtgccactcaagaggaaaaaaatactgcaactgctttttttttttttttttttaaaaagcttttgtttgtaagagttcacgaaaattaaatactttgagttagatatttaaagttgttgataataaaaaaaaaacaatttgccaggctataaactactacaagtttagaaatacatttgcaagcgataatacctacaaccagggttttgtagcatttagctagagaacagttttagcacacaattctaaataggataaatgcatttgaataaggtatattttgacatatcctgtagagggaccctgattactgctgatacagtaagctgggatttaaatgcaatcaacatcaacccaataagtaactcttcatgtgcaatttccyattctttcaagtgaaaagttcatttccacacagagatgctccttgtcactgcagagcgctgtgagaggtgttttccgcgacgcatccctgcctgggtggctctcgcrtgttggaatgcagtgttttcgctaaccttagtaccaaataacttgtgcttcacttttaaaactagatgtcaccttcagggttttccttgagttagtggaggtcgtgtgtgtgtgtgtgygtgtgtgtgtgtgtgttagaagggaagattggcttacgtctccctctagctagaaaagagttaataaaaccagatagagataatgatcaattgataaatggctattgaaccacatagatggtgttagattgcttatttggcactagcccatttccaagtagatttgaatctaaggagattttgtcatggaaaacattttaactaaaaaacaaataaagtaatataaatgatgggtcagaattaggacaatttatgatgtctttgatccagctgtctgactgtgtggatattttgtgtgtacctgtgtgtgcatatatgtgtaatggtgagcatcagtgattatatggagagaatagaaatatagggaactaatttatgcttaatggatgctattaaaactgtataatattatgctatttatgaaatagagtagtacaacaaaaggagagaaatcacagttttaaatatgttttcttttttttttggttttgatgtagttagcaatcactcctatccccccaacccacctttttctgtcatggtcactgaatgtttacctcttgtgcatttttggaaagcatgtaaaagaggatatgagcttgcattttttttctcttcaagatgacattttagtttgtataaatattacataacttaagttcaaactatgtgagtgaaagtatgtgtgctgttcatatttaatatgtttgtttttcttacctgtagttcatcagcaatgctgattcagcacgtgtgtgtgtgtgtgtgtgtgtgtgtgwgtgagagagagagacttattgaaattatatctctgatatctcttgaagccagccatttaaacgagtattactttcaatatatacagttacgctagtttttgttacaggtaaaagtttgtccagtttaatcaaatatgtagaattctgtacatctcattgctgaggcataaagaggtttctctagrttatgattattttatttctaagtaaaatttacttagcttatgaaatgaataaaatttattgggttattttttttaaagttttctttaatagtataaaaactaatattttcctgattatttatttagacgtttgaaaactctgactagtagggctgctataaaaggtttcaaaactgagttacagataatttaccatcagtatttaactatagagaaaattgtgggaaatgtccatgaatactgaaatttaataatctagttttatgtgttctattagtaaactaggaagtagggatacaaaaatctttgtcttttgtttcatatgagcaaagttggatctgcttaaatgtacatctttcattctgtctaatagtaacaaataatcacaatctgaagccaatttagatttagtgggatgaagtatgtgcccctaaagttcaagtgaagtctatttgactacattttcctgtgcctgtacattttttcttctatactcaagtatgattttctcaaattatttctatgtatatagctgagtatttgagaacattaaagggtatgacacttgtgtaaagggarttcttctttggatcagtttgatcagtgacaggtggagaaagaaccttattttgcctattttagtttcacaaggtactgttaaaagcaaaaaatgaggcttgcttttcaaagttttttttttaatcacacttgaggaggcaattcttctatttgtataaatattttgtgcatttgagagmatagtaaataaaattcttgtagctatctcaagggatgtaatagtccagtctatttaaaaatctttttagaaaggaaaccataaaggtatatagctatagcccacatttaatgtgttactagagacatttaccttttattattggtgaggtatatttaacctgtttcaaataaaatgtagatcccttaataaggtcttttttcatacttgagtgaaatactaagttaggattataaatgactctctgcatcattatgtagtaatttaggattcacccgatgatgtaacaaaattaacaacataatttcattgtgaaactgtgtcttattaaagaacaactgtctgacattctcttacagttgctttatttaacttcatgcaaatattattagtagtgacatttttctattgtgcattagattctctcattagcatgatgtgttagttatcaccagagaaatcattttttagataggtgaggggcaaaccaagaaagctaaaaattaaatcaacgatttacattaataccagagcgtctgctcaccagagatatgacagagtaaaagcaaactttcttactaatataaaaatctagcacctttcagagaaatgataaataaaatataagaaatgtataataacattgctagaatccatttaaaacagtgctcaatatgaattttcctcaagaaatcttttttttctattcatataggccaacaatctcagtttctggaatctatatttttaaatgaaaatgtttttgtcccccccccaatttttttgagtatttattcactagtcatttaaaaggcatatatatatatagtattacaagtcagacgcctagttgtacattgtggtttgggtcttctttatagttcatacaacgcatttttattctaaactctgtcccactcaaatagacatccctttttacataggatgtatattcttatttaatcaaagccctgagtaaagcagctgatagttaatggtctttgaaaacgactttcattgccaggcatcatccatccctagcttgctttstgcagttttctccattttttactcccttccttacagttagtatgtttggatgatcttgtcttactaaaaaaggattaaattgactaaacttgtggtcttaatgctaaaataaatatttatattaagaggcatgcagttttagcctgttgaattactaggctacgacctccaatttaggcccctcttaatttgagtggtaatatgttttatttttaacaatagacatatattcaaatataattctcagtatattgtctgataatgtaacactaaagtaggaatatttgggtatttgtatttgttaagatacaaattgtagcatagagacaggtgcttggtttgtcctaaactttgaaggtctatggataacatgcagacttcacataagagataccgtctcatttgtaatgcagtgggaaagtaacagtttatatatatggtattctatgtacatgtaaacgttaacgcaagtaaagcatgcacaaacatattctcaggtgtgtattttgtatatgttaaaaatctgtgcacaaatttggagtttattttcaacatgattcatttaaatgaatttgaacacagtaggtgatcgttttgaaattatttaattttctcacctttctgtcatctgcaaacaggtctattatgtttgtgtaatttgtaaagccttttgctaaggtgagccaagtaactgcagttgaaaaataaatccctctaaggtgcagatatcttatctataattgtaggtattttttataattatatttatgagtgtatattcacattcactgataaatccaattattcatgcatagctttatggaaatctgattaatgcagtgacaggacagatttgggctgccacagcagcacatcctcccactcccatgtcagggttaagagccacggcaaatcctccctgactaattagatgctgagtaaggcatctctgagaagttggggcagaagtgaatgggtcacaaccaaggcaggattgcaaggactccagtgatagtgaaagcattcaagtttgccaggtcgttgtgacacagggagctgattccaaaggaacagtccgttacagatagtgagctggcgtcatccacttgaatgaaaaacacaaattctggtgcctccctctctctaccttgtatgcattacacacactcacttaaaaaaagttgcattgggcatctgccgtcatctgtctgcaaagcttttgagaggattttccttgtaaacgtgaatagctaatgattctgtatagcccaagaggtattttctgaacttggcactctagattagcacatatatcaaaaggaaagaggaaaagaaattggaatttgtttttagcttgtgtctataatttgaaccttagtgtttgaatcgatctaggaattaactcctttttccccccagagtgctgtcagagaactttgtggttgtagagaaaacagagtgaatcgggtaggttgactttttcagtgagagaaattttctgtgggattccctgcttgttattgtccaaagaacatggaatataatgttccaagatttcctttcacgggaggtttggagcctggtttgttatgcgtgtagaaataattcgccatttgaaaatcctcttgtacctttggtggtacgcttttgtggtctgtttatggtgctgctcagtgaccacccttctccagaccttggtcagaagattgtttgggggtcctaggaagtgatggatctcactactgtctgccaaagctgatgccattttttatttccagaaaagcagctggcttctrcattttgctgggcgatcttcatctactgtaaggaccctggagacaggagaaagggagtcaaagaccctttcaagaaactgacatctatttttaagctttagagaaacaaaggaaaagagacataattcaggaacaacagcctttatatcctcacatagaaacaaaacattgggtaatagagggaatgttttyctataagaaaaactggtaaagatgcaggaaaaataagatgaaaaaaatctgctaagcagctcaaggtctaagaagttttaaaatgtgcagatggcatcccagaaatgatgtctggggycatgacatccagggtccccacatttcctcctcattgagcctgacctgtactgycatctttctccccaggtttaaagaaagtttaacgaataggaaaaataaaagtattgattattttttaatttgtgcgttccctgtaggaagcctcgcagatttcacagtgtacattcaaaccctcaggtgaaaaatttatgactggagttcatttgggtggagacagtgtgcagtgtcattctgttcaaatgctgtatgtagcatttcatgccacgaagtgcagagatcaggagaagagaggaatcgctgtatgttttcttcattcatagagctttctttaatggaaatgcttgtggaaaaacaacacattactcaaattggctagtttaggaaccaaattctcaacttattaatcatcattccgattaaaaaaaagaattgatcctttaacaacaaaataatatccttttgtttttctttaattaagcccatcagtttttcatttctctctgtaaagaaaatgaaaataatcttgaacagtaggaagttactcattgaaacaactgattctcttgagcatatctgacgtcttatttactcaatgcttttgaactgtaatgttatttcgctactgtctttagggtttatgtgtcattgagtggtgttgatttataaatctcattcatatttggttggcagaaatttacttaatgacctaaatacaaggttattctgttcctatttcctttctcatagaggtaatttctttctcactttattctcttttcttctcatctctctcattctgaattcctccttactttcactggccctttttgccttaatagaagagaattgaaatgcacctgaaacgtagcagtaattgaataaatacccttttgccaatacatcattctggcagaggcatsagagagaggtgccaccctcaggtgtggtcctctgtgagtgctgacaggactgtctcgagtgttgctgtagaagggytctttgagtaagggcatgataaaaacgtgtaaccaggggccctggcttatcattcagaggtgctgaaaggcagctcaatttgatccttagcctgtataagaaagtacttagttgaagagagattttgctttccttttttcttcttttaaaaacctaattcttggacttattattttgtgcagttagacttctacacgagcttatttccctacaagaaggaaaagataccaagggcagtgcagtaggttgaagggatgattctttcagacaaactgcagctagtaagagttaacagaaacatttaaaaaaggacttgaaatgatggtaggaccagtattaatggatggtattatgaaattaaaatttaaagcatgcagtatacataacacatgaggaggattcactcttgttttgtatttaataaattttaacccattgtctcacaaggcatacagattgttaaaattgacaagactgaaacatattctgtatgggaaagacatagctttcaatattgttacctgctgtgcttttttgagactgtcatgaatttttcaactttattaaggtgtcttttagtggctattggttctctagacagttcttcagaactcacattttatgatcggagtacctgaactgggtgtctgaaaaggaagataacaggttagtgaacgttttacatgacaacaagtaattgctttcagctggcttaaaataataacaaaactaatattaaaatgagaatctccattagaggattttaataatttttttccctttccattaacatttaaatcaagaagaatttcattgatttaaatcattagggtggctatttgggacacctgatcaggcatagattaagaaagctgcccactactgcgccctctgccagtgctggaggtcagtggacatggctgggatgtcaccggcaagatatggggagtaattatacactgagcatattcatgagagtgtccctgagtgagaatgcctgcaaacattctcattgttgacctcatgccagaacctaacttggagtcagcgagttagctgctgtttaatattgcttttcttttattctttcttttttaggtataaatattagagtaccagaaagaaccaaaaccaaagtctggctgtaaactttgtggaaggacttactgtcttgaaagtactaaaaatcccatattgccacattatggtagtgcatttatatgtaatgcgtagacatgcagaaagtgtatgcctgctccattggttggctggtgacaattaggtgacttaattctatgtatgttgaggatttgctaatgacttcctcagaggcagtgagcctgtgggtggctttccccaaagaggcattctccatcctaagaatcttgttgtaattattccttatactatgctatctatatagcctttttcctttcttgactatagctttttggtgaaactcagtgtcattcattggaaaatagcatgatggtttcttattttgtgaactgccattttcagcaagtgggagactacagcttacttcagataaattagaattgcgctaggatagagacaccaggatgagtctctctgactcaaatttcagatgtctcattatttccctttctagcaacttttgtttgttctcttggacaactttggaaagtaatcatgggactgaatggagcttaaaatatgttaccagtcctatcatgactaaatactcttcattgtggagaggagttttttcatttttactttatttttgtcatctattataatgtaagtaggaagggataagaagaattcaaactccaacatctgggagagcttgtttcagtagccagccgggaagccggaaagctggcctcatacaggtgagatgtgttatgggaataagggccttgtgcacttaatgaaccctgcctgcctgtcagcctggtttttcatgtaccattgttgttcaaataagaaaaagagagtgttcacagcctgtggtgagattagagtaatgaaaatgaagtgttaatctgttgataggaagcacatcccatatcctgcatcccgggccacattcatgcgtgtataatatattccaggttttctcatgaccagaaaagcttgggtgttcattatattgaaaacatccttttagtaaaagtgagaagttggttgttttaacttgtgtaaacagttattttaaataatttcttaataaaccaactgctgcttaccttctgagtattctgataatcactgttcctgtatgtgccagcagtcctgtacttttgatcttttaaattttttttacaactgcagaatgccgaaaatgagcttcaatataagcctactttgagatactcttttctcaaagtaggcttaatagagtgattaatagaaggagttaagtgacagtaatacttttctctccataaaacacagattaactaaaacatccattatctcacactttatttttcatcttaaaacaattaagtagaaacaaaaatttgtgaattgtgagtcttccagaactgctttacatatttgcagtcagctgccatgatgtgaacctgaggagaccagcttaaagctttggtcatcacatcatggtagggaattgtgtatttcataaaattctctttctaagatggtataaaaggcaaattaacatgaatgtaatgaagtatatactttccttagaatgtttgttttaatttttgttttttaaatgattttactcagtaattagttgagaaatttccattttttttccctaaagctatatacttaaaaaagaaagaaagtaagtttagtcttggattacaacaaggcattttaaagamagtaatgtgaacactggttcagtgccctttatatgcaggtcatcctataagatcatatctttcagatgcatcgtaagaaatggtttgaagaaaagtgtgaaaggggtgcggagagataaattaacaactgagttccaggtgtctatttctaattgctcacatttcaatcataatggaaattaaggaaaaatgtttcccataagaaatacactgtcattcaggcctacctaagactgcctttatggagttcatgtttacggtattttctttttttctattcacctaggagttaaggaatgctacagtatgatcattatgattttgtgaactgtttacttaaagttgtgcaagttgctaagaatcaagagaatttggggattaaagtccgattgtgaagtaaatttggcatatgttcagggattacattctttaggtaaaaatggaagaaaaatgcttcctttcggaaggaaacaccttaaaaactaatctttcaagcatgtggtgcaatgatgaaacataatgtaaaaacactatagtatagttgatccaaattagttggcatatgactggtcatagcctacgtactacagtttgcatgatacgtaagcatttctgtactgtagtaatacgtcagagatagcctgtttttaatatagttggatgaaatgagaaggccgttgcttccctctgctaaatagggtatttttaattggtttttaaaatccattaataggtagaaatgctgtgtcgttgtgattgattgggaataatgaaatgtaaaagatattctccttgcaattgctttcatgtaaaaaaaaagtagatataaagaagtgcatggtgactgtgtcatagacatctgcttttaggtaataatcatttgtaaagaaatatgccatgactttttgggtcatttgaacccataataatgtctatttaatgtaagtataaatgtcagatggtggcatacatgtggagtcagtaaagatgaatatttgctgtgataatagtcatgcatcttaaatgttgacttttaaaatwtaccttgaagacatatcctattttcatattacagtacattttcacttaagtacatgatagctctagaaaggaagtgtggaagtgttaacatgtgaaggaacaaaatctgagtaatgctttgacatgagcatctattttgggcttcagagaaataggtggctgattgaaaaccaatgtaaagattgttgaaccactctgtaaggctgggtcatcagttctggatttactattttaaaaaacatttaattatgaaaatgagtttcctttggtttgcacgaatgtttcattgaaatgaaacttgcttcccattgtcttatattctgtaaacttgtgaaatatgtatttttaaatctctgttctgagaacaccctcttctttttttcccagaaactctagagtagtatgrcattttaaggagtagtagttgtctaaaagggccatgtggaggtaacaaaaattaaaacaagtagagtgagtctagtggggactgtggtggaccagaaagctcatgtctcaaccacagtgaggtagctgctccttggttccagccgattgttaccaggtgggaatgcacacccagtttgccagatccactgctgctgctttataatgatgagccaaaaatccagatttttatgtgaaatctcctgattttgaaatcttggcaacctattcaaatattttaaaaactgtgtggtctaaacaaaactcatctgcaggctacattcagccctctggctgccagatagaaacctctgttttagataatattttaatggatgaagataatagtttcattgcatgtgatcattcatcttgggaattccccactgggatcaaccaaattcttcattttttcccctgtgattagaaaaaaagtttagtaaatatatttctggtgctgatagttttgatgtatagcttttctccttatgacccacatttaaagaaaaatcacctgtgtgggcaaaacaaaaaaatagtcaaataatttaaataaaggtagaagcataaggattttaaaataataaaagatttctgaattctgaaaataatcccatgatttgtgtaagtaattgatgtagatgaaaagccgaattcarctataaaaagcttttcgtctcaccttaaagcggtagattcttggccctgaatctttgtgggattgctataatttaccaagcaattgattatgatgtcacaaggaggagatggaccacaagggggaaaacttccccctactaattcatgcaaggccaatattttatacctgcttcaagaaaacattatttatattgtataagatgaggtttaaaatgcctgtctatattttttgaagggtctctttaaaagaaattatctattcataattgaaattctccaggcaaatcagttatcagcattttcaacagaacaggtaattaattggtttgaatttcaaattgaaggtcatcctgttattgattttcgtgggaaaaggaaacaagaacatcctgttaaaatgatctgcaaatggggcctaggtatatctaggctctttctagggtcttgtttaacagcatcactgaacagtgtcagaaaccaatcagaagggagccatttstgttttaaacataacaagttgttggtttgcttccaaaacttcagagaagaactcaactggagaaaagaccagagattaacagtttgtgttagagtaagtcagatatttcaaatcaagtgctggtgcagcttgtaaggaaacatctataaatgtgtcagaatgatgctggtatgccatgttcaagaagttcagcatcaacacagctgtgacttaacgctttcagaaacctttcaactgggaattagataaagtatctttaatataaggggagggaagcactgaagtaaaagaggtagcgaataatggaggataaaagaatatacccctttagatgctgttaatttttataaaataacatttgtgctttgtgtttgctagatagttttattgttacatatgctaggctatttcaaagcattcatttctctcctctgccgtgtttaaactttttgagaatggtgtaatgtaaaggtaacacagacgaagtgggtggcagacattttgcctttctacagtaaaccgaaattagtatcattttggtggttgaggggagacaaggtgtggttctgtggcccaggctggagcacagtggtgagatctgggctcatggccagcatccacctctcccgcccaggcgcaagcagtcctcttacctcagtctctggagtacctggaatatagatacacgccaccatgcctaggtgatttttgtattttttgtagagatagggttttgccatattgcccaggctgggcttgaactcctgagctcaagcgatctgcccacctcagcctcccaaagtgctgggattagaagcatgagggcaccacgcccagccaaaattgagtaagtattttaattttagctgcactaactaggttggaaacttaatgcagcttcttatggttcaaagtaaaattcttaataaaaaaaaagggcgggggaaagccttccattctaartaccctggagctgttagtgcagttatttctaagttgacatacttttgtataggcatgacagtggcaccaaccatctacattaagccttaacattccacagagccatttcaagtttattatgagcttcaaagcctgcacatccctaagagaatatcaagtttaagcatgtcactttgccatagtcacagttaactttcttaaaaaaaaaaaaaaaaaaaagtgccttttcctaggctggttttctacaggttatccttgaaaaatttcccagttcagtacagtcatttttcttacccgttgtttctgcccccttgagttctgtagatttatcctgttggtgatggttggaaactacctccaaataaaagtagtattggtcacaatttgttgaaaggtctatgactatgtaagtatccctttgcagctttattcctagggctcaagacattgatcccattttacccatttccatttgggtttccattgcagtccttaaaaaaaagtgtagctggggagaaaaggaacatgtaaaactgtaaaattgctaatgctgtcctagtacatgacaatttcccaccatggaakgctccatggggaggacgatgggcctgctcagcctgatcttacggtacactgcttctcttcttagggaaaggaattccccatttcctgaatgtgaaacgcctacccttttggagcctcctagtctttagttcctacctcagttaataaaccatccctgtctatgccttgcatctcagagatggaatttgacggactagtcagcattgcaaaggtcaccctaaagctattggcagaatacactgccctttgttgctcagtgatgataatgctactgtagcagttaactggatgtattagactgagctacttttccagaataccaaattatctatttatttcttttaaacacctgataaaatgcccatttacaagctgtctcaagtgtattttcaaaagggatcttaatgatagtgaaatatcagtgctttggcctcagaagagataatctgtgcagtgtgtgtgtccgttgtgttgttttgcttccacgaaaatacttctaaaattatactcatcttttagtgtttcagttgtctgaaactaatcatgttccaacaagtttgaaaattcaaggtgttaaaaaacagttttatttacattttgtcttctgttagtgcaataatactctaagatgttatgaattgctttattttggaaaaaatcttataaagcttcatttccattcccattatttcccacaaatataaaaatgtggaaatagcatttttggctttaggttataactttacacatagtgtaaaagtggatgtcaccatctttttatatctttaaatctactcacaatttacttactgaaattatattcagtatttattactgcttaaattatattcagaattatagaagaacaattaatgatcatgctacttgaagcgggggagctatacttgacatagttttgtgttttgcatgtgtaaactgattttgtgacaccacagtgcagtcttgatataattttttgtacacaggtaacatttttgtcttggttctcacctaaataaaactgagtaatgatccaaagtgctaaggtatttgtgactttcactaattattttcacttatccatgtattttgtactaattactttcctaaatgatttgccacatgctcttctatcctgtagttctgttttgtcctaatcagattgggtgagcgattagggatttaaaattactacttctttggtctcaaaacgagtaagtgaagactcagagaaatacctttaatttgccttttagtatttttgaataaagcagactctgtcctgccttcctttcatgcaygtattcattgtttcttactgagtgagacaagcacatttaaagtagaatatattccttctctccagaataatagaatgaaatcagtgatcaagtaatttttcatttcagtaattcaacaatcaatggaaacaaaacaaaatgagttaggaaagaatagtttgcattaagctcagacatggaataatatttgaaaacaaagtatcactatagttttgtgctgtaggttcttcctgacctaagtgattgttgaaaggactttctctagtttagaggtatrtttatcttcgaacaataatcacttcatgctgttctttttttcctagttgacccattctccagacctttcaaaaactttttaagtggatgtaaactccgttttaattagagcagtgcagtctaatactgcaactagcgaggaatggaagaaacgtgctggaagttaatacaacccaaatcaaccacagccagataattcccctgatctttgtarcaaccgcccccccttccccacctccacaattaagtgaccctgttgttctgtagtttcaacgagacatttaaggttcatttaaaaaaatgatcatcctttacaggattctttgctcttgcgtttctctttctttcttccccttgccacacagctgtcactggtataggagaaagactggggggaggggaggaggaggaagccctgctcaaatcstgtcacgtagcactaattcatctgctctcattagagggagcgagggacagcagtgatggccaagagctgcactctacacatgacacgcgaacagtttggggaatagaaaattgctttctcaggaagcccagccaattaaggacttgaccatattgaatgtcaagtgttaatttaggtttttcttcattttcccagtagtaatgygggtcctgtgatgagcaaatacatgtcaagtaaaagttgattgcatgaaggacctgggtattatatgtcactgacaagtcacaaatgtactgaagtcttttaaccccttaggtgagttgggagggggaggggagaatgggattaatggtaccataatgataagaatagatagtttatgtgggggtggcttggatgggacagacaggaatggtaattcatgcaaaaactggggatagaacaaatcctactctgagggcataaatagagacccttgaaaagcatacatgcatatatataattcccactgcaaacacactgcccagaatatatgttcggtctcctaagattttatgaaaagggaaaatagtgtactctgtggtcatgaaccaggaaattccttattaattatctcatttgaaagaaagaaaacattcattaaataattacactgttttggatattttagccctttggctcaatgccactgtaatatttctggctatttacttataatttcaatctctaatatttattttcaatggactctgtgtgatacatgtcataggaaagatgcaaagcataagactgaaagaatgtttgttttctgtcttgagtatctctgtaaggtgttgtttaaccaatagaaactggtggaaggtccatcattgtcattcatttctttttgtgcccaggtgtaggaggggaagagattcaagcttcagcaagtgaagtaacttttttttttttaaatgttgaacgttgcccatcatgtttagcatctcatttccattcatcagcattcatttacatatgaatgtcttgaaaataagagaatgtctgtttctgttgcagttgtacatgtagcaaataagaatgcctccagtttagaatactgtgtgtagtctgggcaatcttagaagttattcgtgattgggccttgtttttcctttatacctataaccacttttccccttcatatctttgaagacatamtcttaattaaaacactttcttgaaacctactctcttctatttattccaaaattttaacacacttgcctttgtatgttgacaatgcttaaactttgaaaatttaagtctgatcatactttaattttggcaacaaaacttactaacgtagtctttccctgtctctcccacaggttagaaactgtgcaatcattatattaaaagttaactaaattttattaaggaataattaggaaacaattccaagaatttgatgtttaataaaataggtttttcttgagaaagaaatagtccctctaatgaggctcctgaatgctgggctggcatctgagttctttaacatctctcctccatgtctcaaaactaaccaaacaaaattcgcttaactctctcttcccttcctattttgataagctctgtggaactgtggtggcattgcaagtgtactgtttaattaaaatccagttgtcagcaggctctcttccactgggtgtgctgagagacttaagtaagtttccataaagtaaattctgacgatggcagcgtgggttgctgattcaagttattccttctcttctgtgtcacttttgacggatggtacctaatgcaatcaaccacaggccgagaaagccttttctttggttgctttagtaactggaccaggagttcccctccccacttcatctccccttcagtggcttgctcactccttgctgccacccccaccaacacttcagcccaaataggaaagcggaaagaacagcagaactacctaggactggctgacaggctttccctaaacctccatttcccagcggtgaagccgaagctgcctccctttgcgtgcgtttttgataaatttaagaagtcaaatcgctgacacagatagataatccaagtgtatagggtgaagcgttataaatkaacacattattccctcttaatgtgaaatacttgagaatgcattttctgagtcccctgacatctacccagtgagggctcacattgtgcttttctagtggcattgatttgttaaagcgctgaatcagcatctcaggccagctgcctgatccactgttttgttgtggggctccagctcctcctctctgccagcaatcccttttttccttcggtcttccttttctttttctctccctttccctactgactccttctctgcttttttccattttgctcctccccatctcattcttatttctttttctctctcaccccgcccttcctgtggcttgcttttgtctcaatctggttttcctcccacaccatctctttgcttttccttccttctctcttttgtccatacacatcttgtcctttctcatctctgagtgagttttccctcactcagggttggtgtctgttaactgcctttgcttgcatgtgcatgttgtatgtgtgtgttgaggagggggttgatttagccaatctctcgactccaaatgaatccctgcagagcagaataaattaacgtatgcctgtttgcacatgcatgtcctgtttttaatagaagttcatgagaaaactttcacctattttgctttctagaaattaaaacgtagcttacagaactttaaaactcttatttctaaatgccatttaacacagtaaagttttcttttggctcaaggaaaatggaaatcacggctggttatcacagatttgatctactcacattgtacccaccaaaataaattaacatttctacaaaactytgggcacctttttgaatttcagtgaacttactgatacgacattttttcttcagcaggttctgtattgttctgattccacttatttgtactggtacaatttcatagaaaatagttttcatcgtggtatttgtagcatgctctgatttcctaatatgtgatgcatcgctataccatagtagtgaatacttagattataaaattactttggcccggcgtggtggctcacacctgtaatcctagcactttgggaggctaaggtgggcagagcacctgaggtcagggattccagactagcctggccaacatagtgaaaccgtgtctctcctaaaaatgtaaaaattagccgggtgtggtagcacatgcttgtagtcccagctactcaggaggctgaggcaggagaatcgcttgaacctgggaggtggaggttgcagtgaactgaaaccgtgccactgcactccagcccgggcaacagagtgagactccatctcaaaaataataataatagtaataattacttggcaacttgtttagaactaaaatgagattgcttatccttcttttagtgatgtatcccagagttccagaggtcttcagaggagatatattaccatggagagggttacatgtactgcaggtgcaacttcacagacctcttttcataggccgcggttcatcctttgaatattggtccaagatactttggtgtcactgtgttgattaacttgatataagaagaaaagtgtatctgtttggactaaaatagaaattaacctctgtaattttaatctcacggcatcacttgattcttccttcaattttactgggttttactctagtaacttcacactagtaacatcaaaattggaatttgaatatgcacattgataataaatcagattacttgaaaaaaatcaaatgtctattgctgttgttttttttgggggggggggcggagtcttgctctgttgcccaggctggagtgcagtggcgcgatctcagctcactgcaagctccgcctcccgggttcacaccattctcctgcctcagcctcccgattagctgggactacaggcgcccaccatcacgcccggctaattttttgtatttttagtagagacggggtttcaccgtgttagccaggatggtctcgatctcctgacctcgtgatccgcccatctcggcctcccaaagtgctgggattacaggcgtgagcctccgcgcccagccttattgctgtattttatatagattaaactgacaatttgatttcagcatttgcaatttgaaatggaagtgtttcacataggttttggtaacctttgcttctgagttggattgattctcccctccccccagtcaagtataattccttttttttaaaaattaattgctgtcctctcatgaattagcatggcttggctaaggtgaagggattagaatgacttttcaaggcatgataatgtctgtttaaaggaaagaaaaagaaaaaagtcttttaactagggcttaagactaattccagctactaaggagacaaaaattactctaaagaagacaatttggttttattttatatgtgcatgttaacytgctttgagatcatcattttgtattttagggtattctcttagatgaagtaagatgttcttcatttgttactgaaaggggacatggcctcactccaggagattaaagctggaacaccttctgccttctgtagggataatcacagctcacctggctgtagctcaaggtcagggcaaaaagaggggactttgtgctttttagaattgcctatgactacagtagagaagaggaataataaaacaattggacaagattgaaagtgaatgtgcatcatatgaagatagttaataagatgaatgatcagaaaaagacaatctggaagacatccttcagtggtaggagaatcagtggtagaagaagaaaggggtattttggggtgcaaaactatgacctctgttaacttgcaaaaattagtactgttgtgattggttataaagggctacatgagaacaattttaaaattataaaaacatttgtaaacatttagtatgattttaatttttcatttggtrtacatactttttaaaatagttscttgtcagttatrttgcttggaaggcagaactctctgcacaagcaataagtcagtaaatccagttttttgatctaatattgttgcttgtttgttttgtaataatagcatgtaaataaaaatggttaagtgtaggtgttttaggattcaatccctttgaatttttctctcaacttctctggagaaataggaattgtttctgggtgttttgtaaatctaaattgaatgtcacttaaatgtgaaagaactggcacctttgataagtagtccccatactgaatcattttgtcattaataataacataattatcaatgcaaatgtaaagtttgttttttaaaaagtccaaacaaacaaaggagggaaaaaaaaaacccaagccacactatcatacaactcgaggaaaaagcatccctacatttaaacagaagactttcaatagtagcagtaataataagaaagaacctttggcgtctgcccaagagcctgttgagagggagcagcaaatggcctgcgcagtgtgtggctctgcagaaattccagggtgacacatgcctcacaagctggtcacaatgcaaggggtcaggggtcatgttcaagagcagggtgttgctggataaggctgaggaagcagaggtggcccctctgtgctcagtgtgtgggtctgtgtactcctttcccgtcaaagctggcccagcgcggccaaaaaagcggttccttggcagggtttaatggcaggatgatgtagtctgttgtgactagtgcattcctttcaggttaaactagggaaatggcattgtgttaaaattccaagtcgcatgaatgttttattgccacagtgcatttagccctccaggggagtgtgtgtggcggccggtgggggtgggggtgggggtgacttagagactcaggaactatcagaagaacacttcccttggaaaattttacccactagcatgaagctgatttgctgtgatggtcacttagaagggtttcgctttttcctaaactgtggctgtttaaagtcttggagtctggacaattaacagctgaagaaaatatgacaagacacacgcaaagaggttgggagatagagaggaggagtgcgccagaaaggagctgagctgccttcttgtgtaaactgcctgagagcgggccccctcccctggcctccgtccctgtccccccttccccaaggctgtgttctgctgtctgcccgaaggccaggactgatctgttaaccttgcaccactggctgggaggccgctgcagctcatggtactgtatgttaccattactactccctcattctttttcactggcttttttttttttttttttttttaaaaaaccatttctctgtaataacggtttatattagtcagagggatacaattttggaatgcagaagatccgagtttaaaacaaaacaaactttagaatggtacttttttttttttttttcctttttggcatttaraagggctaaatccaaccatgctaattcaattgcagccaaaggttttcagtgtgatttaaaatcaggagttctggaaatggagcagttgaaagatgcagtcatttgggctgtggatcttataaagggactttgttgtgaaaccacacgagcatcttcaggtttttaggatattttcagtctttgcatttgtctcagttatatccattttgcagattgcccccaacccctatccttccttagggaaaactctagccgtctcattcactgttggagttgttttaggcttacagttactgagggtgtgtatgatttgacttcagttgtaatcgtgtgcrttacatataacatttgaactgactcaagttaatttataacagattaaagtgtggatgtgtggaacagctttctgataatgcagtgtgcctttataaaatattcatgtgtctgattttttcccccaatgtataggagaaatatgtattatcctaagatgacctaagaaaggatatattaataatagtttgaattttacttttggactgcatttctcttcaatttcaaaccttaattctttctttgttttcatgttcctgttcagatgttatttttcttttccttaataatacatatatacttgtatgtgtgtgtgagtgtgtgcacattttaataactgccaaatagttataagaaaaaacttggagagctgctaagttacttttccattgatacattatcagtcagaaagtcatgtaacaaaaattcaactcaagaatatagcacagaaaagtaaactatgagtggacccgtgtgccctatttatagagttttaagtacatgttatatatatcttataaaacaatgattttgtcaagatagacccctgagtttaatctgactaatggtgtttgtatgatggcttgttcttcttaaacatatatattgacattatttataggaagtcttacaccaataagcgatcagctccataggaaaatcaagctgtgtttatgggctgggcacttcaaattttaggtgaattcattagattttttttcttatattctagagaatacccacttcaataattatttctttttgttctatttggtctagtaacatgatgatagtttttttagtgatttgttttttagttgtacattttaaaatgygatttttccggagaatattgctctgtgctggatttttatttcttttacttaacagccaattttaaagttaattattttatttaaatactagaaaaagtagttaatgttgccaaatttaggagaaaaatctgtcaattaacatttagattatctgaagttatatttcttttcctagtgatagaagcactttttttaaactgtgaaaaggatgttgtagttgtgttcagccctttccaatttgatttattaaaagtttcctttcataatccaagaggggaagggtggaattactccagtatcacatctctctaataagaaaatttcagctgatttaggaatcttctccgcataaaagtaaaattttcttaaaaaatatcatcacttgttcttttagtgttttcctgttcccattgtgccaggcacacttgtttggctttggaaacttcgtggaatagtgaaaaaatgggtgttgtttcagattctaatgctgctacatgttagctttgtgactttggataagtgactttatccctgacctttattttctttgcttttaaaatggggaaaaggacatttagcttacagattgtcaggaaaatgaaatgagacaacacacttgaagttccagtacatagtagatacttaataaaccttaggtcatcctcctttgacctgctctgtggcttattctccagtttttatcccttgggaagcttgaatttttggaaatagtagtgtaggatgtaggggaataagtttaaataaaatgttttaggttcttcatttatctctaggaaaggcgatattaggccatcagcagatgtcttttttttttttttttaagtaaagaaactctggcgttatttattagtctacatttttaccactctgcaaaattttcattaggttgatctttgtggatgtcagagtgatgctatcatttctgtgttaccagttttggtacaggtagtttacaagtaaagttggccgattctgttggatcctgtttacttttgtataatctgttctaatcatttgcttgaattaaagcttcctgccttatagtcattagcatttgatagtggatcttgaaacttgattttgcaagttagactccagcgtctgtccctggttttgtgaaaatctacttataatcatggaactaagaccacactaaagcttcgagtgtttacacctctgtagaattaaacaaaacagcagcagtcaacatacatgtatctgggcaatactttatcttcatttagaatcttgcagaatgcctaaagggtagttaaggacttaggaactacttgttgagcaaaataatgtgcttctttttattgttttttagcccaggattatgttttcataaaaaataattgtgttcccatgtgaagtacattaatattattgtggttggtcttttttttttttttttttttggagagtctcgttctgtcacccaggctggagtgcaatggcatgatcttggctcactgcagcctccgcctcccggttcaagtgattctcctgcctcagcctgctgagtagcttggattacaggtgcctgccaccacgcctggctaatttttgtattttcagtagagacggggtttcaccttgttggccaggctagtcttgaactcctggcctaaaatgatctgcccccctcagcctcccaaagtgctgggattacaggtgtgagccaccacgcctgcctgtagatggtctttatttagtattgctattttgcttaacatctaacttcttttagcctgccaaagtttgaacatactgcatcttaagatctaaaataaatatttgacttagtgtttactttggcttgttagtaagcataaaaaaatgaaaattgttaactaataactttattgctaccttttagcacacatagtgtgctagggatgctagtcatgatatcttatttatgcttacaaaagcattcatggaaggtacccatattttcattttacagatgaagaaatcaaggcctaacatgtgtaatccagcaaagttgattccaaatcccttgctttcccccttgctgcattcttcatatatcatttaagctagctatttaaaaagaaaaaagaaagttagttgtagaaaccactggttttatttcctttcaaattaaattttatgaggaagtcagtatgtagaactgataaaaatcagagttgttctagatgaaaagagatagagccacagtcccatcttttaagcctctcctagggatccctggaatacttgatgagaaagccttagcctaatacctccacaccccagaaaatggggcctagtgcaactcttcagtttccccatctgggacttgaaggttttgtttatcttgtgcttggcgatgttattatgtggaattcacaggaaaagctaatcagtataattttatttattatttatttatttattcttgagacagagtctggctagagtgcaggggcccgatctcaggttcaagaaagtctcatgtctcagcctcccaaataaccgcgattacaggtgtgtgccaccacgctcagttaatttttttcttttgtatttttagcagggatggggtttcaccatgttagccaggctggtttcgaactctggacttcaggtgatccatctgcatcagcctcccaaagggctgggattacaggcatgagccactgcacctgactgctaatcagtataattttaaaagcctatgaaagactgtggggtaaataccaccgcaaaaaaaattacaagccaggttgctggcacgcacctatagtcccagctgcttgggaggctgagtcaggaggattgcttgagccgaggagttttgagtccagcttgctcagcacagacagggtgttgctttgttgcttgggatggagtgcagtggtgtgatcatagctcactgcagcctccaattcctgggctcacgtgatcctcagcctccagaatagctgggactatagttgtgctacaccaagcctggctaattttttgtagatatggggtcttgctatcaagacctcaagcagtcctcctccctcggcttcccaaagcgctgggattataggcatgagcaaccatgtttggcctcattgtaaatgttaattttcagggtataaattttgtttcatccatagcaatgaagtaattttactatggaacgagtctgaaaaaactaagtcacagttttatgtctaactgaagtctgtgtctacagactctacttcattttgaaggttaaagtttgggtgctgtatatcacattatagcatatctattaaagacatatacatatcatacaggcatatatgtgtaaacataaggatggagaagataaagtggatcaacttaactgggaaaataatgtcaaaatcactattttaaataaattgcttgtaaaacaaattaactgccatgataattctgtaatatctttataaaccagaaattacaggttttctcaccagataaatttacattgggaatttatgtagctctttattagaaatatgtctctttcatgaatatagtgagaagagtccagactttttagctagatttacctgcatttgaactgatctctttcctatgtgactttgtaaaagttatataacctctttgaatcttagttgcttcatttataaaatggggcttagaagtaaatgatgcctgtgaattctggcacagagagggttagttagaccaatttcttcttctgtctgttactattgtagattgctagtcttatgcagtttgcacttggtatctgtttatcaacagtgccacagtgttctttatacttgcatcatgtacatacttggccttttcaattactagtttaaaaaatacttgtgtcactcttgcagaagtcttacttttgcagaagaaaatgagggtggagagaaatctcttctttcttactcttcactgagaatcagtcactgagcagcataattctaaaatcttatgtggcttttgggtactttatgaacctttttatggtaacccagaagcaaggcactgattgaattaatacatttccatcaagggactattctgttagcctatcttcctcctcctaacccatgcatgcttctataagggacttttttgttgcattatttaggttgccacatatagtggggatgacagtttgtagatgtgcaggttactggtaagccttatagcctttctgtttttaaaacaaagggaaaggacaaaacaaaaacaaaaacaaaaacagaacagcaacaacaaaatcactacccaaaccaaaagtaacttaaaaataccatcttagctttctggaaaacccagtgctttataaaatgtagaatctaaagttcgcatactgatattaatttttaatagttttaaaacttttaaatacaacttctgtacaaaaggatatgtgttcatagggcagatctgattaagaaaacctcaaagagagaaaactgcctgaagggctatcaccaaggaactgttaatgtatttttagtcgtctttcttcatttacaagtacctaccaatgtatgaataggtggtagtttcataaagggatgatgttacatgtatatgtgacttttaaaaaatgcattgttatcctaagtatctttccatgtccgtaaatataggtattcatcatggcttttttttttgagatggagttttgctcttgttgcccaggctggagtgcggtggcgccatcttggctcaccgcaacctctgtttccccgggttcaagcgattctcctgcctcagcctcccgagtatctgggattacaggcatgcgccaccacgcccagctaatttttttgtacttttagtagagatggggtttctccatgttggtcaggctgatctctaactcctgacctcaggtgatcctcccgcctcagcttcccaaagtgctgggattacaggcgtgagccaccgcgcccggccctcatcatgacttttaatggattcttagcttgccattgtatcatagtttatttaatgagttcttggtttgtggattttttttttttaataaacagtagtgcttaaatatgaacatccttgcttgcccttgtatgcttatttcctaaaggtgaagacagatgtgatactgctatggaaggcagcataattttgcacagcttaagagagagattggcaaatctgttctgtgcagggctagatggtaaataggtagatgtatggtttctgtagcaattattgaagtttttgtaggaccaagcccctgtgtatgtaaaggaataggcagggctctatttcaataaaactttatttacaaaagtaggcagcaggatagcatttggcccacaggcttgtttgcctaccctggacttgaaactaagtagaaactaatttgggatgaaaatttatccctagtttgctgtaaactgcttttacagtttcttagaaatgtgttcctatctcagggcaatgtaatgggctgatgactgactttctttccaggtacgtggcaatcaatacttaattttaaagaacttattaaaggagcttctcataccagctcctactcctgaagcctagtaaattttaaactaagaggttatatataccagtatatatttttatcattctatactttttttttttttttggaaatcgagtctcacttgttgcttaggctggagtgcagtggcaatctcggctcaatgccacctccatctcccaggtttaagcaattcttgtgcctcttagcctcctcaactagctgggatgggattacaggcatgtgccaccatacccagccttttaaaatattttagtagagatggggttttgctatgttggccaggctggtcttgatctcctggcctcaagcagtccacctgcctcagcctcccaaagtgctagaattacaggcgtgagccaccgtgccctgccacatcgtatactttagatttcagcatatgttgacaacttgttgggcaaggaacgacctctttaattaattaattaattttatttttgtatattttgagatagagtctcgctctgtcacctaggttggagttcagtggcgcaatctcggctcactacctggttcaagcgattctcctgcctcagcctcctgagtagctgggactacgggcacgtgccaccacgcccagctaatttttgtagtgtagtagagacagggtttcaccatattagctaggctggtctcgaaatcctgacctcgtgatccacccgcctcagcctcccaaagtgctgggattacaggcatgagccaccgtgcacggcacactctttaatttatattgcagggcagatgggtatttccccctttctagaaggttgcttagttggagtcatgttctagagatattcagaagtaagctgaaaggaaagtccaataagaggagaagaatcatttcagcagaaatataccacagatcaacagggtgacattgagttagttactgaaccttaataggctaaattatacttgaaaaaatgctctgtgcataaataataacctttttgcatcttgagtttctataaaacaggaattattggcctctacttgccttacgggtatttgttgaggatctgctggaataatgaaatagttaaaatcactctatttgtaacattgtgtcactggtgcccttatgaattttaagatatttatttattattcagtatgtatttgttgactatctgctatgtgtaaagcagtatggcaagtgctgttgggaaatacaaagagaaataagttagttcttgatcctaaggagagaaaaacatgtttttaaggttcaaggtcatgtggtgcttagagccctaaggaacatagagcacttgggaggatgagatccctttcatccaaaggtatcaggaaatttcatggaagaagtggcatcaggaaatagggacattttcaaagggagaatacaggcgagggtattccaaaaagagcagcatgagaactatttcaggttaggaaagtccaaatcagtatgcaagagacataaaatattctaattagagtgtctatcaagcatttttcatgaagaaggaggagaagataaagctggaaaggcaggttagagctagattgtagagggcctggaaagaactgtaattggtaattggtggggagctataaacatgatctaggagaatgtgttygacaattggaggggtggtgtatagcactagttggcaagtatggaatgataaagtcaggattattgctaaagggttattgcagaggtctgagcatgtacttgttagaawtattctggaaagtgtgtgggggacagctgaggggattgaaagggcagaatggacaggctatcagaactgactgggttcaggaaataaggagaagccttttaataatgatgtatggttctgagtctttgttaatgggsttatggtaataacattgaaaaatatagaaaaatccagggaaagctgtagtaaagaaaggagaccagtgaacctatttgctttgcttgtttagctcgagatgttaactggacacttagaaaaatctagtgagagtttgaaaatgcaggactgaaattcacatgagaggtaaggattagggatttgggagccctgttcacacagaggtacgtgacagatgagacttgagaagagcttcacgtcacttaacgagaatgcatgtaagagagaaaatgcggccacatgatgtggctcatgcctgtaatcccagtactttgggaggccgcagcaggaggatcacttgaggccaggagttcaagaccagcctgggtaacttagcaagacccccatttttatcaaaaaaaaaaaaaaaaaagaaagaaaaagaaaaaaatttagctaaaaagaatcacttctcagctaaattgcagggcacgtgggtattttcccccttctagaaggttgctttagttggagtcatgttctagagatattcagaagtaaactgaaaggaaagtctaggagtttaaggttgcagcgagtcacaaatgcacatcactgcatcccagtctgggtgacagagcaagaccctgtctcaaaaataaaaataaagaaaaagaaaatggtattattttaagtattacttaccattgggtaagtcaattacgtaagtagctctgtctttttgtgaggcaactaataccaaaagaaaagcaaaaaagaaactctcatgtattttaccatttataaagcattctgttgtccactaagcttctcttcttagcttctaaagctactaggtttcaggggtaaagtatgttcagtttggggaaaaaatattttcataagattcccaaggaaaatataactccctttgactttatcttctctccacttcctgagaaccttagtaacaaagatgttactggtaggacgggtttacattcactttttacctgtctgatacagactactacagcttttcatctcccctagttctcaccccagttgagatccatgcatttgggatgggggtgggggggtatcccttagaaatcaactttgtatgcgttygcacatttttctctttttagtctggggtcctcagcaggcttggaggggggattgtgtagtayacagtatgacttatgtttgacttgggaaaatttttcctgtatggaacagcaggactgaatctgctttctcatttcctttcttcttttaacattacctatgttcaagctttgcatgcaaagaaaaccgtgttgattcattgatcttcgacatgctacattatgagccttggcagaaggtaaaggctcccctggctcccctgttkagagcagccggaattcctctggtctgttggtaccatctgtggccttccttcaggctcagtcttcatagtaagtctaactcatgtcaaatgggccaaggtgctagtccagagtaatttgcatctctagccaaccactgtgcatttactctagtagtaaatgcctgttgtatttgtctcttaaactgtgtatgctactgaaacttttttttaaaatcataattggtttaatgtaggtggttcaatgagtagtttgtgaagttgaatttttgggaactaatatttgctctttccctttctgatgccacaacatattcttctatcctatttcattcaaattcactattctgcttttttcacatacgtttttcaatcaccctttttccctttggtgttgtttagcaagggaggaaaccctttcaatttgttccatttttgtgcctctgatgaagtaagagcaactcagacggatgtattttcttcctaagtaaactcttttctaaaaaaatgccacaccctccccccaaaataaagcattcaatagcttgatggtgattacttgaaggcagtctctttcctcattagaggtaaatacatcttcactgttgattgccgcggaaagataggtagagaagctgagtggagcaaacccaatggctgagttcaagttgacctggatcattttaaagtgcttttcatgtaaatgctacagttaatgtctgtccccacataatttctttctaatgtttgcagcagatgtggagttggccttaccactgctcaagctgcttgctcattttggctttttctcgtaagcttttcctttcctggcttcctttcttttctttacagagtgagatgttgggagataagaattttatgccttggtgtatgctccttcttctttctctccattgttttaagttatatcttttctaaaactaagttatgatctgtagagcttttgccttgtggttcctttttggttttctagtttacatgggctagggagcctcaaactttaatgctcatcagcatcacgtggagggcttgtaaacacaggtgagggactccacctccagtttctgtcacagtgggtctcaggtggggcatgcaaatgagtttcagacatgctctcaggtgatgatcacaataatctttggccaagaagcatgccttgggcactgaccgagactattggtcttgtctgtcagtgtgctgcccacccccagagggttgggttcttcagattttattcatgcacgttctctggaaactctttactttttaataatttataggccaggctgctagcataagagaactcagaaaattaccttatattttaattgtgaaagggttggttgcaggaggggcagatatgctgcttyttgccactctcaccccctcatcccccagtgaagtcttttttttttttttttttttttgagactgtcttactgtgttgcccaggctggagtgcagtggtgagatctcggctcactgcaacctctgcctcccaggttcaagcgattctcctgcctcagcctcccaagtagctgggattacaggtgcccgccaccatgcccagctaatttttgtatttttagtagagacggagtttctccatgtcggccaggctagtgtcgaattcctgacctcaggtaatccacccaccttggccccccaaagtgctggaattacaggcatgagccacgacgcccagcacccagtgaagtctttaacactaagtccctctgagctgacagcgatcttttcggtcattccaaacacagcatcactctaggaagccttctaaaagatgattgagttggcccttggtccctaagtgagaccaagtgactctgtctctttttagtttccccagttgcttataatattcctttgacccttgtggcttgctttcctttcccctatgcggcttccatcgtggtctcaaagttctcagccttcattggattggtatgctgtggtgctgcttttgtgggctgggggcagagtaccatttacagatatactgtgtacctactgaatccttaggtgctttacatgtgtcatctcattcaaccttgccaaccctgcacaataaatataagtatcctcattttacaggtgcaggaaacaaggctcggagatacgtaactgagcaactttacaagatattgcggtagagatttaaacagagatctaattgcaaagctagaactctttcagtattacctgtctttaagatagctggagttgagtgttgaggatagaaagtaagttaacctgggtgtggcatacttgaaattgcatttaatgtcagttgtcagagttgacaatgtatttgcccataagcaacaacctgtggtgttcaatttccaaaataatgtattacaagaatgattgcaaaccaatagaataatagaattctgtacctttttttcttaaatataagaacccgccgggtgcagtggctcacgcctgtaatcccagcactttgggaggccaaggtgggcagatcactttaggtcaggagttcaagaccagcctggccagcatggagaaaccccatctctactaaaagtacaaaaattagccaggcatggtggcaggcacctgtaatcccagctactcgggagaatgaggcaggagaatcacttgaacccgggaggcagaggttgcagtgagctgagattgcgccactgcactccagcctgggtgacagagtgagactccatctttaaaaaaaaaaaaaaaaatggctgggcacagtggctcatgcctgtaatcccagcactgtgggaggccgaggcgggcatatcatgaggtcaggagatcgagaccatcctggctaatgtggtgaaaccccatctctattaaaaatacaaaaaattagctgggcgtggtggtgggtgcttgtagtcccagctactcgggaggctgaggcagaagaatcgcttgaacccaggaggcacagctttcagtgagccaagatcgcaccactgcgttccagcctgggtgacagaatgagactctgtttcaaaaaaaaaaaaaaaaaaaaaaagaacccatacccatccgtggatctggtacaagtgacttcattctcattttctccaatgctaaaacccaggtaaagcaagaattgcaggaagtacgtgaaatctgtccaatagtaggatgtttttcgagtaaagcactagcgaagtcattgagagaactttgtcttaatttcacttctatccatttttatcaaatgtagagggagaccatagtgataggtctcagttttctcatttagaaataaaaggagtacaatggaaatttctccccttccttacttgtctgatgtgggaattaataaatattacgtgtaaagccctttgagcactctggaagaaagattctatgtaattttagcattattcgtggtccattaggctcctcagggtgtcaccagggaagagagatttttaccttttatcccatatttcacagtataaaaacaaggtatttctgttgttgtttgtggctgtgaaaaatctcctgtaattgtacctgcagaggttgctcctatcacagagcccagggcactgttctttggcagctcaccccagaggatcagctcctgagggaagagcaagagtgaaccttagtgaaatagctcctggtggctgtgaggacattgtgcctgctccaccccgcaccctggcatccccccacctccgtcaccttctgtgtctttcaacctgttgcataacagaatcacatactgattgactcttttccattttcttttatcttatgctgatcctatagttcattgctctgagatgactccagaggagatctgtgtctccttcaggcactggcatctgtcctatccagttcttctcctataaaatatctcccatccttatcatgttcctattgatacaactctgccttatctgagtctataacaatgaatgtatttctggtcattccatccttgaaaatggataagtactgtgttgtatttatttatttgaaacagggtttcactctgtcactcaggctggataataaatactgtgtcgttagtatgtatgtatgtatgtatgtatatatttgagacagggtttcactctgtcacccagcctggagtgcagtggcacactcacggctccttttaactttgaactcttgggcttaagtaatcctcctaggattacaggcacatgtcaccacacccagctaatttttctttcrttattacttttctctctgtgttgcccaggctggtctagaactcctggtctcctgccttgacctccctaagtgctaggattacatgtgtgatccaccacatccaatttgactctgttttgatttaccagttgctttctgatcagtgagcagtgggttccttcttcgcccttaggttctatattcttggtccttctgagtcttagtctggggtcccatggtagagaaagtttaggcccagaattttgtctcctagttaaaytgtaggctgaaaaatggagatataatttaactgcatactctgccacgtagctcaccttcctgtgtttctgcttttgtattcatttattttgcagcagtgtgtttagcgtgcatcttcatctttacagtgttggataatttgtttatttctttatctgctctttctcacagggactcctggtgagcttattgtcaaatctatttcacttgatggtcttcctgaactctttgtgttatctgagtgatttttcctcttgccgcttggcattgtataaccactgaaattaggctggagtgctattgggtcttccttttggcttggaatccggcagtgcttgtacctagccatgtctctgaggagcactctgatggggctttatttctgtttatctctctccctctttttttttttttaaacttacattgtatatcattcttttccaaggtctttgtcccttcaacactgccagactgaagccaccaaaacacatacacttcagaactgatctgggcttggggccagcttgactgaggagactggagctcacatggaagttagtttgtttatttaggctgtgactttcatagtgtctatcaggcagatgcctacctgcgtgtttaatatttaaaagtaaaatggaaatttcaagtggaccctggctctgcagggggcatccctgactatgagcccttttcatcgtaacatgactcttctctcaagttatcatttctgtgacttttctcttttttcctttgtcccctttctaccacccatttttcacagccattcatcttcaaatattttcaacggtagctcccatttacaacctggagctttttatgtcttcttttcagaagtctggtccctaacattttttttttttttttttttttttgkgatctcagtaaacaaaragtgtgtgtatgtgtgtgtgtgtggttatgtgtgtaggaagcctgccatatttcctccctgccccacagaaaatatgttttctggaagcccttttgacaccgaagtgaatgcccactggccctcccttgttgaattctcctgaggggagagagagaggcctttatacttgtcatatcttttgtttctgctgattatacacaaagtaagttgtaaatagctctctcacacaccatgattccttcaaggtatgtatatacaggagagtagatatgtactcagcctccacttgccctggggatttcagagggtccctttcaaggcctctgacctcctgttacagtactaagataatgaaatttacatcagttgtaggcagttattccataattaaacctgtggcataatgtttagaaatattagctgaacagttcaccatttttttttgtttttaagttaaatgattttattacttttaaagcaacatatacaatcatacaaaaagaataaaagttaagtacctataatcttaatcactgtgaacattttggaaaatctttgtagaactttgtactatatagtatgtcaagtatgtcattaaaacaggcactaggtgttagcacagaggaaaagtggataaaacggaattccccaaatcagtttaaaatttatattaaataatggttaggcacaccccatattttattatcctaatttacaatagactaataataaggggttagacaattgatatctgatttttcttcaatcattttttgattgcttgtggctggctaacttctgaggcttctaaatcaaaaggtggaatgagatgtgctaaattacaactaattaggttatcagcttttatctcttttgtatcttccttagtacattttgatgaattcagaaagagatatggtttgcctttccgtgttgaaagatttccctaactgatgacgctgattgtggtggatggggtgagagtgtggtgtatttttagaccatgaaccgttcagtgaactttgtgaaccaattttgatttgaatctcttatccctcattttttagaatatgggagtcaactttcaaagattcttatggatatatttttctgctcagaaatcctagcactctaagtttgaaaatgtacccacttccctactagttcctttttgtgattatgattgttgaaacatactggtagtttgccaccatttcctcccaacttactcacagacctttatgttttctcttagaaacagtgtatttctaagtgtctcaagttgtaattgcatgtaattttagttgtttaactttctccttccctcttgagaatgtttataaagtgcattctgtgactgtgaagataaaaagaactagaaacttagtgtttgtgacgtggtcaaataatcttaaggtaagtagcaatttgttttgtgtatgtgagatcgggtgaggtttacacttaatttgcaatatatggcttactgaatctgccttagttaagtcccatttattgaggttttataataaggttttggggggattcattttgatttggaatattctcaggttaatttttttcttttcccttctattgctccctggggagaattactgttgcagaactcattagtggccttccatatgtcagctgaggggtagaatgagcattatttctatgtgtgacacaacacaaatgcacagtgcccccgctcttctccctgctgcatttctttcttattcctcagttaagaggataaattcccttttttgttacttatgttgtcctagaccaaggagcaggtagcaggtcttgatttcggttagcgcctttttcctttgttgtcttctttgtaatttctttcatatgaaacatcaacaaatacctctagaatggatgccactaaatgtagttattacatttttttttwaaattaaattcttggaaatrtattctcaacctttcttttctttctcatgtcttaagtttgaatccaggttttacaacctaataacatgtgactctgagctagttatttacctactctaagcctcagttttttcgtttgtagactggagatgctcatactccgtaagagtgttgagaggaaaatgagggttaatctacacgtaagattccccacatagtgactcgcgcattggcctgcacgtgtgaaactcttgggtaaagagtggttataaacttcaaagacagatgacactctgtccatttcaccttatgagcctagtaaagaagaataaaagacttgaaaagaatgagagaactggacctaaaaatgtttgaagcgttgaccgagtaccttttatttttcttttctttccagtgatattcactagtgaacttgcaaagtggagtatactgaacgttgtttaagtttggacgattgtactgatttttgggtgaaaagaaagagggaagcaccttttaagctagcatgcatggctgaaaactgatgtctgaacaaagcaaattgattagcacagatgatcttaattggagttttaaaaaagtcaaagaaaacaaaacagaggagtgctttgatagggaaagaagacaaaggtgagatgatgcttagttgatgtattgagtttagagacatatagacagatatatgattagtgtgagtagtataagtatggaaataatgaggaacaattagaaatttttaaaaagcagaaaacatgtttaggtggaatctaaaaccttgtttaatcttaaaaaaatctgaaatgaaataagcaagggacagtaggcagtatttagggatgatattgactaattataatagtttacttttaaaaagggatcttagtggctttcagtttagaattttagatatagagaaacattcattaagttttaaccttgtttttttattattaggacagatacataaaacaaggtttttaagcttaaagataacatgtttaaatgagtaactattaataataaatattgataaatagaagtctgcctgtgctagcctacaccaggaacaggaaaaataaatttgaacaaatattttaagaacgtaaaggaacttaggcattgttgaatgtatttttttttaaattcctacataagaaaattaaaggaaagaggaaaagaaaaaatttatgtcaccaatgtgaaacagaaattatctattttagtcttttcccatccctgcatttccttccttctgtctccctcctcctgtccgtggctatttattaggtgcctactgtgtgctacctgctgtgaatacaaggaggaacaaaatttatgttgcttttttcttcttggaatttaccttctggtagttaataaactttgttacatggtattcactatatatttgacatactaagtgtcacatacatgtcaagccatgatgacctgttagagacccgcagttgggatttcctctctctgcctgggtcaagtgtgactgtgtgcagttctcagcagcctccatacacagcatctaacgtggctgtattccctcaggttccattggcatgtactggcagagtgctgggggcagacttctgcccaaacctggaggagccataccacaggctggaagtccaggttggagtcttaactgttttctcagctaggggtggtgtgacagaaacagtggtcctggaaagccatttgggtatatcagcgtcatcaggaaaagacaaccattgagttaggtgtaaagaggaaccagtgtagcgtatgtgcagccataggtccttttcaggatgcgttgtctgtaactgtagatcatttgtctgttcagtcaagacatatatacatactgtagtaagtacatggtctctgaaggttgactacctagagttgatacaagttgctgtgagacctttggcaagtcacttaatttaagtgaaccttagttttctcatctgtaagatggagatttaccacacaaggtgatgatgagaatttaaaggacctgacatatattcagcagttagtgcaggacctggcacataacaggtacccagtaaatattagctttcatcttctaagacttttgggatatatgtgagtaagtcatgcttcctacaatatggtctcccggctcaggagaacagcagccattcaactgagtgctttataagaaaagcaggacttaatgaaatatcttctgtcttcatgcgttggaagatatgtcttgtggtgtaataggagtatattagcaaagtacatttttttttttttggtgaaactgttggattgaaattcagttcgttttgtatggtcttgaggcattagaagtgatttggtgtattgcaaattaaaaatgtaaatgtgacattttggctaaaggcatgcctccatttctatgtacataataatatttaaggaatgtgtgtgccaatgcaaagatgcaggctgaagtttcaacatgggtagcactccctagcatgaggaaactcatacttttttttttaggacctccatttggccttattttctaaattttcaggcttataagatgagcatagtgagctcagttttaaaacgtttttactgatttagaaccacaaatgagaagagagaaccatttaaaaaatggacttctatgcagtgagaatgagggtagaagtggtggtaggaggaggtttcagtttttatggtaccgaagggtatgccatctctagcacacctgctcttggcccagggaagaccacctgagctctgctgtgccccaaactggtactgtctgggtggtgtatgtctgtgatacaacagaaaagcaggtgggacacatgagacacgatcatgtatttcctagttctagaaagctaacagcttgtgtgtgacatgcaaatgcagagtgatggaagactttttgtggagagtagtctgatccttgaccttttttgggtaggacgagtgatgttcttcaaacacatcacctggaatggtctgtcatgggtgattgttggaaatctgtttttaaaccttgaattacagtgaaaagaaaattgggttttgcagatgtgagtgtgtaaaataaaactggaaaaaaaaacctattgagtacattgacatactacgggagaaaatgtagaaaatgttatatttacaggttaaagtaacattctggttgtagatgaaccagattgtggggttgatagttcagaaaggaccttgcaaagaagactaagttcctggacaaagtaatgaaagtgacattattggatattcctcattgtggatcatcattttggtggactgcgtggaaggattgaatctgttaaaagatgatcagctatggagagttagtcaagtagctgggacccacttgaagcatttcttcctctcttctttttcttctgccttcctaaatgtgcttcttctgcacattttagaaatacctagtacatatacatattatgtccaccataataaagatgcttaatatacttttcaccagctatctatttcaggagtattttttagcttagactgctttcattcttgccatgtcatgtgtcctagtcctttttaaattttttcctagagaatgagccatttcttattgttcagcatagctttatactctagggarctcactataggacttgccagtcatctccttttcctgcttgtatcataggctttgccccagggctaggcattatcatcactagaggttttgctgtttggcctcttgattctgagaataaccttccgtacacctcaatttaggagcagcggtttgtttatattctttcttagaaaggatttttgtttagacatacagccctgaaatctggtttacttttatgttttagctgacgtaagttctcatgactggtggagcccctttctgctctttgccttcttccttttaaacctttgccttttattcctaaaatttcagatttcttagcagctttatttttaataatcccaagatcccctactgtggtcaatgaatgtatctttggttttgaatgactgtcaaccttcaagtctgtgcctgatttgacttttgcaaggacttctgctgtggtttgtgttaatattgcttgattcagaaaaataactggaaatcaagattttgattctgtaactttatttactttccccagtggcttttgaagtgggtactccagtttgggaggttaactgatgaacagcagcaaagaatcccactcttatgcaatcatcttctaagaaatggttattctaatttagactctccttaattgctgatattttacttttatcagagaaaagttactttgttagttcagttgtgcctcatcatgtattaagttgttacatttagctcagcacagttcttttcttggttgggaattcaggatgtgaggtttgacttggtatttttcaccactgaagtgcttaaaaaattagagtaaataatgaaccaatatttcagtactagattagacacaatttgctgtgatgttttataaaccacaggctcctttcttatgtgaatgcgtggaggatcacttttttttccagacatactggggtgcaagtgtaaatttccataaaagttaaatgaggtgcttcctgtaattaatgaacaactgtggctgctctctggtctgcattgtaattaaccgtgatcaggcttgtttagtgatgacactgttcctgtaataatttgacaagctactgtgaatttgccaggttattaaacaacctgcagcattcacttctggaatcacggagatgagctcggctgctgctgctagttaaatgcagcataagggtgaaccaaaagctgctcatcgaagtctgtcgatcactatgaacggatttaaattcctatgatgttggagaagttaattaattttgtatagggtgtcttgaaactttttattacatgataaacctactggggcaaagctggtcatgtttatgaactcacaatgaagccagcaaattctctatattttttaacaacagtatgaactaaacaaaatctgaagttctccttaccaccttattaaatgggtataacttatttttaaaaaaaggttgtttccttcacagatacatccacaacatccccccaaataaaagttcactctctcttttttttttctgttccaaatagatgaccttgtgctaaacaaagtsgtgttgccggtagagcagtctaagtggaccagtagccttacatccttggtcaccagcgcaccggtcccccaaccccctctttcaggttaagatctgttcaaaacgttactgtctagttactgtggtgtctttcattcagattctgtttattgactaaaccgcaaggattcctgcccaaagtaccaggcggtctatgcttgactgattttgattttctaacatcagccctgsggtttatttgaaaaatgtacatacactgcagctttaacaagtcaagtgactgcatgtttttgaccatggagtagagtatatctgaagatcattaaatttagtgggggaagggaggggtagagaataagtgtagtagtcattgtaccattgcagagtgagtgagtgtgtgtgtgagtttgtgtgtgtgacacatggtttttgtcttttcatcttctccaagagccagaaagtttcctgcagttctctttccagctattgacaaatgattgccagatgtgagatctttgcagtgctctttccctcagcaaacctgcagcgatgggatatttgattctcccttgcccatttcatctcctttccacatctgccagggacacacaagcaatacatccctacatgagagtttaaagtttattcagctcctttttcccctccgataaaatgtttggagacaacagaatgaggtccatatgactctctcctgacttcaccgtatgaaattaattgtttattttacttatctacctctcagtaattgaagtatttcattttagtttcggtccatggaaaatttgacgtaactctgggagtgctaagagtttcctattgtctgcttgctgcaagtatgccaccatctcagcttccctttgagtgcctcaattctgataaaaactagactgttggtttcacaggacttcccagtaaagtaattttaatcaacagctgtcaaaatattaagtgtggagtgtctggtaaaattcagtagtcatttagaatttaaaaagccatctaagagggagaaaattcaacttatttggtttgattggtttactctgtgtttgtgtccattgtcgaaattgatatggatgaggctctagttttaatcacaagtagcttaaaaaagagaaagtacactgagtttcagaggaatctgaagttagcctgtgtaggccacacacgtaatcactaacatgcacagaagccttttgcatctgcttggaatctgtattgatactgattttttttttttctcatctcagtttgaaaatattttccaaaatgcccttatagctcatgttcataccatagggtgggctgacacaggtggcctgtctgttttccttttacactttttggcaaatggaaaggccccttattccctgaataagatcaacgtttttttttttttaaacatttaaaaaataatccataaaatgtctgccacatgttctctagtttatggaaatgtttgccaaattagacttgtggaattggattcttattgtaaaagtattagtgtgtttactatttctgctaccttcttagctacctgtgattatgtgaatttatatttttatatgaaatttaaatgaggagtataattattatttctgaattcccgtactgaggaaaaattttttgttattaaaggaggtaagtgattatacccacatcagaatcaacatagaaaaagtgtgaagcctgtttttcaatattttctttaaaaaattaagaaaacgacaaagctaacaacaacaacaacaacaaaagcccctgaaaagattaaatcctcctaaacctaagtaaatggcggaaaaccatttaccacaagttgccaaaatggtgtatgtttctattgaaagttttcactgaataggatagaacataatcacagttgaacatgaggacagtgatttcaaactgtttacccttaaaaagaagatgaagatcatgatggaggggttaagtttaaataacactccccctatgcgaaacaaaattactaagaaccaaacagatccctgtggaaaagtttgtatgattattgttctgactttccctgaggactgacgccatggtaggcactcagtggataccagtggtggaaggtggaggcaaagagcccttttataaaacaacaaggttaggaactcctctggcaggagccaagttcctccgagtttagatcacttcacataatgtgcccttgctaatgcatttgctggtttctcacgccttcctgccttttcctctccatggttactctgggaggcagagaggtgctaagcaatggaggtgtcatccggcccgcgcatctagggaacgtccttcagaggacaacttgtcaccagccgtcaaagaagagagtggctttgtggtctctgaacatctggcagcgctgcacaggaagctgagggggtgtcattaattgtgatgaaataatttaaaccatcaggaataaatgaggctgttaagctaagttcagattccatttgccatgcacatgtgtctagcagcctgtgtgcagttaaaagaaattgaattatattagctcatgagtagaagtgaaacagatactgtaaatgaaacaagttgctgtatagcgatgacatcgtgttgaaccatttcacagagttacagtttgtaggatcactgtatcaaaagtggtatattatttaatgaatttttatattataaaacattcctacggtatggagtatagtaaggaccagtggtttatgggtaggtagagaggatgtgtaggtggatgggcagaaagaagcaagccaccaggtaaaggtgcagtgaggtgggtgggaggtgttttgccaggctgaattgaggcacagtgtagctttctatagagtctggctgtgattgcaatattaggtgccctcgctctgtgtacatagtgcagcttggaggacagtttctctctgatgaccagatacgaatgttcctgtgagagcctctgacactttgggcccatccatgttgttttcttgctattaaaaacaactatcttgggcgatagaaggttactcctcaagcaagggaacatatttataaggctttgcacaatcagtgaacactgatttcgattgtaattttcaggcactaccgaaggagacatctccagtttctttacaaaggaaaaactgttgggtttggaatgtcaggacaactctgagtttttgtgcactaaatggatcaatggtgtgtaggttccaaagtatatttgtaaaataaaagccattcctttacacacaagtgaagctttcaaagttgaacttttatgtaaaaacaatcatggaaatttgaaaaaaaaaaaaaagagactgttactgtttaggtacagaaagaattttaaaaaaattactggagaggtaggtaatacctctgtsagaaaacagatacatggccaggcgcggtggctcacgcctgtaatcccagcactttgggaggtgggcggattgcctgagtcaggagctcaagagcagcctgggcaacatggtgaaaccctgtctctaataaaaaaatacagaaaattagctgggcatggtggcgtgtgcctgtaatcccagctatttggaggctgaggcacgagaattgggaggcagaggctgcagtgagccgagattgcaccactgcactccagcctgggcgacagagcaagactctgtctcaaaaaaaaaaaaaaaaaaaaaaaaaaaaagaaaaagaaagaaaacagttacaagttatggtctggaacttcggcaaatttggacaagagttgttttgctaaaaatattttatctcccttcaccccttcgtccctcccttaccttactgcctttcttattcactgtcacctgctgccttttttcttcctcctctctctccattttctcttttcctttccattattctcwctttttattttgcatcctctcatttttgttacaattgattctcatcctctaccgtcacagaaagtgaactgcaattccattttcatttataatgttggttttcctgctactagttaaaagatttatatctataattacttagtttgtaaaattataaaatttaggttacatttttacataaagttgtgtgaccattggcgaattttttgaaagaaagcaattgaaccttgattaagctttttaaaaggaatgcagaatactcattgagttatcctcttccctggaccagaatgaaattgttattagtgaaagccagctagaagtttgcagctctgggttaccctctcccttcttaactccggacacaggaggaagacattcaggttgaaacacttgtgtttcccctaacttgagacgtgtttgaagttgaatagaatgaccagtagtcaggatattgctactgtgtgtgtgtgtgtgtgtgtgtgtgtgtttgtttgagacaaagtctagctttgtcccccgggctggagtgcagtggcgcgatcttggctcactgcaacctccacctccsaggtccaagcaattctcctgcctcagcctcccgagtagctgggactacgggcattcaccaccatgtccagttaatttttgtatgtttagtagagatggagtttcaccatgttggctgggctggtctcgaactcttgatctcaagtaatctgccagcctcagccacccaaagtgctgggattacaggtgtgaggcaccatgcctggccatgtgtgtttttatctttaaattttattttaattgatggatagtatagaaagatgagttcttcagcctatctcttgacactgtcggacagattgaaggagattgtgcctgtgtattagcttttggctaatagtgaatgcattgttgttactgtgtaaattacttttactagcttgtggtggccaagcacataaaaattagacagaatttttttctgaaattttcacatatcttgaaaaattaaatattatttacctaaaaacagttttataatttttccctaaaataaggaatctaaagaacacagaaaattttggaacaakataactatgtttttctttttatctttcttaattcgccttctgtaatacatctgtttctcaaaacaaataagaaaatgataatatcttcaacagtgacttgtgctttctttcagaagtgtgttagtgaatatttacagggaaaaaaacagttcatgaacttgctttttttttctcctcccttgttctcacttgggtgtggtgtgaactggatgcccctacatattttcgagaccttctttattccgctgctgcggttaacttagcatctgcttaggcagcattaaatttgtgaattcctgtgtctcaggttctatatgtcagatacattgtggattaagtaaactttggttgaatggcctgagaacytaactacatttctgcattctctctcaataccaatatttctgtgagagaatgttacctagattttggacaaccaacttaacatacactgttcatgttggcaactgccagtattaatgtaagaagtattaaataagatgcttatgtttatgtatgttcctaagccatagcagcttcatagaagaaggaaaacatagagaaaaacaaaatgttttaattcttggcttaaatagaattacgcgtttgtgtttgggtgtgtgcctatgcatggattttgtatgtacatacacacatgtcatatatatgtatatatccatatttttatataagaatagctagtgatgttctgttcaaatattttgttggagttagtcataattaataatttaagagcacacattccctcctacatgtacacaaaagaaaaagaaaaattcttttgtttgagtagataatggaatctcaatttgtgttttcaattctttaggatcagtattttttcatgttttcgaaattaaaagctggaattgattgattgattgagacagagtctcgctttgtcacccaggctggagcgcagtggtgaaatcttggctcactgcaatctctgcctcccgggttcaagagattctcctgcctcagcctcctgagtagctgggattacaggcgtgcaccaccacacccagctaatttttgtattttaaaatacaaaatttcacatgggtagctgagattcaccatgttggccaggctggtctcaaactcctgacctcaagtgatcgatctgcctcggcttcccttgtgagccaccgagcccggccaaagctggaaattacttaagttatgtaacctaatatctttacagatttggaaactaaggtagagaacttttaagacttaaccaaaatcacgtagttagtaacacattcttcattgctgatgtgtcagagtctttaagatacaatttactaggttttattcctttagagtttaacaagtattatatagcagtattctaaattttttcttttcttcgaaaattaggccaggcacagtggctcatgcctttaatcccagcattttggaaggtgggcgaggtgggcctatcacttgagcccaggagttcaagaccagtgtgggcaacatggcaaaaggctggttctactaaaaataaaaatacaaaaattagctgggtgtggtgacatgtgcttgtagtcccagctattctgaaggctgaggcgggagcatcacttgagcccggaggcagaggttgtggtgagtcgatatcacattacgacagcaccactgaactccagcctgggtgacacagtgagacttaaaaaaaaaaaaattaactcaatttagtccttgttttgtataatccaagtggacttaaataaaggatgtaaatatcagttagacctcaggaaaggtgagggaaaggtgaagaagaatgcaaggaggctacatttttaggcattgtagtagttgtcttggcaggtttccctgtgaaaatagcagatcttcctgcactgtgtgtgaaatgtgctagcttgatgctaagaaatggaatatttgggtcttgcttttattttttcccttctacttttctagtgtcagttagtttagaatttgggtgttgctcaaatgccgattcttaaactttaagaatcggaaatattcccatctaataatctgtttcaaaactgccattatagacaactgaacagtggaattgcccaagaacataaaagtgtaaatctctactgttcattgagtgccagtggagagcttcaaggagcatatacgcagaccaagtccccttgaaatcaatgttatataaaccatctttaagtgccttcttgggtatggtactatgtttacatcttataagaagtgagctgaatagatagggtcgttgccctctaggagtttataatcaaaaacagatgatatagctgatatctgttattgtcttaaagtcctacaaataaacatcgattagatccataaataaaagtttgatatcaaagacaagtaaaaacctttttgcttgcctgattaaataagtaaacacacatcttcttccctacactgagactatccatgcgagttgtaaaatgactaaactaaaataatcatgacaccaggatactcctttagattgttattttttttaggggttttaaaagagtgctgacattaatatgatgtcactgatggtgtattgtaagtgggtctggattcagggatgtttttgtctttctggctaggaaattgggatgagattaattttcctccatctctggaatttctttatttctaactattcaatggtagtacttgctgttgtaaaccagcattctagaggacagtttaaaaattttatccagaccctcactgtgattagaaatcatatgtttttaaaattagctgtcccctaagcctctgggaactgcactaaaacaaagatgaggatatgaaattgatgctgtaatgagatgaacttatatatctaaaaggctttgagtggaatattagtccgaaaaggcaggttcagaactttggaatgaacagttctagttgtacgtttgagtaaagctataacaactaaaattaaatgtaaaatgttggcaagagagataggtattgagtttgataaaatattttctttctgcatgcttcaattttagtgcaaggtattataacagtcacttcattttttaagtgtaggggaactaaaacagcaacgctggggagactaaacatgaacccgtctcagagttcaacacattaaaaaaatggctgtccctactgcagtgtaggtgtctggctgtgtaaattaaagcatgtggatgcagaaattaattagaacagtcaaagatataaatcaaacttatttggtacactgatgaaatgatcattgtttatgagattatcttgttatttaatctattctgtataaacctggctggttagccttatgaagtaataatacaattaatgtgatgtgatgatggtatactttttctcggtacaggcctgatcctgcagatctttcttgactgggacttgtgtatatagaagaccataagaactggaaattttaattagcaagaatgcctccacctctcagttgtatgtgtgtgtgtgtgtgtgtgttttttttttttttaaatctcagaatgttccctgggagttttattctttttgaaycattcatctactcaccctagaagaatgaagtgctttcagatgttatttcctcaaaactgtgcaaagtttattataagagctacctgctgtcttccagctatactgtgctatgctactgggtctcaaataaagagaaagttttacttataaatgaaaccattaggaatttcttgaataaacaaaggtttttctccctttgatatgcaraggaattttgtttgtaattatagtcatataagtctatgtctaatacatgcaagcatcattcattatcttttatatgagaatgcactcctgtcacctaaagagcagaaaacagatacactaagacaaaacaaaataaaaaacccccccaaaactaaacagggattccagctcgtaggaaaattgtcagcgtcattatttactatttgattcaggatttttgcttcgtgttgtttaccctgctttctttccttgtctctattcctttgactccgtgaagttggtttctttatgtccccaaatgagaactttgtttttggaaagttaaagatgtagattttatttaccttgctcttagattgcttcactactccatggtgttctcttactctttagcagaatttggcgacagtgtccaataaagtaactaataaattgtaggaaaaaaatgtcacatgtaatctctcttgtaaaaccttttatgaatggagcctgatggctggagtttgttgttcctacttaatctcataaagagaatggatttagaacaatgttcttttaggattatgcatagggtgattatgagtgtgatacgataaaatcgtaattatgatttcattttgtcctgaacagttaggattttttgctctggattggtctatagttgatgttaaacattttctttttttttgagatggatcttgctctgtcgcccaggctggagtgcagtggcacgatctctgctcactgcaaactctgcctcccgggttcacgccattctcctgcctcagcctcctgagtagctggggctacaggtgcccgccaccatgcccagctaattttttgtatttttagtagagacggggtttcaccgtgttagccaggaccgtctggatctcctgacctcgtgatccgcccgcctcggcctcccaaagtgctgggattacaggcatgagccaccgcgtccggccaatgttaaamattttcaatttgacatgtcagatatttggatgtattattttaaagatcttttgtctcatcttcataggagtgccccagatctccctgtttcacctgtgattatctgtgatgccatagcaacaccccttgctgttagcagagtatgtattatttctgtggttttgtgaatcagtaaccactaaaagatttgtgaccaatcacccatgaatgatttgttcagagtttgcttaatgagagaaactgtggcataagacaaccttacaatgtatgtacaggtatattttcactgttacacttggctctgttctagattatgcaacttgcattttcagtcattgttgagctatgtagatatatttggtggagtttgggtctgttttctgtaagcctttcagaacagtacttgtcaaaccagtgttaaaaccaggatctgctgactggagttcaggcatatggtgaaacaagatgccttctrggttaaagaggtgactaacggtgggccaactgctctcctttacttgccaaccagagcctgcttctcaaatctcatgggaggcaggcttcaatgagctgagtaaacagtatgagctgtatgtccagtttctattttggaagtgatgcataggaccagagctgatgagaaactctgggatatagtctaattttctgtcaaacagaacccctsgtggtaaaggtaaaggctgatgttggggtaaaggcactgtacagagattstctcctgagtttggcttttccatgggctgcctgttcttttggatgtgaaaggctagatgtgttctccagcctttctgcacttccctagctcttttctttttaccacttatcctttcctttttcctgtgagttatttcattgcttcaccttttcgttcattttgatgcaatcacatattattttatccatacattttaggatgtcttttaggaggagccgatgtgatgtgggcccttatgtaaacagttgagagagtgacttgcatgaaggcattttgtttagggaggatcctagagtagaaatgaaggaccagggaaaaccaacacaaagatgaattactgagatgatcagtgccacaactgatgggttctcattctctctgaggccttctgaggaaatatttaaccattggctctcatttccattgatccgtatggccgtctgagcatgaacttcccacactttttggcttgtgcatgtgcgtcttcaggttgtcaggaagcatgactcaggtggggcaagctcaggggaaggtgctaattagcgatcagtgggggaagttggttcatgcggctagaataagagacgtgacagagaggatttttaagtagtccaaggaacccatacattgtttttggttttggtctaaaagcatagagagctctggagtatttgctgttctgaatttctcttttcttgcatttattgtagtgtacttctcaggtgagttcacgtatacctttaccatcactttgttacttgaagggattgtttgcatttccttcaataattttatcttacctcttggaacattggtcattcaccattaggaccagaatgatctagaataggtaacgcatttcccttttattaacacaagtctactgctttatccacactaaagcataaaacagttatatcctatgtccttgattttggagtgggagaaagttgtcagctattcagccactcttaatattcttcttaaattggctggatacagtggctcatgcttgtaatcccagcactttgggaggcagaggtgggaagatgacttgagcccagaagttcaagggaacagtgaactatgatcgcgccctgaattccagcctgggtgacagagtgagaccttgtctctaatatattttatttatgtttatattctatatrtatattctaaatagaggtatttagcagaattctgccacagggtaatttggctctttcagatgttcaaaagtagacccaaatctttactggcattttccaatggtcctaggaacccgaataggtatagttaatgcttctattaaaccatgacatatgatagatcagtgaagatttagagaagagtgtaaggaaaaactaaaaatagtacccagtgggattgaaacattatgcatgctttcagtacttatttgatagaagaatctgtttcagaaaccaacttctaacaaaagcagttgaattacacaattattatatgtttttaaattgtagttacatatttttattggagtcatggtccacaaattataaggttaactattatcatgkatcatgcagaggagatgaaaccacatcaaagtttcctaccgtccactctaagctgcagttcaagtttctaacacgtttttgcttcttataagtggatgagctgatcttcatttctttttcygtggtatctgatttctttctggttgtttctgtttaaagaaatatgtactgcttataggaatgataatttaagcagttagagaagaagtagttctctatttgtgcaggtagatggaaggaacaccttgccaatgcataacatagtatctcacatactttaattccctcaataagttattgtattttaaaggtaaaagaccaggacagagaaacaacagagggcctgattctactaagaatttataactgttataagatcctcaaccaattggaagttgctgtctagtgagatgtgcatctcatttgctattttgctccaattcacaatagccagtactgtttcaataaaggaaaaatttagtttactctgctagaactttctcttgatctgagggagttggatagttggattatttgaggttaacataccttagcacctttagggcaaaatgtaacctgggggtgtgatagaatattccatctagaggataaggagttttagattataaggaaaattactcccttagtgggctcttcaggaacaattttttatcttgtggttggtcactttcaatatatggcagttgctttccattatattctcaggctccaatcaatacgtacaatattatgcaacttatagttacattataaccaaaatatgtcaaatgtggtttctgagtggctgatttacagtaagtcttcctcagtccccaaagtgggtattatgactaatttaaactttcatacaccaaagcaatttttttcatatgaaaatcgtgtgtcttgaggggggtggggtctgtagagacagaaggaacagtaaagcactgcgtcaacttactcacatacagattgatccattgtcatctcctttgcatctcatggattgttgtgaattatttgctcaccctgggagagacgtgctctgaattataataatttaaaatctgtgaatctattaaaaccgtatttgtagctctaaaaaaattgatattcactgggcagtttgcccaacaagagaaagtcaaagagattacacacttaccctaggtaacagcaaccaccctgccaattcttcctttgaaagaatacagcagacccaaattatacatctgtggataaggggagacaagaaaagaactcaatatatcaaaatcagaaagtaaattccacaataatggctacaataatgtttcaagatggtattttagcataggcctagtcattgaactaatcatagcttagaggggtttaaaattgtttaaagtacatcctgacgttgttaagtatgtttaccactctcacttgaaatcagaatattcactcatgtatggtataccctgagatcatatcggagaatgacaatgactgcattgtttggtggaaaaagtgaggcccagagtgtcacaatggttttctgatttctcatctaaaggtcttttcataggatacttaattaacacatcgagctcccgcggtatgccaggggctggcagtgtaaagatgcataagaagaagctaggtgcagtggtttgtgactatagtctcagctgctcaggaggctgaggcaggaggatctcttccagactagcctgggcaacacagtgaggtctcccagtgaggtctccttcctttagaagaaaaacaaggtgcataaaaataagctggtctttccatgggagcttcgctaaatgtgatcttcccgaaggacaggtttagtcctgttcatctttcaggtctcagcacttaccattgcgtctggcacttagtaggaacgtacctaataattgcttgatgtgataaatgccaatctttgtgccatggaatcacagaggacaggaaaaccaaggaagaatttaaaaaggggatggagttttagttgagttcttgaatagtgttttggggtgcaaatagagtggagaataggtaagcccacctaaaagatgctctccttgagggcaagaataaagttgtgttgatctttgtatatccttgtatccagcatagtgccccatacatagtaggtcctcaaaacatatgctatatttttttctgtatataaacttgaactatacctttcttaactttcatattacaaatgtggtaaatgttttggtttcaaaacatttcttgtttgattatatctaaataatttatgctagaaagaaaatgctgtcaaaaggctatctcatttaatttaattatgtcaagaagaagttggaagtattatttgctcagataatcctcactttctgataattggaaatcgactttcttggactgttaaggatgaccacctcaaattactacatttggcactaagtggagagtcccactgttaattttcaattaactacaatgttgattatcttgtcagtaacaatgctttagttgtttttaccacctaatctcagttgaggagatcatggaactaacaagagcttgattgtggattttattcttgtataggccggttaaatttgcaaaaggaaaaactccttgaataaacatagacagcactccaaattttggttagctgttaaataaatggatgctattattacaaaagaggacttggctaaagaaggtagatcatcacatctcattaccatttggataaacaaccaaaacatgtattctagtgacagtacttttataacatcggcktgtgtgygtgtgtgcktgtgtgtgtgtgtgtgtgtgtgtgtgtatgtgtatctgagtgatgtgtgcttttctgaaattagtatttagctttttagtggaaataggaagcctacagtgttctttattggttttaaattttttcagagtgtaatatcactctggtactagttcataactatttgaatttatctgtgaattttttaactgtagactgaagcagaaaaaaaatcaaaatatgtcaggcaaacaaaatgttcaggttgaataatgctaactacatttaagtgaattagcacttcctcaaaacatgaaaaatttgttaagaatatattgcttcaaaacgtgtgtgcatctggctttgtatagattagtgtagactacatttcagatgggcggcaaaacagatatatttgctgtttagataccatgtttaaactaggaaaacaggtctgctggatgtgtgttgaagtgtttagctccagaatcacccagtgagtctcagtaatgaaagctgacctgtggtttcttgaaagatgtttttacttaattgccaagatagcttagatgttgtttactgtgttgtcagttgcattgtagcatttagagaattgatagtgttggtcggtaacctttctgtgcgtgtgtttttaagctgttgtttctctcttttaatgaagcacgttaaatatctttaatgccacctacctgctttattggaggattcatgatgttgagaaaaaccaaataaaatttctatatagagttataggagagaacatttgcagcggacatagcagagatcaagggaatgccaacattaccagagtgaagaaaacagagaactgaagatgagaccaaaatcagatagatagagatgccctctggcaaactatagctctggaggaaagtatgttagaaggtagctcttcatagaaaaaaaaatgtattttatgggaaaaatattctaaaaaacccacatgatctcctatttattgaaatatgaattcaaattttatacaagaaataactcattgaaagtagttgtcaatgaagtagttattaaaattactgtgttttaacaaataaatatctgcattgaaatggcacaaggaaaaaaatggggataatttaccagataaaattttaaagatagtttctttaatatttttaatcctggaagtccttattgcaagtatgactgaaaaactaatcatggaaatatgtgtttttttcaattagttacagatgatttactaggagaggttcaacagktaggaagtatttgtttacagatcgtttaggattataatttttaagaaatgaaatgcctacttagtaaggatcatgtttgtaatgatactaactccagagtgcctagatccgtgcagttccagggcttggtttcagaggaaataaattttgttctgattagaaaattaacttgcattatgcattttcatatctctgaatcagtcttgactataaattcatgatgctagtcaaatattaaacacactttcatgcttagtagcataaaatagtgtcaaatggtaaaataagatggtaagaactgctcaacctcaaagaatttacaggtctagtttaggaaatttgctgtgatttctctctctctctttctttctttctttctttctttctttctttctttctttctttctttctttcttttctttcctttctttcctttcttttctctctttctctctctctctctctctctttttttttttttttttgagacagaggttcactcttattgcccaggctggagtacagtggcacggtcttagcttactgcaacctccacctcctaggttcaagcagttctcctgcctcagcctctggagtagctgggattacaggcatgcaccaccatgcctggctaattttttctatttttagtagaaacaggatttcaccttgtttttcaggctggtctcaaactcctgacctcaggtgatccacccgtcttggacttccaaagtgctgggattacaggcgtgagccactgcacccggctgaaagttgctatgatttctaaggtacttccttaatttataaagaagttacaggtctagtttaggatagttgctgtgatatctaaggcacttccctgcttctgccatgaagcattgtgctaatgctgcctataacctgcctattctgaatttaagattcactatattctgaatctaagaataggcagggtgtaggcagcatcagcacaatgcttatggtataggtgaagcattctggtgctcacatttcacgtggacatgaattctgagagtttattccagagcagaacagcgttttcagctgaggacaacaaaaccttctccttattgggtctcttgtagatcccctgtttttttttgtttttgtttttttttgttttttttgtttttgtttttttcctgaatacccttattgcccctacttttattttcctttcatttttatgaatctgtcattgatgagcatcctacccaacaccagaccagattaggatacaggcagtttacaggaatttttaccgcatagaaaccctgaagttgtagttgcttcctacaaggccagaaattctcttcagtgtccccagacagtctcagctaaaaggagagaggccttgagcaaaaacttggtataggcttatgagtcaagaccatggttggatgcaattgtagtggaatttctctggataggaaagttctggacccatgaacttgtggttgggaggggtagtgagagtcagacattctgggcaaagtgcagcattagggaagatttagcatgcctctgagcaacaaaatatgtagatgccagccagggaaggactggcgtggaaaggagggacaaccttgggactctgaagtatgtttaggaaatcaataacgtggagcattccctatcaaattcagtgtttgagatgaaatgaatactgatgtcacaagtccagagtgtcatttttttgtcgtggtatttccctttacattgggaaacaggaggaataaaggcctattatttcgagaagcaggataaaggtggaatcgaggatcaatggagggttaagttttcataactaatctctaataataatggcacgttagttgggttagcccttttcttgccaggggcttacctcctcccttgttttggaccacacatttaatatagcaagactttataggtagactctaggcaagtttctataggtttaacagtacatttattcaatgaggaaattacttattaaggcaaaaatttatttggaaaaatctgttttcatgtgtctgctttcagatttttttctttcttattaagtaaggaaataatattcacacctgactctttaaaattttgttcagtggattagatatcccagcaggcacatttgaattgacgctattggacattattactctttctgagatttttgaaatgctcttttgtgttttttacctgtgtaaagtcaccggaatgcagttacagaaatacataattttagagcaaatattctaagaactagaatattagtaccaagaatatcataatattagagatcatgaagttcagtcccttctttttatagtatagtccagaatcacagagctggaatacataaccttcttggtaaattagaaagaactcatatttgtattagtttgaaaacagagtgggccaggcatggtagctcacgcctgtaatcccagcactttgggaggctgaggccagtggatcatgaggttaggagtttgagacgagccccaagatggtgaaaccctgtctctactaaaaatacaaaaattagccagggacggtggcgggcgcctgtaatcagcccagctactcgggcggctgaggcaggagaatggcttgaacccgggaggtggaggttgcagtgagccgggattgcgccactgcactctagcctgggcaacagggcaagactccgtctccaaaaaaaaaaaaaaaaaaaaaaaaaaaagagtaaacagagtggagtgcctatggatcactggaattgagcgagcgagtaggggaggtgttagggatgttattgatgaaatcacttggctgtatagtgaagcagatgagataatcagaaagggtataaccagaatagactgtaacctccttgagggcagatcataagctttcctttttctattgctactactgtttaaggcacttactgcaggtaatagcaactttaaaagcatttgtttaaaattataataaaaacacattgatttagtaaccttttaagaatggtgtttctagagaaggaagcagtagaaagtctccctgattttatgccatcaaatattcattcctttttctgttttaggtaggatattttctcttgttttattttattttttgagacagtctcactctgtcacccaggctggagtgcagtggcctgatctcagctcactgcaacctccacctcctgggtttaaatgattctcctgcctcagcctcctgagtagctgagactacaggcatgcaccaccatgttcagctaatttttgtatgtttagtggagacgaggtttcaccatattggccaggctggycttgaactcttgacctcaggtgatgcacctgccttggtctcccaaagtgctggaattacagacatgagccactacgctcagcccgggtattttctcttgtgatgagttaaaatctggccaattacctctgaccatgcctcattgtaatcagtatttattttaaggtatgactcctagaatttaaataaagtattggcgatgtggtgtaattagtgtagagtagaatgagaccttgccctgttgtacacttcataggtttgttgtgtttacttttttgagccatatgctctagaatgttttaaatatgtagcatcacatcatctaccatttagaggaccagaatatctattctgagtacacaaagtagactcatgaactaatatgtgaatgttttcccctctgaaggagaaatattgggagtttaacagcttgagtagaaatttccttttgaatggttaaccaaactggtatcacttttaaggtcctaaatcccaatctgtttttctagggaaacatgtkggcagctgttcgaaataactagtggtttaaagacaattgttagtgtggttttctacacacttaaagcttagacctgctctgtyacttgtctttgatgctaaggagttgtctaagtagttgagttaaataatttcagattagttttatgcattaaatggtttggttttatttttaaaaacctctgttattatttaaytctgtagtagacatttacaaaataatttttcttatgtgtatttacatggacattaaaaacatcttaagaaattaattttattgatgtttttaagttcaggaatgttctcacaacaaatcacacacacacaacacatgtagtctttagaaatagacatgaaaataagatcattagatgttcatgcctgcttaataggagtctccaaagcaatagaaatattaatatattggaactctgatggagggaatccctgagtgcagagaggaaactgataacactaaactttaatggcctcggaaattatgagacagaggactccagagtcttctataatacataccttagctttgttttcatctctggggaactaacatacagctatatagtatactgatcacttccccatatactattgaagtcagtctccaagtaaacttgtgatttagtaagggcaggtggtacatgctgttttataaatgaggaaactggttgagagagtttatgtggtttatccaagtaagttcaaacagttaataaggactagctatagtaagacttaaaacctagggtttttttgttagaagatgagtatattacccattacatctgttcttctgatgatacaggaatgaggtaagggctcacaccttctttctctctaggaatgaagaaaggaacccctaggttgtaaaatcaattttaccacatgacgttgggaaggttaattgcttttcttgagcctcagtttccttacatttaaaatgggaataatggtatatacactttagaatatttaggattaagttagatcatctacagtcatccttcagtatctgtagagaattggttccaggacctccctcaaataccaaaatttgaggacggtttagttccttataaatggcattactatgcatataatctatgtccatcctcccgtacacttgaaatcatctctatattacttacaatacatagtataatataaaatgtaaatactatgtaaataattggtatactgtattgatttttaaattactattatttttattgttgtgttgttatttttttttcctgagtattttcaatctgcagttggttgaattcatggatgcagaacccacagatacagagggcctattgtatagcagtcatattggctggcacattctgtggaaacttagtttttccccctttttgtcctttctctttttctgctatccaataaagtttggctttgtttgtgaaggctaattatagtccgtgctattggataccttaggcagcttatgttctgctaaagagtaggaggtgcacacataaacaaggaactaatacaaagtggtatgtattttttttttttttttgagatggactttcgctcttatggcccagtctggagtgcagtggcacgatctcagctcactgcaacttctgcctcccaggttcaagctattctccttcctcagcctccctagtagctgggattacaggcgtgtgccaccacgcctggttaattttgtatttttagtagagacagagtttctccatgttggacaggctggtcttgaactgccaacctcaggtgatccgcccgactcggcctcccgaagtgctgggattacaggcttgagccaccgcgcccggccccaaagatgtgtaattttcaaggggaagtccaagacattgtgggcaagggatgcaaagtgctagtaaatagtacaattggagaacaactaattatggggtccctagtgtgagtaaaacttatttgggggtgagatgttagatttgtaaaatattttgcagggaataatttggctgaatacagatattaactgaacatataattctgtttcaggcatctatttggttgctggaggtacagtgtaacaragtcctttccccttggagattatattctagtggagaagacaaatagtaaagaacatataaratagggagtataataagggctatgaagaaaaaagcagagaataaggggatgggaagtgaggctagagaggagcctgttattttacatcgtgtggccaagaaaagcaacgctgaggagatgacagttgagcagagaactgaataaaatgagagagcaagccctgcacagatcaagggaagaatattctagcagagagaacaacaatgacaaagaccctgatgcagaaacaagcttggtaatttttttttttttttttttgagacggagtctcgctctgtcaccgggctggagtgcagtggtgcaatctcggctaacttcaatttccgcctcctgggttcaagcgattctcctgcctcagcctcccgagtagctgggattacaggcatgcaccaccacacacagctaatttttgtgtttttagtagagatggggtttcaccatgttggccaggatggtctcaatctcctgacctcctgatctgcccacctcggcctcccaaagtgctgtgattacgcgtgagccactgtgcccgccgcaagcttgggattttgagaagcagcgtggttgccagtgaacaggggtcctgaaattgcagaagggcacratgaaacggagagcccttttacatggcggtacaatagaatttgactgtaatactattgtcagggccctctgcattaagtcagtgcacgtgtgtgcattcacatgcccccccccgccatccatctgccatttacccacacctgtccatctatccatccattcagccattcagcaaatatttattgagtacctctcttaagttagccactgttctaggacctagctctcaaatgaattcatgcttaagtttaatcacattcaaaaaaagagacagttgcgatgatcaatggtttgtgtatcggcgtaatgtatttttctgatcctagttgatgattttaagacaatgtaaactgtcaccttaaaatctaatgtgtccttcagccattgctttttagagggaaaagagtgtaagagaaaaaagttgggtggggggtgtgggcataagaaagagtgccttcaacatctgggtaaagagagcactggttatttggtagctggattgtctgttctgggatagttggtaaattagctgtgaggcaaagtacagtctttccttaagagacagaccaagttgtttattgatgctggggaggaaaagggctgggcacatgcttataagacctatgatctttcccagaatttggaaggataagagaattgttaagaatttgacattggaactgttccctctaattgtggcttagaccatttgatgggaaaaaaaatattaaggaatccaggaggtgatatgctgaacaatatggggactattcacggtgaaaacaagcatttacccaagcatttgaccagggtaatgtgtgttttagtttcaggtagtagaaactgaagtggctttgtttcacagtgrcatttaggaacattgactaaaatataccgggctgtttaaagttttgttttcttttttccccctctcccttacagtactccccctgactccaaattctccagccttatagctgtttccatgttttgagattactgcaaaaacacttaatggcacacatatgaaaatttttgtaaatgtctaaatagtttaacaatgaaaattttcactcattctacatatattactgatttggagaatttctaaattgctgcacagttttattgcaatgtagagatgtccccattcccttgcaaattagtaaattaggatctccttctacctctgagtgctatggatgccatcccttctcttgtcccgaaattccggtctattattgaacttctgtttattctacttagggggttgattcctttaaaagtgtattattacatatattaaacataagaattttagaaaatcagagattacaaaaagcaggaacatcatctgtaaccctaactggcctgccctaagatcaacacacctatgtatcccaagtagcccccacaaattatgcttcaggtgacatcatagtatgatatataatattgatatgatgtaatgtcattgatgcatttgtgtatttgtatgtctgatattatgaacagccttctatcatctttaagagtctgcacattattccattatatggataaaacagttctcctagagtttatttctaattctttcctattattaatacacgataagcctctttctggtccaagcacattcccttcagcctactgatggccaagtcacacctctgtttccatctggcagtccctttctctcaacttccattcagaactcagcctttagaaagaggacataaaaaatttgtttcctcttctgccttagcctcccacagtctagcttctgtttcttgtcttctccacaacaacagctctggagcgctgacctctcatctgaagcatattgtagaagcgtttctgktttttttacttatttctctgtgacatttgatgccactgaccacttttgctccacctttaagtctttggattttctaactcttcattgttccagttcaatctttatttttctgactccttgttttctagttcatctttgtatccttttaaacataaatcttttccaggtattctatactgggttttcacctgcacacttggggtagttgtactcattcccattattttaaatttctgcagatttgatgttaactgcccacctgtttctccaacccaggcttctctgtagggctccatatttgtatggagctctctcggttgatccacttcaaaactaagccagtcagaagctaaatttttagtgtctacccttgccccactatagtcagcctccaccgttctttaaatagcatcaccatctggctagaaaccagaaagtcagcttagacttgtccttctccctagctcatacctccttccccaatttkaaatggcaactgacttctgtttccccattcattattctgcatccccagtgcctctaatcttgtaaagattccctctgtgaggagttgttttgaatgggtataaatttagttatataagatgaataagtcccagagatctgctgtacaacatattgcctacagttaacaatatgatattgtgcatctagaaatttgttaagacagtacttctcatgttaagcrttcataccacaaaacaaaaacaaataaaaccctraaggtccacatggaagcttttggagatgatgaatatgtttattattctggttgtggtgatggtagyatgaatgcatacatatatccaaactcaccaaattgtagacattaattttgtgtggttttttgtataccagttatacctcagcaaatcttgaggtgagggagccttccattatttcttgacttcagactccactttcaacattcttgaggctgtttctcctactggtactgtgaattctgtctctccccacccccgaatcctaccatcagttctcctggtgcatcgaatgagacagaaactcctcagcatgggtggccccattgtcgtccctttgtcctttcttgtaaccacttttcttgtctcctgcttttacgggtgagtagagttctccctttcctccattctcgaggtagaattaagcacattctcttctgtgttccctgagcacctacacacagggttactcagccttggaactggtaacattttgtgttggataattctttgtgctacactgtgggatattcagcagcttcttgacctctactcatagctaccagtaactgtcctccacactcagttgtgacaaccaaaagtgtctccagacattcccagtgtttcctgggtgacaaacctcccctattaagaacactgccttgtatgtgcctcttctgaagtacttacaatgcgtggcgaatatgtccacacgtgtcyatcttcattctgtcagaggtcagtacatctgtggcttctagaacagtactgagatcagagtggcccccagtcagcacgtgttctttgctgcctgactgtgcatgccaggacagtcgttcgctgctgctctagacaaatgagaaaggaaagtcagcaattgtggagaattttgccatttggaacagtttggtagtttgataaaaggctttgctttgtaataagtgaattcaaggaaaatattctataataggcacgtgagggaagttgtataatatcttttgttagaattatttcaaaaagagactcgattttttaaaagtctgattcattcatttaattaatttgtcagtaatgcttgaattttgttttgtgctagggactttttttattcctggatgaaatagtcctgcctttttatggccttttagacttttcagatagatagtcaaggaggaactgtaatacagtgagataaaataagtcactgcaggggagatttccaagatagttacctgagtctcatactgtcggcagatgcggcctgcaggtgtgtataggggcaaattccaagtaatcttaatacattgatgctttgtaggatttagcaataagcactgtccccccatatttgcttttattcatctttattttagtgaatttggagaatttgtgttttaagatagtggcttaaaattagcatggtcatgaagcatttaatatttcctttatgctgtatcgtaatgattttccctcccccagttttttcctcctttacttgaatttctgtaatatgaagcataatgtggcaaggattctgatctcgtggcctagtctgtctgcagaggtgtatgtgagtgagaccccttttaatcattcgtataatgattggtggctccctgttgttaaaccacagttattgatctatcattgctgaagtacatggctgaaggaactggtgctgtcaggcattgattgactaggaaggaagtgtagagctattctaactcacttttattttcatcagcaacagttacagtagagacttgtgcaagacctccatgatggaacgtcatttttcctgcattaagaggtgtctgatgtgactgaaattgctgggataactcaaactgctgcatttaaaatatttagaacagaatacactgtscaaaaccttcttatctgacttggctaatggttcaggctctggaaaataaatttgggggcatgggggatgggtaaaaaagaacagatctagtataaaattgttccaaagcaaattgagcaacctatatgttaatattttactgaagaagtatatctacacaaattaactcagacaaaacaagtgtgtttttgtgtaagttaaattgtttaatggctgttcaaataattaagttcaagtcataattaatagctgtcttttggtactgttgttatgttttggtctgtttcaggaggatttgggacctgcatgcgcaaatattttagataaggatataaactgaagatagtaaaggtaattattaaaagtgcctctctttcattagcacaacttacgtacattttaacatctgagatgagcattgtttattttaatggactctttaataatgcttatgttatgccctgaactctagttagaatgaaaatgagcaagaacaacaaaaataaatggtgttggggttcggcagaggaaagatgggaggagtgcattaagagagtgaaaccaaaagagaggacaaaaaatacaatttctactgtagttgcctaagagcctgtgcttttgtccctctctctgaatgttttatttttgctataattacagcatcttgcctgcactttgtccctctgatcctttgttaaagcccagatcactctgtgcagactgcgcttgtaggtgtgatttattgagtgacaagtagctgtagggtagaacacccgcctctgtacctgagtaaagtattagacatcacagagctggggcaggcaggaggggggccgaggaaggagtgggggaggcgaaaagcaaagagcagtaacacagcagctcctggatacagatcagacaagaggttctgccacaaatcacctagaaacatgtcagacgctgcatgtttgttgttttacactgagggcacagccgtagtccaaaagtattgattcttttctttgtacagagacagagactgtcagacctagcaggctgaccttggtatggtgcagacaactattccccaccctgccgaccagatgaaccccacaggagcagcctaggcaagatatgccaatgtccacttcacaggcacagagagaaaccgatgcctgctgaaacggctccttctgtttcccaaacacttcccccgccaggcccccagagtgctccttgtgacagaaaattggaggcaggattcttggagggagcgtgtgtgcttttttgtgtgtgtcttaaaacacacaaaaagaagccctttttatttcatttgtccgtgagataaactgaaggatgtctgggcaatggtgtatatgtgtgcattttgtatttaaggcggcaagaggagatagtttattttctgtttgtacatatcgaaggggagatttctgtgtgtgggcacttacatttgtgagtgcgtgtgtttcccctcttctctatttcaaaagctttggtgagatggggaagagtaatcaactgtcacacttaattgatctgcagttattttaaaagttgtttaacagtaaaactacacagacccatttgtccatatgaatctgcaggtctctttatagtcttaaaattcactgtactcttaagtcattttgcagcatttaaaaaattcatttattctgaaaatcaggtaattttaaactaaaaatactagtttgtaatttggagatcatctaatataaacagaaacatataaccgccaacattttgaaatcaagagttcaaaacttgatcccgtaaaccattagggagtagggcccacagggtgcccttgaggaagtataccctatctcctgttgggcttggtgtgtcaagacttcggtttgccagaaatgcttgcctccaagtagaaggtgtttcagttactctttgctgaagctgagtgttttattttgactaacaataacagggaggatgcctttctccctttcacttttaggaatgttgttgcatgcacaacttctgtccataagattgagctgtccatgaggaaaaactccagtagatttcagatttgcccgaaggaaaatatgaggcacactgatggggaagaaaagtgatgatatcatgtgcacttagggtgtaaaaacctctcctttaaaaacgaggtttctctttttcaagtaaaataatgcagacaggttcaatgtgtgtaatactatattacatttgtataattcactttaaatcttttattaaagtgaatttttcaaaaagtagaccactgaagataaaaataacaagtaaggcattcactttcgtgaaaagccccattattttctacatctccattttcacattcatcctatttgtttaagtgactggtttggcaacctaaaagaaaacccaatggttaaaaaaaaacatttgttttatagttagtttttacttgtttttatagtatgagatctctgtgtagtattgagttttgcagactcctgagagaaaaaaaattctaataaaagtgctattatctgaaaacaatgactcaattaattattttggtttcttatgttgattctaaatatttcttgtttctctttgttgggtctttatgtctcatccaaaacagatttacattttgaggttagaaacagctgaacaagtctgcctttgggtattaacaaaataagcaaactatttaggatatatcaatgtctttacaaaaggatattccacttataaaatgggagctgaggaacacatatgctgtgtaagaaataccatctaagaaaaataatgcatagaatagattaggaatggtttaagatctgaacactcaggattggtatttcttaacactctattttttattttaatatatacatgctaatcgtctttctctcttctccgtatatgttatagtcacttgatttactactgaaattatattgcttttgaaagtgtcagttgagttatcccttgccttgttagtatcatgtttgatttcttggacagagacataaatcactatctcatatgcaggtcttttgaagacgcacccaaggtttattgccagtaacagactagtggccttatgtggactttccatgaataaaacagattgatgagccattttatagcatcgcaagctgtattataaatacatcacccttttcagtaatttaacgtgaggaacagcctaatgagctcccagccatgatcagccagagctgggagttttgtttaacttctaggacaagtgactggtggagggtaagaaacccaaaccctgtattgttttccccagttctgtgacaaaatcttgtaatatgaatcatttgaagtaatagtaaagtaaagatgcatttagaatctgtcagagtaataaagggaaatgtaaagtgggtctgattttgcttatagctgaaatctaaggttaagatgataggctttttaagttacttgtttttcttttactgattgaagtcatcaattgaataaacagattctcattttgaaatatacatgatgtaatatctacctgatagcttggaaaaggaacaggtagatatagttacaacatcgtaacggtctcttttgaaagtatagcttaagatgaccattgtttctgtattcaagccttcttttttgcatagcttacaacactttacctttattttttcattaatccttaaaatatccctgtggaataggatgagtgggtggcatcttagggtaaacagttactatcctttctggtgaggaaaccgaggcatatagaaatggttgtttttaaagagttatctgactagaaagaaaagcaagataaaattaatttttagaagtgaaaaatattttgcattacgtatagcacatgtcaatatttasaaaacttacacaaacataactttgtggacctataattttctaaaagtttggaaagtaggcgacacttaggattggaaaaggcatagctttgtgaataatttttttgctacctggaagctgcaatatattttgagctagaagcttctataagatatttcccttttctgaatgcaattgattatgctatactgcataatactacatttacctatatataatccagttaaagctgtattacrtatttatagaagtcagactttggtctgaaatgccattatttataaacacaaatcagtgagtaattagtctactgtgtaaaaaaaataaaaaaaaattttgaaataatcttttctactgtgaaaacagccaggcagtttggtggactctgttattcatatgtcagacgggaattaccttgagtgtacagggaagaatgaagaactgaaaaggctttaattttctttaaagaataggtaaaaacagaatattttaccactaaggcatgaacacatcagtgatgccctaaccagttgagctcagtcctgcctacactgagacacaatgcactttcaatttaaaaatacatctaatttaaatggaatggtcctatttatgccctctgttccttattaaaaatggtcgacaagtaaaattccgtttaagaatacctgcagacagtcaatattgttttgaattttaaagagttcctgtgtcttgtgaatgacattatgcctttaatattccgtattcagggcagagtccttttgaaaccaactgtgcatttatctccatttttgctttcttggtctttgccttcctctgccatgcacccagggttgagtgctgactgcaggtctaagcttatcagattggatgaacctcttcggtgtctccattttggaaactgtgggtgagaatttaatgttcccctagcccacactttgaaaatgcaagattacagaagatttatgaaggcctctgtgtctccatagctctgttctttggggtacctctgaagtttactactgagcgaatgatcttggcatgttagtataggctgagccaaagtttgtgctatattatttatgattctatagcattggcctctcaaacaaatgaagtttattgacgtatcatctggaacaaaattttggctaattcataatttatacatcagaaatagatgcctttctcttatagattgtgccacttgaacataaaataagattttaagattaaaagaaacagaggcctgtagaagtggcttttcaagcttgtagtcactgatggttttttaatccctaaacaacacaaaacaaaggaagacagaatatgcttttccctctcccatacttcccttttctgtctctaattgtaagctcttgtgcaccagtgctcctacttttcctctgagtttagtgatagttcataagaaaagcattaggcttatggaaagaaagatctgtcgccagtggacttgattctcccttgtgatttataagggtctgagaaagcagtcttccaggtcttctcttctcaaggactctgggaaagtcttgttcaaaactaatggttcttaaagaattggtcagctgcagaccactggcctctcaaaacactgggtggttcaggtggatagcacacactgctttgcaactccaagatgcagtgggtgtgctggggcccgtgagtccgtcctggaagacctttggaaattctgtgttagtcaggctcattctctttcacttgatgtgcgcacagatttttgtagaaatcatttgatatcccagtagtgtacaaagcatgggatgatatatgcattcacacacttacatatcaaagatacacttcttctatgtttttgtctttcatacagagtctaaggcgactaagtcgttatgctattttagcacataaagatatcattggttttaactcaaagtgattgactcaaactatatttttatcatagtttgagtacctcatacttgttcactgcccttatgtgcatggtcacctttagagggcataattctgctaaaaaactattcctaatgaattgcaaatggagatgagttaagtaagctgtgttaattatgtcatttgcaagattgtctaatgtggaattggtcaagagactggaaactgcttgtcaaatgtttctcttaactaatgtgatagtttgtggtttgcaggtgacacaatttccataacttatttgatggagcctcattaaccaccccttagttcgccttagcaaaattatgttattaaacatgtcatgataagttctgtcctcattactttgcattcggcacagtgaatagtgtttgtcttgtgacacctctcccaggtccttagtcttcgaggaagccaaaggaattccatgttcagaattgtgtttttaagctgctttccagcattacacacatctctcttgacttggctaatagaacctggatgtgttctcaatcactgctatcaccatgcagtccttatttagccctctgtcatttctcctcagagcttggtgtcctgatgttctactgtcttaaatagaaacccaaagaatctctgaaccatatagttttagttaaaaacagccaagtgtatggcagtagtaactgtgatgataattccagtagtggagcagttttcctttttcatagcatctgcctcatmtaggaaatcttcacattagcagcagagcatttatctctmtagtgaataatttttatgtttgcccatgtttgttgcttagtgctgagaaacttcatatgtctttttttaaacacacacacacacatattttattgcgtacattggtgactctctgtaattttgtcttcaaagggaccagtctcagagatactttacagtgattgccttttagtatttagtttctgtcacttaattttttctggtggtgggaattcatttttgttaatgtataaaatttttcaaaattgggagatggttgaataagattagaaatatagttcatggcagtggaatagactagctaatccacaagtgaactggaatagcatattgatctaaatgtataagatacctttattaaacctgcctaagaggatcatatttaatatttattttctagtgagcagtattgtacttactaaattgatgggaatacacatattgatgaatctcttatattttacttgaaaaattctgttgaaggctactttatcctttaacctgataaaccctctctctccctcattctcaaaaatctcatcatggttgcacttggatcaagcttcttcataaagtcattgtcatcttacacttttcccagaagcgtcaccctaggggraaaatgattgtgtaatagaaaaactctctctgcattctatgcattgaccattcattatcttccatttggctaccctttgacctcctttccctgagccacatagctaaccaggtcggcctctgtcaaagtctgtctaaggatgttattcttcctgtggtctccctttttctttctaccttctaccggcccccacccgtaccacacacattccgccaattctctgtgcagacttgacataagattccaccccaatccttgttatgtaacctaccacctacccctttttggcaagggacacccgagtcagcaagttgcaacaaagagtggagttaattggaacatgtgctgtgcccaaatctcaacaaagaagggctgatagacatcaggaaaacacaaccatatgtagatgtttgcttgaggaatatgagtgtacatgggaaatatcatctacaaccaggttgcatttaaataaaatcaaccatcattctcctctttgtcttccgacacccctttcccccacatgtaatacttttaacttgctctctcatgtctgctcatgggtgggcatggtctactaaactgacaaatgaaacagatctgtctgtgatacttcatatggggaaccttatgtaacttatgcgggggactcagctatggatgacatcccagtagaccctctatggattcccagctgttacaatatctcataccctttgtgaccttttcttctatttttgcatcccttttagaaatttaggatttttttaatttaaccccgaatttcttaaatgtgggtacaatttacacagaatgaaatagacccattttaagtgtacagtttatgagttgtgacaaaatgtgtatactcatattaaactatcgccccaaccaaagtacgtatcattttctttaccccataatgttcccttatgccttttccagttaatctcctttcccctaaggcaaccattattttgatttgtcacaatagattcattttacctgttcaagaactttatataaattggatcatacagtatgtactatgttgtgtctggctttttttgtttgtttttctcatattgttgtgtgtattagtagtttgtgtcttctttattaccaagtagtatttcactgtaaacaacagccatttaaaaaatgaatatttagacatattttatgagttgtttctatatagtggagacatcttaaaattgcagcaactcttgagtttaacaaatagttgactgtcatcagactttcacttttttactacttccctgcccaagggtgctggaattccccagctgtgggctgaatgcccatcccaaattctcaggcttctgggtattcttggttcacatcctgaacttcagaaggaatggtgacctccagttcactgagatggtttagaacatcttaaaacttttgctatcctcacttacgttgtgaaactgttttgctaactggaaggtagacgtgttgctgtgtacaagtgaggattctgaaacaatacgaaggccttttcagaaccctgtggaatgacctgaaaggaactttgtctttgagcgtctcctgatgtgtattttcgataatgtatcctgccctcagtgtttttctctgtaggttttaaaggcctcagaagtcccagaatggttctggacctgagttgctacttgagaggatcttgtaatcctgctggtctctagatacctttaggacagaagtgctgggtgattaggttaataatacttattctttattaaactatttaaccattataagcaatatgctaagaatttatgtacattaatttatatataatctaacatcctgtttatgttaatactgttattattcccacttgctagctgaggaaactaagcctaaataacttacccatggttatacaactcttgtgctgtgatgggacaaggatgtgattccagatctgacatccagtcccaccaacattctattctaagtcccacaaatactttctggacatctcctcccaagtataaaatagacagtgtggtaatgtacatgtgtttagtattgggtataaaatatccagtgtaatataattgttaagctattgaatattatgaaaagtataaaaatgtgacgtgaactggagcctctaactgcattgaattcttttcatttaagggtcttagaacatgtgaaaaggcagaaaataataattttttataaagaatagtagtaagaactgttgtgcacattttgaaggtgaagattttgagacaagattctttaacttttccacagcaatatagagttagaagaaacctagactgtctccctgtgcctcttcctctactctttcaaatcttctttttctcttatccaagccaaggttcaaggaacattattaattgttatcttttttacctgcaagtcatagacaaggactagagaaattcttgtatgtgttaagagtttacctaagagactattatgacagcagtcaggaatgatttctttaaagtatgtaaatgtagcgtcttcattatggcttagatttacaatgctgacgactttgtgaagcagagaaagttgaagagttaggggctgctttacgaagtgtactttggaacagtttctagtttctttcaaactttgaattgaaagagaaaaagcaaagtaagtacctaaatcagcactagccaaaagaaaagaaagagaaagagaaaagaaacctgcacaaggcagcagctactctccattgggaagctcatcccctccttgacagttgctgggctggctgtgcaatgtttgatatgtgctacttatttactgtctttctgtttctctcttgatgctcttagactgacactgtgttaactgtcttatgccactgattacatctttcctttcatctttgttatgactagtttaaaggataaatggtgattttctataaacacaatacataagcttaaagaaaaagatgaacattttagagaatttgggattattcagaatccctatgactataaatgacttagcatatctagaatgcaccgagttgatttatttttttctattaatagtcatcatgattagatagtaccagctttaattttaagttttgttgcctgtgaagtttattttcaatgctcaataccatccaagagagaatcttgtttaaaaattttaatcaaaacatatttaaggtgcttggaacctaagggatcacttgattcaaccttgtcatttctctgttcatcttgcaataacttgagggggccacctaaggttattctagatatctagattcttttcctcttcttgccccttgactccattgataaattgagaatgaaaatatctctctggaatatcttttgatttggtatgtataggaaactttgatatcattgtagaaaggcagaatagaaataaaagatatttcaaagtcttttgatgtaggttaccatttgtaaatctgtgaatctctgctttgacttcctgaaaggttatcagaaagctcttctaaggttctcttggggtacttattacaggcgtataggtgtagccctaccccattccacacctcccataggttcttctgaaagtttatggtgttaagagaactcaagatttttaaaactggctacttgttcctattgttcttgaggaaaattgtgctgaagacagctgtttgaagatttctttaatataaaatctttaatcttaaaccatgctgaggaaggtcagtttggggcagaaaaagagccatgyatttgtcccatttactccagaagaagctaaaaatgatttttgaatagcagctacccttataagtaccaagaaacatcagatgtgattgctgcttttcacatgcttagaatataatttytccatattttttcaygcaaaaaaagcaaagaattctagaattaaaaataagagggacctaagatcatatatggtgcagctcctaagatgctacaccataaccagtgtaaaagttgaatctttgctggagggggctatgcgtggatatttttttcactttccgtaggtgattcaaatgtatagccaaggttgaaaaccaggaatgtggattccagaccagcctttcttacttatgtttggggttgctgagacttacagaaagtaaaattattctgtgagtagataactaattatttgagacccaaattctggtctcccagaatttggtacctcattttttttttttttttgagacagagtcttgctctttcacccaggctggagtgcattgtcgtgatcttggctcactgcaacctccacttcccaggttcaagcgattctcctgcctcagcctcccgagtagctgggattataggtacgcaccaccatgcccggctaacctcatacgttttaatcccaaattaatgccagctctatatagaaaagacaggtctgtgatcattattcatctgtgtagttttctttctactgtgataatcatagctcagtttagggagcacttactgttggcctggcaccatgacagcagttttacagggttactttcttaattaagtatactcatattctcgtttcacaaatgaggaaacaggcccaaagagaaagtaacttgtctacatttttagagcaagagtaagtggaggtgctggaattggaaccctgatagttagattccagaactgtgactcttgaactacttaactgtaccttctcctagaaggatttgattattgcttttcattccaaaacaaagttttgtgtagactatttaagccatagggactgtagactgtattttgaaagccaaaattaagaaaacaaaaaatgtggccccaaggcactcactgtttttcttccttgattcttgaatcttaagacagcatgggatattagtgatgacagtcttcctactgccaaatggacgcttggccactagttgtagatttgcttcaaagattttgtgtcctcagaagtgaaagaaaaattttagtgaggcacatgctgtgggaagggtggtttggtcagtggttttgtagtatggtttgtgttgttttctcagtgtggagaaaataaggaaagctatatagtaaggaagaatatgttaaaatatgtactctacctttcaaagaagagtccagggtgagtagcaatgctagtgccacctgaaagaactttggagatgtttcttaggtcagaatgaaaagctgttgcagtattgcctaaaatagaatttataaaacagaacgctattgagacttgttaatgtttacagatactgttttctttctccttttccttaaaaaaatccttatgtgctcactttaaagtataaaagtaaacaacaaaacttgtattatattaggtgtaatttcaaggataacgaagtggaaggagcatgttggcaaggtaattttctagtatcaggtgagtgttttagaagaagggtcactacttattttggcttatagaacatgatggtaaatcagatgataaatgttgcttaataacttgctgcattgggtgtttactgaattgcgaaggaaaaatctttaaccagtacgttagtagatatttgcctgtgacttttaattaaatgttaacagcaaacagaaaaatggccattccattaaatagcatcatcttacatggtattttgattatttcttggcatcttccaaaaaaagggaattctcatgtgggaatgatggctgtagcttagagagaaagagagtttacatatttgattacatatttgatacatatttaacatggccatatctttgtatatatgctttatttcatttaatccatatgcccccattgaaatgtaacatttatttggactagaagttttggaatcttagctggaaccactgatttcagacacttatgtgatagcaggattgtttagtccaatatgtaatttgcatccgaatactttattaatctagaaatttttagtggtgaaattaagttatcttttgaaacagtctagcaaattagactaaacaatcaggaaattaattaaatagaggcaacarattgggatagtaaacctatttgtaatattaataatagctcactttaaaatatctgagaaagtgcctcagcaaatttatttggtgtagatttttgtgtttcccagacatgggaaagggaaggttcttgaaggagagaagaaatgtcccactcatctgaccacttcctttctgttataatttaagatcttttccatgattttattttaatcttctcactgactttttcaatgatttacaatctgaagtattttgaaaaattatcatactgtgcatactgtacatagtgtgattacttttgtgcagggatttaaaaaagtaatcagtggtctttctttgagaatgaacttttctggtaatgatttctacaacatagaacaaagccttcattctttgtattttccagtagttactttatccagtaattctcatgcatttctctgtgagcatttctaaggtcttgttctgagggtccaatttcctatattcacatcctggcacatctgtaaatgctcacagtgatggtgtcttaactctttctagagctgtgaacgtactgcttcttgagttcttagacacctctctttctaaagtaacaggatcctagtgttagtttcactgtaagaactgaaatccagaacctggatgtcctgtgaccrcaaggggcagagccaggtcttggttgcagctgttctgatgcccagtttggactcttccctagctagtctgttatgctgcaagctgaagtttacaaatttgatgcctcctgttggggtatttctgaagggtgtakagggttatcaaacactcttraaatacatgcctaaggtcatgcttaatgtatacggcaaaccatccctcacagtttcttgcataaacttgaatatgttctacatgttttctcagcctaatagaatgaccgcttaattgagttgtataatttgaaatgttgaagtgcaataagaacaggaggactctctgctttctttggaaactattaaccagtaaatgaaaatttagttgaaaactagtagttaataattgccattttctaacatgaaaggattttatccctcatgtgttttgttaaacattgtaaaagtgtcaaaattagctgaactctcatgtatttgtatttaatataatctgtttagatgatctggatatgaaatgtgataggaatgatggttgtagcttagagagaaagagagagagattgagaccctctctgaatatttggtttctggatttaatcaccaatgcacttattttattactcttggcttttgtagtctgaggactttgttttcttcttttgcttaattttcttaacctgaaatgtgacttggcaaaattaaggacagaggtgtatcaaattctttgctagtctctattttkttttttgtgaagaagagatttgtattactacgttttatttataatctttagaagagctataatagaaatgggttcatagatctgtaaaaatcaaaatcactcttaaaaaatccctcaagctgtctgtcactaatgggggaaaaaatgtaatccactttggagatttttttttttaatgagacagggtctcactctgttgcccaggctagaatgtagtggtgcgatcatagctcactgaagccttgaactcctgggcttacgcagtcctcctgcttcagccttccaagtagctaggatggtaggcatgcatcaccacacctggctaagtattaaaaaaaatttttgtagagatggaggtcttgctgtgttgccgaggctggtctgaaactcttgggctcaagcggtcttcctgcctcagcctctcaaagcactgggattacaggcatgagccagtgtgcctgacttgagatttttttttttcctgtgttttcacatgtgttgttgtaaggttcatttggttttgttgttattgttgttaataaggacataaaaaaatttgatatgagaattaacgaagaggcactaacataaagataatagaaaagaatatagtggtagcattcaacagtggtgtattgagattgcaattatttcttaaaacttgaaatcatttttgaaatacatatgttagacctatgtctacagaaacaaacatgccagacactgagcttttcttctttctagatgttggtaattagtaagcaaatgctaaaatttaatattagaataaaatgaccagattttttccattgcttaacagagaccaataacaacattgttatgaatataaattttcattatttctgttattgaactaaaatttggttttgataaaatgtctcctaaagtgtcatccaagaatactttattaacttctgtttttaaaaaataagtacagtaatttttttgataacctcaaacttattaagttcacattaaggaaaagtttcttttgagggaaaatagcctattacacatgacatcctttttcttcttatgagagtttcttaaaccttggacttttagaatgtattttcaaatcaataataattgaatcattattcttacattacattgctatgctagacattattactttctaattattatctttaacttttgcaatttatattatcattgtgtttagatgttacattccctactgagaatcataaatcctatccagtggttttaagtgaggcaatttatgtgcgtttagaaagagactcaattttactcatttaaaataaatggagagaaggaaacattaaaaatagtattatcgtactctatttgtagtttgccattttctgtttagtgtattttcgtagatgaaggtttttttttcttttaaaggttgtctatctctaggactatagttttatgagtggaatgtcacataatgcatgataacataacctatatgtaagggttttacaggtaattagagccatacaggccatttgaggggtacaggggagaacctgagcctgaagaatcatgtgtaggaaaaatccttgtaatcttaaractttttttgggtgtttaacttactaaaatgtcttaattattaaacwttcttaatgctggacagttaggagaatattaaaaaatataaaattatttttatccaagttttctgttttatccagtaatcagtaatgatctgccttgattcttcaaagtactattgatgaatttcatttgagttgatttagaaacaactttgttgatgaaaagtttgcttatgtatgtattttcaacatttttatgtctatgcacttggtttcagatgagataggaaatggaaataacaaaacactgttagaaaatcttgtttctgtagacggctcaaccttgccwkwaaccassaggcagtggaaatatcacgagaaagcttgttcctacaagactcccagactgattaccagaccaaagaagttcccagaaatttagcttgaagcaatcatttaaaatttaggaggcggatccaatcctgctcggagtcatccattgctaattatagttgcctatgatgtcccagtgattttgttatcagccacacctaagtatatttctgattttttgcatgttccctccaaaatatattcttgctgggcacttaaaatctgtttatttcactgtatgtatattacaccacaatactgttcgcattttgaatctatgcatttttttttctttgcctgatatatcttgttcaaccttgatgagacagatggctttttttcttttaatctagtttcatttgtatcttaaaatttctagtagctggggcactctcctcacccaggtgaggcctgctttgccctacaggtgtgttagatgcatggttgtgtgtacacatctttgaaatacatgaggctgctgccttttagaaaagttactgtttttgcttttttttaaataaatattttggccagcctcagaaatttagtaatggctttgaacacttggaattagcatgataaagccagagtttattatatactgttgtgatttaaatcacacactggttattttggggagttagagcaatctacttgacacagacaggtcttccctggcggaggcttgcccctgcatgttctggatagatggctttgatgttgggtgaacatcacaacttgaactgctgtgtttacactgtaagaatgcttgctgaatctctcactgcatctctcacataattccaacttcactttagttctgaatacatgaacagtaaagggggcagtttscttttaaattttrcttgtcagttaggcactttaagagtcttatttctttatgtgatttcctgtaagagctcatatatggggattgttattgagtaattttgaacacaaaattaattctataccctttgatgtggctaataaaagccataagggtatggtaggaaaagaagataagaagatagagaaaaaaaaattgcctctttctatatggcaagaagaagaaaaaaaaaattaagagcagttgtctttgaaccacagcagggtttactcttaagggtcttctagcttgtttttcccattagctaggaaagcactatgtgagctttaaaaaaaaaatacatatatatatatatttaaatcatggaataatataggacaaatgatttaaattgaatctagattttgcatgaacactcttctagtttattggttaaataaatgctgtagtttcaaataacatcccacctgtttgccttgtttgaggatctggtgagatgtagaattccagtagcttggctaaaaaaggaagaaataaaagatagaataacctggaagttctccacttcccttcaggtattttcttgttgttctttagatttggaatctgttactggattcttctttcatccatgcttcatggcatatagatatgtaggcattatacaaaaagcttatctagctgggtgtggcggctcacacctgtaatcctagcactttgggaggccgaggtaggaggatcgcatgagctcaggagttcaagaccaccctaggcaacatagtgagaccttatctctacaaaaaattaaaaaattagctgggtgtggttgcctgctcttatagtcccagctacttgggaggctgaggtgagaggatcgcttgagtccaggagtttgaagctgcagtgagctgtgattgtgccactgcactccagtttgggtgacagagcaagaccctgtctccaaaaaaaaaagaaagtcttcacctaaaaacttgcatcttctagaaccatgaactatggatggtcagaccttcttatttttatgttagcagatttttttttctgtagataatttttcagcattatgattatatgaccaacatgcgaatgtaatttcacattttagcctttgagtgtctgctggttcactcatcttaacagtctccatattctaaaattctggagtagtccaaggaacattcctaagattattttgccatatgctttgtgcagattttgagtctttttcaatcttaagtttaaattgtttccagtttctgaatattaataaaacaaacaaaccaaccctcttaatgtatcccctgttctacacattcccttactttttgggaactcttttgtcccctgccctcaccaccatcctaccctttgccatatggagtgtgggatgtattgtttgttaggttttaaataagcaaatttgccttctctgtgttgaagaaacctttacttttaaaaactgattatggcctctaggcaccaaatcttaaacatttctgtagcttatctgttgagtttattatagatcgtatctagaaatttatttagcttgtttgagttgccaacaaaagttggccaagaaatctgtataatagaattgtctgtccaattttgaaatatgacttctaattatatcttttgcatacacacaaaaatctgcagtattaatttgagctctgtcctaatcacaattattttttgttactttccagtaaaatagctttttcttgtaaatttttgacataaacaccagaccacatttattaaaatgaaaaaatacttgctgttatcaaggtattcaaaagtattataaaatattaaataaagttagagtttgtggcacattgactaacaaattttatctgacagagaccaagaaaaaaatacataaaattataaagtaaataaacaaaatcagtaatttccacaaacaagtatgtttatgcaggagcactgttaacctactagtgttcagagtaatttctgaatcaagataatttctgatggtgcttttaaagagtctagttatcttgtaactaatatgacatgggattaaagttaatctctttttaactacagtgagaaaatttaaaagccttggcttcatagactaaatacctgaacagacaaattgctgaaataatgcagctaagactgcaagagaaactgcaaaagataccccaagttatgtttgttattaagcataggttattttgaaaataggtttccatatggagtatayggtatgtaatttatacagaccacattactaatagattctgtcaagtggcactgaattcaagctacaatgtccataatggaatatgtaaggaaattgctggtgttattgggttggattaaaagaaaaaaaaaacacctttattagtatgtgttccccctcccctcagtgtacactgcttcttgggctcagactttggggtttaagaatgaggtatttgggccgggcgcggttgttcacgcctgtaatcccagcattttgggaggctgaggcgggtagatcacaaggtcaggagatcgagaccatcctggctaacacaatgaaaccccatctctactaaaaatacaaaaaattagccaggtgtggtggcaggtgcctgtagccccagctactcgggaggctgagkcactagaatggtgtgaatccgggaggcagagcttgcagtgagcagagattgcgccactgcactccagcctgggtgacagaatgagactctgtctcaaaaaaaaaaaaaaaaagatatttgaaggtctaattataggataaatttggtgactaagaggttactcttaataacaataatcatatttggtttacctatttgtcaccagacagtatccagacttcatgtgactaatggtgacaactgtattttgagaaatttggaaaatcacataagctgttggtgatactttcaaatcagaatgttttaaatagcggacaaggtaaagcaagctcagaacttaataatagaggaatagatacagtatattgaaggaaaaaaatacattgacatttgcaaagagaaagatgctgtttctatagcrtacctaagtccattgaatttgcacagtggacaaattgcaattggggaatattattcatataaatagtcctgtcagaacacgggatgagtagagtcttgtggaacagtttgtttagagaagtactagttaggaatcacttgtattagctggtaagcatcaagagaaacgcttggatagggtagtttaataaacagtgtcagcacatttacatggattgtgacagttttatcttttgctaaatagcctagagtaagcattattttagcatgttatcaaaaataattataatatatttggcacccactgaaattctgacttacctgttggggtatgtttttggtaattcagaacagattgattgaagaatcttctttaaaagttgcattttagatgttttctttgggtggttcttgtagccatcacagaaataaacataccttagtttgcaaaccgctatttacttggatctgaataggaaacattgtcacgatgttacgatatactgtatttccggataccttaacaattattagataaacacgatgaagatggaaaatattgaagaaataatgatattataaaaacttttgaatggttttagttgaaaacaaaccaagaatatattggtatagacataattgcaaagtagagctaccgcactaccaaaaaaagttatttgaggtagttgctggaagcagaattttcacggttagaaatgcttaaaaagaggctcttttaagtagaaaagaatgtgagactttagttattgtaacagtaggcttcagagtagccataaatgaagtttagctggagtaagactaacagggttttaatctgttgtttttctagttaaggcttattaataacatttatgtatggccttgttcatttgtgcactgggacagaactagaaccttgggctccccattttgttctttggtacagggccatcgtatttcagtaaatagagagttttttctcttcttagacgtctaaacaatggcaataatttataactaactgctcttcgttatgttgcagaggcaaattgcgcagaaaattatggataattttaaaaagatgaaatacaggtggctcatctaaaacagactccaattaaaaccacattgtattaaatagagcctgctttagataggctcctcttcatgctaaatatgaatgaagcaacaattttagatataatagctggtatctggattttaatatgatcagttctcatgcttcggggcccaaatattgccagctggtattaagaaacctaccctcctataaaactcgattatattgttttccctaagagtattgctttaggaattattgagaaagtggtttttacagggtatagacttttgcataaaagttggtgctaaaatttgactcatcaaaatttgcatcacactcttgcatctggaatattaccagatggcgttaaattagaccttgggatgggtgtctcattcagagacatggcagtctgtactcagtgtaatgggtgagcaaagatgtgttctagacctaagtgtatgctgtctgcattatggcttatataaaatggccacatctgttattttatcaagagaataagttttctaagttttggttggtctgatatgctaatatctgcaattagcagagccttgacaaattgttcccttaaattaagagttcatcagtttggcagaatgtgacctgataaaatgatttgggaatatggtgcttttacatacacagattttttttttttcccgttttagtctttcttagccatcagactccagaagatgtacaaggctatgccagtttttttgtttgtgcttttaaagaaattattaccgaatgtgggggatccacggaaagtgaactcctggagggacagaggaggagcaagactgtctgatcctgagatctcagtgcctaaaacatagaaggggttcagtaaatacttgtttgaaataaaaataacgattaaaaaaaaggagggaatagttcctaccatcatatgcaagatgacatgggtagtcctgactcttctggagtaaggagactgagcattctcactgctgaattaggtgaagggaaacttagaatctccttaaaagggacaaacaagaccctacatgattggacctgccccttaccctgtctgccattcttgtcatttcttgcctcagccttattgccccagcaacacagatcagctggtagttctttgccgattttgtgctatttcctatcgtggaacattctcccatgttgttctccctagtccttatcttgcctggttggctactaaacttgtatttaagcttcattatgttctgtctttttttctgaagttgttctaaagccctacctgagttggtgccttcttctttttctctggaaatctctgtgtgtttctgctcttctgcacaacgtgataaattatttgaattttctccttcactagatggtttttatgtcaagatgcttttccttatatttgttcaaacccaaacattggacacgatggtaggccacggaaatcagttaataagtatttgccaaatgattgttcataccagccctctcagttgcagaatgaaaaactttgaatgcttctttaataataaatcttcttgactattggctgtgattctaagtcccttgttataggagtatggttattaacctagttatttctgccatgtttcaatgtggataagcgtatttaacagattcgctctgttgcattgatcctgtgatggtgttatatactactccagtgccctggactgtgcgctacagggcagcctctagactttgggattaagtaatggtgattcggtgggggtatgggttcttattttatgggagtgttttggcaattaagtgctatttaaaggtattatttttgttagaaagataaggatttagatctgtggttcattaattatgtaaaagttgaattagcaaaggctagtttttggctcaaattatgaaagaatactcttgggaaactgggtatcggggagaggataagtaagtttggttatttgtcttgagattttatagagaacacacacgtaccccataaatgtagttttaaagaattgttcaaagtaaatcaatttttgattttaagaaaagctccaggccggacatggtggctcatgcctataatctcaccaccttgggaagcctaggtgggctgatcacctgagatcaggagttcgagaccagcctgaccaacgtggagaaaccccgtctctactaaaaatacaaaattagctgggcgtggtggcgcatgcctgtaatcccagctactcgagaggctgaggcaggagaatcgcttgaacccgggaggcggaggttgcagtgagccgagatcgcaccgttgccctccagcctgggcaacaagagtgaaactctgtttcaaaaaaaaaaaaaaaaaaaagaaacgctccacatttttaaataatacacaggttttgcagtgtaactactggtgaggaccagaaatctagttactagatttcttaaaaataaaatttctcacactgtttaaaaaaaggaaaagaagtacacttatttttcctatgtgtagtttatacatgctaaataaataaagtttagaaaatggaatttaagaagagtaaaagcatcgccaatagttccttccacacaggtgttaatcattttttgttttcacttgtcttttgtattcattttaaaaatagaggaccatattgcgtacactgctttgtaagctgctttttgcttatcaacattttgtaactatctttccatgttattaataactgagttttaatgcttttatcataatttaatcataattttggctcagccatattagctctttcttgatagattttactgtgtaatttaataatccagttttggacttttcccacttagactagtattctttattagatttaacatgaactaagtgctataaatgagtcaatatttttttaaaattatatgtctgtttatcagtgtactgtttcaagtctatgtattagttaagtctgttcttcaggcttgaacataggcatacctccttttattgcacttggctttactgcactctgcagatactgcatttcttttacaaattgaagcagtggcagagtttgaaagaattgactccaattttgaaagaagtcctagtgtggataacatgctatccaaagcatcaatgctacagagaaatcttttctgaatggaagagtcaattgatgcggcaaaccgtctgttttatgagtagacaccacagccacccgtcttcatcaaccaccaccctgatcaatcagcagccatcaacatctaggcaagaccctctgccagcaaaaagattacacctcactgaaggctcagacgattgttagcattttttagcaataaagtattttagatgtatgtatgctgttttttttagacataatgctattgcacacttaatagactacagcatcgaataaacaaattttatatgcactgggaaaccaaaaaaaaatcatgtgacttggtttatgtggtggtttggagtggaacctgagttcgtccgatgtttgcctgcagatgctcatcctttactctttccccactactgttggtgctcccagttctgctgtctgcctttatccaattgtaagcctcaatgtgatttctagattcaccctaagtacttgcccttgatcagcccagcactgaactcccccaaacacacaaacattaaagttcatttagaaagagtgaattttaggaagaaaccacagaggccaagatcttctctaattaatgtagtgaatcttctgaatgtagtgagtcttctggccattttttgagtattacattgatagctcattcaaaacgaaaattattcacacaactatggtrtaaataaaaagatgtgatgttaatataatttttggattagattattgccgaatcaagcatctttacaacattatagtttagagtaatgtgtttggctaaattaggcaataaaagtaaacataaaaggtaaaccttcccgattagtccttacatttgacttctctgtatgtgaaacactgacaaaaaccaaaaataatttcactactctgtatttatttttctgattgagactttggaaaagtcaagaatgacaayggtaggtatttcttttttgcagaacaagcctgagatggtacttaggtgcttacatacaagctactgatcacttaatgacattaaaaaaattttaattacttattgccttcagacactacagaagtttaaaaatcctactatttccacttaaatttctagaccaatgctgttggactttctttccctttaacagcaatgattatccagttgaatgttgtttcacagaaaggaaaagtgcatttgtgtaaaaatatctggggcttgccagggaatctttttcagaatgctttgtggttacaaatgaagcttattgttgtataaatggcaagtttaaaatcatagaacttttttgcagtagctcatggcatgagttgataatctgcgaattgctctgcgtgtgtgtttgtgtgtgttcgcatgcatgcytcagcccatctgtaagtagctggatcctgtgccgttcctccccctgtttcccacctcacttatttagatacataaatacgcacacttttacatctaaggcaaaccccaaaagatgcatgtggaaggctggatgtgggagagaggtgttttcctttaattgacctctcacggcgttccacttgataaagtgacaacaytttctgaaaacttaaggtttttgaatgtgtggattttctccctaccactgtaatttctgaaactttctctaaacaagatggctggcacattatggggacagagcagagacatagaacagagacaaagccgccctgagaaggcagacacacttatattgcttgtggtttttcagtacagctgctttcagatgagccggcttgttctaagctggtcccactgccaaagcaagactgtcacacagctggtagtacttactgtacttgcgggaaagtatgtgattcattagttggaaccgtatgtttttcaccagttctggtcatgtttttgttaggatgtggtaaaaacacaagcagggggtgaagggacaatggaaacatgtgacttcttaaggattggcctgaacccgttattagctaaattgtacaccgtaaaatgtcctttgtacctcataagacaaatgacttaattttttattcctcagttgaggtcattcagtcataagtggtaaaaattatcaacactgagctctttttctctttttactttctgcaaagtattatgatccgtttaaaccccaaattataatatgaagggaagtcatgcaagtaaaagacattaatttgctgaaaaatgcccatgacgggtgaagaactttaactggagtgaactcttgctactgataaaatatgagtatggtattacagctcataagaaacacttctaataccacagggtgtgaggagaacaataaatgggagtttctttgtctacacatgatcaagcagactcaaattgtatggctggaggattgagagactagtcttttaagtaattttggtgtcattaatgggcttgcatcacagtatctctgtaatgctcaatcctggtattgtgcagaactgctggtgtgagccgcattgaatattggcctgttatcaccaggtttttgagcttgtgaatattttacaactgcacaggccgaaccatattctttggaaaatgaatgccattgctgctgtgttgtgttctccttacataggaatatgctttgacatttgcttgcttctgcttcattctgacactggagttgttttacttttgtccccactcccatagcctgctattgagacaggtggtattttcaaagtctaagtaaaatattggcagattatgcctctaccctcagactctgtttttcaactgttsccttctaaagttctgcaccgttcatgcctcactacatacactccagcagttgctggactctgcagaattagaaccaggtctgtctctgacaattagctcaactggctgcaggataaataaaggaatgcgctcaggggctgtagtctgtgacacagtgtaacagagcgtaaaaaggtgcatctgttccatgccctgattcagtcgcctcactgtcactgggaagttaccgacacggagacatgcccgtgctgtttggtaaacaagcggcaggtattaaattaacagggctgtgagtgtgcaaacgtgctgctttattaaaagccctgctatcttggctcactgctgggtcacaggcagttgctagagcatctagtaagatgactcatggcactgcatacttcaataccctgttctcgcttccttccagaggggaccgttgacatttgagagcctgattacggaaggaaaaaaaggagaaagaaaagagaatacagggtgtgtgtgtgtgtgtgtgtgtttgccttttacgtttcgtaggctaggcaagaaggagatgagggccagcaccccagagccaggttttagtttaaattgggcttctgaatccaatactaaattgcaaccaggtctctgtytttgttgttgtttattttctctgcctttctgtctcaccctcctcatgactgctacttgatttgtggttgaaataatgaggggataactgagagatgaaagttttgctstgtctgcctgcactgggtgggcaccatgcatcttgcaaatgtacttgcaggaaaaaacacttcgacttttattatattctttaagcatttatcgcctttgcatttaatatttttaatgaaaaactcgcattttaaagactttctgctttcattcagcaatgtcatgatttttgaagtttgttttcccttcagcttcaggaatgctttacasagggtcatgtgtggttgccttgttgaattgttcctcacttttgtggtcttatctttgaggagtcctctttagatataccaaggtctgtaggcaaacattacaagacaattttcagtacacatgtctgtgctaaagagactggcatttctgaaggtttcctgctcccctccaagttgtgtttcttttaagggccccaactagctcctcatccattagaagatgatgtaatgctaatggtatctagctccacacagcttggaccaaaaatgattccagttggctgtatttgaatgtgaatgaccagaaggtgctagacattctccactgtaattgcaagtgcttaccttggaaatctcttttggttgtagaggtcctttggtcctcatactagagatcataccgccacacatgcattcctactgtccagacccatctttattgttggctgtctttttatagtgatgtctaggtagaggagtgcgatgcccagrgtcggggatagggagggtggagaggaagcagcctttctcaytgtttgctcagaaaggaaagtatcccactatctagagagttagtgatgcctcagaatctctttatctttgtaacctcttttctgtatgaagtttaataagccggctgtgcagtttttaaaacgccagtggattccgcttttcacttggaccgccccccgccttttgctctgagcattcactccctgtttccttatttcccccgttctcttttcctttatctcaggggagttccctgagtagcaagactgaaaragagctgaggtttatgttagaagaaattaaggttaatgatcattggctcattttcatattctgtgggtgtggatggaggagtaatcagtgcaggtggccctgccagttgggagtttttctttgtcatcaagaaaataaggagagtgcagggattgaattaccacaactatttcaggactaaacatatttcatttcccgatcgggtctggtttaaggacgcaaagctgacattaattttatccaaagaaagcacagcattttttttgtttcataatttgactaatgcatagggtagatgcatgttcaaatttaattctagtataatcttacaaataattctctgaaaagcaaaggggttttgattcagtttgacagtttatgtttctgtgtccarttaccacttagttattgaatgttaaaaagctgctttctaaaatgtgcactccgactgcaccaattggcttcccagctgcctgctattacatgcgaggtgctctcttctaactttttaaaggatgtacacagttgaagtagttatgtttagctagcaaaggaagtgggggatttggttaggaagtgcttgctggccttgaaaaactatcatgtgtgcattctcatttcagccacataaagatcattctttamataaatacttgttggattaaaaaaaccttaaatgctccgataaactagagaaataactttgattttttttaaaaacatgacttccatttggatcaactttttaaagttttcaatatgcttttaataccactgatgtaactttctacaagtgaggtattctgattccatgcttggaaaaagaagatctacaggttgaccagagacaataaaagtcattgaggaagagtgtcaacacttgccatgcatggtaggttttgctttcttagcggaatgcagcagacgactcaagtgacctgatctgtttttaaagcacaaggtttatttggctgttacagtgtgagtataatattaatgatactaatgtaaaattaacttttatgttgtgtgagcagtttttcttgtttccccctttaaaattgcagatatttccttgtgcatacatctggtgttgttgccatagtgaacatttatataactttgtttaagccatgaaaagtttggtataatcgggtagtttggcaagtccacgtgaaggtggttttcggttttcatagccctgtggtatgagtccacatgcagttgaatattcattgtatggccattaatataaatacttcgtctagcttattaataacacatgaagagaccatgcccagacattcaaagggcaagaatgttttagtggtttctggaagctccttgctgtgaagaaataaggcttttaaaaaacattgtagtttagagttttgaagtagcactttaaaatattttaaaatacatttggtatatcttaagaaattcttgactaggctaaaacttaatattgaacgaagtgatcttttgagatcaatatgatttccaagtttgacatttaagcaaatcatgttctctgttttaagaaacattaaacaaggagacaaaaatacacaatacatcagtttctaaggtaacattatttcctaccttctgctttgctttttactgaatcctttttacctttcctgctactgatagatctcaaaactggcctcacggggttttcccaaaggcttttggaaagatccatttactttatgacccacatacatctggtattagagcaactatgaattaatccagcctcacttcagtgtttatctgttatgcattaggaatatttaaaaagcaaataatttaaactaatgtttttcttgcatgtaagttagatccttaaaatcagctacacatcatattaacttgaaatttttaaatagtcgactgaattgctttacaaagtgtagttgtttaagccattctgatggttttctctgcaggctccttagctttgacaatactgttctactccttcacttgcatctacttgttagtgccttttactttggtcttttcgtttctttagaaagttcttccttttggatacatagaatataacgtcatttattgatctctcttttctgctacctttgtattagaattttaaacacgtcatgacaggaaataattcagtctggtacaatatgccctctctctcctagtttttaagtcctgagtcttgtatgccgcactttcaatctctggtggctaacctgactactttgtgtctcgtttactggaatacgtccataaagcaaggatacatgtgtgtcttacatgtccaacaacgtattccaacaaaggctttcagtgagccaggatgtgtggcttagtttcaccatcattttggtaaaaatacatgtattaaacagatactgaatttctgacttgcatttaatcttctcctcctgttttatgttttctttctttgattcagacagcaaactgattcaaatcttcagtataacctataaaaccaaaggtttattaatattagggtacccagagaataaagttgttcatcgttttttaacagtagagaaataaaaataataaggtttttttagtatataattaagcacttaaattgtcacctgaaattgttgttctttacatgcgtttcccttagccctttgtaattacctaacactgccagttagcgccagttgtgggagcaacaggcttctaaaaataccctcctcctggcctggccacccacctaagaaccatgtgaagaggtgttttgtgaattatcagaaagttaggtataactgatgcaatctgtgcagctatttctgtcaaaaattgtgcctccaagagggatcagctacattatatcttgtaatttcagatacactttcttggatttagtggaaaaaccttctctgaggctttggtaaccttctgaccaaatggattgcaatcaagtgtacctgtgatagtgagcttgaattcmcaaaacaagcaactcgattcattgctttgttaatccacatccacttaaggcatagatattctttatttgatacgtcatcttggtttattcatcatgattagtaagtttgtctacattaaaaatattacacaaatcctgaaaaattttagtctaaaagtcatcagagggagctataggttcttaaattaattgactaatgaataaaacctattttcctattgggtgttcttcactgcttcttttagagtgggcgcagatgaaaatgaatcatggagtttaggaatgaaagtgtgaaaagtaactagataaaattttataatttggggagctayaaaatttagaatccatttccttgattttcatccctctcatttggaaatgatgaagctcaggaggttaagaagaccacggtcatcacaaccaacaagagattgaaatggacaagaatcctagtgtccagaccagtactgtgcaatagaaataattctgcaagccacatatgcaatttaaaattttctagtagccacactacaaaagtaaaaagaaacaggtgaaattgattttaataatgtatttcatttgacccagtatatcaaaaattatgatttccatgtataataaatataaaaaatatataatcaatatgagtgtttatcgagacattttcttttcttttttcattctgagccttcaaaattcagtgtattttacactttcagcacatctcaacttggactagccacatttcacgtggtcaatacccacatgtggctagtggctaccatattggatggcttaggtctagacaccagtccaattttctttccaccacagcagtgtagtagcttttaaagggttgacttggattttcaaagtcttattttggttaatttaggagacctggtgtctttgatatacaagtgaaaaagtaactgaaaccttatataagtcgttataatagaagcacattgctctagaatcatctttctcattaacatttttgattccttggcaaatgcttagtaatacttcaagtaaatattttcaagttacttgtagacttttttccttcgtcactttactccctgtgaagccatactgtctcagttttgctaaccacagacacattacaggcagtgttgtgggagaagaaaaagtttccctctgtttctccttttggaggttgaaggcagtataccctggtgctgccctggactgaggctgtccaccatctgtgtaaggaattcacaatcccagacaaaagaaattggcaaagtcttccctctgtctgctctccagatcctcaagatagccataaaacacctggacaaaatcagcaggtgatggcaagggaaaaagaatgatcagtcacaggcgttgttgaatcctttgaacattacttacggcctggacattgctgtcaccaggctcaatttgatcttgggtgagttttctggaagagctttattccctggctctgtgacaacagcggaaccagataacattgtggatagaggagagaagtggaaagtcgaggtttccctgccttaaggtatagcagttccaggtggtgttacctctgtgtgtgtaagaacatcctacagaaataagtcatatcaccagatgcataaagtgtgctatttagatcagtgttcttactgtaatcctgctcaaggagtttaaatattcactcatctacttatagtttataaattgttttcagaatgatcagcattgttcatatgctgaattttaaaatgtagtttaaaatctgttttctgcacttaacactgaaaaaagggagttggcactatggtatttataggcttttacaaatcttttcttatggtggctctacataagaaactttgctacatactcattttgtgtcacatggtttgcttccatatcttttgttttgatgctgtatgtagaagtttcagtagctactaagtcatcatttgggttgtctgaaatttttataatgatatcagatggtggcagaattgcatatcatgaagtctggtagtgaaggggcacatttttaatggatcaggaatttagccatgaagaaataacacttttgccagtaaaagctccgagcaaagtccgttagctgttgcctctttgtcagtcagtaagagagtttaatacagtggtatttagctttctttgctgctgccagttttaagggtcatattttagctctgatctttatttccagtgagagggctaaaccaaagcagaagcagcactatttaactcggaattcagaatgattttttctctccctttggctctgtctacaaatgtagccctttttcatatcaatggcgtcaagcttcattgaatttagctctgtcttgttaagtacattaatgctgtgttctgtcattcattacatgagaattagttgtctattacaaagtgggggtttttgtttggagcctgatcttcacgggaagaaggccatacgtggcttaatttcctgagtgcattgaatgctggacttatttttctgtgacttgtatgtccactgaaagcatcatgcaaaatgttgattctaccgttgggaggcccactgtattttaagcaaggaaacttaaaagagaagaacacttaccacctttcttttttaaaatcccctttcccccatgcattttgtcacatttttcagtgatctatacagtgcccttagagtgtgttacagaaagtgttaatatcttagagcagcagtaataataatccttttactcagggtaatcatgtgctaatcctctggtaagtcaaaagtattagatcatttgaaattcattgtgtcagctcagttgaaataactggtatggtgctataaacatttagagaaagggagtctttgaacccaaataataatgtcaaatagtttgttagtgttacatgttcatgtttaagggtttcataagctcaacccayggacaagagcatttcagtttacatcagtgtgtaatatattattttaactgaaggtttatttttattttgttatttggggaaagtttcttttcctctggcacttgtggactggatttttatggtacagttttcactctgcaatcacaggaagcctgctgtgccagaagggtgctttttggtattttttttttgttttttgtttttaaagaaaactatttttgtttttctaaagcattatgttgggtttgaattttctccttgctcccttctttcgtattcttgagaaaaacattgatggtgtacatatttatttttctgtgaatattttaaccaggaattttggcttcatgtttcccttttcctcctgaacagagtcacctcttccttggaatttttataattttcttgaattattctctttccctctctcactctaagtccccaggggatagagagcccttagattcttggttttagtgatctttgcacccagcataccttaggtgttcaataaagaatrctttgaattgcttcacttatagaaatgctggtaaatttggtgacttagctaaagttgttcccatgtcagaaaatgaatatttttggtgacaaatcattttcatttcttctttcctgaaagtcgtttgagttttagaagggcgccttttcttagagcttcaggactgtttgagctgcaactgttgtcctccacctttatgaaaccactcagctgttgacaaagccggtgttagagcttcagagagcaccagcacaattaattggttttctgagaatgcataacttaacttaagtaattgtgcaatcaaggctcatgtggaaaggatgagtatctgtcctttctggacctcttgttatcactccttgtttccacctgatctttgattcatagttttggagaacttgtagattcttttatcctagggtatattaagtactgtaatgtgaagtcctrctcctcttttttgaagatgaaatttacagatcttgctgctgattgcattctgtaaataaagggagagctctgaacatgatgtttgatgttgtgtccctagtccgtggccatgctcgatatagctttcttcctcctggcgtcctcccgtgaacagattctggtaatgagaaggttcatcatctaaaaagcagtccacaggatagctttctctatgctgttatagaatgaactgaaatctacgtagaatagctctagagctaaaattgggtagagagaagaggtgttaaatgcaacctgaacattttttttcagggataacccagctcagagaataaggtgtccagatgatctggtttaagtcacagagccagtgtagccaaccagtccccaaggcactggcctcactgagagggtagctggcgttccattgggtatgggatcagggattattgatggcattgttacaggtctgtcagtgagggcacgtagaataggtagccccgaaagttgcttttagtcaccgtaaagtggcgctccattttagagttcagtccaggcatggctttactgccattgctgggaaagtacagcatgtcacagtggcagagaacatggactgtggagccaggctgcttaggtttgaatcctgtttccaccacttgtactgtctctgtgatactggacaggtttctgaagtgtctgggcacccaagttcatcatcagtgaaatgggataatacctacttcctgcatagctgaagttaattgtgaggatttaatgaatgtatggtgcctagaacagtgcctgaaacataataaatgctgcatacatgtttatgtagtaaaataaaactgggtgctgagagctgctgatgcttcagaaaaccattagtgaaacctaacccctggaacctgacccttcattaaggccccaaggttttactaaactttgtgcctgccacaaaaaccatacttatatgtgccttgtatagaagctcctatagataatcgtggtttttttttttttttttcctccatctgtacgtaaaatttggaggagctggctctacagggctttgtggggattctcttgggtgacagtgtagctgaggaaactctactttgaactaaaaatagggccattttcataattcttttcatattccgctttgttttctttgggtgatacattctttatcaggtataatttgtcatagaatgatgttttcaattgtattttttcgtaaccaaagtgattaattttcaatttacatgtggctaagaagatatatctgataatcaagtttagttcaaaagtaggtttttttgtttgtttgtttgttctataagaagtacctcattttgattgcagggccacggttaaagtggacttgacagtaaactgaaatttacgtttatcgatgatgatcatgaccccatatcaatttctgtgttctcaaatgcattatatggttgtctgaatagttactccagattgccaacactgtgatttaagcctttcacaaattacctgttgtaattcacaaaactgggtttcatattatctgtggcaactattttttttaaagattcctcaaagatgtaataatacttgcacaagtggtggcaactaggacagaatggttcaaaacaagaggaaagaacatactatgaaatgctatagagagccacctacgaaattcccacgtgtcagtagaacttccttccttccttcctttcttccttccttccttccttccttccttccctccttcctcccctcccctcccatccctgtcttcctgccctccttcctttccccctttcttcctttctttcattcattaatttttaatttttttttttttttgagagaggatctcactctgttgcccaggctggagtgaagtgccacaatctcagctccctgtagccttgatctcctgggctcaagtagagattctcctgcctcagcctcccaagtwgctgagaccatggggctggctaatttaaaaaattttttttgtagagacagggtcttgcaatattgcccacactggtcttgaactcctgggctcaagtgatccacctgcctgggcttcccaaagtgctgggattacaggtgtgagctaccatgtctggcctcttttattttattttattttgcgagacagggtctctctccgtcacccaggctggagtgcagtggtgtgatcatggctcactgcagtctcaacatccgaggctcaagcaatcctgctgcctcagcctcccaaggagctgggactataggtatgcactaccaggcccacctaatttatttattttttattatgtagagacagtgtcttactttgttgcccaggctgatctccaactcctggactcaaatgatcctcccaccccagcctcccaaagtgctgagattataggtgtgagctaccatgcctggcccggaacattttcaatatggttatggaaacattatcaactggacacagttgcttgatttctcagcttaattggagttatcttgatgtaatggaattgaacaaatgtgaccattgagctctcagacttggttttgaattccactttttccattgaccagctatgaggccttagtcaagttccttaatctccttgacccttagtctccttatctgtaaaatggcgatataatagtaccaatcatgctcaattgtcatgaaaattaaattaattcatgcatgtgaagtatttacattatagaggaagaaaaatttattttccttccactcgtctaagttcttggctgctaactctgtaacaaaagacaaattaacaaagaaaagcatacaaatttatttaatataaattttatgtgacacatttccttcataaggaaatgaagacttgaggaaacaattaaagctgaatgtttttataggttcgatgaagaatggacagtcctggaaaaatgtgataagacaaaaaagagtatgtgctaagagtagtaaaccgaaggaaacgtagcaaggccttcttatttagattccttttgatgtccttccattttcagatatacagttgcttttttcctctgggttttgggaagggcacctctcacatgacgatcttatggcctgcttctggggaaaaggatggggaaatgtcagagagtccttgcatatatcatctctcaaaactcttaatcttaaatattcagtatgtcaaggtgccatattttggggtagcatgtcctgagctccatcaacattaatgtaaaaatatttagcctaatgcctggcacatatcaagagcttaagaaatgctgactctaaaattatgacatctaggaagatgtggggcagaattgtaaacttacctgctaaattacctatgagctrcccaccattcgttaattatggcaataataatgggtttatcatgctgtatcctcactcttgcaagcagtgttccttgtgcttagcagtaaatgttgcctaatttggggcatgctggtgtgtctgcagactgttcttgtatgtggaaaggtaactggcctgcttggcttttttttttttttttttttttaaagagacagagtctcactctgtcatccaagctggaatacagtggcccgatgacagctaactgcagccttgacctccagagatcaagtaatctttccacctcgacttcccaagtagttggggccacaggcatgtgccaccacacccagctattttatttttatttttatttttttgtagagacagggcttccctgtgttgccaaggctggtcttgaattcctgagctcaagggatcctcctgcctcagcctctcaaagtgctggaattacaggcatgagccaccactcctggccatttttttttaacttcatgcatgtagctcttccatatcaccttactgtataaaagggaacaataccccagaaacctttcttttaaatagtacctggaaactctaaccttgctttctttttatttagagaagaggtgcattttaccatgatagtgaaggcatttacatggattagatggagttttttggattttttttttttttcaagaaaaggtttttccaagtggttttgttggcttttaaaacaaaagcaatcacagtaaactgaatctgtttctcttttgaagcatacatgtgttgattgctaactctgtgctaggtactgtcttggatttcggaggctgtgatgagtaagaccccatccttgctaataaggtctttatgacagtaatgttatagaaagatttctaagttttggccaatggccaactatttctactagaagttcttccattgatctcagggtgtacccctacatctgttgcttttgtattttttcttcaggcttgtgacagtgaaatttaacatttttgggtttcaatcccaagcgttaatttctggttaatttcattcccaagcgttaatgtataggacatgctgtaatttggttttgagccttgtttcattaggtttggctccaaggacacacaaaccagaaaacaacttattttcattcctttctttcgtggctgttatccatatggtactgctcatctccctcttgtgactgttacctttcttttgtaatcgagttgtctcatgatgtcatcgaggcaattaattgaaaatacactgcctgtctggaatcagagacaactcagaaaattttgcagtcttccatgacatgcccagtgacagctgtgcttgtcactatttcttctgggaaatcccagggaattgtcatagtctgctgtcctggttacccaggatttctcacttaaagctgaattggtggttggattcaaggatgcaggggcacccaaattatggtaagaggtctaagaggctcctccttacatttacctgttgtcactcaggaaaagtagcagggggatcttcttgcgcacaatctcagtaattgaaaaatgaaggtagtagctgatctccttttcaraaaaggtacaggtgttggcgtttgttataaatacctattctgagaagcctgcacagcagtaatggggaatactccataacctgctgtccccagtgattttcaataacatgtggcatttggggccacctttccttttggctttgtcttttacatttaaaatttattaaagcaacatttttytgggttgcaagcacaaaatggatttttttcctagaagttttgcatatttcttgttatttctttaacacagtacgttttccttcccttgtgtgatctgcattttaaaattggaaaagtacactgggtatttgcatattcaaactggcacaataggcatgcaggctctaataattagtcatatgcttggaaattgtcagtgttccccatggttcacaaatttaaaataaaactcactgctatcttttattttgatccaattgatttttcagactacctttctaaccttatggtcctaggtattctccttgctataactcatatgttctttgaacaagccccatgctgctttacctccgtaccattggcagtacttgtccatcttcttgggtgatcttctttccccatcttggcttggtgaaatcacttaaataggtttgtcataagtgatgatggtccagcactgagctaggagatatgtgtgggtgccaagtaaaacaagacatggtctctgaccttgaggacctttgagtccagtgcctcttgaaagcctatccatcttccaaaccacttccttcactaagctttttctcattacctcaatagaagtagtctgtctcccctgaaccctaaagcattttgtttatgcctgtcttgtcacattgatcacattccactttatagtatagttatttgtggtcaggtttatctccctactcagttgtaaattcctcaaggacatatttatgtttacatgtcagggtttagaattctgttttctacatagtaggtatttgataaatatttattgaattgatggggccacaagaataaaaatccatgctaagaattggtgaggggatcttgtcatataatattttgtatttcttattcagtacagttaagggaatttaattttcaaattctactctaatataaggatggaaaatggaaatatgaatgcctagttctctaagtttggtatgagaaaatggctggggaaggggtgggtgtgtgagactgtttcatgtgtacagtattgtatcatgaggcagatacttaatttcaggaaacagcctaatgaatatgaacacttggaaaattagttgcccattctattaattgtttatttgtgaatgaaaggggctagtcaggctggaggattgcatggtttctggaagtcggtatactaaactatctccagatgtggggagaaagaaagacgtccacattttattgcatataacactttgttgcacaattcacaatttgagcttagaggttttttttttttgcttctgttttctagttatttattagtgttagatctctgttctctcttctacctcttacaaattaactaatagaataatttaaaggaaacatttagtaatgtgcttttattgaagttaggtggtctagttagaagaaagagactaggttatttttatatggaggaatatttgttcttcctcgagttatttattttgtttggagacatttatatgataaatttacttgtatatgaattttgaaaaattttgttaaatcaagaattgttcctttactctgcaggtagaatattttaaaattgagcttaatcattattccagagaatttgataaacacatttagtgaaacttggatggcatagccttacaagctggtcttacaagttaytattttcatggctgaatgctaacagactgcatgtcttgctttatcagagtrtaaagtgagaccttttttttaccttgaatttttttgttgttgttctttatgcaatcatttaaacaatagctctggcatcacttgattgtgctattagcctcaccttttcagcaacaagtattctaaattcctatcttgggagctgcttgggaacctggatttttgtatgataaccagtcaaaaaataacataagattgatgtccagggttggatttttatgtgtcatttaaaaatggcatttgtgccacagttcactttacagcygttttccagataattcaaaatactagaaaaatccatctggtcctttagaaaactatcctggagcccttcccttcatgtgcaggttatagaaaaaactctggctggatggatgctttggtgactaatttaaagtatctggcaggacgattgatagcgcctttcctttgtgttgtaacaaatatatttcggctgcagtttattaacataattcagcacaaccacagacatattgtacatattaaagcatagaattagaaccattttttgcacatcacagtcttctcttgcttgtactttttttttgacaaggatctggataattgcttcaacaaatgaactgctgtgttcagtctgtttctataatttcataaattgttttcatgctaaaaccaagcaagctttcactgagttaatataaagaaccgcagtgtaattacaggagctgtattattaaaaagtatgacagcagtggcagcctaagtgacagctactttctccttgctttatcatgacaaattaaaaaactcttttaagtgccagggagcaacagaatttgctatatacacgtcatcttgaaaatgggtatgcactcatgactaattattttaagtgtgtgtatgatgttgtacccctggaaagactccatgtacctaatgatcttctgagtgttgcgtttcttcaactgtgaagcaaggaaaggtgaaataccatgtatgagaatgagagttaagttaccacagggtagatgacattttaaaagcagataggagttttttaagatctactttgtattttcttcactgattgcgtttaaattctgttgggccaactgatcagagactacctatctctgtttcaattcatagacccttataaccctgataaattatagtaatttaaatattttgtcagtttatcattccttcaaacttgtatctgtagtctgctttcttgtcatacatacattgttgggaacctcggattccttctgggggtatttaaggaaagatgttactcactggccgttcctttcaagttttactgaatttaattatagtggtgcatctggcaggcatgaaaaccattagatgagcaaagggggctcccaaatgccactctatgagcataatttaaaatgcttcggattcagcaatcctccttcagttgcgttattaggtacattgccttgtactgttatccttctggttgtggttacatggtgcgcccagtttttgccaccccttttcccttccctcatcactgcattgtgtgatatctatattatgttgctgggcctttcctttagaatttgtggaaataatggtatatttatccataatatggatgagatacaaatgatttggtattaagggacataagtgatttgccttcttaagagcttgtgattatcagacagaagatggcagagaagaataagagcaaaacaaagccaaacctgtttcttctattgtcaattcagtcaaaatggaggatactaagagacaggagtcctgagaggagggggtaccaagggaaaggtaagaagggcaggtaagggattcaagacctactggagacaagggggaagagcaacagttttgtcaaaaagaaaaagatcagtgatctttctggaagtccagcagagaagacctttcttgagattagtttaaattaagaactagaatagaaatatgtcccatagataaattccataaagcacactcctgggattctgctgtccaggtacctgaatagtttgtagccatcttctacatacctttattacctgtaacataaggaagcataggagatacaaggatgaagttcggtcttctccttagcaggctggacacagttttagcagttatttctatatgctcatatttagcttgttttccagctgagctccaatttttgttgtcctggagcagctcaagctttcacctttgggcctgtagattcctatctcagttcacctccatgaagcaagactaggttggtgcgccttctcttcatatcataacaccctatggtttccccccctctattggaaattgcttatttactttccttgcagctcaagcttcttgaggatactgtgggttttatactatgtatacaatccccagcacagagtaggcattcacaaaatacttgttgtagtaatgatttcatgtctgagacttttgttataaaagctctctgagcctttgaaaagtggctccgaaaggtcccctggggtgcacttttctctaggcaatcagtgatcagagttagccaagcctgctgtatcccctttcattcaaacagcccatgttgcgcatctttcacaaggctgtgttctaggtgctaaagaaacacagaaaaatcccaagatcccttcctgtacaggagactgaacttaggttggcaaggtatgatgtttaggaaccttaagtacataataaaaacattataaaatatggaaacctagagctttgaagaaatgttgagcatattgaaacttatgcatgtaatggaagaggaagtggagtttgacttttgcctmtttcaagtttgcatgcttctgccgggctttggaaacagtacctctatttttcagatctcactgactccctgtcaggttatcttttcatgacatcaacttatctattaagtaattagggcatattttaacatgtaaagtgtatgtctgggagccatatattttggaaatgtacagtgtgcacctgtggtcccaggtacttgggaggctgaggcaggaagatcccttgagcccaggagttcaaggctgcagtgagctatgatcttgccactgagtccagcctgagtgacacaacaagagtctatctctttaaaamaaaatttaaaaaattgattatttttaaatgcttattttgtctaagaattaataatcataataaactttttttttcttttagttttaaggagcagggagtttaatagacaagaaagaagggggaagaaagaaaaaagaagctcccctgtacagagacagagggagggggaagaaacgtttttatttaccatttactctgtgtctatcactgtgcttagctttttaagcaaaatatttctaatgtgtacaaaattgctgtgtgaaaagtagtaccattcagttgttacaagtgaggaattggggtctcagggaaaataaataacttaaaaataggaagtaggaagtacccctaaggaatctttttctgctcatggaaagtagaggataagggtagatttagttaatcacaagctttctactctttttgagcctgccctcccctgacgtaaatttgatgtctcaaatttcttgaaggctttatttaaacagtgctttgtggtcccttctggcagtgtgactgatgcttgtaccatgggggtttttggatacctggaactccatattggtcataagagtaaattggggatcctgggaaccctgtcttactctttaaaaactgtgttcacacattaatgtttcaggagagtcaaatttattttgcctgttttgtgtttttaaaaaagagatcaattttgttaatctataagttaggtcactagagttggaactacagtattaaggggccttccatctggaagtcttaactgcctagacagggtaggaaaacatcaccttagatttcaaaaagacttaaaatgaacctcatctgaaaatgaaagcatccgtgtagcatrtacaaatacattagcacactatgctatgttcaagtagagttgttaatttctctgtgtattattttaaacaagattggtaaagtaggaaaaccaaaactttttttgctttgaaaatttattctgtaagaatataataaaattgtttacttaccctaaagtgtagccgttatcaaaactctttcctttagacgtgtttagtttaaccacctgcctaaaggaccactgagtttgaattgttacagccaagtttacaagtgtggacttggtcctgtgtttcttttaaatgccacttcataagaccacccctttttttctacattccctaattattttctccgtctctccttgttgtctgtttttttctttctctgaggttttgcattacttttatcaaaacgaatcccctttttaaaactggataccacagcgcactgtggctcacgcactttgggaggccaagacagaatgattgcctgagcacaggagtttgagatcagcctgggcaacatggtgagactctgtttctataaattttttttttttttaaagtcagccaagtgtggtggcacactcctgtggttccagctacttgggaggctgagacaggaagatcgcccgagcccaggaggttgaggctgcagtgagctgtggtcacaccactgcactccagcctgggtgacagagtgagaccctgcctcaataaatgtgttagtccgtttagaagcaagtcacacattatgtggatggccgcaggccaaaggagcttgtgcagataaattcctgtttttaaaaaccatcagatcgccggccaggcgtggtggctcacacctctaatcccagcacgttgggaggcccaggtgagtggatcacctgaagtcaggtgtttgagaccagcctggccaacgtggcgaaacctcgtctctgctaaaaatacaaaagttagctgggcatggtggcgggagcctataatcccagctactcgggaggctgaggctggagaattgcttgaggctggggctggagaattgcttgaacsttgkggggtggaggttgcagtgagctgagattgcgccacttcactccagcctgggtgaaagagtgaaactccgtccccctacccacaaaaaaaaaaaagctatcagatcttgtgagacccattcactgtcaagagaatagcatgggaaagacctgccctgatgattcagccatctcccatgggtctgtcccacaacatgtgggaattatgggagctacaagatgagatttggttggggacacagagccaaaccatataaataaattaataaataaaattgaatgcctatatatttctcccctctaatccattcctcagagtctctgacagagtgaacttttttctttattattaacttttaaagctaatcctttaaaaaatattttttctattctctcaagtttttgtcttttatacatgtttgaattaagtcattgttctaaatatacatgtaagctggtttataaatactataattacttctcttacttaggactcaaatgttgctcataattgaaattgtaagcccttattttctgttctagcagcaggcactctaaatggcttgtttaaaaaaagttcttgactgggcgccatgggtcacgcctgtaatcccagcactttgggaggccaaggtgagtgggtcacttgaggccaggggtttgaaaaggttagccaggcatggtggtgtgcacctgtagtcccagctacttgggaggctgaggtgggaggatcacctgagcctgggagggttaaggttacagtgaaccgtggttgtgccactatgctccagcctgggtgacagaacgggaccatgtctcaaaaaaaaaaaaaaaaaaaaargaattcttgaaaggttggactctttattagttatcactaattatatcacagactctgaactctaagaatgcttgttttcatggctctggtctctgttgtgctgtaataaacttccatttcatattttctgaagttgtcactttgagttctttctttggcaataagaaaagcttccattcagtccatcttaaatgtggaaaacagttttatgtagcacttgttacttaacagtagtcatgggacttaaagaaaaatgttgaagcttagaggtggtaaagcatagtggtttagagagtaggtagtgaagttgatcggaagtcctggctctgccttggcaaaggtggttaatgtctgtgctttgttgttgtttttacctgtaaaattgagataatgatagcgtgataccctcctaagagggaaaagtcaggataagctgagtttgtccattcagagtgtttagaacactgcttgatagtaagtgcgtaagaagcgttgccagtatttttaaacttaactttgcagataatatatgaaatatgcaaataagtagaaatatatacttgaaaacatgaaatctttaggataatttcctcttttcattctctactaatttattgttggtgaattagatagaggtcacaatctagtcatgtgttttacagaaagtagttacaatgttgtgttccttttgaaatactgacttattctttggcgtgtatgaggggacatcacatgaagtcattgttgaaaaagatgtgtccattaagaaagttggtgctctatttgtgtaattcccgagagtggagggatttgtttggtacagtagccttattagctttactaaaacaaacacacaaaaacagactgacacccacaagtatttttgtcttgttttacaaggtctggtttctttattgaagtaaaattcacatagcataaaaattaatcatttttaaccttttcttttcttttcttttttcttgagttggaatctctctctgttgcccaggctggagtgtagtgacgcgatctcggctcactgcaacctcatctcctgggttcaagtgattcttctgcctcagcctccaagtagctgggattacgggcgcccaccaccacgcccggctaattgtgtttttttgtattttttagtagagctgcggttttgccatgttggccaggctggtctcaaactcctggcctcaagtgatccacccagctcagtgtccctaagtgctggggttacaggcatgagccaccgtgcccagcccattttaaccattttaaagtatataattcagtggcttttagcgtaggtttagcatagttttgtagccatctgtctctcaagatctttctaattgaaaaggatttatatttaaagttttatgagttttgctttgcatttaaattatgtcatgcagcttttctaaaataaacatagcagttctgtgtttcacaaaattaaacaaaagttggcatttaattaatatgaatggggcattgcttctcttttataaagtgttttttaaaaaatctctcttacagagagagagagaaagaggttctaattaagatgggtcccagatgtttgctttgtattggtttgtattgtacttctgttgactaagcaggtagttgttagtggttttaaaattgtgaactaattagaacaatacgaagagaattgaacatctatcttgccaacatccagatcaaataaaatttagacttttattattatttaggatgttatttagtatacaaactcatgtaaagttttatttactagagtttacattcttttgtatctttttgatttgaggaaagaaaaaaatggacaatttatatgaaatttctagcattttaagcagtactgtgacagaattttttttataaaatacctaatttttaagagaatatttgagagaggtttgaaaatatacctaaacagaaaaaaaattaaagaaaagtgtatatttttctgggcattaataaaatcagccaaggttatgagcagaaatactaacagcaggtttgggatgttgatagtgaagcttacctaaaaatcttaagttaaaagttttaagttattgccagatttcatggcacttgcaacctcctttttagttttgcctaaagtgaagcatcttagaccagaaaggatgctctaattgttgagtctttattatggcatttgagagctgcttattgctgataaatartgtttatgtactatatgtttagcgtctcaaaattattttcttcaatggagcaattttgcacacagacaaaaaaattgtgacttttggtgtgtgatgttagggtgaacctgattgttaaaagtttaacaaatatttgcattggtagcagttaatgtgtattaaatgtttatttttaaaatcatatgttttaaataatatgaaaaatgtaattttaactggttacaagttttcttgtataacattagcattctacctgacactgagtagaagtaaattttgattttagctctgtaaccacataaatacaatgctggattaaagcctttggccctgacttatctgctagtgtgtgaacatttctgtttgcagtgcctgacttcattgcttcctggaccaaggaaggattacttttgcttcttgatagatttaacctaatctattactggtttgacaattggaggcataaagggtaaccatcagcatcttttcgaagcatgtaatgctacttggagaacaatattccagtaaggaaatttcttgttttcggaaattcccaaaaattcagtggataactcatagaatgcttttaatatatacagtaagatggcatcttctatttctaaagtatttagtttatcattttattagtcaaggaatactatagaaaagagcagtagatgaaatgagggtttggcagcatcaaatgataaaaatccatgttcctggatgcagttaaaacagaaatgtaaaaatgttcccatctgtctaagccatcagtttctgatacagtccctggaggaagtggctgaaaagtcatttccacctaatgggttgttaggttgcttctgtacagtaagttggtggttgcagcccacttcctctaagacaaaggtccatgtctcyaaaaccccatcacaactgacactaattggcattgctctcggcccagggctgtgaaagcgggcctgagtgggcatagagtggggagcactgagggggtatgtggcaccactgaaaagacattgtagattttcctagtataccacatttagatttttgttttctgacccctgttcatgcaatttatatcatttttatgctgtcatctggcttgggaaaaatttttccaaagccccattggtgaataccatgtcattagaaagtattttcaccttacctaatgttgggacttccaaatactaagttacctatgaaaatctctatgaagtaattaagatgattagtagtaaatacaataaataagtayacatttttacctcacatttttacacatctaataaactaacattttgttttccttttttcttaaataagaaaccagaagagggcatattagtctttcagaaatcactttgggagccacttggcccagttcagttacaattaccataaattaggcaaagaacctgctttgtattcataagggtcaggagtgaaggatttagttcctgcaagggggttagaatgacaaaaattatgaaagcagaatggtaccctcctcttaacaacttttaactatgtcaaagcttgattgctgtatatggctccatactttgacgattatgtagaagacagggaagagaaacattactgagcacttattatattggaggggttgtgctgggtactttccagaacattatcttttaaactttagagatattaccagactcctggttatagaaaagtgtgactgcagttacggccagttgtacgcaatctctctactttcctaaatgcgtattgaaaaattagtgagtggtggcagtggggaggaagggaattactaagggaattgattagtcatattaatcatttatatcttttccctgcatccatttaaaatgaaaatggatagccatttaggtacccagaccctgccctccctggcttcctcttcccctctccatcattttcaggctcaggagtgtgtagtaggatcttgcttcaacagttggcttggactcagctccctctgagaagctctgctttcaaatcttggaaaagctcatgaggccctcctcaggaaactgcttacttctcttgcaatgtcccaggggattcgaaacaagtttgggatttccctttacccctgaagtcctttaaacagagcatcttcttgcatttgtgtctgttcgtttagatctcagcacagttccctgcctcttctggtaccacaagtgttaacaatatagggccaggagtagggtgagccaaatgaggtgcccgaggtacaaaatttgaggaggcacttcttctcgggttgtgcaagtggactggaagttgcgattccccgattctggagtgtggtcctggatatctgtacttatgtaaagcaccacagatgattctgacatatacctgttcttttttatatttaataggtaagagttttcttttgctgaaggaagtggagacatttggttcatagctaaagaagatgagattgtgcygtggaaccttgttttcgcagcacgtgataaatctcacctttaatttacagactcctcttgccccttccaagatgtttaaataataaaagatgtatcatcatcattttctgtgatcccaaattaaagcaagaggcactttcacattgaaggcgttattagcacatattttacatttctaccctttgttgtgcattattatttcagatgaaaggtaggacacctgacaactgtgtacagagatcctcaggttactagctcaggtgtaattccttcatacacaaactaactttattcatgtataaccctagctctttatattacttctaacaccagaagactctcgccacccgccgcacccccgcatcattacctttttaaaataaaacaagtaggttgatttaggggagggagagttactattttaactaattgaaacacaaaactgaaatattaaatataggtaaacattaaaaatgatgtttttcagctagaatatggttaggtgaggaagcatgtataccttaactttaaaatctgttattttctgattaaggaataaaatgctgaatttgtcaatagactggaaatctaaagaaaataatactgtacaaatacacacccacttaaaattgtactacgtctgctttacttttttaggagacataccatctggcagctgtgtctcagtgttaaacaacttgagcacaggtaatatatttgacaattaaaataatagcctcacatttattggatatgatcaaagtattaaagcatgcttatcaccagctctatggatattcagataatgtttcagtgaaaaatcatattgaattgtgctttccttatctatttatgattcactcaagtagaacacactaattgtgcaaatagggtaggaaacagccatctcacaaacttacaaggtactttacagaaatccaactgatgttcagtgtcataaatagcagtatttgtggtcatcaatgtagggcccctcttggattacttaaagtacataccgtagtctagatataggtttcttatatatcagggttttaaatatgagtgagtgatacagtaaaaccgttggttgcccctgttttcctttatcattcttcgtagaccagcaaagctggtttgtgtgtatttggtcatccgataatatattggcttgtcctatggtgcttgtatggaagaagtggaagcaccacaacacatgggcatgcgctgttatcaatttatcaatgaaaaatgcagatgtatgaaagtattaagcatatcttaatatattacttttttttgacatggagactcgctctttcgcctaggtgggagtgcagtggcgtgatctcggttcactgcaacctctgcctccgggttcaagtgattctcctgcctcagcctcccgagtagctgggattataggcatgtgccaccacgcctggcttatttttgtatttttaatagagatggggtttcaccgtgttggccaggctggtgttgaacttctgacctcaggtgatccacctacctcggcctcccaaagtgctgggattacaggcgtgagccactgcgcctggcctcaaactgctttttacctttacttaaagacaagttgagggaaccattcatttgaagaaggtgttagaagggtgtgtgtgttttgttatgacacgtttttgtacctaggcttccgttcacagccatctctgccttgcagcaagagagagtattgaatttctacttctttccttttgatcctatgaaagttgtaaatctctgtagtatgtaagttatgacctaactctccaaattacttgaatatgrttgacattaagctcatattccaaatcactttgctccacagttcagttatttgtaggcaggaagcatatttgtttatgagggagcaggaagtatatttgtttatgtttttatatttcataatttctagcattgtctttggagtagtcaaatcttagcaaatgaagggatgaatgctttgtgataggctacatacattttaatgttcagttgtttttatatgggtgaatggatattggagagactaaagttttacatgtccttgaagtatacttttgttgttaatttattcatatttaaggcacaaccctatttaatattttgtgcaaaaaccaactttaaggaaatagaagtgaaaaatacatattttgatgtttggctttttcaaaaatgcaaagcatctcatttaatttccaggtagaaggaataggtattgcccaggatatatacactgcctgtgagccagtgcccgcctcttaagctgtgatgagtctgttttcctattttgggtttcaggtacagtatggtaaaagtagcctttggtggtagagatgagaatggtggaggggaacatatgcttttctataatgacagggagatctaaggttagaatgttactagcgttgcctggaagaatagtaaggcatgtggacttagaagaaggtacttatttctagtgtatccaaaacgtctcttccccgtagtggtgagttcattctgccacagccaagcctaccaggaatgattatcttttgtctctcttatgtgaagttggatgactaaggcagtgatttctgaacagcaacttttgcatattctgctagtaaatacatgctaaatatttcatgtgaattttatagtttctatttttagaaagttgtccctggaatttgtagataatactcagtaatagacattttagcaacttcatcacttttattttttaattcacataattttacaaaagttatgtccacttaaaagctttatctgcttttattttttccccagtcagatcatacttagaaaacctgaggttaacataaattatatattgatagcttcttagcagtctagcagatttcaatttcttagaaagatgttatggaaccaaaaatttgacagataaatgtaaagtgtctagcacgtgatgtgaatagtaacaaagattttatttcatttctatcaattatgctactattatgaatattacagtatatggttcttactcttcaggcatgcacatagggtctctttcatcaagaagcacatatacctggactgagagacaaattactgatttgcagtccttaattatttaatgagaaattacagtgagatcccaatatatggatttaactcttcaaaactgccccgaaaaccaggcacggaatgaaagaatatcatctttatacgataaataaataaattatatttaaaatagataaatttatattttaaatcacaactagctttgtacaaataggagcagatttattttgtacacttaagattatgggggaaatgacataaaagctcatgcaggtaaagcttatgccttctcatgtgtaaaacaaatatctaaatatatgtctatttgtgtccacatacagagttaaaggacacttttccatgaaataacacattcctttagaattgctgtagattttcataattttttaaaaacatttctattgtaacctacatcaaaagggcagccagcgttttttttgtctggctatacatatgcattataaaaaagtgagtctactgtaattaccagtttgcagagcaaattcctgcagggtttgtactctccccattagtaaaagtgataagttgaaatgtattaaaatttcactgtacaactgggagtttttgttcacagtaaatgtgttaatgtttcttcattgcttgactgtttgtgtttaaatttaggcagcgtgcccaacagggacaaaattataggataaagctatgtataaaagaaaatccttcagagagcaccagtaaggctctttttaaaaataagcagttacatacaatagtacatggctgtagccacagagaaaagttttatctgtctagttcagaattattggaatttttctttcccttgtgtaaaagttaagaggaccgagcttatgtcaatagctaatatactttgatgtaaaaacatccattattttattcagtgtcacttctataaaaagaaaaagaaatgatttctttttgttgttcctatgatgaagagaagctaatagcattttgagagagaggtgatagatcacattttcttcccgagtaaaggaattctttcttgttaagaattctaattacagcctgttatatttttggagtatttttctctgcttttcttcgttgccatgaacttagtaaatacaattattcatgtagataggcttattttttaaaaaattaatctacaaccacaatcacctagcatgaatatgtaatgaaattcacaatcacagggtaaaggctcctgtttctctgcagtctagagagggcagaagttgcagttatctgaaaatgctggctgtataatcgttggccagccagggaatcaactctcctctttctcttaaatgttcaaaatatattgtagtttttactgtttaccttttgtagtttcttctgcctgcttctctgtaagtgaaaatgaaagaatttgccagtatccatattctgtcccaaatgtctccatagatccacaaacaaatggtgtaaagaggtaaaaataaaatacgaattttcattttgcattgttgctatcttagaaatcgggttttgcaatttacctagtgtgtgtagatatctggaggggagagagagaaaaatatgaatgtatatgtgtatgtattttagtggtttgtatttgtacattcacgtacctataggaaaacataaaaagccccttggatatttcatactgtatattagctttccttcagaaaatatatttttccccttaaataggttgatctcccctgccccaagatgtttaatttttatttcttcctctacactgttctttaaaacatgaatttgtagctgataaaccttaaagtccttcatagccattactttcttttgrctaatttgtagaaaggcaccatatgaaaattggatttttgatctgatggagtgattcttgagttcttacgagccatttatagtctatcaagtaaatccttcttagttcacggattattgacccaatggaccatattagctgcttcgaagctgttatagcccattatgttgattcagctgacacacatgtgaacccagtccacatgcccaagatgacattaacgttgttctagaagactttttttttctccacaaggctttgtatttatttcttaattttcaagagttagctcaaagttcctgacaaccattacataggtctcttgctttgctcagtgatgttgaagcatttgtttttagctagtcagtctgttttttcctgtctttctctttatgtctgtttttaaaaaccatctaatctttaaaagaaaaaagagaataattttttttcagcatactagcacacattttaccttcagattcatatagatgtcatagaaatttgtggaatttctctgagcatatgaatttagccctttgaatttgagaaaaccaccttttagaagaaatggtaacattgtatttgtgttttttaaaaatgtattacctgagaggtttcacttgaaaaattccagtgactctagccactggtaaaatcaagatgtgccttcattgatttatgtgaagcgctaatgaagccagtccaggtctcagcacagacccctggggaatctatgacctaacataaataacgtataagggggcacatagactgttcatcatatcactattattatttgtaacaggtatgattcctttgctgatacctgcttttaagtgaagaaacatattcttttataatcagagataattrtgatacacagttagatgtacaatagaaggtattaaaatgtttgttgagatgtgtcgctgatggacagtcccaagacaggtataagtaaaatgctgtagaataaaccaagtgttcctgggaatatcttgtctcactgttttcagattttgacatttcttaatataaccatataaagactataaaatactgtgctgggtcactttctttatttaaaagtgtaccactttttggcagaaaatcctagtatatatggttaactgcttacttagcattttcacttttcaagttgcttaaacctttacccatccctctccctttttgtgtagttttgttcacatctcctatttggttataagctcctattggaactgaaaacatatctgaggaaatctcagatttgtttgaggaggaggggaacaagggggattatcaggctcctttcctcccatgcccaggctgagtagaaagagccctggattagtagctgtggccatttagggacatctcagagcctcattttctgctgtttgaaaaaatctctaattttagggattttgatgattaaatacaagaatgtatttgaartrttatgcaagcttcatagcactgtacaaacatgggatattattagtcttacagtctgtctcaattggcctgggtaatcagttgtcatctgaaatgttaaattctaaaacgtaacaacttttctcccctgttgctttactggggtaaattttatcacaaacctagaggagtaaatttagttaaaaggtcacctacctatgctcttgcttaggaaatggattgattacagtgctttggcatttgaaataaggtgggcagctccttttataaagagggtaaagatttagaggaactcctttctttagggagcccttcacattgcatctgggaagggaaagatactgacttaggatgaggtgttatatttggcacaacttgggacaacttttgtgttacttctgtacatctttgcttcgtcaccaaagtgtgtgataatcatgcaaatcgattgttctttctaggattggaggtgcttttgaaacataccagaatttaagcttcatcttgtcttgcttcttgcttaatgaggaatagtttctttgtaaagtgcttaaaggtttataagtctttttgcatctcattataaatcctgtccttattaatgtcttctctatcatattatattagtaattgttttcatgaatgccacagagaaatgtaatcacattaccatctttcaaattgcattagtgaaaatgaataaaatatatatcaatggaatacaaaattgctgattcaacattaagatgaaatgagattattattacttagcatcatcagatatgagaagtgctttgcctccttctataaagttaggtgttctggtaaatatagactgagttaaaatgtgtgtttttctttttttaatggcgagctaaccccttattttcaattaggtgataggtctgttcatggaaggactatttactttctatttatgttattacagctgcctaagtagcctgtaaaatttgtaagtatacaggcaataaatggagtatcttaattgttaaatgttaggtaagaaaataaaatgtttttgcctaaattgaaatgccttttcatttcatgtttctttaatattactaattgcctaacaaaatcgcatgtattatcataggcctaatttaattgaaacacacacacacacacgcactccaaagcttgcgtatgctttgatgccatagaagcatgggtattttccttatataattggctatatcccgctgttgatttttactctgaacttctaaattatttaaatggggcctttcttatatcgattgatagtaggttgtgatagtaggtaatgactatggatgcttattggatctctgtctgggaaaatttatatgcctgtgtgtgtccctttctccctgtttgtatttatatattcacacagttgtagaaacatttacactcatatataaacatatgcccagaagtttctggttttccctctttgcctattccccctaagccaaatttgtatcttggcttttgctgaaataatttttttcatcacagtaaattgaggatttttttttttgctggtatacatgacagaattcagcattgtcaatttttaacaaattatcttagaatttttttaatactttgatattaatattgctgagcatcataactgagaagttttgtttttgtttttgcttttgcttttttgccccgcaaatatttgaaagatgtactggatttttccggatagaaaaatggcagtggatttttaaatggatatattaggttttaatattttcaaagtagaaaggattttcaaatataagcaacagtaaaatttctttgttcaccgtccgtgtattaactcacttagcatttgtgtattggagacctactgggcaaaagatgtgctgcattatgtctcctggggaatgatatcttatgggattaaatggttttaacaccactaaaagaaagtaggtggggcagtgggattcctcccaccctttccctgttttaaacagcttgattgagatatgtttcacttaccatacattccacccatttaaaatactcactgtattttactatatttatggttaggttcagttatcactgaacatttttatcacctcaaaaagaaactccatgccctttagctgtcaccctaagcctcatcccccacaaggcagccactaatctactttttatcattacatatttccctcttctgaacatttcatctgaatggaataataatatttggtcttttatgactggctcctgcaactcagcttagtgtttttcatgttcattcatgttgtagtatgtatccgtggttcattcctttttatggccaaataaaatttcattatattaatatactgaattttgtttatccatttgtcagtggatggagggatagcgttttataaaatgaagttttaaatctcctgatttttaacatcatttgatgttcaaaggtcaacttttcccagtgaatctctttcgattattttggatgtgtttattgtgaagatgatgtatttctttggttcataacatttttctcaaggttttttttggggggaggggaggggtggttaaccatctttaaattgcccagctttttgtcttttaccatgttgcctgcagtttaaaccaatggtacctggccttttagtgagtccagcaaacccaggctcttgcgaatctcctgtctcagttataagatctaatgtgttttttcgttgagaagacaccaagaaatttcagaacacattaagtacaacaaaataatcattttttaccagcttgctatttcttcatatgacattaaaaacaattagacaaatgtaaggacctttctttgaattgttaattaatttttaattttctgrttaccaccaaataagagacatacttttaggtataattttccatcatatgaatgtttgagtagatttttttaaggagacagaataacttcattgtttctcatttgctgctgttactattacattaggagtagtgacatttgcactatggtttaacatgcttgtggacccttaacatttataatcagttttataatcactgataatcatagcatgtaaattctgtgtgcattgttcattcagacttagatttatgtatttctttgtataaatggagaaaacatacccaccttactaaaactatagrtttatattaatactctcatggtcagaattagatagacgttttaggttgttaataaagcttttttgtgggatgtttaaaaccgtagatcttttgacccatgttctgtatctttctgactcacctcttccttgtctccttttgatacttggttgcaaaactcttcagtacaacaggtggatattcttttacattcrtcatagatgagttttgtaatcaagtacaagtgaaattgatatgtagtcttgtagttcatgctggtcttaagtaagcttagtagttgtccaccgtgcaagaaaaaatgcagaattttttcgctcaagctgtattgtgatgtggccagttaggaagctgatttcttctcccaaggcagtattatataaattctgaaaattatacagggagatatttgctgacttaatcaccattactatcatgtgagttttttagtctttgtggcaatgtttgaagtactgtcttagcatatcatacacaacctatataaaagtgcttgtttcatctttttggtcatgtttataagatcactctctgcatccacaatgctagcaagccattagtttgtttattgcagtgtattctatggcaatcctggaataattagctttcagattcattacagataatttgctattccagattttcgtccactaggatagacgtcttttgtgtgtgtgtgtgagatgaaggtctcactcttccatccaggctgggagtgcagtggtatgatcatggtttactgcatccttgacctctgaggctcaagcagtcttccygcctcagcctcccgcgtagctagaaccacaggtgcatgccaccacgcccggcgaatttttcatatttttatagagacgaggtttcgccatgttgtccaggctggtctttggctcaagctatgtgctctcctcggcctcccaaattgctgagattacaggcatgagccactattccctgctaggatagaaatgtctttgaagaacaaattttctttttttaagccaggcacagtggctcatgcctgtaatcctagcactttgggaggccgaggcaggtggatcacatgaggtcaagaattcaagaacagcctggccaacatggtgaaaccctgtctctactaaaaataccaaaattagccagccatgatggtgggcgcctgaaatcccagctacgtgggaggctgaggcaggagaatctcttgaacctgggaggcggaggttgcagcgagccaagattgtgccattgcactctagcctgggcaacaagagcaaaactctgtctcaaaaagaaaaattaaaaaaaaatttcttcttttccctccattagagcattttattaattattgtgatgcattttcttttaccgctgtacatactggctaatttttatattttttgtagagaccgggttttgccatgttgcccaggctggtctcgaactcctgggctcaagccatcctcctgcctcagcctcccaaagtgctgggattacaggtttaagccaccacacctgagtggctgcttatgttaatgactagctttttctataatttaatattaatgtaggtcatgtacttaactattaagcattttaaaatattttaaaatttcataattcatattgtaaatcttgctatactctccagaaattaacaaggggaaagaagagttaaaaaggtttttagggccaggcaccgtggcttacgcctgtaattccagcactttgagaggccgaggcgggtggatcacgaagtcaggagtttgagaccagcctgaccaacatggtgaaaccctgtctctactaaaaatataaaaaattagcccggtgtggtggtgcgtgcatgtaatcccagctactcaggaggctgaggtgggagaatcacttgaaccctggaggcggaggttgcagtgagctgagattgcaccaccgtactccagcctgggtgacagagtgagattccgtctcaaaaacaaacaaacaaacaaacaaacaaacaaacaaaaaatggcttttaggccaggtgcaatgactcacacctataatcccagcactttgggaggctgaggcgggcaaatcgcttgagcttaggagtttgagaccagtctgggcaacatggtgagaccctgtctctactgaaaatacaaaaattagccagaagtggtggtgtgcacctgtagtcccagctacttgggaggctgaggtgggaggattgtttgagcccaagaggcagaggttgcagtgagccgagattatgccactgcactccagcctgggtaacagagcgagatctgtctcagaaaaaaacaacaaaatttttttttttagttatgtatgggagattggtgaaggttaatgaayccatgaagggagctccttgtgaatagttgtttttggttttgtttgtgtgtggaacaccaaaacccagaaccggaatcagttttttcccctctcattatgattagtcgttcagaatatgtgctttatgcttctrtttgcccaaaggccatattttgcatttttaaatttgcgtcagataactgggataagtgtccctaaacaactgctaataggagttttatcagttagccttgtgtgtagttcttttgtgaagtaccctatatatttactgaaacaacaatttgtgctttcctgagaaatatgatttggtcagaagattggggttcaattcacataaacttgcagaattggaaccaactgtagagctagagacctcagctttagtgataacagaacctatcctctgtattagagctttggaatgcatccaaaatactttcaaatgtacttttatttaatattcagatataaaagtgttactgaccaaacattgattagtttttttactaaattattcttctttgtatattttagatgtacttttgcatatgaatatttataattatttttattgtaagttttctttagttttctacaggtaatggaaataaactgagtcataattgggagatttgtcttcttctccactagatcatttaagagccgtgtaaaacacataaacgtttctgaaccataatagtaaaacagaaataataatctgtgtgcctaccttagaggactatagtatgaataatatggtattatgtatgtcaaagtgttcatttatttattaagactaaatatgtgttaagcaatttgcaaggtgttggagtaaaacaatacattgggaagaatcataagagagaaaacaatcatttaaatgtaatatgtggaaagtttcttgtggccataaatggttgtcatttattgagcttttcctgttgccrgataggttaacacttactttttcttcattatttcatttgagtgttttgccactgttgcaatgtcattgttactatcattttacagatgaggaagcgggctcagagaatcatgtatttttaaagtgccttttgagcacctgttatttgccactatacattgaaagcccaacagacatgtctatcctgccctcatggaacttaaattctagaggggaaaacaaacccatatcgataatcacaccaataaatataatattcacaacctgtactaagcattatgacagatcaattatgatacagaagtctagtggggaacttgtcttgaatgggagacagggcagctgccctgggaaatgagtggtacttgaactccaaagaataagtagccgttaacaacttaagcaggacttggaaggagggaagctagagagcacrgtgttggagaagtagggattgagaatttggatagcagaggagtcagctgtccaaccaaggagaatggacagccactgtttctactctagtaggcagaatctgacaggagrgtgaaaataacctcagtcaagcaaatagcaatcaaccgtgtggatctcttaagaagagagaatgttcatgcagatggggagagaagagaaacgtgtaggttaattaggagacagtttaaatagtctagaaaaaaagactggaattatggtagtaaccgtgagaataaaagacaggaaaggaagggatacataatctttggagaaaggcagaatatcagtgaaaactctgccctataacttgctgtgaatggaatcgtagctcaggattcttagctcaacgtgatggtgcacgcctgtagtcccagctactggggaagctgaggtgggaggattgcttgaacctgaaaggttgaggctgcagtgagccatgatctcaccactgtactccagcctgggtgacagagctagactctgtctctttgaaaaacagaaggaaaaaaaaaaaaaaaaagattcctagtcagtggaatggagagttgtttctgatttatagatctgtgactttactagttgattgactttaggtaagttagtaaattatctctaccttagtttcctctgtgaaataaaagtaatagtagtaacaactttatgctattttctgagaactaagaatgctgatgtttgtaaactctgtagcacagtgtctggaaaatggaagatattcaatacatctagctattattataacaggtaataatttactattgtaaataaataaattaaaatcctgaggtttggtagaggaggaataatgcataggagatagtcctccaatctgtgtaagggtttcatttatgttcttagttagggtctctcctctaaactcactgcccccaaaccccaaactatcaagtccttgatcacagggacactgccatccacttcccaccacttaagaggcagtgcctggctccacagtgacggtttttgcttagtggtgatatttgaagctgtaggagggcgtgaagttgccaaattaaagaatgaagagcttggccatgggaaacacctgtatttatttacagtggagagagagagagagagaggagagagcagttgatgccagaaaaactaggatagtcagtctctacagcccaggaatgaaggagagttagtgcagcaagctgcatcacagtctgggaggacaaggagactagaaaaaaggaccagatgggatgagaacattgcctctcagagagacagtttcaggcacgtgtggggcagaatctggattgtagagttaaaatgtaggtggtggtgaggaagtgggagcactggttgctgggtgcatggatttctctttcaagaagtcaatggtaaaggtaagcagaaggaataattactttcaataaggtgcagacttaagaaaatgtatggttgttgttatggttgttcttggggagttgggatatgctgatcatcttcactgckgcctccattcagctcatgtctgagagcctccaaccctcttctgggcactcggaacaagaccaagctgtatgtggtacattstrtgaacgacaaactttgaaaatgcaggtataaagaaaagagcagacagtttccaataatggaaattgaggaaagaattacaaggcaccctggcacccttgttaggctgggtcctggaggcctgctttacccagacctgaatactaatctctgcatagataggtgggaacactctgactgaactctctgctcctttctgcatacctgcattttcaaagtgtgtagttcacagaatataacagcttggtcttgtcccgagtgcccagaagagggttggaggcactcagacatgagctgaatggaggcagctgtgaacatgctcacaagaatgaaagcatattcatttcgactcttcccaactgtctccttgtaatgcatgtacatttttgaggcttaactggttttgatagttttatgataacttatgttatttgcgtgtgggtgagttggccagtgatcacgttggttctattttgttgtgaataaatagtatgtcaaagttttatgctgtttcaaaaatgttatttagaataaaacttcctttgaagcggcaatagtctcttactcaaaatatttatttagaccatattgtttaaatatatataattctcttaagggaaaattgtagtctatataaatctgaatttaaaacaaatagaccttctggaattcatagatatacaaaatggatattctagtgcttaagtgtttatatacaaaaggagttgaggtgttccagtgtttgcatgtttaggtacaaaaagaatagaattcataaaaaggaataatgatctaaaaagttgaattcccgaatgtaccaaatgtgtaaagttatttaggaagacaaaatatttgaatcataaacttgttcagagtaagtgaatgaatgattcaaccagtaaaaaaaataaatacacataaaaataaatcaaatccacagtctgttaatttgttctcgtcttaaatatggctgtaattaaagttgatgaaagtgtgctttaaagacaatacaaaattaggatatttttataaaataattaaatattatcaaattaatgatttaaatatttgtgtcttttgtgctggagtttatattaactgtccttgaaataccatctcattttattggccctcccttgatttcggtaaagcagagctattttttttaaagcatttatgaaagcttttattattgcacttcaaattatatgaatgttttaatgtcaacatagttcccgtatctgaatttataattagataatttgtaaagttcttgtttttagtggaaatgctgtcctctaagctctttttattttggtcacagtacaatcaagttttgagttcattaactaatgaacatgttatttaaataaactatttctgacttgggatgttctgatatatttctcagttaacaaattattgaaatttaagaacttctggaagaaacgtttctccttatagtctacaaattaatcacttctatatacaacaaagtttacaacctagctacaattggaccatgtttggaagagagatcctgaaatatcagggagattatacaattaaatatttccctagtgctaaattgaagcacaaattaaagatgggggtgaagtatgaatggagtctacagtgaggactccaacatctgaaaccaatagggatccatagatttaatattaattaatggaagagaaatattttacacttgcctgatctaaagcatagggaatggtaaaagcctgctcagtcttattctctgtgaatggaatttgtcccagtcatgttaacaatatccaaaatactgcctgttacaaatgagacagtttctataaaaatcctaatggttccagaaatatgagcatctggagctgtgtgagtgagcatggctttcaggcacagagctgcagtttcaggtatccccatgcccacccctccaccccagaatcagtaatcattgattgcatctaaatctgcagagagatcttttcctggcagttcaagtagttacagtagattgttaatctgcgaatgatcagactaaatcccttctgtcttcagaatttctatgcaaattagaattaactgtatgagataaatttattaactgtagtccgggagcttaggtcagctttagcactattcttaaacataggtttttattcataaaaagttacactccatttatgctaattttctatggattcattttataatattaactggtgagatggttttttaaagtggttataaggaaatgaaagatttttaagtgtgtttttcagttttctgcaatacaggtgtactgttccagatataaaatattcacataaatgattttttctgttccatgtctgatctgaaaccaaaatttaaacttattttctttcttatgtcactgttgaaataagaggaggattgttttttatttttcaaaacaggaacgaaaatagaataaaaaatattcaaggaattgggatgtgattaaataataatagaaatatgttaggtcttattgagcacaggagtgtctttaaaatatatttgagagtttagcacaacatttaattgaaattcagcagaagaaaagtaatattctaataataatatttgtgtgccatattttactttcacaaacatttcacttgaatattattttgttacagtgtattttttgctttattgacaagtagagaaatttaagtggaaatatatattagcagcaatatacttttttcttttttggatttgtgatgtcgtaaatccggtatcttatcgaatatgtaatcctttatttttattctaagtttgtaatttaaaggttactgtgaatgacctaaaacattgtattagtgaatgagcttttgttttctttaccttttttaataagagattttggtgatatctaaatttatttttaaaactctccaggcccctaccatcataaaatctttaaaaatagaagtgggcaatatttattgaaatggtgaaaagagtatagtatctttgaacagatgctgacctttttttcctcctttatttttcaggccatccgttgcacactggtaaactgcacatgtgaatgttttcagccagggaagattaacctgaggacttgtgatcagtgtaaacatggctgggtggcacatggtgaggaaaatctgggcttttcttcccgttcttattatgttcatgttcgtgtgtgtgtgtgtgtgtgtgtgtgtgtgtgtgtgtgtgtgtctgtttagaggagtcactggcctggagaagagagaggtcagctgtgctccaagtgttagttaagattcagcctgcggctctaaaacagcatattctcagctccaaggagctaggcgagcagctctcagyagaaggccaagatgtttataggacagttgggctgtgaagttcttactgagcatgggcgcagccagcaagcaccaggcctgatggaaactcaaacataccacagttggcctttcagggcctggacctcagagggaagctggcaaatcctccttgcttgagaactcctcgatgactgctcacccttgtcgtatgtgctcggggctgagcttatccttctagatgttaaatgttgtatggtctcaggtggacgagagagtgaacgggaacattatttggctggtatctgaaaatataacctgtaaatactccctttcagtgtgcatggggattggaggtggtcgacgtaggtagagtgtgagctctgtgtaggtgtgtgctggggtggggagaccccacgcgaaggatatgagtgttgagggtttttgccaggtgcacagagccgttctgtcagtgtgccctgaccgagcgttcagcatattcctgtgtatggtttatgtttattctgtttaagtaaaaggagacttggaaataagcagacgtttttttttccacctcccagactgtagaatttaaaaagataggtaatgtttataaaaagaaatcctggcttgagattttttgacagccccgggtattgcctcttaagtggacatattcttcattcccaagcagtgccaaacatccagtgggttgtatttttataaatgtcatgttattctagcaacatctgaggtaacaacactgggccatgcctcgaaatgcttttaatttatcatgtaccttgcttgtgagggcgtgtgtgatggagttgcggggacatttcagccatgtttctgtgagagagagtactctgagaggaatacccgggaaggggtatgtttccaccatgcagccacaatcctgcagtccttcatgcccacagggatagagcgctttcctgctttattaacaaggcccaaatcagcaacaggtctcagtccagtcttgaacaacagatgagctgcatttacttctgcagtctctttatgttactacattcaatgatttcgtctctcttcatatattagtttgctagggctgccataacaaaatgccacaggctgggtggcttagagagcagaaatttatatcctcaaagctctggaggctagaattccaagatcaaagtgttggcagggttggtttcattctgaggcttctcctcctcatttgtagatggtcacctttacatggtctctcctctgtgggagcatgccctggtgtctgcaacctccaactcccgggttcaagcggttctccttcctcagccttctgagtagctgggattacaggcatgcgccaccacacccagctaatttttgtatttttagtagagacgggttttcaccaggttggccaggctggtctcgaactcccgacctcatgatctgccagcctcggcctcccagagtgctgggattataggtgtgagccactgtgcccagcactggtgtcttcttgtgcatccagatttcctctaataaggacaccagtcagattggattagggcccaccctaagggcctcattttaacttaatcacctctttaaataccctatattcaaatatagtcacattctgaggtagtaggggttatgacttcaacatagtaattttgggagaacacaagcccataacagttcccaaatatcctttttttctctgaagaagtattggttttgctgggtaataggtacagagcttatatcctaaactcatcagaaccatatgaatattggaggcagtttggttgtagactgttctgaggtcaaatcctggctctgtcacctcatgacatgttaatattgctggacttcagttttcttgcctgtaaaataggattaatagttcctactttacagtcttattatgaaaattaaagagaaaatatatgaagcctttctaactaatacatattaaaagtaaaatggacagtagatgagcactaaaggggaggccagtcgttgaacaaaggcgtttcatttattcgctctcatttttgccaaagccatcttgtattatcattatctatctactatggtagccttggagtataaaagttaactgtgtcaccagtttgttttatctatttaatgtccatgtgcatattacattagtaatgtaaaggaaaaagcaatgttttttccttcttgaacaacataaattattcctggccagtgattgtttcgaggactttctgaagaatgtcatttttcacccaacttgaataagatgtttttgttacaccagactgtgctttttctactgtaccattaaaaattctatgtttctaggatattaattttggtgtttctcagaccttagcaaaatgtattctaattctttcctttacaattatcaccttgacctcttttttcccacaacagggagatatctgtatacagctcaaaatgcatacayccaagcatgtgaatcccacactctccccattcatgaggccaaatacagcagtgaggggttggcctctagccttggagttggcagtgggatgacagcacccactctttttgcccctagcattacaactaattgcttcattccctctctctgcacagaaaccctgaaatcgtgtctccaatgacttctgctcagaggtgaaacacagcattctttccggctgccttatactgtgcagtgtcctgggtgtggggcaatgaggaagtgacttgggttttctagtgtgtaattttcctctgaaatgcatggaacagcaacaaaactaccaagatacattscccagaatggtttcatggtagcactgaatgcattctacctgtcattatgtcaataaaaaaatttttaatatctgctgctaaaaaataaccaaatgccaaaatcatgtattctctctaaaacagatttttagaaatttgttgacctcctttcttgaataaattatccttgttaacagcattttcagttcattcctaagatgttggatttcatgggtcattatctaccatatatatgcacatatgtgtgtctctgtatatgtacacacacagaaacacacgcacattctctctgttgacttacagattgcttactaaagctgcgtaagttgttgacgttaactactttacaaaaatctttagaaatgtgtttctaaaaaattaaaagctgggtgtggtgtgtctgacagcctgtattcccagcactttgcgaggttgagacaggtggatcgcttgagcccaggagttcaagaccaacctgggcaacatggcaaaatcttgtctctacaaaaagtacaaaaattagtccggtgtgtttgcgtgtgctctcggtcccaactactttgaaggctggggtgggaggtttgattgagcctaagaggtcaaggctgcagtgagctgagatcatgccaccacattccaatctgggtgacagagcaagactctgtctcaaaaataaaaaaaaaataataaattaaagagtgattaattcattatactgcaacacctgggttttgaaattattaatacttagtgggctgtgttacttttcacagagtattttcttaaaatccttagcactattgagttaagggaggaaggaatctcagagcagttctgaataccagtaggtatttcccactaaattaataaaggatttcctaccttaccaccaccctgcccacattaaggaatcttagctctttcactctgataatagaaagcagggcttattgaatttacttaaacatttttttttctcttggtaaaagatggccatacctagtctgtaataatttagttgatgggccagaaatggctcagaatttctaattctgtcaagtctctgtaaaaggactccagtttactgccactacttcactgaaatactataaatactatattttttactttcccttgtttgctttatcttctcagtgcgtttccttcattcacctaaaacaatctgagtatggcttgaaaaacaataacaacaaaagttttttagagctctttttggttcgaaagtggcaaaataagattaagatatcaggataagagcagtaatgggctccttttctggtgatgtaatttttttttttctttttaccctttgcctccacactagagtagcaatttggccattcacagaattcagacttcagccaaatattttacagaatgttaaaaattagctggtacaactagaatacactcagcattgggtgcaggtgggagtgagtcctacttactattctcccttgaagaatacctgcttctaacaggaagcattaccaataggagtttgctgtcttcgtgaaaaaaaacaggaggcatgatgtaaaggttgaggactgctgcacgaaaccatttttattgtttaatatttgcaagttagttttaatgtccatagtttagatgargactttatttctaaaccattaagatgaaggtaaataaaatagtaaaaataagaaagaaaacaaactgaattctaaggygttttaggaaatatttaatgataatccagtacaactggaaaattgtttttatcccatgatatttgatttgtgtatttgataaaagaggtgggcagattttacagaggtaattcatttagaatttttttttaaactagatcagtaactttttcttctgatgaagctcatttgttaagaccatctcttttttggaaaaaaacaaaaaaaaatttttttttaattccactgtttcctaggtatgtgaggtgagcatttggcaagaatatgagacttgatgaataaaaaatacattttatagcttaacgcacccacagcagctttctctgtgcaaattattttctttttttttctttgactttaaatgaaaggatataccattccaacaagctgcatgaatactagaatcttcattcactttcaagagatctgaattaataccagtgttatttcctttggctgaggtctgcctgcaagaatgcttgttgcactggaattttgagacctttcttttattatgttctgtaaatgtgatttccttttactgcatgcatttcattcgaggaaaagatagttttacattattactttaattatttactaattaagccagcttttttcctgcctatattttctccaaactcctgatttttttttaatgtaaagtaagcagacctggtctacatcatccagatcatcagtcagtagatatttattaaacctatctcatacatgaaggattgtgccaggtagccttcagttcttccacggaaatgatgagaagtataaagttaatttagtatcatataccaaccagctttatggtttaatgtactgtaagacttaatatgcatataacccattaatttcaaacctttttttttgtattcactggatataatttttcttttttttttctcagcatggttgaatttgaattttcagcttgtacttgatatgtcttatcagaccaggggtatttatagagaccttcacccaaatagaaaatatagaatttttgattgaatctgaatatcaataaacaataaatgattttaaatataaatattaccatgcaaatttaggtgagagtcctttatgtttatttgctaaatctggcaagcccatacctaaaagaaaatcctattcagactcaatttgcataaatcctaaatcagggctattggtcataagcatcctataatcaaaaaggttttgggccaggcgcggtggctcacgcctgtaatcccagcactttgggaggccgaggcaggtggatcaggaggtcaggagattgagaccatcctggccaacatggtgaaaccccgtctctactaaaaatacaaaaattagctgggtgtggtggtgcrtacctgtaatcccagctactcgggaggctgaagcatgagaatcgcttaaacccaggaggtggaggttgcagtgagccgagattgtgccattgcactccagcatggcgacagagcgagactccatctcaacaacaacaacaaaaaaagctgttgattatatcagtcctacatttagaatcatgagatctcagtattttatttacaaattcctcaagttcgttggaggcatggtagtttgtaaggacttacaagcaaggcagatcaaaacaagtaatttttcattttgtcctatgaaagttcacatgtctttattatttgtcccagtctatgttcttataaattgtctaaatatctgtgaaagtggtttgttcccaactggtaactctctaatattctccctgacttgagtccaaaacctagcataactaaagtagtccagtcttttccttgccaatctcttttcttccctagtcttctctccttcccactccgmatagaaattcctttatcataagaataaagcatgacatttctgtgatatcatgctcattctgagtgactccacaacagtgtccatatgataatttgtaaatgtgtcaagataaagagaggagactaaaaaacaactaagtttcgtctgacaaagggagataatgttcccagcaagctctggcttggagactatcccaacgaaaacaacattttctttcgtagaaatttttttccagaggggtgtttagggtttggtgaacagtagcacaggcactaatttgagtcctcaggggaagggaagtacatgcttagcagtggcaaagtaagaaccagatccttaggggaaatgtttctagggctttgttcagaaacacaaggatagaaacactatcgtcttcttcccttggtgcactcgtttggaaaaagcggaagctggtgcagtatctgcttaaagaatttgtctttctagtggacttagtttttccagattgtaaatgctgaaacccggctttgcctagctgcaaaattctcttttgctcagggaaaacagcttttagctgcctcctagttttggtgaggcagctggattctggtctctccatgagcaaagtccttrgacttttttcttcgttttagagagcaaaagcaaggccattttcctgcctggcacaggaggcttttttgggcttgacctgagggcacagtgccctcttctgcctctctcctttacttgctgatcactgctgataagctctaaagggaagacatcctcataaatgcaaaggtttggtgcttgattaatggcactaagtattttcttattgtgtctctgagcagcttttgatttgtttctcagcctgcacactttttggatggtgctttgcactccttaaattttctttaaacccagcacaaacagtgcctccccttcaaagtcctgggctgtctgcctattagctccccagattttctttttttcctagctatgttttattcagatggaacataaagtgaggctggcaagacctggcctccagtgtagtcactgctggtctgctggtaaggagtttcgtgggagggtgttgagaatgaaacacacagagctgtatcccgcttcgggtgaatgaatgggaggcaatatacaaaataggtaagaatgttgttcttgaatgagactgtttacattcacgtcgcggctctgtcacctactgtaggtagaatcttgccaagttgtataatctctctgttctgtcatctgtgaaatgtgagtgatgatagctcctagctcatagtgttcttctaagattaaatgagataatccagatgcctcatacatagtatacacttaataagtgttagttgctgttatcactaacttcctataaaagtaagacttcaacactgtggacatgatagacatgttttagcaaagtagagtgattaaaagttgggtgtggccaggccagtggtcaaatcccttctctgccttttgttagtaatgccttctctaagactcagttatttcatcgagaaattcggataataatagcaatgcatctaaataacacagattcattttgagagaggattacatgaaagagtagggttagcccaatattctggcacaacaattttaggagctagtattgttattgctaagtcaataaaataatattaaacatcaatattaatgataatatctagtgtctcccttaaggtacgaatgtggaatgtgttgggatgaaactatttctccttccagggaaggttttcttcagtatgcagttgcagaggtcaggtcaccagttcttttggctgttggaccaagtgttccgtaggtgaaattgttttcccaagcaaatccagtatagttccataccttccatttcccctaaaatgtcatttgagcccttatttgaacacagtaaggaatattttacaccaaaagtcattttgagaattgcgccagttaaaataaattatagtaatatttacctgctaaaaatccaaaagctataagtaggtgaattttaggtaggattaaggctacttttacctattttcacacctrtctttttgcatgtgaagtgcttcgatgggctcgccactttatcattttattgcattttattacatcataaatttttatatcttgctaacgatcctacaggaagcttaattgtttataggagcatcttaattaactggagttcaccaggttaagcagaacacaaattgaagggkttataaatgaaacacactcaactcctctccttttactcaggataaactaggagattcggctgggtcgtaaggaccccatatgcctcagcaatatcatgttgatcctttcaaccactcttccttctctattatgtcataaatggtgacttctaactcctctcccctctttactgaagtgtgaaattgctggataagtacagtatttcaaagataactctgaattgtattctgggagccctaaaatgttgtttatacatcccatttcttaccaggttttgcctttgtagatgtttatatatcttcaaaaggttcttgaattaatttgttattagttcgcatatacccaaagaattgtataagaagtgctttaagtattactttaagtattaccacaactggatagacttgtaaccagtatttgttaaaaggcccagtagtgagattcctctcttcgttcagctgctccctggtacccagggagatccccactttgacctcatgggcctctttgccttctgtacagtcaagtgacgctacaaatttaaatgcaaacccatctaattgaaaggacagtcttgggccttagattctactcgccaagaaatgtaaaggcaactctacacctggctgtccaataaggaagccactgttatggctttgaacacttgaaatgtggctagtccaaattgagatgtgatgtaggtataaagtgtacaccaaattttggagctgtcatcttatttaaaaaaagaatgtaaaatagtcattaagagttgttcttccatatatttttgatttatcatgtcaaatacgtttttaaacatcacttttttactattttacttgaaactagaaaaattaaaattctgtatcttggcttgaattatatttctttctttttctttttctgtttttttttttttttgagacagggtcttgctctgtcacccagatgcaatggtgcaatgtcatctcattgcaacttccccttcctgggttcaagcaatcctcccacctcagcctcctgagtagctgggaccacaggtgtgcgctaccacgcccagctaatttttgtattttttgtagagatagggtttcgtcttgttgcccaggctggtctcaagctcctagatgcaaatgatcttcccgcactggctcccaaagcactgagaytacagctgtgagcctccgtgcccggccataaattatatttccattagacgtggtaatcgtaggctctaggtatgagagaatatatttggagagctaaagcctaggttaaagtggtttggtggcagagtagttagaattggtgtgakaatcctaacaccctaaatccaggctcttgtcccttgagtcaccactgtaaactctttcccagtttttcgtactttgacgcttgctgcactattgatcctggccagtttttcctgtgccttgttcatcaagaaagtgggattcccacccctttactcccctctgcaccaccactccccacccccrgagcaattaagtgctcccttctttattttctcaatacactttgctgagaccagaggtttctgggtaatactgatccttccactaacttgaaaagctcaggaagggcacttcacctttgtgtgctggaacatactgcagcatctcatgtggtgcatggaacaaaggtttattgaaactctaagcttatggaaaagtctcactcagattcctaattgccatttgcttttccagcagcctcttcccattttaaggtataagcacagcccacaaacaccttgtctttatgcccatttgtgcgtttttcttttccagttctcattctattttcacctttgctgtttccctctgtcttcagacaacaaaataagtgaaaggtaagtgggaggttttagcagcccaaacatccaggaagtaaattttagagaagttaaatttgtttaatcattaacagatgttggtgtttttgttttattcagaagataagatcttgagtgaaataccttcggctttccagtttttttatattcctttgcctgcaaaaatctgagggtaagacattacccacccgcctccttttggctaatcgtgttttccactatcagtaaaaattaaaaaacaaatcaacctctaacataaaagaaaacacctgtttggcttggagaacttggctagggaggtgttttttctgacatgccaaaagcgaccatcacaaggccccttaaaaaaaaagtcatttttttttctatatttcatgtgagcattggcagaaactctgacaagcagttcttcatattttattatgttcttgtctgcagaatctgtgtcaggcaaaaaccttgtcagcggaaaacctgtcgtaggatcagaggagacaaaaacaggtgtcacacaggcagtcaaaactgaaggaaaaaaaagattaggctaaagagagagaggcagacaattacattaatgccattgcttttatcttatagatgtgtgttattatctcggggtgctgagtgcgcaattgcctcaaagaaaagtagacaggagacaaggggaaacttgatagttattaactgaagaggcagtgtgtcaaagctggatggggttcaaagttttgcaaaggaaaaaaactgcaggcagcaagcaacggctgtgtggttctgctttcggctacataaaccgagtagctatctaacattttctacttggaaacagatcatagaaggaaaaattaatgaaagatttcatttggagttcttgggggataacatttatcctatatatatgtgaatgaatcatataaccttttctctcttacaaaatcttgctacaatgtgagacatggtgaggcatgaagacaggcatttgtcagttcagctgtgttgtttggatatatttaaaacacctattatcaacacacttttaattaaaaaaagctattaagaagcccttttactaagtgtgaacatctgtatgtgcaagctgtaaattaggagatcacatatgtgtgcctcagtcagagactaaatgaatttggcaagtgttttcttttactggtttttaaatacagtaaaatatctcaaggaaaaattgctacattttacaatttgtattgactcttttgattgtgcccgttggtactgattaattgaacttatctaattagaaattttctaattagaaattagggttactatcatgatcaaattagtaaacagaattcaaagcactaaccaatatatcccctctgtttctttattcacattatttcagatgtcacttcttttctgaaagtttgcgctccattaaatatgtgtgatggtataaaatactttcgttttgccaatggtctaaatcccaaaagagtttttgccttgttgataactcatacatgtcaaacagcccactaatagagaatgggatggtaactttaggtttccctatctgctcaatgatatgttgatcacattagtggaaaaatcggcagatactgctttagttcttaacattttctacttgtgcatttaagatttcgttaggttagacttttcctaagccctaggactgccctcttaacccgtttttatgaggaaatctttacatagggtctttttatcccaccggttactgatacaaagcagtttgatacttgatatatgcattaagcaaatccagcagtccagaagaaaacacacgtcagtgccaaaagtgtgtgtgatagcctagagattttaagggattacagtggggaaaacagattgattatagatttagagtgagatttcagcctgaattactgggggaaggaggaaaaattacttgtgacacaaaggtgacattcatttttctttttcaagactgagtataataatttctttcttttagatatttccctaccagatgctggctttttataccacgactctcaattttgaaatattttttcacatgtgatagtttaaagcatatattttatcaaatagtaaatatgccttgcctttgcactttttgcttaatgaaattcttatatagatatatgttcctttaagaaaattaagtctttaaagtgaataactggggggtagggtgattattttcttacagaagaattcgtatttttgtttaataaaaggatgtacatagttaattcaggtagcaaatctcaatagttacttttaaaatgagatatgttttatagtcagtgtactgtgtattaaatccattggtacataaactggataaagcagggtttgtgtagccaactttaagctggctgaggcaactggagattggatagaacagcagtggcaataataataattcccaaacctggtttcagcaagtagattcagttactaaatctcttcttagatctactgtcaaatttgcagataaaattttctctttgcctgttaccaccttcatgtggagttgctgcaaaagagcaaaggcatgcccccaaaagtgggccatgtaagaaagaagaagcgggagaataagtataaccaaggacctgtttaatctactagccaggagagagagcttctgaacaaccgagtggtgaaatacttttatgtgtgcctcagtcagactttaatgcttttcaaagtctgttttgaggactttattatgcgtaaggccacagggggaaatgccattcagtttgaaatattggctgtatagtctcgagtggagctcagtgtctaccctggactaattgtgggtgtttatatgtgtatgtatatccacataccctgaaagctacatgtcaactgaggttgattaaaatccgtaggacagtggggcttaactggaactacttttgtccctcttccctccctacagtttggaattacattcataataaaccatgagagtatttatacattatccctcatgtattaagagatgagaaaaaaaatcaagggccattcacataatgtatataaggtatagtaatgtaatgaggatttgtagaggttcagtggagtttattcattttaaaaaacactgacacactatttgttgaagaaaaaaaaaaaaaccctttgtacataagggttgacagtttttatcaccacacttggggatcaactcttttagctaaataccattcgttttcttcttctctttaaaaaaaaaaaaaaaactctagaagcaagccttggtattaaatatcctaattaattcaaccttgacagttacagttagaaagttgtgacttaaatggaacatgagttattttgtacttaacttgctcccagttacatagttctttcccccagaagtagtgaataaaatgtgcagatctaaatattacttcacgtcataagaaatttttctcttaatcacaattgttgcctgccttcaygatctcctgattcactaaaaagttttaatgtgtcatcattgccctatattaatgttctccccaagtgttaaggcttttattaggatctagcttacaatctaagagtagactaagtctttgccttgagccctgatgcttttgcctggtaagagagctgagtcttacaatgggaaaggattgatgtgataatgattccaaagggcccctttatgatgaaattctaaatacgcaaaatcccattaaacctgtggaagtkcatgggctaggtacattgaaatgacatatcattatattgggtatagtgtgcttattatgaagtgtggtataattgaaaattattggtcgtattagcaaaaatgaagagccaccaccctcataaattcagaggttatggcctggacatttgagataggagtggtaaaaatattctgtttataaataatgaaaactttaaaatctgaccccagaaattgctccaataaaaatctcatcgctaacaacttttagaactcttaaagtaatcgtggaaagagtttcataaaaacaatccctaaagacgtgtgttaaatgttaatctattggaaattcaaatagtagtctaggatccagagctcctaaaagctgaccacttgatgcttgtaatttggaattctaaagggagttgaggcaagagacccagagttctcgaaacaattagccttgtaatttaaggctcacttggctttctcccaaaataaaagaataagccttcttttttaacttgtaaaattacttcaaattagcattaaaaattttgaaatatccagggcaggactgaaaattagtgaaataacaggtttccatttagacccttttcgtacagatttttaattgttttattctacaaagtaagtggttttgaaaaatcattgtacttcacatacttcttatcttattgaatggctgctagcttcacactgccatgcctgaacagctagatggactccactggacctcaggacctgaaatgagcatattcctgtggaaaccaactgagtcacttgaatttgacttttaaggaaagttgtgtttaaaaaaagttgtggaaaactaagaactataaactatcactgagagccaattttgtaggatcagtgaaaagcacttttatactcttacattaagaaaaaaaagtatctgaatatgttcttatttctgtgaccttcacagaaaatattggaagtgaagtctgtagaattacaggtttacatttattttaatttatttgaaggtttgaggagcaattcctgttatttaaaatagaaataaaaaattgttattcgcatttcatgtgatagatgtgttcttttataactacccctcacccacccccagcactattttatacatttgaaaactgaattttataaaggacattactttgttctttaagttagcagtatagttaaaagtacatattactttacatttattacccattttgcattatgttttatgctcattttacatttatattacatacattaatgaagcacagaaatctcagctgttgtccttatggcaattctgttcccacataaatgagttttcttcattcagactcaagtgtcattttggggtcctgtggcttagccaccatgttcctttggaaaactatagatcttatcaaaatatttattgaaatyatatccaggcctcaatttctcctttgttttgtagccataaaattgccagtttaggcctctgtttctagcattttaggaaatccaagtaaattatgtcccatcagtaacctcattcacagtttaaggagcttgtattgtatgaatttttttccttttttctaatatctttatcttgcagttaaagcttttgctttttccagatgaaattctgcrtactaaaaagagattaattgaccctttgtttgtttttcctccaggycttttacaaaagaaaaataatcctgtctttatagatgctcttcttacagtcttactgtgtgactattctctgacgactttccagggtctatactacacctttttctatagctataaggccatcagtctagcgtattgatcacaaatctagtgatttgtgctaccattatggatgattttcataaagtctgtgtattatgattcagtctgtgtaccttgcaattaagattctttttcttaaccatattagacttctatcctgtttttctactaaaagtgcattgtaatctcccaagtaatacttgacctagtaagaaagaaaatatgccaagtttactcaggattcctgcttagctagcagcgccaccttaccctccaaattgccttaattacccaccttcacttattctgtgagggggtgctgtctagaacaaaagaagggttgagaaagggacatggatgaaattaagaatttggtggcatggtggaatcatacatttaccccttccattgaaaatagaataatggctttttattctattatatacacttaactgtgttcatccatccaacagtatgattactcaacactctttagtgattttgtttcaggtatggttgctgctcaaaatcaaggtcttgagataagtaggaacataagtgatcccaggaaatggtagagtccatttcctcttatatgagggagcctctctaggctacatggaaaaagaaaatagaatataaatcgaaacgggaaagaaaaggtagttagaggagttaataagaaagaagaaagacacttgaacagcgttgaaagtaaacgttctgagaaaatacagctttacggatggaacctcgcttatctctctggcgtcatcttggttcttctcttgttcatgtcctggccgaattggctttgcctggaatacccgactcccaccccattgaaattatgttctcatgtcacatatccagtttgtaattttgtgtgttaatgtgtttgtttatttgtttgttgctttttttttttttgagatggggctcattcttttgcttaggctggagtgcagtggcgcaatcttggctcactgcagcctcgacctcccaggctcaagtgatcctcccatctcagcctcccaaggatctgagattataggtgtgcaccacaatgcctggctaatttttgtattttttgtagagacagggtctcaccgtgttgcttaggctgatctcaaactcgagctcaagtgacccacccacctcagcctcccagagtgctggattacaggcatgagccactgtgccctgcagtgtaatttttaaaagtctgttttcttcactagtgtattaacttcaagtgggcccaaatcatagctgttttgttcttcactaaatctctaaaacttagcatgggacaggaaatacacatttagtgaccaaatagtaaagtgctagtaatatgtgaaggtgctgggaaccttactttgggcagatcagagggcccatgtcagagagttactagactggaaagtaaatcaatctgtccaaggtcttctgacccaggttaaggattttgtgtgtgggtgagagagaagtggggcagttatgtgtgtgaagaggctggggacgtcattggaaattttgaacagaggaaagactaagcagtattttgagaagattgacttggttttctttagcatataataggccagtgagaacagagagagaccaaatcagttaggagcccttgtagtaatgaagttatgaaggtctaaaagcctgctctaaaatggtataaattagactagaaagaagaaattgatccaggaaaaactgcaatggaagagtttaaagtgattaaggatgacgatgacctacggaagcaagggaaagtagtcagagataattttgaatgttcgtgctagataatgttaagggagacaacaccgccaccaagatagaaacttttatctacagtatgacctcaactatataaagttatgtattgaaaaaagtagatgtagatacatcttaacatgtggacaatcattgttttgggtggtgggattatgggtaattgtctttttgttttcctttttcttgaatttagaacattttgtcaataagcacctatgagaaaatgacacacaaagaagtctgatttcaaatattttggcctagtttcccagttctacctttcacagcaaaaggagtcaagtatgtgtttggagttgagcttgggcagagcgaaatttaaaggttagggatcatctgcatagtgtaggaatagttggattcctaggggcaaatgatcacaggtgggcaggtggagaggcagtttgtctggaaacctgatgtttcctctgaatctcgttgattttgcctccagatcttccaaactggaaaatcccaatcattttgtagctgtgcctcatctttactacaagcatctgtttttcctcctacttcttagcttggtcttgattttatgctttcttctcctttctccttacattaagattgtagtcttcaggtcactggcttgcttatacttaaaataattttgaaaactaaggactaccctaacattctcatatgctgagttacttacgaatatcttacagcaagtaagtggcagagctgggattagactctggccctagagactctgtctttaatctggaagacaacgagcatcttttaaaaacactggaaacatgaaatygttgctttctgtcattattttttaaccttaactgttgtttccactccttttcccccaaataacattaccataaatgttcactggaaagtcttttatcactchacatgcatgcctacaatgaaaattaataaaatatttagaaatagaaattttattttaaaaactgtcatcacagtgataaaatccaagcgatataaatattacwaattttaacaatttgttaaacataaagtgggtttttgttagaaatgtatctgtcagtgaagtatctgccggtgaaatagttgggactataaatttttttcttctcagattagttcatgtatccatggatgaatagtacttattacaaaaaagagaaaaggtacactatcagttctagtcccaattttcatttctacagctgtaactgctgagacatctgttcacatgaatacatgggactaggaggtttgttaccacattgtcattcatttcttagaagtcatttcaagttatatgccaaaaattacacagcacttgattggtttgctaaaagctaagaaattgaaaccatcctacgtattactcagatattgttatagtcatttctttttcaatttatggaaaagggctttaagaaattatatcaaataatgatttataatttttttttttggtagatacagggtttcgctctgttggccaggctggtctcgaactcttggcctcaagtgatctgtcctcctaggcctcccaaagtgctaggattataggcatgagcgaccaagtcctgccctataaatttaatygttagtcttcagtttagaggcatgttgtttatccctgtatacccagaaaagattgagaaaataaaaatactgtattagtttttaattcaaataacttctgcaatttttttttaacaaaatgcttttatcttactgttgcagacttagctatcttaattgatgaaaatttccaccaggtagcctaatttgcaaatccartgatatggtcaaatgatcatatttgatcagtgggactgacaaatttgacttaatttttattagaaaaagctgagttcacatttcacttcaaataaatgcactttgtgaaaacttataaaaacatatcaataagttatggaatgcatcttttatgatacattactaaaacagtccagaataaaatgtggtgctagtaaaatttatttattcagcttataatacacatgctatttctctttacttaattagtaattatgtactataatatataacttatttatgaaatgagaagtatgttagaagtcatgatatcactttgataaatacggttccatgtgtatcacacaatttagtgttggactttaggaaaaaattaggtaagagtaatatataaaaatatttatcaattttgctaggtatcatgaccaaactgtttttatatgcttaatgaaagaggaacttacatacttgctaaaaattaagtgctttgacatttggattataatttattctgttaattttattagcagtatgtagaaggtattcaaaatcttttaagatgaaaatgatgattaatggtaaatattttgctattatttgattatgtaggctgtaactaccttactaaatgataaacatagtttctgaaagaaattaggtaacatttctatccacaccttttattcagtgtgttctacaaattttgtagggacaggaaaatattcaaactaaaattaaaagagtgggcatcacttacatttgcttaggggcttttcttcccaggtgaagacgcctcctagggatgaatgagtgttgaggatagttgaaaagaatatcttagctttgaatatgtggggttcgaggagggagaccattttcattattggacactcatgctttgctcccataggatgctttctaaagagcaatacattactaaaatagataagaatgtaagaggagagttcattatcattgcccattttacatgatgtctgaattctgaacattccagcatagtcctaaatcctgtatgagatctagctacactttactcatctgtgtatagtcagggaaatatgagcctttattaattgttttttttgtttgtttattttttgagacagggtctcactctgttgctcaggctggagtgtagtggctcagtcacggctcactgcagcttcgacctccgtgggctcaagtgatcctcccacctcagcctcccgagtagctgggactacaggcacgtgccaccatgctcagctaatttttgtattttttgtagagatggggtttcaccacgttgcccaggctggtgtcgaactcctaggctcaaacaatccacctggctcagcttctcaaaagtgctggatttacaggtgtgagccaccacagctggcctattaattcttttaataatcaaattgtgaattattttagcactcagaagagttttacaccctgggctagtgtaccatatagaatataagccaagtatctacctttattttgtaaagaaggaagggtacaattttcagaagagaaacaagaatgaattcatgtacttggaggmccattctcaagtggatcagttttagagtaaatatggaactgcaagatctggaaattgggtccttgtgtttgcatacctcatggaaggcctttttataccctgagcttaggcatactctactgagaagtccactgaattaagtcatgtcccagtggagtaatgcaaaaatgccctgctctcttcacttggctctaagccatccctccccgtttctatctccaattttcagtgtggtatgtgagtgggggcatatgtgtcatgatcatctggggcaattttcaaaggctgtgggttttgtttttttttttttgaggcggagtttcactcttgttgcccaggcggagtgcaatagggcagtcttggctcactgccacctctgcctcccgggttcaagagattctcctatctcagcctcctgagtagctgggattacaggtgcccaccaccatgcctggctaatttttgtagttttaatagagatgtggtttcactatattcgccaggctggtcacaaactcctgacctctggtgatcccaaagtgctgggcctcccaaagtgctgggattacaggcatgagccaccatgcctggccacaattttcaaagttaaaacaaccctcttacttctgaactttcctgcgttggttggttctggctctgtggccaaggttcatccagtaccttcaccagctwttgttcctgctggataggtgtcatgtctcccatgtgacaactattgctttaattaaatttctgcactcttatcagaattttacatctaaaactaaaaatcatttttatcttttaatcttttgctgtttagagatgcggtctcattctgtcatccacgctggagtatagtgcaggatcatagctcactgcagcctggaactcctgggctcaagtgatcctcctgtctctgttgcttcaagtaactgggactataggcttgctctaccacacttgtccttgcctggctcgttaattttttatttttttttgtggacatggtttcactgtgttgtccaggcagatctccaattcctatcttcaagtgatcctcccatcttagcctcccaaagcattgagatttcaggcatgtaccaccacacctacccattttcctcttataaaatgtttaatactttcctaatcctattaacaagaaataaaattataagctttccacaggtctttgcctttataaatacagctccttacttacagtctgctaatctgatctttttggactaatttccaactattttgctgcaagtgttacattctttagatggttccctaacacatacccattaattcagtgattctcagagtatggtcctggccagtagcatcagcatcttctggagacttgttagaaatgcagattcttgatgcccagacccagtgaatcagaaactctgggggaggtggcccagcagtctgtttcaacaggtcctccacttgattctgatgcacacaatgagtgagaatcactgccttagttccgtctacctacagtagtctcctcctcctttcttgcctgctgacttccgagttaggagactgcattcccggcagcattgccctctcttctgtgtcccacagtactttgtcaaatcttttttatggcatttatattgcctacatctgtctgcttttgaaggtggaggccacaacataaattacttttgcatctgcatacagcacgtacctcagagataagttaataggtgctggtggataaatgaatgtatgcatgaatgaaggaggagagcattttaggaggagtggtgatcaataaggtcagctgctatggagagactgtggagaataatgaaggaaaaaagctattggatttcacagaaaggcaggtgttggtgacctttgaaatgcttgcttcagcagagtgatgggcaagtagcccagattgctggcagttagggacttccgacatgatgaggacttgcaggtttcatattgactatttattcgaacatgtggtgaaaacagaattttcttgaatgaagttgctaagtgaccttaggccagttacctaacctgattgagcctataatctcagaataagcaataataataatactgtgtttgtatgctttttaattgaaggattaaatgagctwatagcccctagaacagggatgtccaatcttttggcttccctgggccacaatggaagaagaattggcttgggccacacataaaatacactaacacactaacgatagctgataaactaaaaataaatggcaaaaaaaaatctyatttawgaaagtttatgaatttgtattgggccgcattcaaagycrtcctgggccatggtttggacaaatttgctctagaatgatgcctgatatatagttgatacttaaagggttattttctttatactcttcctcaccattatttttccttattaatgctgttgaaggcattcgtccctctttgtaaatccgtataagatgtgaaattgtttagaatactcttcattccattcattgcagaaattgtgaattgcattcagcctggaactaacatacttttagttgaacaccgaccactactttgaaattacttttttttttttttttttgagacggagtcttgctctgtcacccaggctggagtgcagtggcacaatctcagctcactgcaacctctgcttcccgggttcaagtgattctcctgcttcagcctcctgagtagagtagctgggactacaggtgcgcgccaccgtgcctggacaatttttgtatttttagtagagacgtggtttcaccatgttggccaggttggtctcgaactcctaacctcatgatccgcccgcctcaacctcccaaagtgctgggatgacaggcatgagccaccgcacctgacgttgaaattactttttaatcagctagaaaagtacctcaaagggtagttgtaatagaactcttttagttccarcttacagaatgtgacttcaagtagacagtgagaaaatggcagaggggacagggagaggtagtggagggacaaggaaatacagattttgttggctcatgtaacagaagattccagggatagtaccagcctcaaagcactgccaaatcttctcaatcaaacaatattatcagtactagatatttgtcagattgtcttgcagcctagatcttcttcatatgatttgcattctcaagcatattcattaggtacaaatttagaggaaagagaagaaattcccagtagttctaagtaagttcctggattcaattgcactgtccagacttaggtcacttgcctattcttgaaccagttgttatgctcagggtgctgggagcagactggttttctaggcctggctaaggaatattcagttctatgaaatactggtattgtctgagtatggtggctcatgcctgtaatcccaacactttgggaggccgaggcaggtggatcacttgagcccagaagttcgagaccaggctgaacaacatggggaaaccccatctctacaaaaaaaatacagaaaaattagctgggtatggtggcatgcacctctagtcctagctgcttgggagactgagtcccaggagatggaggctgtggggagccgcgatcctgccactgcactccaacgtgggtcatagagttagaacctgtctcaaaaaaaaacaaacaaacaacaacaaaaaaaaaacagaaaagaaagaaatactggtgttgagtgtaagggacaagttcccaaaaggaaatgtagcttctattaccagagtgaaggggagtggacacaagtcaggcaaaaaattggtatcaactcactatagagaaaagggcttttcaaactgtacttaagcaagtacagttcagcccactgagatacttaagcaagttgaagagaaaaagggagtaatacctgattggatgttctctgacccatgattactccagcttcacctagaacagcttcacttttatatattttgtatatgcaacttctggttagattgcatttggaaatgaatttttttttttttttaaatcctgtgacagagtctcactctgtcgcccaggctagagtgcagtggtacgatctcagctcactgcaaccttcgcctcctgggttcaggtgattctcttgcctcagccttccaagtagctgggactacaggcgtgtgccaccatgcccggcttatttttgtgtttttagtaaaggtggagtttccccatgttggccagcctggtctcaaactcctgacctcgggttattcgcccactgcaacctcccaaagtgctgggattacaggtgtgagccacggtgcctggcctgaaaatgaatcttaacaataccattggtatgggacacatcagcagatggttaggcccataatatattaaagtaggtgacatcttttcccactccatcctgataaatgagttcttgacctaccttttccacagcgccattggcctaactcatattcctaaccctacaagatccagacctgactcctccacagtcagatatgtgaagatcatgaaattaggcagcagtctagttctcagcttacagattttatgacacttaaaaaatcatcatgtatcatagttccatggatacttccccaaaagttgtcacaacttggtgactcgatatgatctagtaattataaagcagaaaattttgatatattcaagaaatttgacagatcataatctttgatgatatgtttatgctgaaatttgcaagttaggcagtttaatttttttttttttttgagttagagtctcgctctgtcgccaggctggagtgcagtggcatgatcttggctcattgtaacctccacctcccaggttccagcgattctcctgcctcagcctcctgagtaactgggactacaggcgcgcaccatcatgcccagctaatttttgtatttttagtagaaacagggtttcaccatattggccagaatggtcttgatctcttgacctcatgatccacccgcctcagcctcccaaagtgctgggattacaggtgtgagccactgtgcctggcccagtttaatattttttaagtcttcatctatggctcatctcctaggtaactgcttcctaaaccacactcttagagcttttttgtgatctactattgacttccattaaatatctagtccgccttttcatcgtcctcagggcccaaacaaagctggtgaggtgtctgtttgtgtaaataaagtttgtttgtttgtttttggagacagggtcttactcttctacccaggctgaagtgcagtggcacaatcattgctccactgcagccttgacccccagggcccaagcagtcctcccccatcagcctcccaagtagctgggactacaggtatgcctgcctaatattttatttttttgtagagacagggtttcaatgtgttgcctaagctgatctcaaactcttgggctcaagcaattctcctgccttggcctcccacagcgctgggattacaggtgtgagccactgcacctggcctaagtacagttttattggaacattgacacacctaatagtttaagtcttatctgtgtatggctgctttcttgctataacaacagaggtgaataggtgtgaaagagaatgcataacccacaaacctaaaatatttaatatctggcctttatagaataagttgttgacctttgctctatatttatgtggtttataacagtttttctacttttttctttttttttgagacagggtctcactctgttgcccaggctggagtacagtgatacaatcatggctcactgcagcctggatctcccctgggctcagataatcctcctactccagcatcccgagtagctgggaccacaggtgggcgccaccatgtccagctaatttttccattttttgtagaggtgggagtttcaccgcattgcccaggccggtcttgaactcttggcttaggcaatctgccgtctcgcctcccaaagtgctgggattacaggtgtgagccaccttgcccagctgtattcatacttactaacatatggtacacttatgaagaagaatcaactagtgtccttataatatcctcagtctcaggtgttctcgaaagcatatctagggaaatatttttgttctttctgtgctcttttaattctcttttcttctgtacccttaacagtttagtgctcttcatctttaaaacaaccaaccttggccgggtgtggtggctcatgcctgtaatccyggcactttgggaggccgaggcgggtggatcacgaggtcaggagatcgagaccatcctggctaacatggtgaaaccccgtctctaccaaaaatacaaaaaaaaaaattagtcaggcgtggtggtgggcgcctgagtcccagctagtctggaggctgaggcaggagaatggcgtgaaactgggaggcggagcttgcagtgagccgagatcgcgccactgccctccagcctgggcgacagagcgagactccgtcttaaaaaataatacaaaataaaacaaccaaccttttttaatgagtgggagggagagtgattgtggtttttttcacctacaatttgaacgcatttgcacacacacctgcatgtatttaatgcagacatgcaaggtgccaagtacacacacaaaaatcaggattttgtgtcattttatttcctttctactgactcctgtcagtttcatatttgctgttgtcatagaagtctgttttgtaaagaactatctgaaacggttgaggagagctgatgaagggaaatggaggaggagcagatcgcccccgatctggtcactggattctgttagcagagcagccactcatcagaaggctgagtagttaagctgtacttgaagaagaacagggatagtaataccccatccctgcttttttgcagtctaaatgccctgtggagtgagagaaaacttcaatccctaggcttgtgaagcccttatctttcccaaacgttaaattaatttttaaggctatttattcaaagttgacttaaccactagaatagggaagatcagacaaatcagctgcaagaaatgaagtatgagaaaacccgaactctttgacaaagtattcctgggagtaaatgtgttgaatgaagccagcgggtaaatgataagggcctttacactgtggatgtaagaaagcaatttatcaagagtacatgaactctctagtgaccacaagtcaggaggaaatgagagtggaggaggagccctgaaaaaatacatatgaaatactaaaaaatctgtgtgcacgcacttttaaattcctccatgattatgcagtaatattggtgtagtaaaataggagttgctgagaatgcacgtgtagtgtagcccrtaccattagggataaggtgttaggaaaagccgctgagaaaggccacacwgtagtttagaatttgcagaaaccttaggttcataacttaggtgtagttatgacttgagcctagatgttggctgatacccatttgcctgactcatgaggttagatgaccatccttcaggcttatgtgttcatcttgtttaattcctaaatgggcatatgcatataattctgacagttttgaatkccttttgtgttctcttaaggagtttagagtgcctctcactcgttwtctcactaatctttgcagcatctctttaagccctacagataagacagtgttattgcttgagaaactgaggcaaaatgtaattatattatcagcaatagggtgtgcagtaactcagatatggatggggactggaatttatgaccttattttggcctttagttctagagaagagatggcgtttcttaaatttgaggagaaaaagcacccaattgttgaacttttcattttattaaaagtgtttactctgagaatggtcatcctcagctttttctactgagataatacagttagctgaaatacaccagaaattctcaaatgttggtttgtcatttgtttccattttcatctgtacccttagagctattaacaaagtgacttgttatttctttctttttaaaattatgactttaattttcttttttatcctgaataactttcagaaaacatgccaatgaacacaaaagctrtctaacaggtgactaacgagagaaattgagagaactaagtttttggataaccccctatagctaatatgacttgacttaaattactagccctccacacagatgtcagctttccttattccctccaaattaggtctttcacccctgtcgtctaaagaacactctcttcctcctctttaaccattcaggtattataaggggtgaatcttattcagaaaagtgatattcactgagcctgcccatatggcatgagttaggaattgttttgttttgtttttggtggggggtaggggacaccatcgtcactcgggttgaaacacagttcagttaacaaatcaatgaggtttttagcaccagccacggtcatttgaaaaccccctcagtgactctttatctgaaagttgaatgtgttttctatttgttgttgcctgcaatttataaacacatccaattaaaaaaataggaaagaaaaggggtaaaacagaaaggaggtgtcagagaactattttctttgcaagatcttgcttaaacacctatggcgaacattcatgtgtagaaatggagccctggtaacttccagcaatatttctaactyctgttctctctctttatcttattcccaacacccccatctctggaactttggcgggaccaccacagccttggataagctcagcacgcagcacctgtaccaccccacccaagtggagattgtgcagtccaacgtcgtgtttgacatcagcagcctgatgctctatgggacacaagcagtgcctgtgcggctaaagatcctgctggaccgtctcttcagcgtcctgaagcaagaggaggtactgcacatactgcacggccttggctggactctgcgggactatgtccgaggatacatccttcaggtagggagaggacttgaacgccgcccgtgtccggggccgactgtgggtggggaagggtgagagtccttgacaaacctcgcaggaagggctgcacaccctcctctggttaaagtggtcgtttcagcaggcttgtcagggaaggggaaaggagagagacaaagcaggccaccatcgggcctcaggctgtattagaaggaaaacttggcctcttgacttgcgttacctttgtttgcacctttttgaattcaactctttctctacatcatgggctttctggcttcttcaacaagtcttattataaccctattaaaaaggagggctctttgaggcgggtaatgggtgtgtgaaaatctgagattacccttcatttgggtttattagggctttttctcatactcagtttgcaggtacggtgtttttcttggttgtctttgtacctaaaggtacacattttactatttattgttttttcagccaactcaaaggtagaactataatccatataaacttatataaccagtaaaccctcacatgatagccttcagatttctaccttctgaaacacacagacatgattttagatttcgtctttgcagaacctgttcttccagccttgagtgtctcctttgtgtcaatggcacttctgacctggtaagggctctaagagttttctgggaggcccacagccttcatgcacccccatctcccatccctctctttcttcatctcatttttgcaatgtgtcatgtgttatttgcactgtatactttgcctctgaaatgtgtttatggctatctgtcttcctgtaacccttgaggggtcaatgttgagaacagcattttgggagatcccaggatccaaagaggctacactggatgatgaagaaatacccctctcgccgaaggacatctcaatttgagaaggtagaatctgaagcaatttttcaaatttcccatgaggataataccaggagacatgaccccttcaaaaacaattggttttggctgtgccagccttgtatagtgctagacatatctccactgtttattccctgagctactgtgtgttacatgaagggcattagctgccagcttggcatgtgaggagtggggagcctcagtctacctctcgttttaacctggcatcagaacacacagattcttgtcattttcctgtgtggtacctccagctgttagctgggacaggagagcagtggaaggatagaaagtagaagtagggaaagggaagggagttggaataacctgtctgctctcagaatagaatgacatcttaatttagtgagaatctcaactgggaagacacagaaaatttggccctcaaaagatgagatgatggtgataatagtagcaattatatattacgttttcagtttatagagaatgtttacaagcattatctcatttgcctcaggatggggacatttcagtgggttaaagtaggaagataagtcttggacggtcagggggcatgagggggaacaagatctaggaggaaggggccaggaaaaataaatcaggaactggtttcacaatccctgcttatactggccccaagatgcatacagtgctrcgtctttctacagtcatttctacagcgtgattattaatgtctgttttgaatggattttaccctacacaaagagaaaaacctcttacagttgtttgtatggaactgttagcttggctaacagtcctttctttattccaaaccaacaagtgttttgccccaatctggtaccatctttattacctccactatgctgcttatacttctgtcattaatattgtatttcagtttcatgtgtatgtgttgcctaagatacttacacctgtatacctacgcagagacacaagcatatacattgtatctttctgtccaaacaaataggtatgtgcagggctatgttggtttgccattttaacaaagctcaggtagcactttgataggagtaaacataaagcctgataatgtttctgtgttatggtcctattgttctgccttggccagtgcctgttttttattttacttgaaataattatttagatgttagtttttccccaacttgtgaacatatctctaatgcaggtataaaaaatgtaaatgtactctgtatttctttgtatgggagggcccagtatttagcaggggtgtcaaatcttttggcttcctgggccacattggaagaagaattgttttgggccacacataaaatatactaacactaacaatagctgatgagcttaaaaaaaaactctcataatgttttaagaaagtttacaaatttgtgttgggccgcattcagagccttcatgggccacatgcagcccgtgggctgtgggttggacaagcttgatttaaagaaacaaaattgcaagagaaatgaaatttgagaggaaaattcagtaaaaccaggaactaaaatttataaatctcttattttagggtgaaatactgcttatagagagcattttcatttattgtaatacttaaattataattaatttttattattttaatatagattttgacagtctcaaatttaatataatatttctccattcagtctaaaattgacattttgagaaaacgatagatgatttttacattagaggagttctaggtttagtttctgtcttgttttattggtagaattgatgtaatatagattttatttaaatgatggtttttgtcattcagcatttataatctacttgttctttgttaaaacagttctcggtttggaaaaaaaagcaaatggtcccagaacaccaaaactgttaccacttttgtagtgagaaaatgctttgttttgtaaagaaaaaagagagagactgtaaaagtaaaccctttcttctaaagtaatgttacttgataattggccaatattttaaagattgtatgtggtaatgataaggtgtgcacaaattactttgaatataattgtatatggcgtttttgtaaaagtaggctataaaatgtgtgtccgaaggctgtggaaccccataatgctctattagtgtacaagtcattttatctggctaaaactcaattgtcttgtagccctcaaggcatcaattttagcattattgctctcaacaacagtatattgaatattatgtcagttaaaggagaataattatcaaggcaggttagggtggctgttagtcttaccacatattgacttggttagcagttggctacagattgtgttcctgggcaaatgaagatgtacggtaagttgaactagtcaagccaggatattaatttaactctctgtgggacaaagcctgcatcctttatgtgtacacagctactcctgccttctgagatacctttaaatgtggaagaatgacagttgtctgatctgattttgaatttttggatgtagggggaagaggggagcagaactttcaaaagtatgtggtttaagaggttattattagaaaaagggagatgatagtgatgctacagatacatttaaaaggctggcacatcggtcaaggatcctgtactttttttataaagttaattttcacctatgtgagtgtctatataattcacaagctagccagttgggtataaaatgcataacataacttggactacaactacttaagaagtcaggtaatatattaagaacccaatattctcctgtgtacttattaaagtatttattcagaaagtacagaaagttagcttttaagcattttccagaaaaccacaaaaatgggaatatgcaattagatgataaaatctaaatacaagggagaatatgatgtttttctactactaaagaataattctggccaggcgtggtggctcacgcctgtaatcccagcactttcggaggccaaggcgggcagatcacttgaggtcaggagtttgagaccagcctggccaatatggtgaaaccctgtctctactaaaatacaaaaattagccgggtatggtggcatgtgcctgttaacccagctacttgggaagctgaggtgggagaattccttgaacccgggaagcagaggttgcagtgagccaagattgtaccattgcactccagcctgggcattgcagcgagactccatctcgaaagaaaaaaaaaaaaacgaagaagaagaagaagaagaattcttagttcaggtctgtatcttgtgatacatttattgaccatgaatggaagcagtggccccctcttttgtcctttccccattttcccctctgtccttgacctaggaaataagaatacgggtgattatcattgttgaatttagtcatttaaaaatcaagtttttatagtctctttcagtttgaacgtataactgacttgcctgggctcatccaccagcctgtctgtggaaatcttctcatttgcaggtgggtcctgccagaattcagagaagcagttgagacactctgaatatttagctgagatgtcaacagccttataagaagagtggtattgatgcccctctcaactcttctgtgtcttaccagcacaattggtacattagaagagcatttctcaaagacgaatggggccatccgtcttttagaggtccagctttagatttgggagtaactacatactggatctttctcttaaccttcatgatactcattagtataacacaggctctgaggaggtctagggtacgagcctgtaagagtagggaagtagctttctccaacccttcccacttcataacctcttcccttcaagctcatttgaagtacttagttctgaacacactcagctcttctcccacatgagctatttgcatgtaaggtttcttctgcctggaataccttacttgtgtctctgcgtgggtaatttcttctcttctaggcatcagccaaagtctcactttcttacagaggaccatcttagccaatgtaggtcttttgtagtgtagctatatcttaggactctgtttccttcaaactcctatcacaatttaaaatcagtcaattaagtcaactgttaaaatgtttatttttctggcctcctcactagggaacaacacaaatgcagagcactgaataagtatttgttaagtgaatggctagggaaacctgtttagcttggtatagcttgatgtttcaccatggaactcatggaataaccagtaacttcagtttgtcaaaaggcccttagttttttctccaggcttcctaaggactgactgctatagcagcagctgggctgttgagggcaataagaagaaaagtaaaggctcccatgccttctagctagtgatctgtgtagagtaagtgttttatggtatccatgtggtagaaaacatccatattaagcaaacacttgtatttaaacagctctttgcggagcaagttcatgtaagttacctcttttcctcctcttacaccatcctcttatagatgttgccaatgaattaacatttggtatagttgaggctcaaataagtgactttcccctgatcacagaagtgttaattggcacagttgatacactgtaagcttcctgaagataacacatgtctcttattcatcactgtaactcgcttcccagcaccagcacccaggcttatacataaaagggtgtattaaatattggaaggaggatgttttgaagtttgatttgaattcaggtctttgactctatgggcaatatttggatgtttgttttttgtttttaaggctaccagcctgtctttccagaatgtaatatgtgagagtctgtagatgcagagtggcatgatttgggggaagagaagaggcctgagtctggaactgacagactaacttaagatctcgtatattcagtggcacaccaaatgtctgaccttaggtaaaattgggtgaaatggattcctctttcgtgttccttttcttgcctatttcctgatactccattttgttatctttacttctattcgctctcatttctgtgactaaaaccagatctggtatttatccttaatgctttattgtaaattccggtctttgacttggcctr

SEQ ID NO: 7049 - DNA, 18779 bp, Homo sapiens
aaaatttatatttaaaaattaaaacaagaacttactcaacaaacatttcttcagtaatggatatcaagagaatagacctgttattaggcacagggattagaaataaatatctttttcttcccagagctgtctcacgagggagataaaagaagaccctacagaggataacagcaatgaccaagatctctggaaagcaaaatgcgtctcagcacagggaatgacaagtggcccaaagtccagaaaaagtttttctgacgtgtttcaaagagtggtaataaggacaggaaagagagaccaggaagaaaacacagtgtagaggcacaaagccagaaaaaagagcagttaaaaatcagctgcaactaaaacataaggtttacgtacacacaggaacaatggggggatgaggctaaaaaggaatgtggggaacagatagtgaaaggggcttataaggcacaatagtgggctctacctttcagacaattgagaagccactaaagggcagaatcagcaccattaaatgaagataaatagactggaagagctcagtaaccaggaaacaatgctacaaaatgtttggaaagtaaaagcatctatctttcaaatacgaaaaaaaaacaagctgtatatgacaagtttgatatttcccaccatgaactgcaagtaaaggtttatgattgtactaaatggaatggttaagagcagaggtgccagatttagactgctagggtcaaaccccatttgattactgtgtgaccctggtctaattacttaagcactctgtgccttaactgcctcttctgaagaataggaaacaacaacctactgcataaggtcatggtgaagattaaataaatttgcatgaaaagcactttaaaaagtgccaggcacatgatagttaataaatgtaagctgctatcattatcctactattagtaatactctaacttctgtgacataatcaatgttaaggagatcacaactaatgaagtaatggaagaagatttaaagaatcagccaagtgtaatttgaaacccttgctgttaagaaggtgaggatagaaatcagaaactcaactatacactaaagtagagaaagaagcaattgcttgaagtctagctctactggcagtcatcacatgtgcaggtaatgacaatgtatttactttagtgcctagacttcagggactctaaatttagccaatcaacattcataacagaaaatctaagtcagataaacaaagacttcctaaattgagaaacaaaggttgcaactcaagatgagggtctgataagaggtgatctacaccacataagaatagccagttttaacttttaaaaaaatatattctcatttggaacattctgatcactctgattaatagatgcagcagacaaaactcagttttagaagaatcttaacatatagataaagccatgttaacaattttttaaataaagaaatatataatgcaaaaattaattagcaaaagtgtaactattatggctactgatttgaaaacttccacaaatagcaagtaacctatttgaggatgcttgagactcccccctcactggagtcttccacttacctgttgtgtgctgagactgcagagtatgacgtctccagaggctgtggccacacacacagactcctgatccagcaagtcctgaacaccaacaatgcggccacttccatcctctgggagaaagccttctgccaccaaagaaacttcatttttcacctttcaccaaagtaaacacaagcaaattaacccagtctactttcaagaataattgataacatttccagaaatactttttaatgcttcttttattacataaaagctttcaaaaatattttttctagatgaaaatccaaactttcatttgagaaatatcactactctgtcatctctaacaagaaaaataggtaatgtgacctttttgccaaacaaacacaaaaacaaaaacaataagcctggtctctttaaaattgtccactaaaatatgatgctaatagctatgcttttctaagatttctatagtatggggaaaaggcactaaaggatgtaactgcctaaaatgtattagtagaagaacataatcaagggaccatatcaaaaccaacccacagaggtttttaaagtacatatagttaggagccaacactaaagattctgatttagttgacatgagatgtgggctcaaacttttagaaagctccatgggcaactttcgtgttcattcccaattaaaaaccactcttggccgggcgctgaggcaggcggatcacgaggtcaggagatcaagaccatcctggctaacacggtgaaaccgcacatctactaaaaatacaaaaaattagccgggcgcggtggcgggcgcctgtagtcccagcttctcgggaggctgaggcaggagaatggtgtgaacccggggaggcggagcttgcagtgagccacgatcacaccactgcactccagcctgggtgacagagcgagactccgtctcaaaaaaaaaaaaaaaaaaaccactcttataaacagaatttgcatgacaaagagggtaaaaagtacggcacacactcaaaaagtaaggtcagagttctactgacttaggttaaaatagcagcagagttaaagaaggattacgatttaagctatgtctaacatggcatatatatgaagcaaaagatgtttatttgggaggatataaattcaataagatataaagaaagaccatgtggggaaagaaatttggaagaagagaaatcaagggtcatacccacatgctggcattctacatcagtaacttacttctcttgagacagggtctacttctatcaggccatgttctgaaccaatgagcaccgtcccctgttcagttcggagagagaagcactgaggattccctggaccttgaatatccctgaactccagggtccgaaataatttcagatttcgcatgatgaagtgattcccacgagacaagtacaactatcccttgatgaatcattaatctctaagagaaaaataaatagcttaatagtgataaatgaccatatttatttaaatgaaatgattcagggggtgaagaagtggtagtcagaatcagaataaccaagaaaagaaaaaacttacctctctgagtacacacccatgtatggattatagcagcaacctgacccactctatacagttatggtctacaaattaggaattctgaaacctattttatgttctttttaggagaggcaagattctcaactttagaatgttttcttcaaaaaagatgtaatatcagttattcctttgggaaagttgaaagaacaaatgaatggggaaacattttatttttgcatattaggacatctttataaaatcatgaggaaaaacaaaagggtatcccactgattagcactatttgaaaatccatttttatatactggcagttgaagagaatctgaaatgactttaatattcaccaggtctattcatttataaactggttttatacattcataaaaaaactgaaatcaaagatagaaaagcatttactgttctaaaggggaagagaaaatactgggacatgacaacaatttacttcaaaatgatgaccaacatttcaaggaccctgatgacctgacataactacttccagtaactttgttcttctggccaggcttttcccaggacaatataaaacgtgagaaaagagtgctaaacaagacatctactttggtctggcaaaatcaggcttgcttaaatgcataacattacctaagtaggggaaaaaaatgttactgtgctagttatttatattcagatccctttaaggcttatgattgtaagtccctaacttatgttaggggtagcaattacaaggaccacaccggtcttattgtcactttaatccaaggagacttctctcatcttggcaccccacatatgtatgacatagaaagaataaagatgaatcaatcctaatagtacacagaagataatgtcaagtgtcataggaattatataatatataatgtgggataagagaaaggtaagtttatatatgatggaagtgaggaagacaatgattttagtaagttttggtgacaattatattcaagaactgctagaaattacttgaacctctaacatatcatgcaggtttttttgttttttgagacggagtttcgctcttattgcccaggctggggtgcaatggcgcgatctcggctcaccgcaacatctgcctcccgggttcaagcgattctcctgcctcagcctccggagtagctgggattacaggcgcccggcaccatgcccagttaatttttgtatttttagtagagacagggtttcaccatgttggccaggctgttcttgaactcctaacctcaagtgatccacccgcctctgcctcccaaagtgctgggattacaggcctgagccaccgtgcctggctgcgtttttcatctttaaacatcataaaaacgcctcaaaactagtttctctgaaatttcacacccatcagccttattcccttatcttctcggaggaagacttccctccacttctttccaggctaggaaaggaatatcctccatattgccacaggacctaggcctattagtactctttcttggacatctgcaacctccaaccttcctgcctccactgattcaaactcttcgcagttcttaaatgtgctaaagatccctccacaccaaaggtcaatcgtggattctctcttaatttcctgataactgcttcattttcttcccttgctccttcgactatccacctcttggctagacatcacatgcatgattacatataccaggtagatcaccaatacgctgattaggcctaaatgcctagccctgactgaattagcccaaacttaccactaaacccacattttcaacctcctgatagaatcacaagcatgtctcacatgcacatcaaatgcgacctggaaagcaaagaacttgctattcttcccccaaatgacagttcccactatttggggacagaccatttctactctatgtccccaagctgaaaaactgtctttgctgcctttttgcttactcttcatacggatctattcattgattagttccgtggctgtcaatatacagttgaattctttacgatccggtttgtggcctacatccaacaccgactgagcacttgctaagtactgggatctgaagattactcagccactgtctccacggagatcatcgttaacgggagagaaagccacgtaaaacaccacgttagatggagaagcacagaggacaccacctccacgaaaaagtctcacacgcgagaaaggacccgcaccacagcacccgagcctctattaaccgccgccttccatcgtgaattaatactctcgctttcagcgttattatcaaccccctgcaagcaatcaagaggctgggttaagtccggctggaggggcagcaggcatccctgggctgtcgcgcctcccagcgcccccgatggagcaggtggcaaggctgcaaaaagaatttaaggctctaggaaagaggtggtgcagcccgcactccagtccccggcccgcagcaggcagaggaggctccgggtctccttcacccggacaccgccggcggagaggtccactcccgtgcccctaccctggatggatcgcttacctgaggacccccaaacagaggtgcgtccggcctcgcctccccagccacgcgcagccggctacccagagtcagctcccacagtccgcacccagagtcggctccgaattgcgcacgcgtctctgtccgcggctcccgctctctctccgacggcactaggcctccaaggatggaggcgccctccaggggaaaacgctgaagcgctgcaaagaagccagcgactcaatgggtgcgtcaactaggcagccgcagcactgggagtgcggcgcgggagtgacgtcaccaggcggagggggcgaggccgggcccgcttctggtcacttacggcggccggccttctttgtaggcctggcaccgtagaggtagaggagctacattggccgcgtcccctgtccctctgccctcttgcccatctgcccaaacttttgtatttgatctctgttttgatgtcgaaccccaaagcactgtaattggggggggcgggggggggggtggaacctgcggacctgagagcagcgcgcgtgcgcacgacacgcgctgtgcgccggaagagcacgcccagtccgggctgcgcggaggaagcgctggggtcccggagggcgggggtggcggcgccggaggtcgccatggctaccgagcccgaagccgcggagccggtggtgccttcgctcgtggatcgatacttcactcgctggtacaaaccgggtaagtgcggagtgatgttgatccctccttggccgcactggcctaatgctgtgtagactatgttgacagatcataagccacgcgcgctctccctggctctccstccccacgtcagaaggcactggacttctgtgttccgtctagccccagggaatggcatttgcaaagacctggtggcctgaaatacttcagggcgcattctggggccrgcgattgcagtgcgagctctagggtgttgctcgcagtaagatgagtactctaaacggaggccccaaaggtaggcggagggctaggttgcaacagtccttaagtgcctggagggattgaggggctcactctcacagggagtagcgatacataaaattatttaaatgatcagatcgaaactaaggtagaggcagtagggatggcgagaagagggtgggttagattagagacatttagaaagaagaagaatctatacatttaccttaagagacgccatctgccacttagaagtaggtattctttttgtactgttttgtgtaagcagaaccagtggtgggagcatcgttggggactctcctttcttcctttcattcrgtgataatggttatactcagtttaaaaaatatatattgtagcatattttctgttggccaaacatagggtgaccaacctgtcctagttcacccatgactgaggggtttcccagaatgtcggacttgcaccaacatcaggacagtcctggaaaccaccaacaaaaaatatatatcataaagaacgggatgctaattgcattttcctagcaaaaatactacgtgtactcattttgaagtgagtgtaaagtaagatggagcaaggagttaattaccttaatgttgaataaattattctatctgggccagatctctttaaatactttctaggaaacctttaggtatgtctttttgagtaatgaagggatacccgtgatcagcatgcagcatgtatgtgtccagtcttcattatcaactatatgacccaaagaaagtaccacatagtggtagtaaatattgatttcagccaccaacagactcatgtattcttctagatgtcaaaggaaaattttgtgaggaccactgtatactacagcactctaaccggtaagcaaattgggaattttaaattatcaaaaatttttttttcctggtattgtagcctggtatggtcttgtggtcttggattgaacaaatgttcactaaacaaacatgcattaattatcttctactgtgttgaaatggtattattataggagtttgtttggcaagaatgagtattccagtgcctggccactctgaacatataaatttgattactcaaacatccaaatggaggaccacatcatcagctgctacttgaagtggccagtctgtgcccaactactgaactgttcagagcccacagaaagggctacggtagagacayktatggtatctcgtatacacaggcatgccttatttctttgtcttctaccccagtgctacctacctaaagacctctggtactcttccctttcctgggaaagaaattcaatcttgttttctcttttattattgtattctctattctacagttatgccccaatagtagccaaaggaaaaagggggaagatgatagtttgactaaacaaataccagttcatacattcttgttccaataggagttatgggaggaaaaattattccaagcaatcacacaggatcaactttttctccttgtagaatatgtgtcatcacattggcagaatctcatccagttcttcaaagtggaaaaacaattaaaagcatttcctatcagatcagtaccaactgtagcagacttcagaacaaggtctctgggaaatttaagcgggtatgttcctgtaattctgtgattatctacttacatcctctatattcatggtaatgacagatccaatgaaccttagaatccagtagcatatgcttagcatacttctctagcagtttgaggtgctaattttaggtatactttcacctaaagaaattctcagctcccccaaattaggtatctcaggaggtgtagtatctgttatattaggttctgtgctactatccctataatgcccaggatggaggagggggaaggcaggcctttgaaaggagaactctaatagcaatataacaagatattttgtcccttctagttgtattaaactagtatgtcgagttctgtaaaatttaggtgactaactcttctttaccatatatttccacatgtaaattaaacagaaaaaaaattcccaagggagttagaaaaaaaaaaagaaaaacatgggccggtcacaatggctcacgcctataatctcagcattttgggagaccaaggtgggtggatcatgaggtcaggagtttgagactagcctggccaacggggtgaaaacccatctctataaaaatacaaaaattagccaggcacagtagtgggcacctgtaatcccagccactcgggaggctgaggcaggagaatggcttgaacctgggaggcggaggttgcagtgagctgagatcgcaccactgcactccagcctgagcggcagagcaagaccaagactccgtctcaaaaaaacaaaaacaaaaacatgaatacgagaaaatatatttgctccttactgtttttccattcctaaagcattgtcaatgtaatactcatgtacccaccccctgtacctgcacacaacactcggttatatagaatgctatctctaccctctgtaactctaggcaaaatggacagattattaaaagagtatcatgccaaggagaatttagtgacatgttaaaatgtcttaacaaacccactggttgggaaagtttctgtggatgatttaagtcgttcatttactgagttcatactaagagtttctgctaattgctctcactattctaggagacccttattcaaacccccctttgtaggcctgaagtcccctaataattactgatttattgtgctttacaattactgatttttcctcactcaagaaactagtggacttagaaaagcatgcacctctcttaaacgatagtctacaagttacaataacacttaagacttctgaagtttcaatgataaatctctgtccaaaatagtaacacttaaggcaggtacagttgctcatgcctgtaatcccagcactttgggaagccgaggcgggaagatcacttgaggccaggaatttgtgacaaacctaggcaacataacaagacctcatttctaccaaaaaaaaaaaatttttttttaattagctgggcatggtggcatgtgcctatagtcccagttacccaggaggctgaggtaagaggattgcttgagcacaggagtcaaggctgcagtgagccatgatggcagcactgcactccagcctggatgacagaacaagaccctgtctcaaaaaaaaaaaaaaaaaaaagtaacactcctgttacaagtgaagaacagagagggacctgcatattgaacccactacagtaagttttcactggatctcagaactgccaatcattctcccaaaggaggtgacaaaaaggcatcaaaacatttctgctgttttggcacagacctagctcttttgtgtctgctcttttaacacaagccttccccttccttccaaaagcagaaagtcacaatgactctagtattttaaaatgaagaacccacgtgcggaggagtgaagccaatatagtaatatctgaatgccatctaaaaatgttttgagtggtaaataaaggggtcataaagaatagcatcttaacctgaaatgcctatgtccactacaggaaaaattcatgggagaaaagagggcaacacatgaaacatgcctgcactggctctcatgagcctccctgtagatacttgtgagagcctccccaggtatatccatctagtggagtacatgaaacaataaccatgccatgacattcaaatacatacacatcaaaatgtagtattgactcatgggtcaattatttttattttgctgcttaaaacttttgttttccacattttcctcaaagtgcatgtttttgtttttgtttttcttaactagaaaaaatatcccttactaacacactggggaattacaaaggggggggggggaaagaacaatatcccttcttcaaaaagtcttagtgattgaccctggtaaataagttcctttatctattaagttctaatattaaaatgaggtagaaatcttaatgaaactaactttatacaatattgctgtcatactgtgtcatgttgaattttatattgtttcttgttgatggattttcccayacttttgaaatctttatacctggttatatgtagctttttcatttacagttgataaaatatattatcagtctgtaaattcccatttatcatgtgtcttagcttttttccctagacctaggatggcacctggcacacagtaggtacttatattcatataggttctgaaattaatgaatggtttttatatactgaagtaactgatttaaaacaccagttccaggaatacatcctgttatacacctaagggctacttctcaaaggaaagtggaaatgtccatcaactgattacttcttccgtctcattacacagggggcacagtttctaacagagcttgcacctctctgtaagatttactgctcagatggtgaagaatatactgtgtctaggtgagtaactttttagccaccatttaggagaccaaagggaggtaattttttttcttagaaacaattttttttaactaagtaaacatgctgaaatcttaaatttttttaatagttgtgttagaggacgtttgatggaagtgaatgaaaacatcctccataagccatctattcttcaagaaaaggtaaaagagagagaaaaaatatgatctcatccacataccttttattggtttttttttcrtcgtttgacagtactaaatgttctttcctttccagccatctactgaaggctacattgcagttgtgttacccaaatttgaagaaagtaaaagcataacagaagggttactgacacaaaaacaatatgaagaagtcatggtgaaacgcattaatgccacaacagctacgtcatgaggattgacatggaacaaaaagcaaagtgggattcttgttacctggcctaaaccatcagggtactaaaggagaagaaccagtatatgtaaagcatacctaacagccagccatatgcaggggaggcctagtgcttcacttagttttccctctctgtcttcataatgagccttggttcccatttgtctacagcctgccagatctggcctgcccatgtactcacactgttctcttgcatctctctaacaactggcatgcaaggcatgtttttctgattaaaaacaaacaaagctctttgaagaagatttagaaaatacagaagagttttaagtagccaagtaaaaataatttacccatcatcccataatccagaagtaaatacatttgacccttgagcaacataggtttgaactgcaagggtccacttatgcatggactattttcaactataaacgagtcaaaaatatatcattaaccaaacacgaaacccacttatagagcaggttcatatactcaggttccaaagggccaactgcaggacttgagttctcacgtatggatttgggtatatgtggaagttcctggaaccaatcccctatgtaaaccaagggataactactacattttaacctacttctgtttgaacatatggtatggttattgcttttgcctcgttttcctaacagtttgaagtttaaaaaaacctaacccacctttcttacccagtcttctataatgtgcctaccaaaaagcctagtcctagcccatctgcctcaactcctctcccttttaggttgtagggaagaggccggagtgtagagtatattrtatcttctgtcccccttatgccaacaagatggccttcccctctgaaacaaagtaaaactgcaacactgtgacttcttaaatgagggatatgtgaaaaggctatgaaaaatacaaaggctttcctaggaaatgtgttataatgcagcgggaagctaattcttgaaatatgcacattatagttactcagtctcacatactctagttactggcaaagaagttactgagaatatgtcattcaaaggcataggggcctttgaatggaacaaatgctttcacatcatttaaagtaaaaaaaaacctccaacaactgtgaatttatagtttaagagtgatttacactgaatttcaaataaaaggactataaaacgtgttatttttctgtaagggctataacatacatgtcaatatcmctgtttttaaataaaatatacttttatacagaaraaatcattcgatgtattaattccattggttatctatcctcttatgctgttgaagtcataagttaccccttcccaacccccacttgctctttctttcactagagaacagtattttttcaggtatgcaaaaatattatctaatgaaagtacaagtgggggttggaatttttaagttttaattatttacaaaataatacttacttattttgtaaataaaacaacattttggttcataggaaaaacttgtaatctgagtgccagcatgactatccccctaaatataccccccagacatgatacatgtagtaagtggataaacacctccatgatggtgctattagctgaaaatataaacaaaccagcagatcctcactttaagtagcacaatgactcttgaaggcgtcataaaactatgacagtaaacgtagtaaaagaattgtgtataacattttacatgtaacattacctcacatcattctcccattatttctattgtaatttaaaagagtactttggtttcagagaataaaaatcatgcttaatgattttgactgtttaaggaaagattttaaaaaggttattaacagagctgagtgcatcacattttctcccgaaggactacagtgaaaattttcctcaataaaatattgactagctgtggtcaattggcattactgtggttcttccggatcttttgtgaatactgattgtggtggctgacccagataaagatcatcagataagcttatattatctactgccatttgataactgacataccctgttagatttcaaaatgaatgtcaaagcattaagatacaaatactacgactgaagtctaacacaaagttggccatactatattataaggagaaaacctataaaccagatccttcaatcatgaccccacccacaaaaacaagaaaagctttaaactcctaaattaaaaagactaaagaaagatgttttttgttttgttttatagtgaacatttcaaatgtgtgatattcagaatttaaatagattcttggcttccttattctgtctttgtcttccattccatcaatcaatactgagaaagttcaaaatatcttttaagtctataagataggcttagaatcccagctaatattcagggcagactggccagctatgctagaactagaaccaaaaacccatctcatactctccaggagttgttccaggattctgtggagttccattaccttacttttgggagtaggtgagggacatacacagcacagcagacccacccttgctgtacaaaatgcttattagggaacaaacttgctgctggcatggacaatctgggacagggtcatcaaggggatttttgtcacacttggtaaacagagggattgaagagtccacaggtttaaggaaaaccctgcattcacccagactactgtatgtttgctgctgacattagtgatctagatgataaagaaaacagttaaggtaaaatatgccaaagctaagcacatattcaaaatagcttcttgtggattaaattgtccttgagacagttgggatatttggtttgacttttaaagaacattagtgcaatgttctattttaaaaatcacactacaattagaatctagcaattaccaagacatttattagttgtcaaaaagctttacaatcagtttcatgatcagaaaatagagcaaaatttcaatattgttttctttataaaattgatgaatttctgaaaagataaaggatcatttgatttttaaaaatgtcagcttcatcacatgatgttccagagatctgaccccaaaagcttctcaagttttactatccatagtgtccttatttgtaactgagacccatccgttattttccatctgaagctggaaagagttaagacaattagtatctggtttcactctgaaaaaaaaattacaaaattaagtagtaactattttcttttaaaccattttttaaagtatgagtctaaaatagaaaaactacctcaccttcttcagcagtttataacaaagtgaaagaagttggactaagagagccatcatggatcttgtcttcgtaatacacttgtcaacctacaatgacaaaaagcatgcaaatgatattctaaaagtagtacttaaaagaccttaccatttatttagttttaacatgataaaatttctccatatggaaatctaagggatcttgaaagagatatggatttaggcacatgagctgactcaaagccccaggacacaggtgcaggggtagctgcctagatttcatgtctatctcatggaaccccagcagaaagagtgggtggaaaattaatcattctactgcaggctgtttaggggcttctcaaaacactccaaatagtggaattaaatcccatcctttgcaattccttgcactctattttgtgggcacaaacccatattctctcagacaaattatgggagaccagactcggaggcacctgtgtcctagttgcagaggtaatgacttcagaattgaagggcagctgttcagtgctatggaattaatgatgtccaaaaaactactttatttggtgaatctgctactctctggggtcagttatgagagtagataataaatgattcttgtagacaaggcatgaaaaaaggaaataaattgcccttctgtgggtactaacagtttatttgaagaaaaaggggctttaaccagataaagatagatgtgtgaaagtttttcatatgtctcttttacctttagaaatactttattctgcaaagaagtcttagttactgtctggagctggtggcatagaggaattagcttgtttatttccaggagaagcataagcttgtcatcgtctttcagctgaaatgtaatttaacaagttataacagcccgcaacaaaactccatctttaataccttaaacacatttatacattgatattatacccccaaagtaggttatacataataccaccaccagctccaggtaggtagacatgtgttacctgttttgaaaaagcttgaacactggaagtaagctttaaaccctctgcagcaaaaacctggtagaaagagaaaacaccactattttagactgatgtctatggatagttggtaagaaatatacttactaataatttttacgtagaattttaaaaataaagcctagatataaaaagtctgtcaggaactcctaaactttttccagtaccaggaatgcacaagggtttaactgttttcagaaggagtttccacagaccagatgcagaatccatccctggagaggcttctctacaccagacctccaattattctggagggtcacacagacctgtgatattcagccacacaaattatgtctagattacgcaagggacctagagctcatctcaaatatgctcaattataaaaggatgatgaattttcaagcatgaggtcaaaagggttaggaccttcccaattccatctaggcaagacaaaatttgtcacccatacatattccataaccagacatttgagagaaccaatccaggtggttggtttttgttgccactttttttcagattaattttcactattcaccatgtaccatgaattctataatttaatgagatgaacaggatgatggagaagtagagtgaaaaagaaggttgtacaggtaagacagaagtatttagcatattatgttaaaatggtttgcagactattttagagtgagatgccaggggagtaaagggaggaaggcttagttttaggtggcgtcagtaataatggagagaacagggaaaatctgagagtggtttgtgaatgaaaataataggtcttcataataaattaaagaatactaagaaggaggaggcaataattccagggttaatttttaccctctattcaaaaggcttaacaccttgctatcactggataaaatgatctcaaggtcaaatcgtactttgcaaccttccctttaaaagggaaaccagtaagctttacatctagactccaaccaaatgaaatgattcacttccccaagtgttccttatcacttcatgttaccactttctattctgcaaattttctctttccttctagcctgcaaaccccttggggacaaaatccatgtctgtctcatacagtatgatggttttaaaactacctgaaagctggtaactcccaggtctctctctccactcctgaactatcctgacatcagtcttgtacagtcatccctcagtatccatgggagattggttcccagacctccccaaggataccaaaatctgtagatgcttaagtcccttaaataaaacagtgtagtatttgcatataacctacacacatcatcccataaactttaaatcatctcatctctaaattataatatctaagttaatgtaaatgctaagtaaatcgcagttatactgtattgttttccctcccttggaactctaaccttttaaaatgtattttgtttttttttactgttgttatattttattggttttcttccttttttttttttttttgagacagggtctcactctgttgtccagagtgaagtgaagtggtgtgatcacagctcactacagccttgacctcccaggctcaagcgatcctcctgcctcagctgcctgagtagctaggattacaggtgtgtgccaccatgccccgctagttttttttttttttgttttgtttttttgtagagacaaggtctcactatgttgccccagctggtctcaaactcctggactcaagtgatcctcccagcttggtctcccaaagtgctagggttacaggagtgagccattgtgcccagactgtttttactgttttgaatattttcaatccatagttggttgaatctgcagatgcaaaacctgcagatagggagggccaagtgtatatcctatctgacctttgtacttaacatgtgcaaaacaaaatgctcgatttccaccctctaaatctagtgttctccctcagtgttccctgtctcagaaaatggcactaccactcactctgttggccaagccaaaaaccttacttaaaacataataggatcagctgggcatagtggctcaggcctgtaatcccagcactttgggaggctgaggcgggcgaatcacaaggtcaagagatcgagaccatcctggccaacatggtgaaaccctgtctctactaaaaatacaaaaattagctgggcgtggtagcgcacacctgtagtcccagctactcgggaggctgaggcagaagaatcacttgaacccgggaggcggaggctgtagtgagccgagatcgtgccactgcactccagcctgacaacagagcgagactaagtctcaaaaaaaaaaaaaaaaaagtccttcccatggcctacagagacatcatattttacccctttccttctggctcacttcactcccatcaataattgcctccttactcttctgatacacccagccctacccctgcacctcggggctttgcacttgttttggctatctaaaatcctctacccacatttatccatccaactctcacttcattactgtctctattcaaacactggctccttagagaggtcttttctgaccacccctctatcacctctgtattctagtcgtacgtgattttatctccaagtacttacatatgtgcactgaatgcttaaattcttattgtctatattctgccattagaacataagctctatgggggcaggagctttgctttgttcacttttctccacagagctctgttctcccagatctgacatatagcacaagttcaataaatatttgttgaatgaagtatgcaattttatgttcatcacagtttggagacaattcattgaacattgatttaatgactaagctcacataggaagaaggtaagtagtggatcttttgtagtaaaacacccctacagggcggtatgacagaatggacttgggccaaactgaaaaaaaaaataaattcagaatttcaactatcttaagggaaat

SEQ ID NO: 7050 - DNA, 49736 bp, Homo sapiens
accattgcctttgctggatcccagaggttttgatagattgtgtcattattgtccttcatttcaaataatttttaaatttccatcttgatttcatttttgacccaatgctcattcaggggcaggtaatttaatttccatgtatttgcattgtttcaaaggttccttttggagtcgatgttcagttttattccactgtggtccaagagagtgcttgatataatttcaattttcttaaatttactggggctcattttatggtctatcatatagtctgtcttggagaaagttccatgcactgttgaatagaatgcatattctccgattgttggatgaaatgttctgtatatatcttttaagtccatttgttcctaggtatagtttaaatccattgtttctttgttgactttctgtcttgatgacctgtctagtgctgtcagtggagtattgaagtcccctactattattatgttgctgtgtgtttcatttcttaggtctattagtaattgttttataaatttggaagctccagtgttaggtgcatatatgtttaagattgtgatattttcctgttggacaaggccttttaccattatataatgtccctcattgtttcttttaattgctgttgctttaaagtttgttttgtctgatataagaatagctacccctgctcacttttgctttccatttgcaagaaatgccttttttccacgtctttactttaagtttatgtgagtcgttatgtgtaagttgagtctcctgaaggcagcagatagttggttggtgagttcttatccattctgcagttctgtatcttttaagtggagcattacttacattcaatgttagtattgaaatgtgaggtactgttgcatttatcatgtttttgttgcctgagtactttgtgtgttttgtttttgctttttaacttgtatttttgttttataggtcctgtgtaatttatgctttaaagaagttctgttttgttgtgtttccaggatttgtttcaagatttagagctccttttagcagttcttgcagtggtggcttggtaatggcaaattctctcagcatttgtttgtctgaaaaagactgtatctttccttcctatatgatgcttagcttcactcgacacaaaattattggctgttaagtgttttgtttgaggaggctgaagataggaccccagacccttctagctttgtagagtttctgctaagaaatctgctgttaatctgataggttgtcctttataggttacctgatgcttctgcctcacagctcttaagattctttccttcgtcttaactttggataacctgatgacttgcgatgaatttcctgagtgttctttgtgcttcttgtgtttggatttctgggtctctagcaaggccaggaaagttttccttgattattcccccaaatatattttccaagcttttagaattctcttcttcctcagaacactgattattcattcttagttttggtcatttaacataattccagacttcttggaggctttgttcatatttttcttttttctttgtctttgttggattgggttaatttgaacaccttttctttgagttctgagtttctttcttctacttggttcaattctattgttgagactttcctgagcatttcacatttctaaaaatgtgtccaaagtttcctgaatttttcattgtttttttttctttaagctatctatttccttgaacatttctcccctcacttcttgtatctttttttttttttttttttttttttttttttttggatttccttgcattgggcttcgcctttctctggtccctccctgattagcttaataactaacctcctgaattctttttcaggtaaatcaggaatttattcttggtttggatccattgctggtgaactagtgtgattttttgggggtgttgaagagccttgttttgtcatattaccagggttggttttctggtttcttctcatttgggtaggctctgtcagaggcaaggtctagggtggaaggctattgttcagattcttttgtctcatggggtgttcccttgatgtagtactctcccccttttcctatggatgtggcttcctacaagccgaactgcagtgattgttatctctcttctgggtctaggcacccagcgagtctacccagctccgggctggtactgggggttgtctgcacaagagtgctgtgatgtgaactgtctatgggtctctcagtcatggacactagcgccttttctggtggaggttggggggcgggtgtgcaatggactccgtgagggtccttagcacactagatcagtggagttatgtacctatgaggattatggatgcctctgctgagtcatgcaggttgtcaggtaagtggcggtaagctggcagtcacaggcttcacccagctcccatgcaaaccgaagggctggtctcactcccactgtgtcctctgccaacagccccagtctgtttccaggtggagggctatatggcttgaaaaccggccccaggctatctacctcccagctgcgaaagaaaagggcttcgttccttctcagcctgtgagtctgcacaccagatttgccctgccctgagttctggccacgaggcttctcaccccattcaaattgttacaaaattcagctagagatttctttctccctgtggagttttagcccctgctcctctgtctactctcccgatggatccctgtggtgccagccaggaatgggctgctgggggaccccgtgagctcccagggccttactgctgcttcctctacccctgtatttcacttggctaacttgactcagctccaggtaaagtcaaaaacttcttccacaaacagactttcagcttcttcagtgagggtatgtgttcaggagaagagggcctccctttcttacttccacagttggggcactcacagttttagggggctctcctgggtcctgcaggagtagtccgcttccttcagagggtctgtgggtcctctcgggattgctggtttgttcttgtagtcgatctggagctaaaattcataatgcgagctcccacacgctgctctgtccggagcggcaatctagtcctgcctcccatctgccctgatgattgctatctccagtccttcgttcatgagcacttgggttgattccatgtctttgctattgtgaattgtgtaccagtgaatatacgagtgcatgtctttttggtagaacaatttgttttcctttgggtagattcccagtaatgggattgctgggtcaaatagtagttgttttttaagttctttgagaaatctccaaactgctttctaaagtaagccctctctttaaatagctaggtttgtgcttgctatttagtttacatattaaacccccttcatatttatttacacgtaaatagctgaaatatttcatttagagaatagagtgaataggagatgaggaagcagagactacaagtggagacaatttgtgtacgtctaaaattggtaatacgttggttttaaatgttttttttttcctatgaaaataaatgttggcgggcgcagtggctcatgcctgtaatctcagcacttggggaggccgaggtgggcagattgcctgatgtcgggagttcgagaccagcctggccaacatggcgaaaccctgtctctactaaaaatacaaaaattagccaggtgtggtgacaggtgcctgtaatctcagctactcaggaagctaaggaagagagaatcacttgaacccgagaggcggagcttgcagtgagacaagattgcgccattgcactccagcctcggcaacagagcgtctcaaaaaaaaaaaaaaaaaaaaaagagagagagagagagaaaataaatgttatgcatatattcctgaaaccgacttatcccattcaacaacatattcttatatttcagtgttaagaaatacaaatctatatcacaactttaatgactacatagaattctatattcgaggacatttcatgatttatacaaattgattctaaaaattttaagtaataaataatgctatgttaaacatttttgtacagtcatatttaaacaagtatgtgattctatttttttcaagcatataatcaaacctggaatagctgaatcattgggtatgacatagtttaggcttttggtacaaattgacatttatttataaaaggacagttttcataagaagaaaaaaatacaaaacaagatgttcagtacttcacatattttagcatttaacagcttgaagcaacacatctccttgctgttcttctaaatgttaagatcacatttcaaacacactgatctaattagccttggccatcactctgttgtaagtggctacccacataattattagattattaataaaagcaagcacaaataagaaaaagagaaagggaatagtcttcaaggttaactgaatatttgaaatgtcaatgtaatgtcaaaatttgctgcatggtttggacatagtccattaaaagtatctttctccctgtactattgaaatctctattaccctggcatccagtacttttatttttttaaatttatttttattatttatttttgggatggcgtctgactctctcgcccaggctggagagcagtggcatgatcttggatcactgcaacctctgcctcctgggttcaagtgattctcctgcctcagcctcccaagtagctgagactacaggtatgcgccaccatgcctggctaattttgtgtatttagtagagatggggtttcaccatgttggccaggctgctcttgaactcctgacgtcaggtgatccacccaccttgaccttcccaactcctggaattacaggcatgagccactgcgcctggccccagttactttcaaaaccttattcaagtacatgatgcaaatgaatccagcttctagggtggttcataaattgtaatttcaaggtttagttcaataagtgaagcataatgacttattccatttttccaaagtaaatggtaccaaccagaactatgcttgggaggaagaacagggaagggatatcaggaaatcctgaacttccttccacctcttccaaattaactcatgtgtctcctgttttataaatgcctttgggaggagatactaccatcatcctgcaataaagatgaagcttgaattcactatatatcagcatgtgcatatttaagatcagtgtttcctgaagttgtgacagtgagaagagagagtcggctgagtgctacaagtatcacagggttgacgaggatggcagccccacctggaagggctttataagcgctgagattctggaggcagtctcttgagaattcataactctctaggtaactgcattagtcatcaatgtaatcagcctttttctttcttctgagtcaggaaaggggtgctgatgaggcaagattccgaacatttgtggattcctggccgtatactactgctgtaagacctccttttaactgaatttggccatatgcctttgggcaccagaaattcatatcttaatacatgtcgttgttggagtcaatacatgtttaaactgatatactatatcagttatatttatatcaattctcccttattgatcctagaataatttaaaagaaaatgaaaagactagacataattatggccacacaagacagtagctacacaattaagtaataaatgttttacaaacttaagtaatatatggacccctctttcaaaggaaaacaattttctcatgggccacttaatgtttacttaaaatattttaattgtaatgttaaaatgtataaatataaacttggtatgcatgccttatgcttatacagcttacaaacaaaaatatacttacaaattaaatataaacaaggctacagagccaaataagcttaaagttaacaacatttatttaatgtgagacacttgatgttgttttgctaatattaaggccctccttgctgtgtgtatacagcatgacatggattctttagaatttagtgatccatctcatcatcttgactgcccattgggaaagacgctcaatctctacccatgtggattttcttggaattcctgtaagctccaagggtaagttagggtgtgcctgggtgtgcctaattaggtactgttgccccaaaatctgtactcagatttgtactaaataagcacaattacccagggtcaggaaaagatttattgcattttttaagttttaaaagtaaaaatgagatcataggcactgcccatggcctctttgtgcccttcttttatttttccacatttctggaaattctttttaagtgccttctagaattctgtaccagtcagcaaaaatatttataccaaagtttgagacaggcaattttctttcagttggaagtagttgtttccaccttgcttgtatggggaggggtctctaatatgcacccaatcataatagtccctgggctttgtctcctgttctgcttgcctaccaaggccatgaaaacctaaattctcctttacctagtttgacaaatgccctcagctgaaatccagttttagtcctcagcttgctttctgaatgatggtcatgccatgcttctggaaatggaaattccaaatcttacctttgtaattacatgctgtacccccatccccaaygcctgatgcaagcatttcagtgatgctgttctttctcctccaaggccaggtgggtttctagttgcacagtaacagtaatatggaagagtagacctacccagtgaaaattcacaaagacaacctggcttctgctttccaaacacaaaagcatcatagaaatacaaatgataaaaatgttagaaacccaaacatagactgtcacatggctgggcatagggacataaaagaccaattgtatgattgtaacatagacacttcttagtttttttttttttttttaagttcagaggcacatgtgcagtttgttacataggtaattttgtcatgggggtttgttgtacagattatttgatcatccagatattaagcctagttctcgttagttgtttttcctgatcctctccctcctcccacccttcactaggccctggtttgtgttgctcctctctctctctctctgtgtccatgtgttctcatcacttagctcctacttataagtgagtacgtgcggttktctgttcctgtgttagtttgctaaggataatggccttcagctgcatccatgtccctgcaaatgacatgatgtcattctttttttatagctgcatggtgtctctcggcttttttttttttttttcttgaaatggagtttcactctttttgcccaggctggagtgcaatggtgtgatctcggctcactgcaacctttgcctcctgggttcaagtgattctcctgcctcagcctcccgagtagctggaattacaggcgaccaccaccatgcccagctaattttgtatttttagtagggacagggtttcaccatgttggccaggctggtcttgaactcctgacatcaggtgatccgcccgccttggcctcccaaagtgctgggattacaggcataagccaccgcgcccggccttctctcagctttttaagaragcattaaactaaatggggctcctctgacaatttgtgactaccaattagctctcaygtttccatagactgttaggacaccttgtcctcactctttaaaaaaggcagacctggctctagctcccctgagtaagccacctccctggtccccagaaattacaaagtaagagggctgagtatgatgtagtatagtgggccaggtgatctggggagaaggaggcaggggtatggaaatgaaggagaaaggtgtggcgagggtgaatggtaggagaagggaaaggtgaggacaagaggagggggctcgtttttgtaggacactcccaggtggacctggacatcattacctagagcagtgttccttaaatgtgcccagataggaagcataattacaaaagtaagaacttgcattttcagagagctttcccccggaaattctgattcagcmagtctagagcaagggctatggtatctaaatgtttctgtttaacgagtgataccatgctaagtaaaatacaacttgtttaaaataagggagttcctgaattatgtctggcatacaatccaatccagatttcatggaatattggaatgcctggagatataacaatcttagaacaaaacatttgtaaagcagtgtagaaaaaaacaataaacaaaaatccaaaatatcttaattttgtccattttgagagcattaagcctaccctcagtagttgtccaagtttctaagagttagggtgaagacaggacatgactgatgcgcagtactgtgcaaccaaagctttagaaagggaactgggtaaagaggcgtgtcgccttatgccaccttgtggcagaattgggtagttaatgaagaccggctggaggtcgaatgacttgggtccttcaacaaatactcattaagtcatcatttgaaaaaaaaaatcacttaaaatctgagtctgttttctccttttaaaaaagattactatttgcttaaattatgtttttgatacaagcaatgagactttaaaagtgaaataaaatattaagtattctttttatcattgctaatgctgttttcccatttataagtgagggaaaaacttatttttccagggatattcctttttctcttgattaagatggtgaacagaaggtggctggtcagaaatgaatggggaatgcattcaatgagagagatctctgccatcctcctcttcatctattctattttcccaattcgctagagtgagacaggctactttgaagatgtcagatggctgactgaggtgctcagaaaagacagatctcaccagtagctgcagaatatggttacctactatgatggttaattttatgtgtcaatttcgctgggccactgtgcccaaatagttggtgaaacattattctggatgattctgtgaaggtgtttttgtttgtttgtttgtttgtttgtttttttggatgagattaatatttaaattggtagactaaagcagattaccctccaaaatgtaggtaggcctcatccaatcagttgagagccttaatagaacaaagactaacctcccctgagcaagaatgaattctgccagcagactgcctttagacttaaactgcaaatctttcctggggctccaggttgcaaacctgccttgtagattttggtttatccagccaccacaatcctgtgaaccaattccttataatgtccctctctctctttctcaaatctctttctacacacacacacacacacwcacacacacacacacacacacacacagagttgattttattttctggagagctgtgacacctgtgaaggtgttagataactggaacttttgagaaagacatatatcccagttgctagagaatatggttacctacatggtgagaattgaaaggtactagaaaagtctgctctctttgtagaatcttctctaacactcaagtgtgggttgaagttaggggtgacctaactcagttgattggctccatttccctgagattctcttggttctgctcacccctatgtggtcgctccattctcaagaatgatctcaggaagcctccaacagtttcagcctcacwcagaaaatctggaagataaaaatctgcttcaattctagtattcaaagaaattcaccctgattaaagtgtcaattgctgactaggactttggcttgggaaatggaacttagtatttaagacaatccttggagattggggtgaaatcagttttccctaagacttaatggaatcaaagtgctatatggatacatgaaaaaaatcctggttctgctaaggtgagggaaggggaatagctgttgggtagatcaccaataatgtccaccagacacttacgtagtaccagcaattgatttatcacaatgtaacacacaagtgatgatactcaaattaaactatactagtgctaaggaaccagtaaagattagtggggattatggtaaacaagaataacatgatctattaataaaagagagccacgccaagcgtggtggctcattgccagtagctgtggctcaggcctgtaatctcagcactttgggaggctgaggtggatggatcgtccgaggtcaggagtttgagaccggcctagccaacatggcgaaaccccatctctactaaaaatacaaaaattagccaggtgtggtggcgtgtgcctgtgatcccacccacttgggaggctgaggcatgggaattgcttgaacctgtgaggtggagtttgcagtgagccgagattgtgccactgcactccagcctgggtgacagagtaagactctgtctcgaaaaaaagaaaaaaaaaaaaaaagaagaagccactactttgctctaagcaatgtgaccatgcaaaaatataacccttctgttgcaagatcatcaacattttttagagaaactgataatttggatttttatgtaaaatagccatattttaaatgttggcaactaagttcatttttgttcttgtttttaaccacgcaggacagccaatactgtctaaaataaacaaagcataactgttggctaaatgcagtctgtgaacctctagttttctgggctagaaaaaccattacttgccattcagtagttctatgaatgaaaggcttgctaagagtagaggaaccaaagaagatgagagaatgagtgtcattgtctcatacaatgcttttcggcaggtgtgtccccactcacatgttctcaggctcccacttcacggaatgaaatgtgaagtccacttggggccagttaattctttccaagatagtcaaggtgttccactgccaggcaccaggaacacttgtttccctggtgttgaccatcttacttcatttacaggtaagccctagcaggtacagggacaaaagtcttcacactaacagaaatccagtgtagattagcttctttttttcccaagatgcctaaattctattttttaaaaaagatatagcgatcattcttccatttctagacccttagctgacgtcattaggtagtttatcatagttctgcgagacatacagcttttcattaataggttagattaattaccgtcctatcattaaaacgcatttagtttaactgaatggaaaatagcagtttgtcataaacttaaaaaaaaaaatcaatgcttaattagcttaaaatagactagtactgagatcagagactgattggcgtttatcttttccctggacaatttcttgttcccaaaaaagcacaagggcagtagttgtcactcctgcttacgcattagaatctagtggatggaaatgcggggtttggggggaggagatgaggggaacgcttttttaaaaaagcttttgtccaggccaagtgattctaatgtgtagacagggcagaataccgctccctgtgcgggggaaaaaatccccaacatctgaaattcctcaaatccctcagattctctccagaactcttcatttcagcacgtaggggtaccaacgaacaattttctgaggtgtctgaggctagtcatktcccyggagattgacgggaccgtcagccaatcggccgtctgaacgagtgatggcaaccccaatgacaagcaacagaatgaggaastttatccccgcagaaagaccagatcgcagtagcaaaggtcaacaagtcaacaaaagccaagggctctccgtcaggcatcagcgaggcccgagtactcttagaggtcgtagccaggagagggtcccgcgcttgcccagcgttgctagggaggcggcgcttgctcaagcttctcgtgccctctccgtacgtcacttccgcccggcggggtctcatagtcctatgggctgggttgaagccacttccttttttctttccctttttcctctccgtggccccgcctcccggaagttctgccttgtctccgccgcgggtcaggggtgagagctggaatctctgcacgggccttggtgagtaactgctgcgagttctgttcccgcgcggcgccagttcaaagaacttaggttagatcacgcttagggcccarcaggactgtgccaggcctcaggagtctccaccctctccagttttggggccgtcagtctcctgggcctgcaattatccacgctgaggctgaggtctttggcttttagcgagttggattgcagccttgttctgcttctgtgtcttctctctccaggcgaggtcctactgaggttgttgccagcgatagtcctctcctggagcttgaattggaagcagagtagtcttgttagtctcggtgatggctgcgttgtttcctgaagtagccaaagtgctttagcatccattccgcctcctttgagcaccctgggaggtaggcagggcagacgaaaaatatattcgttaatattgtgcagttgaggaaactgaagctcttggcgaattcactgtttcaaagcaacacggcctctaacaggcagaactgaaattcgcacccaggtctaactaacgtagggttgcataaaacagtggagagagcgtttggaaatagggaaaacactgcaaacgttaaagaagagctggggtttctgagtgcttactttgtgttcggctttgtgccaaattctttctataattatatcatccattttattttataataagcataggaagtatatactgtggttatttattcctgggttaggaaactgaggcttagagatgataactgacttgtctagtactaatgactttagtaggcatttcacagatctctttcagctctgtgattctttcaacactgtagtattaacttctggcataatcaaactgcccttttctgattttggcattacaggaagagagattccagaactttatttttggtctcttcaccctttgcccattgtctcatttcttatcaccattcttatcaccatcctatttagaaatttatagtcatgtaaatttagccttgactttcttttttttttttttttgagacggagtcccgctctgttgcccaggctggagtgctgtggtgcgatctcggctcactgcaagctccgcctcccgggttcaagtgattctcctgccttagcctcccgagtagctgggactaccggcgcccgccaccacgcctggctaattttttgtatttttagtagagacggggtttcaccgtgttaggcaggatggtctcgatcttctgacctcttgatccgcccgcctcggcctcccaaagtgctgggattacagacatgagccaccgcgcccggcccgccttgacttttactctacaatttaattttttttttttttcctcaaagagaaatatggagatggttgtggaattaatggatccaggttaaagggttggccagaaaagttgctagtttttactctattgttttactctattgttgctttgcttacatatattatgtcagtttctgcctttttttctatcaggaaaacgactgtcwtcttctgccaaaatgtcaggaattggaaataaaagagcagctggagaacctggcacctccatgcctcctgagaagaaggcagctgttgaagattcagggaccacagtggaaacaattaagctaggaggtgtctcttcaacggtatgaggaaacagtgccatgaaagtgtgcttgtcttctgtcagttgcaacttgaaactaaaaattcatggaagctttctggagtatggggaagctatttgaaaagaagagggaaataaaacaggctgaaagtaggtaaaatgatgtggtagtcagttctagaggagaggtagattgatagttgttctttgttttcaaggtgtacttatattctttcgagaatctgggaaggtggtgcctgatacaacattaactataggtatttagcagtgggaagatacacatttatttttcattcactgaaaaagtcagtaccagattctaagagacagtttagcaatcattgagagtatggtgaagagtgagagtctgagaccagattgcctggagttgactctgagctgtaccacttcctagctggctgaccttgtgttatccttcctttgcctgttttcttgtctgtaaaatgtaattagagtacctgctacattagatttttatgcatataaaataagagtccctgttaagggctaacactttgcatttaatatagtaaatagtcaataaatgggaggcattcatagctaatattgggctagataatataatggtgcataacatagatattatccttgctcttatggagctgacaaaatgagtattatataccaaaatctcatagtaatgttatatatctgttagacatcagaagtttacaggttttgatctacgtcaagattttgcttttttgaaaatcagacatggggatgtgatattaaaatgttttacattttgtaaaatgctttacatttgtatggcttgcaaaaccacatctattgcttatttgattttgaggctgaggtttattttagagaggctgatttttttttttgagtcagaataataggaacattcatagtgagttgttgatgaagtgtcatttctgaggctgcctgaggttctggtacttaatattgctggcaggaagtgatttttgttttagcactgccttgcatcatgcattccaaaggcatttattcactcaatatataaatatttgttgagtatttgttatttgccagacactatcctttacactgaagacagcccctagactttagtttgtagggtagcactgacaagggaatagactgtttagagtggggtatgtgctgttgacagggataagcacatacttatgggaagcacatagcacacaccccagtgtggactttatccagaggcaatgaggagttagtggatagtcttaagtaggagactaacatgctctgacttgtgtttggagactatagaaaagcaaggattataaacaagagtccagctagcagacttttttcttttcttcttcttactctctttcgctataactgcatctctccaaaggtggggatctgaggcatgtatccactgatccccgctccaattggttgaaggttgycattgaaagcagtccctcctgtgcattttgagattgctgttaggagccagctgtgattgcgggacagaaaaactgagtctccaaagtgtgcttgaagtgggaacaatggcagtgtaaatggagctgtccaccacagctgtgctgaaatctggcaggctgacaggacttagcacagagtttttgctataggaggcctttgcagtaatcttaatgagaaatcatggtggcttggaccactgtggaggtagcattgataagatctgctgatggaytggataactcacatgaaagataggagggaggatcatcccaggattttgaaagtaatggaatttttacttactgagctagagaagtgtatgagaggagcagatttttgggagtcatggaggatgaattgagtttggtttggtttgggacatataagtttgagatacttatttgacctctgaatggataggtagttaataagctggatactagagagaggtctgggctaaagctgtatatttgggaatcgtcattttgtaagttgtgtttacatctatgagactacagactcctttaatgaataagcatraagaggtctgctggggcactacaatattttcatgtcaaggaatgagaaaggactaatcaaagatacaaacaaagagggaccaatgaggtaagaggataggaagagagaatgggttcccagaagctcaatgaagaaagtatttcaagaaggagctgattaggtgctgctgatgtgttctcattcaggtttcagttggaacaaggggartaaagggaggactgaggtgttatatttaataatagttcactggagataccaaaacacctttgttggtgaaatagtggggatggcaccctgttttcagtgagcttaagagaatatgaggggagaggaattaggaaaaagagagtagagacaatgctttataaaggagtatcgctgtaaagtagatgactatataatgactgatcatggaatttaagttcagtaaagaaggaggtgagagaagtgaaaggtataggaccaatggattgtagatcctggagaggttaaagaatttttggagtaaggaaactggagagagtgagctggaaaaatagtggtagttgtgaagaatgaggtgtttgaaattgagcttatagaggacatgtaggtacaagtaagactaaatgtgggagttggtggctgaaggaggtagaagacaagatcattggtgaagaggaggtcagtgacttgatgattcaagtataggaaaggttatctgtatgggtattgaaatcattaagaatgatgacaggaaaagtattggagagtgataataaggtaggtgctaagtctttgtgaaatgtgaggaaacgacgtgggcatttacagatgaattcaacagagcatggcggcaggtggtataggctaatggcatgagctgcagaggtaggaggttttagggaggaaggtggggtaatggcctggaagtggcaatggaaaataaggaggatattcatccctctctggcttcaaggggtgtggaagagaaacagccaccactagagaagcctgcagggaaacagtttctcatccaagtttcagttagagcaagaagggaaaggcaatgttcagagaagagtttgaggatatagtttattaatagtgttaataaactggtacagtgggaaaactgttgactactttggcatattaggaatgttttaattaaagtggaaaagagaaaaatgaaacaaaaattggtggtgtaataaacaattgtcactttaaaataatgatttcattaattcctcagaaaagtaagactatttttccacatgctggttctttgcttgttatatcctccaatcccacctcccaccaacccctccctggtttgtcctagggaaggagctggagagagaaaaatattgagagggatgtgaaattactaatggagtgagggttttgtagagacagaagagaacaggatcctkagcacaagctgaggttttaagaatgtgtgcataattgtgttaatgggtcaaagagatggggaattgttttccatctgatggcttctattttctcattaaaataggaagtaaagccatctgttttgtatgatgtaaaagggggcagggtttggtagaggttgatgttgccttgctggagaatgggaaatagctcacttgataaagaaatatttctrgacaaattataaaatctgtttaggctaagaattcattttgtaaaggcaccggtttcggtggtttgatgaacttctctagaagtctcagcatactgggtacaggaatggaatagccagataactggattaattcagattggggtttgttgacagagatagaataaaaggattaagggcagagaaccaaggaggctgttaggcaggtgtttgaaggaatgtactatatagcatatgattaagatatggaaggtagcagagatagaaggagaccgaaaaggagaaagaaaagaattcaacattctggagatcttgatgaggtaaagggattggtatattgggttaagggcatgagatacctggaaagacgtggtgtttttcagggaatgggaagttggaatataagatttcagatgtggtacagttccagataatgacaaaagtctgagatgtgtcttttgaagtgcatggctgaagcacagtggaggagataatgtttggagtgaaggaactggaaaaactgacagcctagatgctagaggattagatggtttgtccacatgtatggtgaagtcaccagatatattggcaggaactgggatagacagggacccaggtgctgaagtctttaatgaaggaaggatggtgcttacgagatagawgacagtgttgattggagtcgagggtgatctagctggatggtggccttaaagcagcattactttgtagatgtttatgtgactagaacagcgagatgggttgaggttctggtgtatttgtgtgtattattctttcctcacaccatcatatacctgttgtttatctcttctgcttctacttcttaattacttgtaagattttttaaaagtcaatagctttattcatagaaaataactaatgaataattgtgaccttgttgagtttamcggctcatttttcttatttctttgtggagactaatacgattggtttactgggcaggaggaactagacattagaacactgcaaaccaaaaatcgcaagctggcagaaatgttggatcagcggcaggccattgaagatgaacttcgtgagcacattgaaaaactggaacgacgacaggccactgatgatgcctcactrttgattgtcaaccgatactggagtcaggtagctaacttgtttatttgttcagatttttatttgaccaatttagttctccttactgttctcttcatttccaaagttgtgtcctttgtttcttcataattgtacctacccttctccagtttgatgaaaacatccgtatcatccttaaacgttatgatctggagcagggcttgggagacctactcacagaacgaaaagcccttgttgtgcctgaaccagaaccagactctgatagcaatcaggagcgtaaagatgaccgagagagaggcaagtgttcgtgatggattctatcactgcatgctatcygggtttttaaagtagagctctgctttgaggctttccatttgagggaaaaaaaatggattttgttatttccagtttataattttggggggcttctttttttccccctgtgtcctcaggggaagggcaagagccagctttctctttccttgctactttggccagcagttccagtgaagagatggagtctcagctgcaggaacgtgtggagtcttcccgccgagccgtgtcccagattgtgactgtttaygataaattgcaagaaaaagtggagctcttatcccggaagctaaacagtggaggtgaggcaagaccctggaggccgggagtagtggaggaggaataagaattcatttttgcatgctaatttgtagtttgcaagcttacatatttatttttatttatttattatttactttttaagagataaggtttcactgtgtcacccaggctggaacacagtggcaccatcatagcccattgaatcctcgaactcaagcaatctttctgcctcagcttccgaatagctaggactataggcacgtactaccacacctggctaatattttaacctttttgtagagaggaagtcttgctatgttgcccaggctggtctcaaacttggcctcaagagatcctctcttctggcctcccaaagtgttaggattacaggcatgagccactgtgcctggactatrtattttaattaaatttttagaaattctaaccttcagtgttactggtaatgtcttcattatggcatattaatcttttatcagtgcttctcattttgagccacatgacagtcctttaataagctgaggaaagagtttatcagctctatactgatatactctattaatgacagttttgtaaatagcagaattaactttattatttaataaacagctctaatatctggatctgtttatcgtgtatgtaggctattgatttatagtgataatactttattttaaataacaactatattatttaattattagttacagaattttgacttgaaaaagttaatttttacttaacttatttttcattatcgctaatgtttttaaaaagagttggtgcaggttttagagttgacagatgatctgtatggttaaaaggattattagaaaatattctatggatgaaagagtatttgaaataaaataattatttgggataattgtgttactcagagttaatgcaaaaatttaaatttgtacagtaaagtatttgtgtagctaggttacatctttagtcatttgtggcataaataccttgctcaaatgcaaaaaaaatgccttgatttcatgttttcaataataatcatggtctagttgtaatatcttaatttccctgcttatcattaagatgtttaacctttcatttctgaaggaaataagttgaatgtaatggaggttgaaccattggatgagcatataagaattgtattattctgtaattttgcttttaagggtaattgggctaagttgtcaacagaattaagcagcttgtagaaggcctgtgaaaatttggtcacgggtttcttttgcttttccattagattatgcatttctgtattttattataaggaaaacagatacttgtttaaaaatatacaagtcagaaatacaaataagtagactacaaaagtttccccattctcatttctcaaaagataaccattctaaacaatgtgttttatgtcctctcagacttttgtacttttgtattaatatcttacatctacttgcatgtccccagctaaactgtgtcttggttcagtagtttggctcactcttctttgtttctctagtttctagcactgcatctggcatctagcagatgtttagtcaatggggaatgaatggatgtgaacctccctgtcacctaatataaaataatggtgctttgtgtgtgcacatatgcttctttctccttgggctctaattgaatagttagaaggtattgttaaattttagtaatatggtaattaatatgccatgtgcatagactatgttaaacttgatttcataaatgaatatcaagtgaaacaattgttttatttaaaaagggaataaaatgagtagtatatcaaacgactttaaaattactatttaatggcatgcattttaaggtcgggtttaagttaaaaagtagaaacattacaaatagccatgccattatttgtaacacaaaaggcaattgccattggtaagctgaactttctaagagataaagatgtataaagtatgaattatagcatcagttgtaacttgtttgaaagttcatccccctgacttagactgaaaattgacattcctcaaattcctaggacatcatcaatacagtagtttctacttccccattccctgtggaatttctaccacgccattcctcaataacactatacagtcttttatatttagggtaattcattatttggaggtttggagttgtgttgtgttttacaaaatcccctatgatatgataggccttctagagtaaggtaaggccttctagagcaagtataggccttatagagtaaggtctataaattcatctaaccctgccagagcggcactgtctaacctgccacggcagtactgtctaaccgtgccagggcggcactgtctaacccttccagggcggcactgtctaacccttccagggcggcactgtctaaccctgccagggcggcactgtctaacctgccagagcggcactgtctaacctgccagagcggcactgtctaactctgccarggcrgcactgtctaacctgccvaggcrvcactgtctaaccctgccagggtggcactgtctaaccctgccactgcagtactgtccaaccctgccagagcggaactgtctaacctgccagggcggcactgtctaacctgccagagcggcactgtctaaccctgccagggcggcactgtctaacctgccagggcagtactgtctgtttgtttggtctttgattcaaaagaattgcatttatgggcttgtttataaattcactaaacatttattgaattttattgtattctagccctgtyctcagtgcttaggatattgagaggactaaaattcagtctctacttcttaactcaggttatgaatcagaataaccttgggagttttctgagcatattcttatttttggctttgcccatggaggttcttattaagtaggtatgagataggtcctagggaaatgtctattttaaaagttccacaagtgattctgatgggcaagcctagcttgaaaaccatgaaaaccaccatatgaccaacctgttctgtattgatactaagagtaatgccaagaggtgatatgagaaagcatatttttcttcctgataactctctttgatgggtggtatatatcctgagagtatctggtttcatttaattacatttggatttcagctatagtatttgcaactctaattttaaacatacgaacttggtgtaataagttctatggatttacctacctgctttgtaaatagtagtgtacattttggtttttaagcttcagaagtgcccctaacatagtatttcagaatatatgatatgagaatatgtgataagagcatatgattcttgctttgttattcaggctggtcttgaactcctggcctcaagtgatcggcctgccttggcttcccaaggtgctaggattacagcgtgagctgctatacctggccaaggatacacagttttaaaatttgacactataggccaggcacggtggctcacacctgtaatcccagcactttgggaggctgaggtgggtggatcacctgaggtcaggagtttgagaccagcctgtccgacatggtgaaaccccatctctactaaaaatacaaaaatcatccgggtgtggtggcatgtgcctgtaatcccagctactctggaggctgaggcaggagaatcggctcgaaccctggaggcagaggttgcagtgagccgagatcgcgccactgtactccagcctgggcgatagagcaagactccgtcttaaaaaaaaaaaaaaaatgacactctagatgctaaattaaagtatagttcttcttccccagataatctgatagtggaggaagcagtgcaggagctgaactctttcctcgcacaggagaatatgaggctacaggaattgacagatcttcttcaggaaaagcatcgcaccatgtctcaggaggtacttaaccaaaaaggagagatggctgtgtctagtgggctgtggcagatgttgacttacaattctgagcacctcaaagattaccttactctagaaggcctatcatatcataggggattttgtaaaacacaacacaactccaaacctccaaataatgaattaccctaaatataaaagactgtatagtgttattgaggaatggcgtggtagaaattccacagggaatggggaagtagaaactactgtattgatgatgtcctaggaatttgaggaatgtcaattttcagtctaaacttgggtgcaaataatgccatgattaaaccatgccaagatttggacatttatttatttacacaaaatgatcaagataaagtgatgataggccttaaatgacttttctgatacttctgatgatcattttgatttagttcaaaatatattctactggaatttgccccaccttagyttggccactgaattcttatgctaattagtaatttagtagttgccatttacttagtgcctagaatttaagcactttatgaatgttatctctaatggcaaaacaactcccattttattgccaaagaaacaaattcaaagaggttagtgattattctgagggcacatagctagaaagtgattgagctgtgttgtgactgtaggtctgtttgacttcaaagctcttgttcttcatatgcctttgtwtactaaaccccagtgttaaggtccatgctggcctggttgcatgaatatcatctggggaatttattaattcatatggattatcctggaccttcaaaggggttagaatgtagtagcccttataaataaactggagtctagtaagaaaatagaatatttttatcatgttttaagacattgactaggtgctaccaagatggagaggtcttccttttctagccctttgacaaatctcagatagtattactaacctggagggcagttgtttgctaaactgtgatgtccttgttggctctcatggctggctgttgatgctgcctgtcagctgggttaattgtctactgggatacctgcagtttgcctctccatcatggtagtctcaggatggttggaatttttacatgttggctgacttcttccagtgagcatcccaagatcaccaggtagaaccttcatggcctttctgatatagcctcaaaattgtgtagtgacrtttccattgggtctctaaagttgacccagattcaagaggagggaacaaagatcccacctcttgttcagaggactttcaaaggatttttgtgtcatgttttaaaacctagcacaaagggtatatatagattaatgtgaacttgtaatagtttagtagttaaaatactaaatagtgttagctggtgtatagctcctaaatagagtatctgactttagattatagtataatctatactgtattgtatctgactctagattgctctggggtgagcttaaaaaagagtatggaagttttcttttgttgtgaatgaatggattaccttttgtgggactgtggagagaaatttgggggtaaaaatggtttttttgaaaaaatatttatcttacaaaacaaaagatactatttattatctcttaaaaaattacaaaatttttatgagtttgtggtctgtccagagaaatggtgcttttcagaggtagaaaaattgttgaatcttaggtggtcttttctttgtgtgagagttcttatagactttagacttaaagtttgcatgattataactgacacagaattgttggaggaatccgtgatttcatttttgtaatcatgcattgggaagagggtgaagcatcttctatttgcctcttttctataattactcataagcaagggttaatattatggaatttggtctttttttgctatatgtttctgaatgtttgtctttgggatgtagttctccaagttgcagagtaaagtggagacagccgaatcacgagtgtctgtcctggagtccatgattgatgacctgcagtgggatattgacaaaattcgaaagagggaacagcgactcaaccgacacttagcagaagtcctagaacgggtcagtgctgttttatggcttggagactagaatcattttaaggagtgttctcaggaagactcaccttggggcatggtatttgaggaaaaaatctcatcctttgaaggtacattggttatagactgaaatcttaagagtctctcactaaagaatctttgtgttctctgtaggtgaattccaaaggttataaggtgtayggagcggggagcagtctgtatggcggcacaatcactatcaatgctcggaaggtaaaatcagtgactcaggacatgttttggactgtatgtcagctttcatgcttaggtacttaggactgtgttcacaagtgacatcatggggttttgctggaatagcgaatcagtgaagaaaggaagcttagaaatgatttaagaagaatacttatttattctctatttttctgcttctctgcagtttgaggaaatgaatgcagagcttgaggagaacaaagagttggctcagaaccgtctctgtgagctggagaaacttcggcaagactttgaggaggtcactacacaaaatgaaaagctgaaggtaggaacgcatccctgaagggcagtaaaatcagacgttctgctgatcaactcacgtatatacatagttgtgaatctgcgtattcatgagggataagaaaaatgtagacaaaatccaacatccttttatgataaaactcttaacaaattaggtgtaaagaagtgtacctcaacataataaaggccatataaaacaagcccacagccaacattatacccaatggcgaaaagttgaaagcttttcctttaagatcaggaacaggataaagatgctcgctgtcattacttttgtcctagccagagtaattaggcaaggataagaaataaaggcctcttaatcagaaaggaagaggtaaagttgtttctgtttatagatgacatgactttatatatagaaaaccttacaggctccacgaaaaaactgttagaactataaatgaattcagtaaagttgcaggctacagaatcaacatacaaaaacaattgtgtgtctatataccaacaacaaactctataaaaaagaaattaagaaaacaatcccatttacaataccattaaaaaaaattgtgaataaccttaaccagggagatgaaagaactgtacactgaatggataaagaaatgtggtgtgtgtttgtatgtgagtgtgtgtgtgtatatgtgcaacagcatggatatatttagaggacattatgctaactgaaataaaccaagcacggaaaggcaaatactgcatgatctcacttgtatgtgggatctaaaaaagtcaaaatcttggaagcagagtgtagaatggtggttaccagggttggggaaatcggaagatgttggggaaaaggtacaaagttttagttatgcaggatgaataagttctggtgatgtgtagcatggtgactataattaatgctgtattgtgtacttgaaatatgctaagagtagatcttaaatgttcttgccacacacgaaaagataactgtgaggtgaaggatttgttaattaggtggattgtggtaatgatttcacagtgtatatgtatagcaaaatgccacattgtataccttaaatatgtataatttttatttgttgattataccttaataaagctggggggaacaaagaaaaaatgttaagttttgttgatatatctacttctttacttacatatttacttattatatgtactctgccttgccctgaaaaggatttaaagcaacatacaaagatatgtagactaaatcaaggtgctgtaatgtaggagttgttgagaaaaatgagaagtagggtaaactagggtgaggatccaaaatgcattaaagtggggcttgtatacaagatgtttgcagggggcatatatatactgtggaagggaggccattcacatgtcagtgcttaccgaagtgattccacaggtttggctctgcagttttttgctaccaaaacagagaaagaaacacgattggtgatcctgttggtcttcaaacctgcccagaagaattttcttcttaggttgttagtgtaggggccagccccacagggtcggtgggtctctccctgtgtgcggagacgrgagagtgtagaaataaagacacaagacaaagagataaaagaaaaggcagctgggcctgggggaccactaccaccaagttgcggagaccggtagtggccccaaatgccaggctgcactgatatttattggatacaagacaaaggggcaggataaggagagcaagccatctccaatcgtaggtaaggtcacgtgggtcacatgtccactggacagggggcccttccctgcctggcagccgaggcatagagagagaggagacagagagagaaacagcttatgccattatttctgataattagagacttttaatactttcactaatttgctactgctatctagaaggcagagtcaggtgtacaggatggaacatgaaggcggcctaggagcgtgaccactgaacaggttaggcctccggataacggcggacgagcctgactaatgtcaggccctccacaagaggtggaggagtagagtcttctctaaactcctcccgggaaagggagactccctttcctggtctgctaagtagcaggtgttttcccttgacacttacgctaccgctagaccacggtccacctggtaacgggcgtcttcccagaagctggcattaccgctagaccaaggagccctctggtggccctgtctgggcataacagaaggctcgcactcttgtcttctggtcacttctcactgtgtcccctcagctcctatctctgtatggcctggtttttcctaggttatgattatagagcgaggattattataatattggaataaagagtaattgctacaaactgatgattaatgatattcatatataatcatatctaagatctatatctggcataactattcttgttttatattttattatactggaacagctcgtgtcctcggtctcttgcctcggcacctgggtggcttgccgcccacatcttaggagaagaaaagagattctggaagtctttctcactcctctttcgatcatagtcatctctattttacaagttgtttgtaggttaaatgatatgaataaagatgtttgaactgaaaaataaaaaacaaaaacaacctaagttaaatcagttaaaagtgtttgagtaattaaatcagatagttgcttaggagaggcataactatttttgataccctgtcaatttttttctctgtcactgttattaaagagaacaagttagtgactggggtcctcaactatgtttttaaaataagcatcctgacaaatttcactcttctggtggctcatttgacacagaatataaaacacatatcaaaacaattctaggaggaaagaatacagtatatccaggtaccatctcctagttagtctaatttaattttggggtagattttacataactacagcaatgggtagataacttaataatctttataaaattgtctctcttgtgtaggacatcagtgagttcaaaattttacttcctgtctagcgtctggggcaatgctagattctgcttctgactttgctttgggccctcctaaggtggaattgcggagtgcagtggagcaagtcgttaaggaaactccagaatatcgctgcatgcagtcacagttctccgtcttgtataatgagagcctacagttgaaagcacacttggatgaggctcggaccctgcttcatggcaccagaggaacccaccagcaccaggttgagcttattgaggtaatagccttgccttgtcttttgtatgtaagctttcttgcctcctaaattttacaattttactccctcatgtgcaattaatctctcattcattcagctgtcattcatagagtggcagtaggtctttactctgrtaggtactgggcatataaagatgagatgacaaaattcctgccctcacagatcttgtagtctgcagtaatgggagaatagtatccattagaatgcaatgtggtacaatggcagcatagccaaaagatgtgatacatgagaaaagagtgtctgatttgactgtggaagtttcctgattccacttaaaaaagtaaggtataaatattaaggataaattattggtagttgaaagtaggagaagaagaattcccggsatgagaacagcacatataaaggtatgagagagcatgagaaatagtttaatatggctagagcttacgtgtatgtgagaaaatagtgggtagaagctgcaaaattacttacatttcttaaacaaaaagcatataatggcaccagtagatgatttttttaaaagatagaaacttttattcatatgttcatttctgtatcttccatagtttttaaggtaatggttataatagttggtcttttaatatatgcctgacaaatgaattgaatactattttacatatgtttatatactgttttatagtttagttctccaactaaattctaatattctcagaattggtggccattttctttatttttcagtatcctgtcagtttccaaattagtcttttgtagatatctggtttcattacgtatagattgaactggaaattttcagagtaatccatagaatatgatgatatttctacattttaataagaatttttttattggttcctttatctgtgtgtagcgagatgaggttagtcttcataagaagctgaggactgaagtaattcagctagaagatacattggcccaggtccgcaaggagtatgaaatgctgaggatagaatttgagcagacccttgctgccaatgaacaagcaggtataatgattctcactccatkctgtagtttgctcttaataccttccttgaaagatacaacacagaccccagggtttgttaatgctgacttcaactcagaagtcataagtaccttaaatcctataattcattttggttcacagcctggatgtttgttttttaactcaagttgaccagttttgttttcatcttctgagaaggaatcttttatttggtaattctccctatttctcagtgcctcctgatgtgttctgttctttctctccttgtgcctttgcccttaccacggttcctcataacattgttgttcctgtatttaaggccctataaacagggagatgcgccacctcatcagtagcctccagaatcacaatcaccagctgaaaggggaggtcctgagatataagcggaaattgagagaagcccagtctgacctgaacaaggtaaccagagggaatagaataaatatcatttgctattaatgtcgtaaagctgcttttgaatgaggtcggcaatgtggttatcataagagatgtgcatctttcttttctttattctcccagacacgcctgcgtagtggtagtgccctcctgcagtcccagtctagtactgaggacccgaaggatgagcctgcggagctaaaaccagattctgaggacttatcctcccagtcctcagcttcaaaggcatctcaggaggatgccaatgaaatcaagtctaaacgggatgaagaagaacgagaacgagaaaggagggagaaggagagggaacgagaaagagaacgggagaaggagaaggagagagaacgagagaagcagaagctaaaagagtcagaaaaagagagagattctgctaaggataaagagaaaggcaaacatgatgatggacggaaaaaggaagcagaaattatcaaacaattgaagattgaactcaagtaagaaccacatttagagtaacagtttcgactgaaaagctaagattaagacatcatgcatgaaatgtttggttgatggcatggcttgtctgatcgttttaatgttttagattgtacaattaatttggtttcaagtcgtgttcaagtgcacagccaaaatggcttgcatggctatttagtactttggttcagtgatcgagtatcagcaaaccgatgatggtagccttatttttatgaatccaaattaaggaaaaggatgtcatgattgaggtaatacttctgagaattattgggaattaactactgctcttcactggatttgagcagattgctggcgttaattgtaatttaaatgatattaagtggagtatttatatatcactgtaacttgaacaatatctgatctatttgcctgagagttaactggtttgtgaatatgccatatctttcttaggagatttactcctatacacattgacacactaagatagacctttaacttgttgaatttttctgtgtcataaccttatgcattggcccttctcctgtataaccaataacttctctggcagaacggcttacttcttgctccttactttctatggttgatcctttgttgatgtttggacttgagagaccactgtgctcaaaatgcttgaactcttttggtatataaaagtatagttaagaggtttagtaatttaataagaggtgaagttttagtctttggctgatggttaatcactcagctgtcaaatctaggattaacagtatatctcagactttcaaatttttcccttttatttctccctcttgaactctttaaggcaattttttttttttctggtgtggtatcagaatcatctgagtgacttgtttaaatcacttgtttaaakttttgaactccatccccagacctactgaatctcagttacccagggttgggggccacagaaatttgcctatataacaagtacacaaatgtctgttttataactttgttagaggactttgaagggagaaatgattcatttttatacagcttacttttctgtactttctaagcatatccaaaagtcttttgatagtctgtgcaaaattttatcttttaggkgtgatatgaaatgtaaaatgaaastgttttaaaatattctgctcaatcaaaattcccttgctctgatgacctttattttcttattacattgttcccctccctctactacgcctgtcataggaaggcacaggagagccaaaaggagatgaaactattgctggatatgtaccgttctgccccaaaggaacagagagacaaagttcagctgatggcagctgagaagaagtctaaggcagaggtattctagtctgctattacctgtccttctggttaaaatcttcatttgtgggattttcctttatacttgccaacgatataatttctttctttatctttaaaataagtgtttaagtgcaacattttctgccttttcaaagaccatctgaagtagagattttaaaactctccataggatggtaaaatatatctgaattactggggttatgagtaggctttccaaagtatgtattccttgtttttcctatgtaattcattgctacagggataatctttttcattacttttgggaggaatgtcttatgctcttaaaattttgaggcctaaaaaaaaggatgggaaccactattctaaagaaagttacctgtgcacttctcaaaagtgttgcttatagaagcatgtcatagtagaatggagtgatgttaaaacagatggtgttatgtaatgttttartatattatgtaccttgttctataattctgtaaagactcttttggtattatgaaccttctatctttgcacagtattaattgatttttgaaaatgtgttataactttttattttwgtgcaattcctttcctcttatagttggaagatctaaggcaaagactcaaggatctggaagataaagagaagaaagagaacaagaaaatggctgatgaggatgccttgaggaagatccgggcagtggaggagcagatagaatacctacagaagaagctagccatggccaagcaggtggactcactttctttatttaattgactttttgagtaaatgttacttgacaataagttattgccagtgaaatttgcttttttattttggtctttttttgattgttaatgtgtatttttcctttttgtgtgtgtgttttaattcttaccttcaagtcttttatctttctgttattttgttttgtgtatttgtgaggcaagaaatttacttttatttaaatggacatttattgaagatctagtctttctctgctgttgttcagacagttattgaagatctagtctttctttgctgacctggaattaagggttatagtgaatataaaatgaaaaataagacataagattttatatacattatgattacaaatatatgaaactaagaaaactatgcttataaatatatatcattatatatttctatgtagtacatatactacacagaaaaactatgcttataaatatgtgatttatatataataaggatataatctattaaccaatataataacattgattaagcagtatgttaactatggctattttggggtcatagaactatagagattgttctcctccttataatgaatatgtatgtatttttaaatgccagggaatttttattaaaattcaataataaagatactgaaaatgcttgaaaaaaccatatatgtattctctgttagtacaccttcattgtttctaagaaatagcaaaataacagtgagatggagtaggtttaatggtaagttgatcatgaagtgccttgaaaagaagaacttcattagatcctatacacattccttttgttaacaagtgtaattttgggctgggcgcggtggctcatgcctgtaatcccagcactttgggaggccgaggtggatggatcacctgaagtcgggagttcaagaccagcctgaccaacatggagaaaccccatcactattaaaaaaaaaaaaaaacaaaattagctgggcttggtggcgcatgcctgtaatcccagctacttgggaggctgaggcaggagaattgctggaacccaggagtggaggttgcagtgagccgagatggcgccattgcactccagcctgggcaacaagagcaaaactccatctcaaaaaaaaaaaaagtgtaattttgacttttcttaaatctggtaaatgccacttttttttttcttccctctctcttaaggtaattatcaggaaattatactattataggttctagaacaagtaaaaagaaagacactatgttcttgtatacgatgactatcttaaaaatgttcagtctttctaagtttatgtattaatataatgtgatctcataaaagtgctttttttaagttttgcttttgtttattttggtactagaagaactggttttaaagtacatgtggagaagtaaacaagagtaacaagagaaattgaaaaagaacagcactggggtctcttccatatattaaaacataaagtttctgtagatgaaatagcttgggactactagacaggctattagaactgaatagaaacttgagaagtagttgaaagtacacatgatacttattatgtgctaaatacatagttttaaatcagtggggaaaagaaaaactgtgacatgtgatgggacaaaattaaaaaaaataatgttagagaaaagttagatacatacttgaatacactaggatgatttccaaatggatcatagatatgatattttaaaaaatgcatccatcaaaaagctagaagaaaaccattaaattcctttataatttggagtggagacctttctatgaataaaaggctagaaaacatgaacaaaaaattgataattttgagttattttttaaaatgatgcaaaacttctacactgcaaaaaacactgttagcaaagccaaaagattaaatgacaaaaagtaaaaaatatttttaactyttattacaaagaaggcttatctgatacaaaaaaaactctccaaaatagggaaaaaaactcaagaatccagtggaagaataggcaaaagaaatgagttggttatggaaagaatacaagtggtcttaaccatatgaaaagatgctcagtctcacttaaaatgagatagatataaagtaaagctattattagataccagtcttcacctatcagattgttacaaggctttagatgtttgcaactgctggaaatcctgtagatccagtattttaattgtggaaaagcatgagaaaatgtgagaggttatgatggaagtactcttaaccaattgctgcttgatccgtttgtctagattaaggtaaatacaattattgtctaatttaactgacgttgagtacagatcaactaataagtatcagaccaacaattggygccagtgacttcagataatagagctyctgtatgcctagtgacaaaacacaacttcttaaaactctgtcactaaattaatttatatctaaatgaacagtgggaaaatttagtttcctgtgctcttccattgaagttggaagattcttctaaaatcaaatctcttccttcatcctttaggaagaagaagcactcctctctgaaatggatgtcacaggccaggcctttgaagacatgcaggagcaaaatatccgtttgatgcagcaattgcgggagaaggatgatgcaaatttcaagctcatgtcagagcgtatcaagtccaatcagatccataagttgcttaaagaagagaaggaggagctggcagaccaggtgttgactctgaagactcaggtaattaggatgagtagagctttctattctgttgaaatagggtgctttctacatgatgatataagtaaaagaatgattattgtggcacatttttgtgattggaaaaaaatttgaaaactaaatgttcatcattagggtattggtaaataaattatacatctctactgttattcctacaaaagagtacagtgtacttgtcaaatatggatctgctaatatggaaacatgtctgaaataaaatcaagtgacgtgttttgttatcctttttgcgttaaagtatatgtttacttgtgttcctgtgctgtatattttaaaaatttctggaaggctgcatgagaaactgttagaattgttacttctggatattgggatgagttgtgggtgaggttaggaggtatgtgtgattttacttttttttttttttttttaaatttccataggttttggggaacatgtggtgtttggttacatgaataagttctttagtggtgataccaagattttggtgcacccataacccaagcagtgtacattgtacccagtgtgtagtctattgtacccagtgtgtagtctgttgtcccttgcctccctccgccaagtcaccaaagtttattgtatcattcttatgcctttgcgtcctcacagcttagctcctacttatgagtgaggacatacaatgtttggttttccattcctgagttacttcacttagaatattggtctccaattccaattccatccggattgctgtgaatgccattattttgttcctttttatggctgagtagtattccatggcgtgacttttcctctgggtagatacccggaagtgggattgcggaatcaagtggtaggtctacttttagttcattaaggactctccatactgttttccatagtgattgtactagtttacattcccaccaacagtgtaaaagtgttcccttttcatcacatccatgccaacacctattattttttgattttttgattatggccattcctgcaaagtgaggtggtgttgcattgaggttttgatttacatttccctgataattaatgatgttgaacatttttcttatgttcgttggccatttgtatatattcttttgagaattgtatattcatgtccttagcccactttttggtgggattgtttgttttgttcttgctgatttgtttgagttccttgtagattctggatattagtcctttgttggatgtatagatttttttctcccactctatgggttgtctgtttaccctgatgattatttcttttgctgtgcagaagctttttcgtttaattaagtttcatctatttatcatttcttttgttgcatttgcttttgggttcttggtcatgaagtctttgcctaagccattgtctagaaggatttttccaatattgctttctagaatttttatggtttcaggtcttagatttaagtctttgatccatcttgagttgatttttgtatagggtgagagatgaggatctagttccattcttctacatgtggcttgccaattatcctaccaccatttgttgaatagggtgtcccttcccactttatgtttttgtttggtttgtcaaagatcagttgactacgtatttggctttatttctgggttctctattctgttacattggtttacatgcctatttttataccagtaccatgctgtttttgtgactatggctttatagtataggttgaagtcaggtaatgtgatgcctccagatttgttcattttgcttagtcttgctttggctatgtatgctcttttttggttccatatgcgttttaggattgtttgttctagttccgtgaagaatgatgttggtattttgatgggaattgcatttcatttgtagattgcttttggcagtatggtcattttcacaatattgattctacccatccacgagcatgggatgtgtttccatttgtttgtgtcatctgtgatttctttcagcagtgttttgtaatttttcttgtcgaggtctttcacgttcttggttaagtatattcctaagtattttattttattttttttgcagctgttgtcaaagggtttgagttcttgatatgattctcagtttggttgctgttggtgtatagcagagctctgatttgtgtacattaattttgtatagtgaagctttgctgaattcatttaccagttctagcacctttctggatgagtctttagggttttctaggtatatgataatgtaatcagcaaacagtgacagtttgacttcctcattaccaatttggatgccttttatttctttctcttgtctgattgctctggctaggacttccagtgccatgttgaatggaagtggtgagagtggcatctgtgtcttgttccagttctcagggggaatgctttcaacttttccttgttcagtataatgttggctgtgggattgtcatagatggcttttattaccttaaggtatgtcccttctatgctgattttgctagagttttaatcataaaaggatgctggattttgtcaaatgctttttctgcatctattgagatgatcatgtgattttttaaaaattctgtttatatggtgtatcagatttattgacttgtggatgtcaaaccatccctgtatccctggtgtgagacccacttgatcatggtggactatctttttgatatgctttttgaaggcagtgtgagaaactgttagaatggttacctctacatattgggatgagttgtgggtgaggttaggaggtgggtgtttgtgattttactttttacactttaatattgtttgattctactttgtgcattaatttcaaaaaagactcttttagaatgtctagccattctgaaggaaatactcttggacttttgtttgagttctaatttatatgttatagtatgaattgccaggttttaagcattagcatgcattctctatttttggcaatttggaaaagaatcttttcagtcatttttcagactcttactgaatcttccacaatattttatattaaaagtaaagctttcagttatcatagtcttgatgtattttgaagggttcatgggcaaaatcagtaatagtttgagatttctaacatactgtattttgtgggcttatagattaacagaatagttttttttctttttttaatcttttcatttgtgttaaaatctgattttctgttcaaaggttgatgcccagctacaggtagtaaggaaactggaagagaaggagcatctgttacagagcaacattggcacaggggagaaagagctgggtcttaggacccaagccttagagatgaataaacgcaaggtatgattgattaatctaatgatggttagtctcagtggaacaaataagtataacactgttgagattgtaagttcgctttattccttcaacttgggctaacattttgcctcactggcaataataggtgatacaatggtgtcacttatttgtacatcctacataggcaatggaggcagcccagcttgcagatgacctcaaagcacaactggagttggctcagaagaagctacatgattttcaggatgagatcgtggagaacagtgttaccaaagaaaaggacatgttcaatttcaaacgagcccaggtaaaagcagttgtcttttcttgtcaccttttaggtgttttctgaggtcggaagtgacccatatcatgaaagaatcattagtccaatgtatgtcatttcctactagacttgaggaagtttgttgagggaagagagtaagtctgttttcttcactgccatatcctcagactcttttatggtgccttgcacctagtaggcacaaaataaatatttgttaaattaatgaattagtaaattgttaaagaagtaacagcatagcagcagtagaggattttcaagttcttgtataatgtctctatttttgtcatgctagctgtttctcatgatgtctttctgtctttatccgtaagtctctgaattattttaaaccgttctaccttcagcttaaaactaattactataaaacaaaatagactgtcctctaaactcttagatgtgttttcacaggactgaattggtaatagatgcaattctaatttggggatataattatggttgcctcttctgaaacaaaagaaaatatcctgccatttgcagttctctacatttctacaagataattgaccataaaaggatagaaagtcccctcttttcacaacagaaaactcaagtctattatttttctcaaaaatgatagatttgggtaagtgtgtctaatgggtatgctatcctgccacaggaggacatctctagacttcgcaggaagctggagaccacaaagaaaccagacaatgtacccaagtgtgatgagattctgatggaagagattaaggattacaaggttagaaaaaatgccttagtgattagttttttgtcaaagctttaagtggcctaatagactgggagaataatttgcatgatagtaaccagagaatggtttattttggaggttggggggaaatgatgctctttttttagtgccttgtgggttttcttcttggttgtgtagtatatgagagccatttggatcataaactttcatggttgttcaaactctgacatcttttctttttaggcacgcttgacctgtccrtgctgtaacatgcgtaaaaaggatgctgttcttactaagtgttttcatgtcttctgctttgagtgtgtgaagacacgctatgacacccgccagcgcaaatgtcccaagtgtaatgctgcttttggtgccaatgattttcatcgcatctacattggttgatctaagtcaagagaagaagaggagctggctagtcaggaacttattcattaaccaccaaacctctacctcttctctccttgactgtcacctgtaggacagtttatcagtcaactacctttcctccagactttacttccaggctctcctcttcagtagctggatgactttagcagaaaggactggtaaatacaagccttgggtttcagaatgaattagaaacaaataactcttactgtcttccctcccagctttgtttattttgtgcttttagacttttcagtgttttctttttccagcccactgtataaacttggattgtccattcctcctgaagaaatcaagttggtatttttgatgtggaaaagggaacaaaagtggaaacatggctacttttggggagtgatattttaaaaaataagttgtctatgggcacaaagttttcttcatttgtgtagcaaacttcttgtgaatgtggattacaaaatggtataattgtgctactctcccctgggtggtttgcagccctaatgaaattatgtctaggatgattcagtctatttcccatttactagcagagtaacttgttaagatcagctggctttcttgttaaagttatttaagttttgaatgctctactacttcaagtctttaaatttcttgagactagaataattttaaataatatgaccctttgtcttctaatgaaataaagattgaagaggttgagtcaggactgagctggtgaagaaatcttgtgggtattctggaaatttgatacggagagaacttggtgagctatgaattactctcagtctcctttttacagggttgttgtgatccctcttttccagaaaattctgtggaatgtttctgtaggactttgttctccacaagcttgaattaaagcaggattcagtttgcatttgtgtttatggtttttctttgaaacttttgtctttattattacaagttgattytatatctgctgttatagaattaaattttcttgcatggaaataatcagcttaggttaagaggttggccttgtttagagtatttagatctttgcttaattgaagcacttttctcccaattcttttattgagtctattctatggagaaattatacctaaaagattaatttatttgactactcagttatctttcatagttcattaggtggggtaagagactataatttgttttttgggggagcatattgctgcctctagctttagggtgagagttcttgcattatgtggtgggttttttttttttttttttgagatggagttttgctcttgtcgcccaggctggagtgcagtggcacaatcttggcttactgccacctccgcctcctgggtccaagcaattctcctgcctcagcctcccgaatagctgggattacaggtgctcaccaccatgtccagctaatttttgtatttttagcagagatggggttttaccatgttggccaggctggtctcaaactcctgacttcaggtgatccaccttccttggcctcccaaagtgttttgattacaggtgtgagccaccatgcccagctgcattatgttttataataaccagcaaaccagaggtttcataaatctctggcaaggggttgtgtaaaatggatccttcttgatcaccacctgtcctagaagacaggtaagagcaaattctgtgtctttytgtggtcaccagctataatcagcaggatttgcactgaattccacaaagtcatgtggtatgaattaagcaatgagtctaattgaagaatcttactaggtcatcaagagaggtcatgggtcccttgatccccctgctcagcaaacacccccacccccacagaaccatcatgacaggattagctcctgcttctggacacagtgagttttcatttagtaataggacactttccccttgcttcttgctcttcttatagggtaagcttgagcataactttgttggttgggtgcagatatactgcttggtcaacaggtggtttgggcttggctgttggctgtttgtgacaattggctgagaaagccagctgcccagcaccaggggaccatagggcctgtggaatgttgtggaggaaaccactagccccatgggaagttggatttagaggaagttcctctagttgagatgagcagggagcccctgatyccaacyggcttgaggtcctggcaacacaagttgagctctcacagtcattttcagataacaaccaaaaatgatggtgattttttggcagttggcttctctcactacagaagaggtcaatgaatgcgctttaggaatactcccaaactgcataccaaattttatttgtattgtatgtacattattcatagcttttttggatcctagttagcaatcacagcccttgatccatatgaactttaaagggtaatttctttaaggtaatgcttataaatgccaatttcaaagattattatagaagtcctagaggcttctcatttcttaaaaacacttcaggctgggtgcagtggctcacgcctataatcccagcagtttgggaggctgagacaggaggattgcttgagcccaggagtttgagaccagcccaggcaacatagggagaccccgtctctacaaaaaatttcgaaaattagctggctgtggtggtgcacacctgtagtcccagctacttgggagactgcagcgggaggatagcttgagcaccggaggttaaggctgctgtgagctgtgattatgccatggactccagcctgggtgacacagtgagaccctgtctcaaaaacaaacaacaaccatttcagattttgtagggatggtctctctctctcttttttctttctttcattgttaccttggaaatttcttagtgactttgaccaaagtcaggtgtgctctgaggcatgcataactacatggcttggatcttaccttcttacttactatagggatctttttcaaaggtattgagctgtttctgcaattgttttcttacatgaatttccattgcaattccttttcctttttctctgtccagatccgtaggcttccttgttcttcaagggccggaatttgatgcacatagtttaatgtacatgccactagagtgatgactgtgatttgattttgtgaagattctagacaataaataatcatcagtcttctaaacctactaggatggtgatgcttacacttgccggaagcatatgctactctcatctttattcccattgtcatttgctaggatgtggaatgccgttacatattgttctttgaagatttatctgaggactgccagataaacccatgtcccagtggatctgcagaaaagttttgattagtcattattgcagaagtctgcttttctgatgttaagacagatacactgagattagtagaaaaatggtggattatgtgtaggttggattgggtttgcacaataggaaacccatgacatagaaatacttacaaattttctagatcttaaagtttggaaatacttaaaagtggtcctatcagaaagaatgagctttaccttctgggattcctgcccatgtttggtctgttccaaatgttagctattaaggtcttacttatagcctacttcacaattactaaaggacatgaaaaggacaatgtcttaacagtctaatccctaatatctagcagaggcacatagtagtcagtaaagtttttcatgattaaattaattctgcttcatggttctgctgccagatcttccgaagtctgctttactgggccaatgtgtgattcaaaccttattactctttctttttttcaccccctaagtagaaacaatctttccccatatatcgaagtaacccttcaaatttgtattatccaaaaatatatgactacagttttaatttattttgtggcaataaaaggaattattatgaattctaaaactaacacttctgtagtggcagctcatgagactgctgagtctcatgtagctgagacttcacttactgcaaggcacacatgataaccactacgctacggaaacctgcataaaagcttcatttattgtaagttaaccttttttttttttgagggaagctatgttcacattaatataataataatatgctctgaggatattagagctgaaagggaactcagaccatgtccttattttagaagtgaggaaataggttccagggccactcaggttagccacaggattgaaatgctactatgagaactccattgttcttttatcccaatcggagacctgtactaatagagtacatgtcatcaggtagacaataagtgaaaatactttctgagtcattttgaagtcttctaaagacttacatatacctactatacttatccttgatcattctaatctaactagactctttgccaggccctggattagaactacattttgtttctgaattcactgagttcctttagcaccttgttgtagagtagaattgaatcaagggatcttagatttcttcctgctctcccaatcatatgcatttgctgagtgcttattgtgattccaggcattgtgttaaatatatttctcatgaagtccgacttgcctgcgtatggtgctgctacttattagcaagttacttcatgtctctatgcttcagtttcttcatctataaaataataactacatcatagggttatatggaggatgaaatgaatcatcatacaggagacattcagcacagcgcctggcacctagtaaatgctcagcaaatgctaacttttataattgttgagcaaataaagaaattgatagatcaactttcgtttccacctacattttcttatttctagggaaaaaaacaaaacaaaacaaaacactgacatcctccctgaaatctaagacacacgtttatccatgtctgtctgtctctagtctgcctgtcctggtaaatgatgtcatggccaactcattccaaaacttcaaaaagttaactttatctgctcactgtcctacaactaaaatgcatgtgagtgacatccagctccacctggtggtgaggatcctgttcttttactagttgtctcttcagcttaaaatcctttagtggttcctgtagtcttcaggacacaaatccaatttagcacaagtgatcttgcctctgcttttctctttccagttcatatagtttgtcatccaccttaagctgtgtgtttctattatattaaatgatttgaaggtcccagtttcttgattgccatggtttccctaatctggaattttgtacatgctttcttttagtttagttgcctgttaccctccactgagtctcttcacctcacacacctgcacccacatgcacacatacacacagtgttttcttcactccaatagtacccgttgtgcatttccttattagagtacacaccataaaatgtcagtttgtgtcctttcattacactgagctctatgggatcagaatctgctgtttttatctgtctatttccagcaactagccccaatgcctgggtacaaataggcatccaaaatatgaatgattgagtaatgcaaaaacacccttaggtaagtaggtagttgaattaagttatagtggatttacattttcatgagatttgattgtttctattcggaaagaatgtgtgtgaagaaggcaacaggctagcagattcatgaaggcaaatttgcctgcagctaaaactgcttgggttatcagaaactgcccatatgtctgggactgcagggctgctgctgatttgtaactgtgtttgcatcagttcttggttgggctagaaagcagaaagaaaagatgctgaaatgctatttttatgagacataggtattacagtgttgagttaaatggaccaatgaaggtgcagttacaatatccgcttctctctctgttctgtggagctaggggccaggccgaggcatgggaaagaagcagtaaggcagaaagactaaaaggggattcaaggaagaatagaaaattgtgaggcagtgaccggaatcctgtatggttgtacaaatctctgttactattactagttctgcaaccttgggcaagttacatagtttctctgactcttgtttttttatctgtaaactggaggtctcatttacctacttaagactacatctatagtgcctatcttgtggggttgttaagattaaatgagatcatggtttataataagtacccaatatatgttagttgttacagtattacctgtttataggttgtaaaaaggtcagattgagggtgggcgtggtggctcatgcctgtaatccccacactttgggaggccgaggtgggtggatcacgaggtaaggagatcgataccatcctggccaacatgttgaaactccatctctactaaaatacaaaaaattagccagacatggtggcaggcgcctgtagtcccagttactcgggcgggaggctgaggcaggagaatcacttgaacctgggaggcagaggttgcagtgagccgagatcatgccactgcactccatcctggtgacagagcaagactccgtctcaaaaaaaaaaaaaaaaaaagaaaaaaggtcataagttagggaccatacctatcttcttcactattgtgtctccagcacttggcacgtacatggaagctgtttagcaaatgtttgtcgaattactgatgagggtgatcagtacaggattttagagacctctgaacttgtgctttttcctggaatgtctatctcagatgaagccatttcagttctacttcatgatgcctgagctctgagatttctcagcatatcttgtgtttcttctttggactatagcaaggaaataagcataaatcatagcattaatgggtctcctattaagaaggaactggtatcatgtcaacatttgaatccccaaagacaaagccagcagtacatccaaaagtgaagtttctatctgaacatttattccacagtcatagaaactgaagatggaaaagacctgaggacatctaatccatccatgtggttgtacaagaaaagtggctggagcaaaacagcccgttcacttcatgctcacaagacagcatttccgttcttcctggagcggagcgattgcaaacacattaaaatgaagacacaatgcaaatactcttcacaaaccttaagaaaatacttataaatacattattttcataaaatgattagtaactaaaaaaaaagagtgagggaatcctggattagatggatagtttaggtgggtaaagaaaggaataactaaacagtatagatagtaaagtagtattaatgcctagaaagcaatttctgaagaactggatgggttttctgtttttcctatcaaaaatatgagttgggagaaaaagaggctctaaagtagtttctttcccctttattctttacccacaccaaggaagtgcttaacttgctctaaggctctaacagacacagcaccaacactgagaagtctgttacccagatgataaggtctgttctgcttggcacttgctccgcttaccacttttctggctggaagggaagcagcagctcttgatagggtttgtgcaatagcaagattcatgaatagcagagagtcatctccaggcacattaaagacctcgactgcttgggtccctgtggctgcttcacttggctgtcctggttattcttccaatttgtttttaaattttgggagattcccctttctcctccacctggaagcatacacactctggggccttgattattcttatttacacgaaccaggtagctatatctgttccagctcatctgagcatgctttatcatgtgcttcctgtgccagaaaagcaaggtagcgtcccttatctctttcttctttaccagaataccaccctctatctgaaggcttctgatctttgtgttttttttgagcctcaaaggagttgaaagaacagaggcagagctgaacggaaaggaggtttccaaggacccaccatttcatgacatcattttacaaaacacaatacactgtttcacaaattgcaaaacactgttcagttactaccaataaaaataaccattgctacttaacatgaagactgcttcgtttcaccacaagcaattatggtttttctttattcagaacatagaggcatttcaagcaatgttgatggcagtaagcctgctgtcagcccctgctgctgcttgctgcatcctggccagtgttttggccaggtagttcctccaaagatgtttgaggagcgtgcattggtcatctactttgtggataggcagggcgatctggcatgtgatcaccactgctcagaatgcctcactagagaagcttaaggtaaatccgatatacaaaaatgcagacttacaaaacagatacattaagggataattaattgcattacaaaagggtgctttactttacaaaagaattcacttctgggttcccttaaacagccagcttctcaaatacagtcagaatatgagctgagttacaaaaatgtccatgtacattaggagcatggctgtaatgtggattgaggtacacctgtacatcagccttccgggctgcacagaggttcaggggcacgcagagcatggtggcagagtctccagcattcttagctggtacaagtgggtggggatggctaaggggcaaaatcttccaaaggcagttgcaacctacttctgggcctggggtgagaacgtgaggggatggggtgtttcaacacagaactgtccttttgtgttttcagggctcacctgtttcctcattattgaactgtttcatctgtggagttggtgacctctaactttagagccctcccacatccatatcagtatctctgagcctccctccactccagggttttctcagccaattaatcactaggtgttatctaactacagcttaagttgttattccctgggtgactgggtagattttggtggaaatgcagacatttcatccagtagtagagggagaagttttgtgactgagacacctttccagtgatctccagctgtaaaagaggaaagtgcttggcacagctcctgaacttattgtaggcattcaaattggttgggggtggaacaatgagtcctgagaagataaatcaagtaattgataaataaggaagtcttgtcctaaatggtgcccaggggtgggggtgaggatgttgaagga

SEQ ID NO: 7051 - DNA, 52128 bp, Homo sapiens
  misc_feature (1)...(52128): n = A,T,C or G, or insertion/deletion polymorphism (see Tables 1-2)
gatcaattctagacatacttgttctttcctctctgtaagcacagtttctgtgttaagcaccaattacactggggtcattaacatctttctcaataattttaagagcccctgagtggtctgtgtgtgactagaacataagctcccagagggaagggattttgttttcaacagagatccactactgtaaagatatcaattctccccaaattaagctatggtaattaaatataatgttgactacggtacacaccaagcacccaaaatagtgtctagcacaagtagctgttgagcacccactctttgctagaaaatggggatacaataattagaaaacagatatgaatacatcaatcacaccttctcatccacaacacagtatttctctccatttattcatattcaagtcattcttgtcctttggttaaaactagtttccttcattatagggaccttgaacatttcttgtttattcctcagtattttagcacttttgatactatctaaataggatagtttttctattagactttcaaactgtttactgcttgcttgtatactgtattttctctccagccatcttactgaactcttgttagttctgacacaaaactcaagaagattaacagaaaaactgccatttacaaataaaaactgtctctttcccttctgctactttatttttttcttcttattctcatttcctattttattgctttaaccaaccccttcaggacaatacagacgaagagcaatgacagcagacaaccttccctttttctaaaattaaaagcaagtttggtataatatttgctgttggtatctggaatatagttgtttggatattccttgttaagaaagcttctttctaattctaattagttttgctttactgttgttttctataccagaaaagactaaaatttttaggcttcgttttcattaatttataaatgtaacatagagcattaacagattttgtaaaactgatccaatgtatttctagaataaaatctagtctgtcacagtgtattatgctttaatactctactgaatttgatttgtaaaattaaaaattgttgtgtgagaacagtctgtaattttattttattttattattattatttttttgagaccgagtttcgctcttgtccaggctggagggcagtggcgcaatctcggctcaccgcaacctctgcctcccaggttcaagtgattctcctgcctcagccttcctgagtagctgggattacaggcatgcgccaccacacccggctaattttgtatttttggtagagacggggttcctccatgttggtcaggctggtctcaaactcctgacctcagatgatcctcccgcctcagcctcccaaagtgctgggattataggcgtgggccaccacgcccagctgtaattttattttttatgcactttatgcagctaggttattaataaaaggcaaggaaagatgacaagagtaattaatctatacactatagaaaggagaataaagttatgactatgtctattaatagtgcaactgttataattatcaaagataaagttatgacataagtgaaatctgccatgatgactctaataaatttatgtttaaaatctgtaaagttttcatattaaagtttttgaaaataaaagaatttatttaggtaaactggcacacatttgcttgttttattacctataaacagctaggagaataaaaactaacactcaaacttttttaaaagcttaatatattttaataattaagtcagttatatttacttgtcatatgccttaaaagagctttaactggctgattcaattattcaaaggcccaaaactatacggcccaaaaagactgacgcattatttatttccctacaaatgtggaaatcttatcaaaatgaaggtatacacatgttgctgagcatataaaacaccatccctgtcacaggaaaataaaggaagacattgagtctgtttcgtaattaatgaaaaagagggatgtgctagagacaacacagtgagtcagtggcaaccccagaactagaacacagagattgtgacctccaaccaggcttcttcccattatatcaccatcactgaggtggatgagcctgagatgtcaccatatcccctcacctgcttcttcactgagactgatgaattccaacagaaacaacatcctttcacagctgtttaccatgaataccgtctcaaattcattcagatctctttgtctcaaacaacacagaatttcaacatccttctcatttattctcacaacagcctcattgcacagcagggctacacagtctgcaggtgtggaaactgagacaaagtcaccatctagagccaatcaaccttctagtcctgtccttgtctccttaaactacgtctgtacctctttttatagtactttatttataccatgccttgagttttcctaaatttatgtaaaacagagaatagtacttaatagaactgttatgaagattaaatgagttaatatatataaaaataataagaacagtgcctatcacatcgaaagcacaccataaatattagctatttttatttttactcaaaattatcaaatgtgtccaaggactttccagtccaaagcttctgactgctttttcaatggggatgtgtcataactcctaagccaatgaggtccaaaatgtatttaactcgctctccaaacgggctcctttttctggcttcaccagtactattgccacgctgcaaatctgactttgattcttcaaccttccctacctccaatatctaatccattgctaagtctgatcaattctagatatacttgttctttgctctctgtaagcacagtctctgtaagcaccaattacactgggatcattaacatctttctcaataattttaagagccactgagactagtctccctgcttttctttttctttcttcaatccattcttcacacagctgctaccgtgatctccctaaatgacaattcttattttactctgctattatattagcaaccaaactctcattcagccttaacagcagaataaagcctaaacttcttaacgggtactgaaaggcttctggacccaaactatctttccacccttctcaccacaacatttcaaaaagggactgactatttactgttctctcaaaacactgaactcctttttgactctctgcattttcccatctccttacttttgctcagaccctaccctcacttagaggggtcttctcttcatctccgcccataaatgccattcttcatatgccatttagtcatgtcttacattatgtccaaaaagtgctttctctattccctttatagtttcagagaattttatagctgggatcacctcatcttacaaataaccatgtctgcaaatgctaaaatcaagtaatcaaggtgaccggcaggtaggcctagaatttagatacaacttcaaatcttttcctaaaccacatcttccccctttcatagtatttaatcacaccttgtcttgtattttagttatttatgtaattattcgtatgttcattcaattgtgtgaagactaaaggcaaatgtatttcagatacatcagttgtatgaagtagaacttcagatgtttgttgaacctaataaaaattgcaacaagaaatacagcaactcaagattaacccagctacatggggtgggggcaggggggtggttcgccggggggaacaaaagagtgggggccacatggcagctcccctctgccacctcagagtaaatgtcactttaatataataaagtccctgaacatagctaataatttcttcctctgaggaaaataacagttgccactctcacaggcatctaagattaaatgaagcattgcaggtagaagacttaacatacggccaggcgcggtggctcacgcctgtaatcccagcactttgggaggccgaggcaggcagattacgaggtcaggagatcgaaaccatcctggctaacacggtgaaaccccgtctctactaaaaatacacaatattagccgggtgtggtgatgagcgcctgtagtcgcagttactcgggaggctgaggcagcagaatcgcttgaacccgggaggcggaggttgcagtgggccaatatcgcgccactgcactccagcctgggcaacagagcgagactctcaaaaacaacaaaacaaacaaacaaaacacttaacatagtgccgggtatatcattgctggtacatcatttctagtcttggccttcctctcctttaatatagcctgttctactatccagccctgccatgacactcctctgccttaaaaccttccactcttcccaccacctcccttactggatcaagtccaaactgtttggtctggccttgtagaagctgcttccaagtcctatctcagcccaagttgcctctccaggctcagcacctgctgcttcccaccaccaccactagggtcacatcaaactgtacttggctccctaaacacacaagttctgctaggccgtctcattcttgtgagttttcacccataatatagtggaaaagcattggttttaaaatcagacttgggttcacttccagctctattacttacgagctccgtgaccttgggcaaatcatttctactctcggggactaattccttatttataacgctacgaccaattgtgtgtgtgtgtgtatatatatatatatgaccaattgtgtgtgtgtatatatatatggtatatacatatatatatatacaccaattgtgtatatatatatatggtatatatatatacacaccaattgtgtgtgtgtatatatatgtgtatgtgtgtgtatatatatatatatcctaccttatagtgttgctgggaggattcaatgaattaatgcatggaaagtaattagcatcctgcctggtatctagaaaggacttgatcatgttagctataattagtagggtatgtttctacttcactcctcacagcactaactacattgtactgtgactgcctctttatgtgtctgtctccctactggattgtaaagtccatgaaagcacgaagtatatctcttccagcgttatgtgtacacgttaattactgaaatgatatctcttgaataaacgaatgctttaaatgggtcctgttaccaaacaccttcccaaggctgtgagtagatgcacgctccaatattgtctcattttcccgcggcttcgtcaccccactctatgcactctgcaccggtgataccactttaaggtagatgaccgtctccctcgactgtgagcccctagggttgtatactcacctcgcatgcaagtttgaggattaagcgacataagctaagtaaaatgactggttggtgcttaataaaatgtatcactattattcacggaaggagaaataggtcgctgtggagggcgaaagggggaggattctagagccactgcaagatgcgacagggtggggtagagaggggaggcgactcccaaagctgcggaggggacctccgggggtcgacctgtatatgcgttggaggactggggaggggggcccgggtcccaggatccgcggagcccaaggggggctaggcccaggcccgagaagccgcagccccatgtctcccttgcctgtcctccggatagcctcacctcatctactttcagctcctctagagtgggcagctccactatccccggcatgacggctgcagccccgaccccgacgagaagccctcagccgcgtcgcccccgtctccttgaactcccctttcgaccgccgagtgccacacggcgcctgcgcatgcgcatccggcaacacgcaggcgtattgccctgcccaaccacgagcgagggagcgtgcgcaataccaagaacttttcagcctccagcggggtggggcttcgattcggctccgcccacccctccaggttgtcatagtgatgccgtatccactgagactccggatcctaacagctggaagctaaaaacaggcgccatggagtacacagggagcaaatatatcggggaatatgtagatgggaggtaaggggctcatttgattcacttactataccttgaatagctgtgactggaaaaagacggctttttgcttctgcgaaacaccttgtgccaggcactttcacaaayttgcccgagtaattttttcaaggaccatatctaataagcagcaaagctaagatgcattcattccatatatacttatatgtgtgtgtgcattgactgtgtgtgtgtgctatctgccagttttaaacataggaataagaatatttaaaatgtcaagatccttgctcttatggagtttataatccagttggagatgtattgccaataaacaaataagtgataaaataattacagataatggtaaatgctataaaaacaaacacgaagattagggaagagagactggctaatctgaatctacacggtcgcttccttccaggaggagttcacgatctagggattattatagaggattatatacacaaatcactgtagtggactagtagtaaaaaacaattcaacagtttttttttcttttcttttccttccttccttccttccttttttccttccttccttccttcctaccttcctctctttctttctttctctctcgtttttgttttattttcagacaagatctcgctctgttgccctggctggagtgcagtggcctgttcactgcttactgcagcctcaaccccctaggctcaaacaatcttcccacctcagcctcccaagtagctgagactaccggtgtgcaccactacccccagcaaatttttcaacgccttttgtagagacggcatcttgctatgttgtccaagctggtctcatactcctgggctcaagtgatcctcttgcatgagccaccgtgcccagcaattcaacaatgttgagtggctaccgagtaccaggccctgtaattgactctgggcacaatccctgtcttcagaaagttcattcaaacatgatgcgacaagtagacataacagataactgcgattcagtgtggtaagagctgtagtagagagaagcagaggaaacacagaggtggccactcttttttgccaaccaccctggatgaagaaagtggaatctctgtttttatagctgaggaaaccaaggctggacgatatgaagtggtttgctgaaccagtgctagttgtcgggactgtgaagcactcccaccttggggctctgtattcacaagttggtggaattccagggcattctgagttaataggaaagagggatctgtggtctggacagggataggagatagattcctagagagggtggtaggaatgctatgggatgctatctctctaatcattacatcaattttgcaaggaagatgttattatctttccaggtaagaaaggtgacccttacagggcttgagacacttatcctactcagcaggtaagtggcagaggtgcttggtgtgtactccctctcactactcagtgagatagttcaggctgaccttgcaaataaaggaacagaagttaggagaagcaaaatgactggcccaccattatggatacacagctaggaagtaacagagtcaggatttgaacccaatcctctgtccaaaccacattcttacttttcacaaggctctgctacagtgaaggtggtagaattttggcagatagagatggggtattgggcattttaggcacaaaaagttgagaaactacattaattttcgatgggctgtatatgggtgagagagaaacacacagacaaggtaaaagayggaaggctttcaaccatttgcctttggccttctgtgtattttcattgggtttgtgtgctgaatcagccatttccatgctttggccctaggaatttgggctttgcttgaggttgtctggtacctctgtaaccacgatagggattcccagacctgaacagggcttcccaatttcccataactagcaagaagtcagcagtttttcacttgttatacttcttttcataagttggacatgtgttgttctgtactgattttgtatttttaacaacagttaactagaattctatttggggcatctcaaatttcagcatgtaatgagaggatgagacaggtctgggctcaagtctgccatttgcttgttgtacacttaattaaccatccatacctcagtttcctcatctgtaaaatgggaaagcaatgcacattcagcagcagtgttccaaggaatatgtaatgatcatatatggatgttatttacaaatggtagatactcaatcrattttttttaatttagggaggggatattttcctcttggagtttaaatgaatagagtaacctctctatacagtaggaagttgatatttaacgtttggtttaaaaagtttatgtagactctccatggctgataggaacatcaaatggtacgactgctttggaaaagtttggcagtttcttgaaaagttaaacagccattccacttataggtatttaccccagaaatgaaagtgtatatatacacaaagacatgtatacaagtactcatagcagccttatttataataaccaaaactagaaacaaacccaaatgtcatcaacaggggaatgaagaaactaattgtggtatatccattcattggaatactactcagcaataaaaaggagtgaactattggtacacagaacaacatgaatgaatctcaaaaaattatgttaagtgaaagaagccagacaaaaaaagagtagatactgtatgattccatttatgtaaaattctagaaaatgcaaatctatggtgacagaaagtagatcagtagtcacctagagatgaggattgtgggcaggggcaaggaggaagtattacagaaaggcatgcagaaacttttgtggggagtagatattttgtcttgattgtgatgatgttttcccaggtgatgtcaaaacgtgtcaaattgtacactttaaacacgtggcctattgtatgtcaattacacttcaatrtatctacttaaaaaaaaaaccttaaaagagacatgatttccctgtaccacgtgtgaatattaaaaaaaaaaaggttaatgtagtatctgtctgacctcaatattatggtttctttggagtagtcgcacaattgagttctagataactccactccaaagcaccacaaggtaagtgccagaagagacctacagacacaggggaggaagggacgcccatagcatttatgtagtaactactgtgctctgggtggctttgcctgcatcttctcttcacagggactctttgagatagatatcattatcctattttacagatgggaaaagtaaggctcggagtaaacytgcccaaagtcacccagttagcatttggcagagcaggtattaaaacccaggtcgatcagactgtaaagcccacaggcttcctacaatagagccctgctgctgtggcccttcagaggccacatacagtcggagccgtccttaaaggcttcgtggaagagatagtatttgaaatgggccttgaaggttgggtaggatttaggtggttggagatgcaaggtgaagaattctttttctagaagtttttaggcagagggaacagcatgagcaatagcccagagggcacgtatggagtagagctggcagttcagtttggcaggagagtgggttgtgcccagaggagttatgcaaagggaagctggacaggcggtctgtgctctggcaaagaaatttcaataccgtgcacaattctggtggtggaggaaccactgatagatcctggtagggccaagcatcaggaaataaaacttatttcatctctgtaactctcctcataatgcatatgtgtggtagagactcagtaaatgttggctgaatgaatgaatgaatgaatcataggttttgaggggtttgtttgagacagggtctcactctggagtgctctggctggagtgcagtggtgcagtcttggctcacagcaatgtccaccccaccggactcaagcgatcctcccacctcagcctccccagtagctgggaccacagatatgcgccaccatgcccagctaattgataggtatttgagatctggtaatcatatccttattatggattgaagccttcactataaagtggtttttttcttctttttaacttactttgaatttagaaggcaggcttttcaccttgaatgaattttttaaaatggaagagaaggagggagaaaggaagggaaagagagagagagtgaaggagaaaaagaagaagggaggagaaggagagaaggagggacagagaggagggaagcaggaaaagtgaagatggggagatcagctcagagctcactgcagttgtcccagtaagaggcagcagaaccctgggccaaggcagaagcagtgaagctgcaggaaagagaaaaatgtaggagaggtttggggattttactgccaggagttggcagctgattggctccagtcccgtccagagatggcttacagccccagccctgggcccagctcctggccttgaaccagaggattctgataccattcatggaaatagagaactctaaggaggtgctgcttaggggaggaggagatgagttctgttttaggcgagttggagatgtctgtgagaggtctgaacagtgatgtccagttcaaggtaagaaaaggggtggggtctaacctcagagaagggtgtagaacttgaatatrgagatggtgcttagaaatgatagatgtgagctcaagcaaagagtacaggagggaaggagaagaggaattctcccttccccccatgtcttgcactagaataaaagtgaaatagttttcaatttcttgttctatgccgggcattctgctatagtttcacaaccatcgtctcactcagttatctcaacaactttgtcatccactctgttcactgactactctttctgtttccttcattctttactcaggagacgtttatgaagcacctgcttaatggttctaggagctgaggataccaaagtcttcctttaaagaagcttttcttaaatacaggagataagatacctaattacaaaacaagatagaaagtgttacacatcccgacagaggtattagcaaaagcctaaagaaggtcagagttaggagaggagccttcagcttgttaggaggaatggagaaggaatgaatgaaagcatatttattaagcactcactatatatatgtcaggccctttactaggaaaatcgttatatgttacctggattaattgcagccatttcacccataaagaaactggtcagcccagtgcagtggctcacacctgtaatcccaacattttgggaggctgaggcaggaggatcatttgagcccagaagttctagatcagcctgggcaacatagggaaaccccgtctctacaaaaaaaaaaaaaaaaaaaaaaaaattaaataagccaggcgtggtggggcacacctgtggttccaactacttgggaggctgaggtgggaggatcacttgagttcaggggattgaggctgcattgagccatgatcacacagctgtactgcagcctgggagacagaacaagatctggtcttgggaaaaaaacaaaaaacaaaacaaagaagctagtcaactggtcaagctggtgtccctgccttgttctcctgtatgagcctgtcttcctcctgcatagcacttatcacacattgtataattactcaattttgtcccccactagactgtgagccccccgaggacagggaccgcatctgccttgatcactgttgaatctgtgttgtattcagcaagttggaccatcagcatagtccctgacaaaatgtaggtgctctgtaaatacctgtttggaaggaaagaaggaagggaaggaagggagggaggcacaagcaaagaggtttgggaaagtatctgtattagtctgttctcatgctgctgtaaggacataaccaaagactgggtaatctataaaggaaagaggcttaatggactcacagttccacatggctgggaaggcctcacgatcatggtggacgcaaagggggagcaagggcacatcttacatggcagcaggcaagagagcatgttcaggggaattgccctttataaaaccatcagatctcatgagacttaytcactatcatgagaacagcatgggaaaaacccacccccatgattcagttacctcccactgagtccctcccatgacatgtggggattatgggagctacaattcccgatgagatttgggtggggacacagccaaacaatattagtatccaagattatatatatatataatggtggtaagcttcaaacccttactcctgtctctaaatttcatattttccctaatattccacttgtggcataataggcaaggatgggttggtcatgggggacagagaaatcacagaactagctgccagaaaacctgggctctagtgtccacagtttttactgtgtgtggttttgggcacatctctacrctctctgggcctactaggggggtttatttcagggagcagtgtgaactccaaggtgagagtgagcctctaggtgaaggggagaatgaacagagcaaactctattcccctcttttcgtttttgagcttttgagggaaacaaaacaaaaattttgttttcagcagagtactgctgggatgagaaggatgagaatgctgagaacggggttcctgctcactctgttgcctgccagctctgatcctccasctgtcacacagggctcagtgatttccctgtgtctttacaggatggagggcaaagccaagtacatcctccctaccgaaacaatatatgttggggaaatgaaggatggcatgtttcacggcgagggaaccctgtacttccccagcggaagccaatacgacgccatttgggaaaacggattggccataaaggtgatcagctggggggncggatgctgtggaggagagatcctcacgcaagaagagcctcaccctctggcaccccatcctccctgtctggtgcccaccttgttccattcactcttctctttgcttctcccccactccccccactttttttttttttttttagtctcactctgtcaccaggctggagtgcagtggcacaatctcggctcactgcaacctccgcctcctgggttcaagcragtctcctgcctcagcctcccgagtagctgggactacgggcgtgcaccaccatgcccagctaatttttgtatttttagtagagattgggtttcaccatgtttgccaggatggtctcagtctcttgaccttgtgatccacccgccttggcctcccaaagtgctgggattacaggtgcgcaggtgtgagccaccgcacctgacctttttttttttttttttttttgaaaacgagtctctgtcgcccaggctggagtgcagtggtgtgatctcagctcaccacaacctctgcctcctgggttcaagctattctcttgcctaggcctcctgagtagctgggattacaggtatgtgccaccatgcccggctaatttctccctgcttctggatctcccagggctctagaatcctctccctctagatctggaaggatctgtggagaggccatgatgagtttgcatctgttacaccacttactgcctgatcttaggcccacgacttcacctccctgagagttcttcacctatcaactcgggacagttagttgcattagttatgtgttggtactataacaggttaccacaaatttagtctgaaatcagcacaaatgtattatcttacagttctagagctcaaaagtctgaaataagtcagcaagcctgcattccatccagaggctctacgggaaaacctgtttccttgccttttccagcttctagaggctgcctgcattccttggctcatggccacgcatcactccgacctctgctttcatcatcacgtcacccttcgtccctctgctttcatcgtcatctcttcttctctcaccctgaccttactatttccctctcataggaaccttgcaatcatatttggcacacccagataatccaaataatcttcccacttcaggatccttcatttaattgcatctgcaaaatccctcttgccatgtaaagtagcatattcacaggttgcagcagacagggacatctttgggggaccattattcagcctaccacaatagtacaaggcacctcaatatatatatgtgaacactttgctaagttcccagcacacaagaggcactcaataaatgttagctcttattaccaccatcactgctactatcattataacttacctaatccaaggattcttaccccctggtatttgtgagtcatgaatagaattcagggagtcactgaaacctcttgatttatatacagaagtttctgtgtaaaggggactaagtttttctccaggaaaagcatctatagctttcatcagtttcactaagagcatcttggggcctgactcatgacctaaaaaaggttaagaaakgctccttgttttatagcttggagagtctaagccccaggaaggggatgtgactttcccgaggtcacacagtgaattaatagtatcattggaatttccacccgtgtttcctgatgcccaggccaatgcaatttctacatcctgaggcttcctttagcagtaaggcagcaaaggcagaatgtatgtgtttggacaaagggccgtggctgatggctctgacctttccagctataataataataaaagaataataacatttattgagtgcttactttgtgtcagtgtgtcagtcagggttcttcagagacacaaaaccaataggatatatagagatgtatggaaagagatttatattagggattggctcacaagattatggaggctaagaagcctcccaatcttccctctgcaacctggaggcccaggaaagctgttagtgtagttccagtccaaacccaagggcctcaaccagggggatcaatggtgtaagtcccagtcagagttcaaaggcctgagaaccaggaatgctgatgtccaagggcaaggaagatggatgtcccagcacaagcagagacagggaattggcgcttcctctgcctttttgttctatccagaccctcaacggattgtatggtgcccacccactttggtgagggtggaacttctttgctcagcccaccgattaaaatgtgaatcccttctagaaacgccctcatgaacacacccagaaatgttttaccagctatctgggcatccctttcacttaacccagtcaaggtgtctcacaaaatcaaccatcacagccaggcactgtgctaaatgcttcacgtgtgctatctcattgaattttcaatcaaccctattttatgtacactatcattaacttaattttacaaatgaggaaatgaagggccagagagagtgggtcgtctgcccaagttcatctgccaaagtgagttcacccactttgagcggcagggacagggctcggcacttatacccattccctcttgtcgtcacaaccataataattgtgatagttaccacttctttactgcagccatcagaaaggcccccacttcccttgacatctgaacctcttggccaaaagccttcagcttcctcagatgcacgtgtgtgctccttgtcttccagggcacatatacgttctcagatgggctgcactatgatgagaaaaactggcattactgcgacggctatgatcggaggttttacacagagatcctcaatggcttgaagcctgcaggtacccaggcacccaccctttccttcatacccaaactgagagggaaactaagacagtttcggataagtggactgtgtcctactaaagtaacttaaaggggaagaggaactgagcaggcgtagaagaatgcaaaagagccaggtcctggagccaggaaggccagtcctcatatctcagctccactgtgctagccagaggaccatgggcaagggactttacccactgcgcctcagtttctccccttcaaaatggagtcaatcagctgggcgtggtgactatgcctgtaatcccagcactttgggaggccaaggcgggtggatcacttgaggtcaggacttccagaccatcctggccaacatggtgaaaccccgtctcttctaaaaatacaaaaattagccgggtgtggtggcatgcctgtaatcccagctactcaggaggctgaggcatgagaatcgtttgaactcaggaggtggagtttgcagtgagctgacatcacaccactgcactccagcctgggcgacagagcgacactctggtctcagaaaaaaaaaaaaaaaaatcaaaatggggtcaatagcatcatctacctcccaagattgttgtaaataagataattcatgtcaggtgtttagaacagtgccttgaatgcatgtgggtgcacggtacatgtcagctgttcttattcgtggtacctactataacactaaaattatgtaaatattttaaaaagaaagagttaaggacgaaagcagtactgacagagcatgtgctttgtgtatcaggtgctgggggaggctctctgtaatccctgtctccctaatgtccagatgaccctgcccagtcagccttcctagtcccatgtcactccaggttgaggctgtggagttcagacatggttccctgtggcagagctcacactggtagcccagtcttcctctctgaggtcctctktatcatgctacctccctgcaaaaaccgtgtctcatcatggagggctacatttggactataagtctggattcagagagtggcaccttaaaattttgagacgtgttccaggtcaggtgagcctcaagacgaggggaggagagggatagtattaggagaaatacctaatgtagatgacaggttgatgggtgcagcaaaccaccatggcacgtgtatamctatgtaacaaacctgcacattctgcacatgtaccccagaacttaaagtataataaaaaataaataagtaataaaaaaataaaaaaagaaaagtgtagtttttggcacagcagagataatatatccaaaatgacagatggggaaacaactctgtatactataaaaacaatcccaacttagcttatgagagaccatgagctgtggttgacagagcatagagccagaaattgtgggtttgagtcctagcattctctctctatagcaggatgagcctgcacaagtcaacctccgtcagggcagaagcctccaggaagcactcaggcactggagtcaggcagacctgagctcaaacccccatctccttcccttcccagcttcatgaccttgggtcagttagttgaccgggtgagccgccttctctccctttgccctcctgacacttactctgctattttcctcctatccccaggcttctttgccactgcctcctcaacatccccccacccccagttattcacgttgaggttcccggggctctctggcttaggcattttctgttttcattctatatgctcttcctgaacaagttgatacacttctaagccttcaactaccatcagcttctaaattgaaatcagaatccctgagcctaagatccctgcatcaagcttccctgacacctgtattggtcgttctcaacttgtttgcactgaattcattgtcacccccaccgtgatggctgcctcactgaatgtcatgcccatccacctaggtaagcctaatcctcccttcccctgccccctaagtgcaatggtcctatggattttacctctgaaatatagactttatttgtttattcaacaaatatttattgagcacttccatgtgccaggcagcattctcttcatactctttgccactgccctgttccagccctccatcatctttccccttgatgacctgactccggagatccccacttggcgcccttgaggtcattctccattctgcagtcacttccatctttttttttttttttttttttttttgaracagagtcttgctctgttgcccaggctggagtgcagtggtatgatcatagctcactgtaactttgaactcctgggctcaagcgatcctcctgccaagtgatctggcctcctaagtagctggaactacaggaatgcgccaccactcctggttaattttttttttttttttaagtttcttgtagagatgggtcttgccatgttgcccaggctcatctagaactcctggcctcaagcaaccttccctccttaacttgggattacaggcgtgagccaccatgaccggccgcttacatcttttaaagtgtgaatctgattgcctccctcccgccccgccccttgagtgctccctataccctcaagataaggtttcaaattctcagaaacagtgacattctctggctcctgctcatgtcccagcctcatcctaggctacccacccttctcggtttttctctctcccctcttgcgatacttgctttctttctgtttctcaaagagaccacactttttcctgccattctctctgcctggaatactttaaccctcttacttcacccaaataactccttcccgtacttcagttctcagctcaacgtcctgaagctgggagccccttccctgaattcccacactaggtaaggtctccctgtggcatatcacagcagccatgacctcctcccagggcttggatcgtgagtgttcagctcgtcttcccaagctgtgagcaacatgagggcagggccctagcacattgtctggcatacagtgggtactcgttaaagagttattatcaaacagggataatgatactgacatcacagtgcagggtgaagtatgtgcttaggggagttaaggcaatgacattaagaaatatttcctaagctcctactgtatgtcagacactggctggacccagggagaccagagttaagaggacatcatctctcccttcaaagagctgccagtctagctgcagcttgagaaccttgcaaatcactcctcccgaattagttawgatgggaggcctggactttgccatgggctcttcaccccaattaaggctgtaggcaaaaagccctcagccttaagccttagctctcacacaatggctggttatgctaaagctaagcctctgccagtctcgtggtggcatttcccgaacctgcctggctctccccgaacatgcctggctctcccctacttctcctgtgaccctcagaagagcagcttgattctaagtagctacttccttcccttgtcactccacactttgcctcttggggctggcattgttagggcaactcgccctgcctgcaaggcagggtgagggttaaaagtgccccgcgacctcttcgagcatctgtgagatgggcattggcatgaggctttggtgagagaatggctgtaaagtgcttgacatggagtaagtgctcagtagtcattagccagtacatayggggttaggtttaggatcagggtcagtgtcagggttacggttaggtatgtcattaagcaacacaagagtacctactgtgtgcaagacactgagttgtgggcatggtgctgtgtgctcagtgggcatccagctctcagtctagagaacaaggaattacaggaactatagttagaaggaacctgagaagttatttattccaacctctccctttacttgagccatggcgtttcaagatacacatacctagcgtgcatgacctaaaaggtgcactcaatcttctttctctcccagaggtctcagtgtccctggtcctgtggctgcacctaggctgtctcctcccctgatgttggcagctgaacatacaggttccagagctggactgcttcctagctggataaccttgggaaagttactttaacttctctgagcctcagttttcttatctgtaaaatggagccacagagctgctctcaggattaaataaaagaggagcacaatgcctggcacataataaacattcaatgagtggcagccaccgtggtaattttggcaagagtcaaagttctccaccacctgccccttgtccacctgatccatttcttttctgctgttctccttcatacgtgctctgctctacaaggtttccagagtggkgcttaaggatccatgcctctggcctctgcccacgctttgaatgccacccctcttctggatctgatgctctcctatccatttgccaactctgacttaccctcagggtctgtctaacttcagaacctgtgccctttgtcatggtatccgaagaaatggaggaggatggggtcaaaggaagaagaagacagagggtctcgttcccaagaccctgttcccaagagccatgttcagaaagttcctttggggcaccgtttctgctgggtttgcttcttgccctgagtagggggtatttagttcaacaggggagccagatagtcacatgagccaccagccacaagtggaccttatgggaacactgggtttggatttggccttcatggtgaactaattgcccattatgttctttcaaggtatggctcaactcaccaatatggacccacctagaaaaatccccaagggctattacgattgtggagacggcttctataacccagtcacgagggtagtcaaggactataggaaccgctttctaagaaacgcaggtaggtttcttccgacactgcagcacgttttctcttcacccacatatgagtatgtgcatctgtatgtacaaatgtatgcacacacttgatgagaaagaagcttttgctgatagaagatgaaagttgattacctggatgttttattttttggacttctcgtggctggcaaatctgtacatagtcctagagtgaggtaaaagcacattcgtggtctagcagtgacggcacataaatgtcgcactgaaaggattaaggtacttatttttgtatgcattccttcgattttaatgggcacctactatatgctagacactgtgcttggtgttgggggaaaagcagagcaaagctggacacagccccccttccttgtggagcttgcattctaaaagtggcagagaagtactataaacagttaattgtatcatggaacaaacacaatgaagggaaaaacatggtcctgtgggaagggaaagtaggggccccagagaggtgggacggatgctgtgggagcacaaataaggggtatcaaatcccgaagcggttagtcagagaaggtttcaaggaggaaatgacttctaagctgagacctgaagaataactgggagttgaccacaaggcctggggagagggtttcccagcgagaggaaatggcacaggcaacggcctagaggggagtgatcccttgaggtgcaagaaggttggttcatcctttagccaggggagtaggtaccttggaggatccagaacctcagtttggtgagtcaacacaaggctgatcagactgagaagaacccatttacagtgaccaaactcacaggagatcaatacacaaataatagaacattttcctttaatgcagtgattcctaaacttatccttttctgaagtcacactcccactaggaatatcaaaagatacggaccctcttgccagaaaaatgtccaatgcatgcacacacacacacacgtgcacccacacgcgcacatgcatmcacacacacattttgcagatagtcttaaggggtgaatggtccctctaaagacctaggtcaagaaaccttgctctataatgagaaagaaactgccaggtagaccagaacatctgtgctggtgaatgagagcatcctctccctatagggaaatttactcagtaagtcagtgatgaccagaaaggtgcctcatggggctagaataagagcaaggagaggccgggcgcggtggctcatgcctgtaatcccagcactttgggaggccgaggmgggcggatcatgaggtcaggagatcgagaccatcctggttaacacggtgaaaccccgtctctactraaaatgcaaaaaattagccgggtgcggtggcgggcgcctgtagtcccacctactcrggaggcaggatgagacaggagaatggcgtgaacccgggaggcggagcttgcagtgagcygagatcgcgccactgcactccagcctgggcgacagagcaagactccgtctcaaaaaaaaaaaaaaaaaaaagagcaaggagaattgtcagctgatcctatgactggaatcctggagctaagatgcccgtaacccactggatgctactggaggaacatggcaaatgctcacactccaagtcccccagctcacatttcttcaatgacttcccttttccatttgcacaatgcactactatgtagcacgctaactctgctgggtgctaataggtttaccatgaagtttcttggtcaaataaaataaggagatgttgccctaaacaatgctaaccaggcttatttactgcagaactcctcagggcctttaatatgctaataaactttgtacttttccttcatgacacttatttcaacataattaaatgtaattatttgcttaatatctgtctctcccactggactgtaggatccgtgtgagaaggaactctgcgttatcttgtatcagtaagtgttcagttagaaaaatggaaagaggcaggacgccgtggctcatgcctgtaatcccagcactttgggatgccaagacaggcagatcacaaggtcaggagttcgagaccgcctggccaacatagtgaaaccccatctctactaaaaatacaaaaaattagctgggcgtggtggtgggtgcctgtaatcccagctactcaggaggctgaggcaggagaatcacttgaacctgggaggcggaggttgtagtgagccaagatagcgccactccactccagcccgggtgatagtgtgattctccatctcaaaaaataaaaagaaaaatggaaagaatttagtatcaggaaattgatggctaccagggaactagaaaagcaaaggaagacattgaggtaacagagaaagtaactgcaggatgcaggtaccccctcaaggactggggacaatagtaagagattaggttgtgagaacctagaaggtcaacagagggaccccccaggacctgcaacccagatccctgagcagagaccagctggggcttgctcctgggagctcagagcagggcttctgcagagctgggacccagacctctggcgggggagcactgccagtggagcctctgaagagagagatgaagctgattctaggagtgtggaaaaaactggaaactggaagtgaaatgacactgctgagatgacactggcatgaacaacaaagacaacagaaaggggcgtatctttgtctgcctgacagcccctaacaaggagccggctggcaaaactaatgtaattcagacagttccagtcccaccattgccaagttaagtatggaagtctcagtttggagctgagagtcagtagcttcttttttttcattttgagatggagtttcactcttgttgcccagctgggagtaaaatgacgcgatcttggctccctgcaacctctgcctcccaggttcaagtgattcttctgcctcagcctcccaagtagctgggattacaggcacctgccaccatgcccagctaatttttgtatttttagtagaggcggggttttgccatgttggccrggctggtcttgaactactgacctcaggtgatccatccacctcggcctcccaaagtgctggaattacctgacactgcacctaaccaggtgtcaatagcttctcactggcccagccaccccttttgttgctcagcatccacacacattcttctacagatattaagtcttctgtacaacattaacaaatgtatatttttttgtataacaagtttcaatgcatccttcatattaacacaaggccctctccccttctcccacagaggggagataggaagccccaacagacactgcacccatcttttgagtgaggttattccttggcagttctgcctgaagagtttataacctacaagctcctgccaataatccttctataaaataacaaggataaaagaggaaacaaaagaaaaaattagttaataaaaacaaatatgctagccaggcatggtggcttgcgcctgtaacctcagctacttgggaagctgaggcagaaggatctcttgagcccaggagtttgagggcaacctgggcaacacagcaagaccttatctcttaaaacaaaacagaccgagtgcagttgctcccacctgtaaacctagcactttaggaggcaaaggcaggcggatcacctgaggtcaggatttcaagaccagcctggccaacatggtgaaaccccatctctactaaaaatacaaaaattagctggrcatggtggtgcatgcctgtaatcccagctactcaggaggctgaggcaggagaattgcttgaacccaggaggcagaggttgtggtgagccgagatccgccactgcactccagcctgggtgatacagcgagaccccctctcaaaacaaaacaaaacaaaatgtgcatatagattaataaatagaaagatagatgacatagatacagatagacatacacatacaagcaaggagaaaaaactgtatcactactatagttctctttctgtaactggtcacaaggctgtagttaatattcataaattccttcttccattattcatcccaggttccatttgccttgagcccacccttccattgttctggctttttaccagtagggtgatcaaaaccttcattcctgaagggtccaaacccttagtggtcctgcctttgttggttatttagttggttgggttagttttttatgaacttttactgtggtcagtggaagtaccaagaggtgtcctggagaactgctgggttccatagagcgttccctttctcctaatggatggcagcattatcttctatatccagccttctctcaggagccaggagaaactggtggtaacacagatcataacagcatagagttgctcccagagaactcagtagggattactttaccctggaggccagtaagccagggaggtttcctggaaaaagaaagatctactcggtaacctaaaaaagaacagacgaatgcagcagggttggtaagagtgttaaaggcagaggggacagcatgtgcaaaaggattacagttgggagaagacatgtcataaatagggagctccaagtaattcaggggcatgagctaacagtatgaaaggagacaaagggcaagagacgaagcccgagagatgggcggggtgaggacaaaggttatggttgtctttcaccctaaggcagtggggagcaagggaaggctttaggcaggtaacatagtaactcatttgttctttagaaagacttctttgattacatatagagaagaggccaaaggagatcagattaggtaggagatccttctggtaagatgatgggagagaggagcatgtgaagggcatgggctcagggtgatgggataggtgacctsggatcctggtcctggccccagctctcaggctgcctgctggatgaccctgggccaatgccttccctctctgggcccctttctcttcatctktaaaatgagagagttgaactggataatttctagggcccttccaaccttaagtaagagtctatgatggaggagaaaggtagccaaggagtattttggtcctgatattataggacagatgaagtttggagtgtcctgaaaaccactaaaaaggagtctctgtttgtggccacctagtcattacccctgactcacctcaccctgtgagggactgattcaggcttctgtccctcttctgttttccccagggacctctttctgctgcattccaatctacccccacaaacagtgcttcctgttggcatcctgaaggcgcaggctgctgggcctctgggcctcagatgggtgactgaggccatcccagagtaaacacaggggcctcagccactgctattatgaagcatataccacctgggtgggtcagagctgggaatgcttattgtacagcaggtcacgggctgggccaccagcagaagagtcacctttgctgtgagaatttaaatccatccttctatgtatcaaaattctttgaacatctactgtgtgccaggctttggggttcagggcaggcaacatattctctctaactatagctctcaaaccttcgacccgcagtaaggaatgttttacatcatgacccaggatacacacaggtgcacacgtgtgatgtatgtatctttgtacatgcaacaatctatgacattttcttctttttttttttttttttttttgagacrgagtctcactctgtcacctaggctgragtgcagtggtatgatcttggctcactgcaacctctgcctcccaggttcaagtgattctcctgtgtcagcctcccgagtagctgggactacaggcacacaccaccacaccsagctaatttctgtatttttagtagagatggggtttcaccatgttrgctgggctggtctcgaactcctgacctcaggtgatccdcctgcctcggcttcccaaagtgctgggattataggcatgagccactgcgctcggcccgatattttctatcctatttattttttaagatgctggttgctaggcactaaattgatttcacaaccttttcaaaggtgggaccagctgttggtggaccattgttctaggcagccttccctgaccatctcttctgtcctccactccactgctttgcctgggttgggygtccctcctctgtgctttccaagcctacctcttagcacttagccatggacagtagaagtatctttattagcctatctcccccacaagtctgggagcagcttgagggcagggaccacgtgactatgtctgattcatcactgtgttcccagcatctcacatgagtcccatgagttggagctgattaaatgtttgtaaaagacaaagcatgcaggcaggcagagcacctgctcctaggtccctcgtattgttcaactaatcacaccaaattcaatacctggcacatgatagacaacttatgattttgaataataaaaacaatccattatatttttatgcacatccaagttttcaaagcagtttaacatctgtcagaggtcttaacccagtggctctcaggacaaatctggttgcagtttttgtttggttggtccaattcttgaagctgcttgggttcgagcacctaggtggggccatgcactgcccagatccctcccactcccttctgtgtgacyctagcagcatcagtcatttctggtacccgccttaaagcctttgagctccgggtccttccatctcagacttctcatgcatccagtgagctgggaatgggctcatcctgagattgggaaactaggtcttggagcgatgaatgacagacatgtgatagtgaagctggaactcaarcccactcccatcttaccacagcccagtggtctctccgctaccctctactgctgcttacattgggaccataaagccttaaatgatagcaactgtagacagttattacatattctaatcaatactgcaaacacaaaacaaaagagagactgagttaggatctcttgccccacagaggctggggagctgagagaggtgagmgagatggcgtggtgtggtggttaaaagcctggggcctggaatccatgcctcaggctggcctctagtcctagatctaccactgaccagctctgtgatcatgaataggttacttttccccttggagcctcagtctcctcatctgtaaaaggggcattgtggtagtacctattggagaaattatggttagaaaaaaagattaagtattcaaaatacataggacagcacctggcccaagacaggtgtcstgtgactggtacttgtggctgttatcattatgatgattattgactcaggctggagagaaagaagtgagttagagcctgggatttgttaagctttctctaggtgcctgagaggagtctctagggagacagatgtgcctggatatgctgtctttctgcctcctcaatggttttgcttggaaaatgaggtgctgctgaaactttgggatctgcaaatgcttgattatggcattcagagccccagcctaactttgaaggtctaccttccatcctgctgtctcttctgccccatgttctagtcaaacaggactagctggcattcattgataaacacaaccagcacttcctactgcctattctcacctcatgtattgccccagcacagaatgcctttccctcttttctccgcccatctcagtcctcctcatctgtcaatgcttagcacataacagaaggccatgaagtctttgcctgcaaccctcaaacaagggcatgtggctttgcctgtgcatccacagctcagctgggaaaggaaagcttattgtggaggatccttgctaggctctgtgccaagcactttaacagcttaccttggccatgtgcagtggctcacgcctgtaatcccagcacttcgggaggctgaggctggcagatcacctgaggtcaggagttcaagaccagcctggtcaacatggtgaaaccctgtctctactgaaaatacaaaaattagctgggcatggtggcgcacacctgtagtcccagctactcgggaggctgaggcaggagaatygcttgaacctgggaggcagaggctgcagtgagctgagatcgtgccactgcactccagcctggatgacagagcaagactcagtctcaaaaaccaacaaaaaaacagcttacctcgcatggtcttccctgccaccccaagtgggtaatttgcatgagacacagtttgcagtttgcaatgaagacacttggtctcaggttaaaaacttgctcgtgtcacacaactagtgatacagtcagattcaagtcccaatcttcccaaagcctgtccttttcattcttcttgccagcgtcatggttctggtttattctgtattcctctatctcctctctagataggggcatgtctgatttatagttgttcccccaccaagcacagttcctggcacccagtgggagctcagtaaggttcccaagtgaatgaaaaggtccatcttagagctttaagacaaaaacaccacagtcctcacaatcagatgctacttcatttgaaaaagggtcctttatacactgtgagctaataaagaagcatttggagctatttgggcaaatggcctttaccatgatgggaaactggtagactaactctagcccttccccctcctacacgtccctgtcattcctcttaggaaggataagctagagcctcgctggcagtttgtaygagtatctctttcatggggctgttgcttgcctcagtgttactagtagtaatcatctgcaaaataactgtaccactaatctttactccctcctcccaattaatgataccccatgcgagtgtctcagatgaaagacacattattaatattcaaagaaaaaaccctcgtaaccattttaacatatacaactaacaatgaactaaatttgctttgtggaagacagagagtgagcatcccaaattagtttatgtaaaagctgaaattcttccccgaaaggtctcagtaccatcctcaaagaatatcctgatcatcagaaatgccgtcaagattcccgccaacattatcccctttgttgtctgaaatgtcgaatcaagcacatctggcaaatgtcctagagctcacaaatctttcaaacagcgtataattcccaatggttaaagagataacgccaccgcttaatcgtgctgctcttcaaaatagcaccaactttccttcaatcagaaacaatggctttggcttcttaaaaatatcacacaccagtgattatttgcagagagggcccttttgcatttgaacctgtgggttccagacagaatttaaaatcaaaaccacaagcctcatttgaatgcacactccattaaatggacaatgggaataaggggtgtgaattggggtctgaaaagtaacctggcttatgtgactcggctgccaccaccagaatcatgaggaagatggcgatgatggtggtggtgagagctaaccatgactgagcttttgccatgcaccagaccctcaaccaaggggtagggagtactcatgtggtccctgtttgacaatgaggaaacaggctcagtggggttaaggaatttccccaggaaatttggcaggagcccgaattcacactcaggctcgcctgcctccccaggtttcccgctttccatttctggccagctccaagatcatctgttgaaaaaggcatgggtgaaaagctcccagacatgatgtttatctgctccccacccagctttagaaaagggcgaaatttaagccgcacagtgaacacctagagaagaaagatcacttttgtcttctaaattttctctggtgttttttagacagttgaaaactggaaacatcctcagtgtccaataggagaggactgattaaataacatatagtttattcttactacagaatacaatgcaatcattaaaaatggcagcgaagaactagatctactgatatacaaaggtatccatattttatttcaggtgataaagcaggataataataatagccagcatttgccaactgcttactgtgttccaggcactggtctaagccctttacatatattttattttatttcattttatttaatctccacagtaaccctgcaaagtcattatccttgttattcccactttacagatgatgaaactgaggcaatgtgaaatgcctgcccaaagtcaaactgatagcaagtggcagagctggaattggaagccaggtccagctgacttcaaagctaaagacaatgttagagctgactttgaatgagaagttggagtttactagtgmaagaaagaaagaaccgagggcctgcctagcagccctatattttatagagatataaaaagtatacatccaaagagtgtaaggttgcagatgactattcccaagacagttctctgcccactttcttgctcaaactttggccaatgaacaagtctttcttttttttttctttgagacggagtctcgctctttcactcaggctggggtgcagtggcacaatctcgsctcactgcaagctctgcctcctgggttcacgccattctcctgcctcagcctcccaagtagctgggactacaggcgcccaccaccatgttcagataattttttgtatttttttttgagacagagtcttgctctgtcacccaggctggagtgcagtggyrcratctcggctcactgcaagctcygcctcccgggttcacgccattctcctgcctcagcctcccgagtagctgggactacaggcgcccaccaccatgcctggctaattttttttttgtatttttagtagagtcggggtttcaccatgtagccaggatggtctcgatctcctgacctcgtgatctgccctccttggcctcccaaagtgctgggattacaggcgtgagccactgcaactggccaattttttgtatttttagtagagatggggtttcaccgtgttagccaggatggtctcgatctcctgacctcgtgatccgccygcctcggcctcccaaagtgctgggattacaggcatgagccactgcgcctggccaatgaacaagtgtttcagtgccactgacaaaccaagactcccctaatcttgaagccactgccttcccctgacagatgagaaatctgagacccagagagggcaaatcacatgtccaaccccacacagactgtctgtggtagagccagggctggtaccctggtttcccactgctggccggaactccttctgcaaacccaggctaccttgccacagtgctttccttgcagtttctgcaaaatggccgagtgagactcccccacagcctcctcccgctgtcatccctccagcgagacaaaaggcaatttaccgaaatgttataatcacctggaggctggcacgcggggacatccatgctttatctgcggtgttgttagcagcaccrtaatgaaggctttgtggagggataatacgctgtaactgccaaatcaaatgcccgcaccaatcacacatccctgccagcagacgcgcatttgctgtaagcaaaaggggtaggaaagaaagttatgagtattgaacgcctccatggtgccagggacttaccacatcccagttctttgaggaatagaccattattcgtatttggcagatgcrgaaactgaggctctgggagtaagttatttactgacaatcaagcagctagtaaagggaggaaccagggtatgaacccaggtccctctgacaccagaggccatgctctgaactgatgaaatatgctgtggccttttctgaaccatgaacctgtctgagaatctaggcccagctacggacctctccccagagaaatacacttgaattcacaaacagaattttgcctacagagggcgggattggccacttggaagccatccatacagccctgtcaggacctttgctctaggaataacagcctacccagcttgccgcctctccctggactgcaggaattgcccattgccatcctctctccccaccccagttccaaaggccctggaaattccccttccagccatggtgcccatcagattctggtaacaattcctcccctgccgccccccgactcccccayggcagcctcctggaggcattcgaaggacacagcttccccttcagtagctggagtcaacctggrccagcactgtaatggtttgttttgtctcctttaatagaagtgagtggaaagccagaccctatgaggccggagcctactctctttctcagcccaagctctggaactcagcactgttgactgaaacccctcaggtccaggagaggcggacagggtcacaggcaggtatttagagccagccagatctgcaagcagatcccaactctgccactcaccagctgtgtgaccttgagctaggcccttaacttctctgagcttcagtttcttcacctgaaaaaatggggacagaaatagaccccccttccagggctgkggcctgaagtgagatgacatgcatgaggtgagatgacacactccagcaagaacagcggctggccctaaagaagcacctttcggtgcatgttgacaatcacagtcgtgatccttttacacccagggtgaaaaggtgaaaagcaggggcctccttaactccacatcccaaagggaggagccagygttaccatggcaaactgaagtctggcctcctcccatctgcttttaattctaatttcaagactrgactagaggtctgtggttttctgatctctctacccagcccctggcattctgttacggacgtgtccccatcatcctcatcgtttcttatgcacctagagccttaggccccctaagctccccctagacacaggcctttgttgagyccctgcatccaccagggtttcacttggggatcagacccagggcctggcccccaccaaaaccagtgcagggctagagggaacatatacataaatagacagtcacaggactggggtgggtgttctctggatagaggcctgggccctttagggagcctaaatgttcaagagactgtgaagaaactcccacccctcgaaatatagcttaggaatcaaaataacataaaccaaaaaaaagcacaggaagcagtccaacacaattctgtattccctacgatgtttaattttaaatatcaaatatgagattctttccagaaaactgggagtatccctatttcagtggtgccaggagctacattcacagtgtgctacacacacagagaagagcatcagtgtgtcccaagctatccagatgatgtcctggaaaaggtggagtttggctaggcctaaaaggatgagaggtggattctgctgcatggaagggaaggagcaatatgggcaaaggtccagagagatgcaggggtacagggtgctccagatggagcagctgaaaaggcttgtgtgttggggaatggggaaggtgtcaaggaggcctcagactggactttgatgattatggaggagtaggtctcagtgaggcattcaaggcagagggacccagtgtgggctggagagagccttgaatagcaggttagggagtttagcttcagtccttcagacggtgaggagtaaagacgggagttgcagaaaagttcctcagggaagtgggtagcggtcaaggctgcagctctgaagacagacttggctatcactctgcacccactcacatgagctgggtaagctcgggaagacaccttcacctctgagcctcagtagcctcccctgtaaaagaggtaatgacattgtctttccacgactgctgtgagtattcaatgagttctggtctgtcacagacttctgcagattcctgcctaacacccctgctgactgttgccactgctctagtcttaattcagccttcaacatttgccaactggacaacaggctcccgcctgccggggccccttcggtccatcgtccacttgcagccagggattaggggccaaaagaagcagagggtcaacgcagaggctgtggggtcaggccaacagagtgaccttggccatggcacttggttcctctgaactgccttaggacagcagctaggcatcatgaacatgtttagtgaacatggattcaattataagtgctcaaaaagaaaagggggcaccaggaagcaggaggaacagcaacatcaacagtgttggtgattttgcatcccctctccattcagcacacatgcrttctgcagtgaatgtgaggacactgcatcagtcctctccatccctgtgtgcctcctgtccggggagcaccttgctacagaggatgattctagcatttaaagatatgtacctggacacggtggctcaaatctgtaatcctagctctttgggaggctgaggtgggtgggtcacttgaggtcaggagttcaagacaagcttggccaacatggtgaaaccccgtctctactaaaaatacaaaaattagcccggtgtggtggcgggtgcctgtaatcccagctacttgggaggctgagacaggagaatcacttgaacctgggaaatggaggttgcagtgagccaagatcacgccactgcactccagcctgggtgacagagcgagactccatctggaggaaaaaaaaaaaaagatatgtatgttttgatcagtgtcacccataaacactactcatatgcatctggacctcaacagcaagacaaactctctaacaattgtcagaagactggctatgtgggccaggcttggtgtgcctgtaatcccagcaccttgggaggctaaagtgggaggattgcttgaagccaggagtttaagaccagcctggacaacaatccaagaccccatatctacaaaaaaaagattttttwaaattagccaggggtggtggcacacctggagttcagctactgggaagctgaggtaggaggatctcttgaacccaggagttcagaggctgaagtgagccatgatcacacygtgcactacagcttgggtgacagaatgagaccccctgtctataaaaattttttttctttttttattttgagacagagtcttgctctgtcgcccaggctggagtgcagtggcatgatctcggctcactgcaagctccacctcctgggttcacgccattctcctgcctcagcctcctgagtagctgggaccacaggtgcccgccaccacgcctggctagttttttgtatttttagtagagacggggtttcaccatgttagacaggatggtctcgatctcctgacctcgtgatctgcctgcctcggcctcccaaagtgctaggattacaggcgtgagccaccgcacccggcctataaaaagtttttaaaaataagaagtctggctgtgtggcacttagtgagatgtccatctccagcatgggaccttcctaagagatttccaagggtcattatgactatgggaacttttcccctcacccatcaactgaagcacctacggctcccacctgagacaacaccagctgtccatacacagagatgttaatgaggattgcatgatggcaggcatgcaaagtgccaggcatggccccttgcacacggaagtgcttcctaatatgaggcagctatattccttgccctgacttagccccatcccagggatagtcctaaatccagccttaggcctaactttggagaccccacctcaattatttccacatattaaaacaaagtgtatccacatgaaatataaatcccacattaaatataaaaattttgctgttgcttggtaaactgctttactacgagtctttaacaattggccatgatttcctgagagtcatgcatactggagaattctcgaaaaatgaggaaattgagcctacaattggatttcaagtgtaataaaattgttttgatttctaaatttaataattaagtctgaatgcattaattataacatttattaatttcagttttgtagtttctctttttttctgtttagagccaatcatctttttctaagccttttacatttgaataggccttgagaagcttgtgggtgcttggcccagccctccacccagcccagaagatgctcttctatggggaaaagccggagcaggcccaaggccttccacctccccgccctgtggcaggctttgcctaggcaatgactcctcagtcartattgacaatgctgtggccttggcctctggccaccactgccagcaaagttcaaagcctctttcttgtcaggagtggtgatggggatgcctgggcattgctgccctcactgtggcactgccatggccctgccccaccagctcacgtaggctgcatttgcacagagggtgtggcagggcggtgaatgggacccataggtgcccacaagctggggagcctgctttgcagtgcaccccccatcccagcctggagtcctctgaggatgggcctagacccccccaaaagacgacagcccctatgacagaagcktccttcctccaggtcctggtccagccctgtgctcactgccaccctggcattcggcataagccctgggctgtctctgtgggttggaagtgcctctgctcyctgcacgtgatgacacacactgagactttagggactcacatcctgccacactcagccagtcacatgagccacacaccatgtgcacgcctcccctcagctgcagccactcccacactcacgcacacatctcttcaygcttatgctggtgtgagagcagttggatgggaatacacacacacctgtgtctgtgcacacactcgcagcttcactgagcgtaactctggtgccagacacactgagcccttccctctgccctgatggaaggaattggggcaaatcatttctcccatcagtttcctcatcttaagtggagacagccccatctcactcactgaggagaggacgagtgtagcccccacatacacgcggagctgggcacctcctaagtgcccggccattgtgagctctgccactctcccaaggcagacgctttgtttcatcttggtctcttcccttccctactccccataccagccccctcactcacacaggatggaagctgcatagcagcggtgaccgcaggtgtgcgcagcccaaaggcgtgcgaagagcaggcagagcccagcctgtgggtgtgcagtgaccccaatccgcctgcttgccttccctgggctcgcctgccctggcttgccctgctggctttgaacaaaaattattagctgagctgtggcccttgatcctagggcactgatcctcgtgtgaagacctcctcctcccgcaggctccccctccatcctggcagggaaccagaagtcctgggagtgtcctgagcgagtcccttaaggacgctcccttacaggcatccattttgggaatgaaagacctatcacaatggtgattgtagcttccattcctgggtgcccaccaagggccgttcatcctggtcagtcctcactctgccctctgcagaaagtctggtgaaacctgctacaaagacgaggagggtggctcagagatgggagtgacgtgtccaaaatcacccagcgagtcggtggctcagcatcggatccaggcttgttcggctccagaactccttctagtctttgctgtgttgccacatgagccctgaagtcctaccctcacaagttaacttctggcgtttcttttggtttttggcatttcctgtgccccaagtgctgtgctaaccttttttaggaatgatctcacttggtcctcatgcaagccttcaagacaggcatctttgtagatgaggaaatgagacctagggaggtgtgaggccactcgctcaaggtctgtgggctagtgacagarttccagtgcccaagctcttaaccatcatgccacactgccccctccctgcgaatcctctgaagagctgatrtttccttgcagctgttctgagactttcaggatctctttttcccccagctgtgcactgacctgcaggctgcactaatgtcacctggtgacctgggcacagctcagcagacccggcacagctgtgccctgtacaggtcagctcctccctgccttcactgagaggcaagtcccaggccagccaggctttgagcttcctgagtggggttagtgcccaggtatgaccccacacaacccagcctctccatgtggtagggctgcccaatctattgccccaaatcacaaaaggaaccagcagctggcggtcttggacttgcccttggcgtgcctgccttgccctctcacaagctcygtttgcccagggtggggaagaaattcctccccctttgtcaaaaccccacagggtaaacctgttgcttttatgtccccaaatttacatttctttattcattattcaccasgtacttatgaaatactttaagtgctagatctgtgctgggccctgaccatcaaaagtaaatggtacaggctggagggggtgactacaacgaacactgtgacttcggctcagggaaggctaacatccgggcagggtctgtgggggtaggggacagccaagagagtatgaagcccagcccacacattcatggggcctttaagtatggattgtgaccctgttcatcagacaactcaaaattcacaccccctttcctgaccatagtgcctcagcacactatgaacttatacatttttggaagaaatcctagaataatacactcatattacatttggttgtttgtgttaaaagcagcaatttgtccgccgggcgccgtggctcacacctataatcccagcactgtgggaagccaaggcgggtggatcgtgaggtcaagagatcgagaacatcctggccaacatggtgaaatcccatctctactaaaaatacaaaaattagctgggcgtggtggcgcatgcctgtagtcccagctactcaggagactgaggcaggagaatcgcttgaacccgggaggcgggggttgcagtgaaccaagattgcgccactgcactccagcctggcgacagagcgagactccgtctcaaaaaagaaaaaaaagtaatttgtcaaatgtaaatgtttaaactatactgtaattgttakcaccttgcttaggcctgttttcaattttatatacactaatactacaaaatggaaagtaccttgggtctctgttgtgttctgagaggccctgaacccaaaccaggtcctgaaggaggaagggtggtcccttgggaatagcaagtgcaaaggcacagaggcactggcgagcatgcacgtggactactgcagttcctccggtggctgcattttacagtgcgaggggagctgggagggaagcggggagggaagcaggcctgggaagcaggggaacctggcgaccttgaaggccaggctgaggagtggagagccttctcagggaagtttttcactggggtagcccatggtcagatttggggtgtctcttgcaatatgtttcttttcttctctataaaaagcccagttatcccaatgacctatgagggcagggcatgcaggtggcagcgaggtcacttccaaagcttcagaaccggaataaagacatctttcggccccaaagatagacctaaacctgaagtgcacctgggtcctggcagcgctcactgctggtctcagtcccacctgtccctaacactggccacatggctggccacaggattgggcttgccaattcattcattaattcaaaagctatcaactgagaacctactatgtgccagacactcccctaagcactgggatatcatagtgaacaagcaggcagggctcctggtctcactggagcttacagtctggatagggagacagacaacatgcacgtaaacaaatacatatgcagggagtggcttatgctatggagaaaataaaatgaagacaagatggggtgactgtgagtggaggcggttagattagggtcattgagaaggtgacatttgagttgagacctggatgccgagaagggggtgcatagggaatatttgttgatggcaattgacacaagtcagaatgaaaaaggcttattccagacttcatctgggagagtatttattaagcacctactgtatgctgggtctagtggtcaacaaatcaaacatggtccctgcattgagagcttacagtctaatgggagagaaaaacattatataaaaaaatatgcaagccgggcrcggtggaccacacctgtaatcccaacactttaagaggccgaggtgggcggatcacctgaggycaggagtttgaaaccagcctggccaacatggtgaaaccccatctctaccaamaatacaaaaattagccaggtgtggtggcacgggcctgtgatcccagctactcgggaggctgaagcaggggaattgcttgaacctgggagttggaggctgcagtgagcygagatcgcgccattgccctccagcctgggygacagagcaaaaactccatctcaaaaaaaaaaaaaaggcaaataagtatagattcaaaaattgtgatctgaggggaccatgaaagaaaagggagtgaatgacatcaatctggatgtctgggtctgtgaagggatgtccactcctcttagagaacatgaggatctcaccttttagggagcacactgggttttcatgtatttcttaaactgtttatttgaaagcagttaaattaagagaattctcgcaargatagtacagagttgwcaatgtaccccacgctcaatttccctgttatgactgtcttacattggatggtacatctgtcacagttagtgaactaatattgatgttatgattcactaaagcccatactttttacagatgccttttcctaatgtccattttctgttgcaggatcccatcctgtctccttaggctccactgggggatagctgtttcttaggctttccttggttttggtgacagttttggggagtaycggtcagatattttgtaggatgcccctcaactggaatctgtctgatgttttttctcatgattagattggagttgtgggtttgggaggaagatcacagaagtaaagtgtcattttcatcccatcctatcaagggtccagactgtcaccacgacttaccaatgttgctgttaacattgatcacctggctgaggtagtgtttgtgaggtttctccattataaagttactttcccctgctccctttccatactgtactctttgaaagtcactatgcacagccacgcttcagaagtggggatttttgctgcaacgctttgagggcagagtacataaattacttggaattctcctgcacggatttgtctattctgatttttatgcatttttaccagtatctttatgcaaggtctttttgcttttcaggagttcaagaaccctgttggtatttctaggaacctagaaattttgttttatatttatttatttatttatttatttatttatttatttagagacaggttctcaactctgtcacccaggcaatcacagctcaccgcagcctcaaccaccccaggctcaggtgatcstctcacatcaacctcccgagtagctgggaccacaggtgcttgccaccatgcccagctaatttttctattttttgcagagaggaggttttgccatgttgcccaggctggattaaaactcccaggctcaagcagtctgtccacctcagcctcccaaagtgttgggagtacagttatgagccaccacgcccagccaaaatatcttatttcaattaacaaaatgcgtgaarttaccaagacattacattggagggtaggaaaaaagccaataattttttttttttttttgagacagagtcttgctctgtcaccatgctggagggcagtggcgcaatctcggctcactgcaacctctgcctcctgggttcaagtgattctcctgactcagcctcccatgtagctgggactataggcacccaccaccacgcccagctaatttttgtatttttgtagagacagggtttcaccatgttggccaggatggccttgatctcttgacctcgtgatccacccacctcagcctcccaaagtgctgggattacaggcgtragccaccgcgcccggcaaaagccaataattattttaattatttttctattgtcaatacccattagtgaaagaagatttgggaaataaaagcggaaagagaaactctctcatcccactrtgcagggctattattcacatttcaatttatctttaatttttcttctgtgcacagttatgacataggatatactatgtgtacttttatttcttgtctcttcttgccttttttcttttgcttattatcacatcaaaaacatttcccccatgttgctatacaaacttcctaacaattattttcagtagctgctaaatatcccctcaagtgtcttatagtatccacctccccgaatctagcacaatgcctggcacataattatttgttaaatgaatgcatatacaacaaaataatcattccctcatttttagaaatgtacattttcctttttcctgattctaaatagttccgagacaaatagattatccctttaagaatagtgtcccagagtggaattaccgggccaacagggaccaaaaatttttaagataaatgcaccaaaccagaaatcttccttctctctgcaccactggcagttgtgccaagggtaataatttacaattgattaaagagtttgtggggtgtttttcccccatcttttttctccctcctttccctctccccctcctaccaaaaaaggggagaaattatctgagaaggtgaagatattctcagacaatcatattaacatattccaacaatcgcaatttgcaaaatagtaatcacaactcccaggatctgggaggcattaatcaaagctgcaggtttaattccattttaaatattgatgaaatgtgcttcggcaacctcaccctggcgtggcagggccaggggagccgcagagaggcgcaggggaggcggagggaggggttggtgagcagctgctgggaggggaggcatctgtgattcaaattggtggctgtacagccaggtagagagtgaaaggggtagtgaagagggctgttaagtccattgctgtcaatttttaacgatcagggaggggcctgaggactggttcagcacaatacacccagtttgtctggtttcaggggttactgctgaagaggttgcagctgcactgattcgaatagcctggagacttcagaactgtaattatcaaccaggctgctcacagtgtggcaaaagtgggctccaccagcgcttaactccttgtgtgctgacacatcatcgctgctttccccacccctggatttcccagccgcagcagggactcccaggcagcctccccagaggaaactgaggctcactggctgcttgccagagtgtgccaggcagcaagccgttttccttaggtctcatgtaaagaaatggtgggcaggtggttagtgatgtggaggcagcctcagctcctggcgtgctcacatctgccctggggtgagaggtcaggctgcagagcctggtgaaccttggttggaatccactggcgatggacttaggacaaggctctcccctacctgactgggctgttacaaagatccaatgagacacagtgtctgcaaagcaccaagcacacataggctgtctgtgagcctccatctctctgcccctgggtctggtgcctttcacacaaaaggaaggcatccctggcaggggatctgattcaggcaagctttccgccagccctctgtatttcagctctcagggagtgcccttgttcccaagcatctgccatttgtcacccaaggagggtggacacacccatcctcccatctcttaggcaggaggcactgggctagacacagggtaaggagaggaggcaagaactcctccagtactctggccctcaggagaactggttaaaggcaggtagtggcaccaagggaagggaggagtggcaggaaggtggagaggcaggaaggcagggagaaggcagcgtggtgtgaaaaaagcatgggcagctggaaggacggtgcaggaaggatgagcaggactcgttgaccctcctcctggaaggaacrtaaccccagagacattctccacgtatctgtgaaggagtgtggccaagaaygcttgtcccagcattgttcctggtagtgggagttgcaggcaacctccgcgtccaccaccggcatggagaggaaaatgtgacggaagccaagcatggaatattaggcaacagtaagaagcaaagagctggatgtacacacagcaacaagaatagatcttgagtgaaagctgtgagacataatgaaagccacagcacaatgccatttctgtaaattaaaaacacatttgtacacaaaacaacagcacatattttacagagcaacatgcattttgaggggtctctatcccaccattggtgtaggtccctgcagtggtggaggaggggcccrgtatgggtttggaggagaaaggaggaaaaatgaaaataaagtaaatccacggaggggtcttgcacagagagatgatggcagcgtgctgtggactgaatgtgattcactcaagtctctttatttgaggtttaaaaaacagcacaggctttatagctggacaatcctaggttctagtctgagctctcccacatactgaccctgtggctgtggacaagtgcctcggcctctgtgagcctctgtttgttcatctgtaaaacggtggtgaaggcttgcccattgcgtggttggtcacgaagattaaactaaggagacactgcgtttagggctttcaggcacagcggcgagctcctgcccctctccgttccccactgaaaggcctggagtaaacaagagggtgttagtcccctggagaaaccatgggttcttgaaagggtcaagaatggagagcctagaaaggaaatgaagatctcaggactctgtctcctagcaccaccggcaaggcctagacccactgtcctggggctgtcgtgcgtgggctgtcagaccaggcaagtgcccgactgtgaagcagctgctctctgcctgtcaggatgagtccagcttagggtggccagactcctcatgcttgcctccgccagcagcacccacagttagaaacccttctgtgttcaatttccccaagaccagccactccgaggaattcagtgtaaatgaaaggtctgttcctccccacacaaaactacacagactggccatcgacggaccatcccagtcccaacgccccacctggggaaccccccaggccaggaaaggtcccagcgagcaccaagcatgaccagctcttcctctttccttgcagatgatgacgagcatgagtggatcacccgtacctgtcgaaagggctaggatgagatcgtgggtcacaggcccgagccgtgaactctgtggctgcctccaccagaggtttccatctrccctactagcattggctgccctgggggacgggctgtagttctagaacctgattttaactcaggaataaagactttctgcggtcagtggccccaggtgtattttccttaaaagattgttcctcagtgggcatcatttaacctggacaaaattgtgagctatagatattcccaggccccaccctagacctcccaatcagaatctctgggaatggggcctagtaatttgcattcccagcatttctcatgcatctgaacgtttgagaaccatctctttataataatagatagatgtaattgagcactaaccggcgcaggtagtgcgtgtgcattatctctgctcctcacaacagccttgcaaggggaaggcttttgcagatggggaatctgaggttcagagagacagagtgacttgcttggtctcagagggcagtaggacctgatcactgtgcccagtcctgcagcagtcatgggttcttagtttctgtttctggttgggccagtgaagccccttcctcatccctcttttctgcttatcactagagacagaaactaaaaaccatggcttcaggctgctgaaagcctaaaacaaaacagaacagaaaaacaacaacaacaaaataaggtgggttggacaagcttgttaggcccaagaatgattactcaggcctgtctttccctcttgccagctcccccatttgaacctcacatcctaagcacagaatcagcatggtgccatagaaagaatgtggctttggaggctgggtgtgatggctcacgcctataatcccagcactttgggaggccgaggccggcagatcacatgaggccaggagttcgagaccagcctggccgacatggtgaaaccccatctctactaaaaatacaaaaattagccgggcatggtggcatgcgtctgtattcccagctacttgggaggcagaggcatgagaattgcttgaacatgggaggtggaggttgcagtgagccaagatttcaccactgtactccagcctgggtgacagagtgaaactctgtctaaaaaaaaaaaagaatgtggctttggcatcatataaaaaatggttataataatgctttaaaacaatacagtagccgtgtggttaaatgagataatacaagtaggggacctggcgcatagtaggtattcaatatgtgtttgctttaaagaacaacttgttagtggtgcatataatcattcctcaaaatcatcccagaggtcacatttgtcagctaaaaatcagaagaggaagcgacaacatgttccagggccacatatgggccatatgcatcctggatctttgtctaactgttcctccttagaggttgctagatcctgttaccccctatgctctgtcccctggctcaccagggctgcccagtggaggcagaacagtgagtcaggcttggaaggcaggagaggaaattggatctcaaactagggacccagaggcgtcatgctggggcagagccaggagtcagcgggaagggaggcctgggctcactctcagctgcgctagggagcagacttgggaggatcacctctccccaagacgccagtcaccttggtagatagggttgtgctccaccggtggtttccaaactgtattttgaaaacagaaggtacattcatgtaaagaaacacacaactaaactcatatattttcaaagatacacatatatctaaacacttgaaaatggattggaagagcagatgtatgaggagcagaaatggaatcagggatgggagatttaaaaactagtagaatagagagaggggccctgcagtcagtgactcatgtgcaccatgagctgaggtttctgagcaactcatttctgtgcagggccacagcaggccagggaagcctctgcattctgcagggcagctgtgctctccacaccaggagctttggcttgagcaaatgactctgctgctgaaagaaatttgacaaccaccaaaaagatgcgctctctcactcctcaggttatgaggtggtggctctggagcctgacaaaaccactataagacccagtcttgtgcagaacctggggccctgctgcccgttccatattcccttaacttcaccttattaaattcttccccatcttccaaacacgctcctctgcacctccctccctgccccaccctcttgcttacctattctgtgaccttctcatctgataggatccagctttaacacccacccccttggctcccacagtatttgccagactgagagctcctccaggacaaggtctggctgggagccttttctcagtgtgcagagccagcacagggcccagcagagagtgtatgttcagagactggaacagagggcatcaagcagcctgatttcctccaaagcttagataagaagcaggtgtgactgagtacttacagaagaaacccatcgtcaggcctccacaatccattgtttactaactgggaaatggtacccgtttcccaggaaggaggattacactgtccagcagcccacatattctgggagccagggacctaagcccttcaccagagagcaggaaagaaatggaatcccatcatgttctggatttcagtgccagcacttctacttgcattaactttattacacaaataagacatttacaaagcacgacatgaaaggtatgtaacaaaacagacattggttttacaaaaaaagtgcttacaattttttttccgtgtgtgtgttttcccctttttttgtatttaaataaatagtcttgatggcctgtacgttcccaggctgctcttaacagggtagtggagacatgtttgaactgtaacatgctacggccacataatccacgcaaggaatagaccctgaggagaggctcaaggcagagtgtgttgggtgaccctgggtagggcttggttggccacttaccacatggttgccactggggccttgatgatcaggagcaaaaatcaaaggaaagatttgagctccaaggccaggaattgggccctggttgctcctgttaatgtcagcgcctagcacagggctgggcacaagttaccactgactgagtgctgagctgagctgtactcaccacgttctgagtggtgcctgctctttgccctcagtcagctgtcactgtctttggaagggagaggaagcaggttcccttcttaggctgcacctgtgcctaccctgcctgtagatcccagagcaagaatgacctataggctttcatgttaagtgccaacgtcaagcatttgaactctgaaaccttatccagactcagtgaaatagagctgccattgattagcaatgtctgccatgggtaaaaacagagacaatggctgcgtatgtaccatgaacttgctttccctgtcttagagtctccttccaaaagcaacataacaggttaaccacagcaggaaggcggacttgggctaaaacatgctgattagcaacctctagtggaaaatgcatcaggacaccaggtaattctagaattacaggataagcttgggacaaatgggcatcccctgaaaacataaatcatggtcgtgtgtagcctgagcccttttgtttggggtggaagagttgtagcaggatggatgttacgcagctgtgtctgacctctgttctcaggggtgggtggggctggctccaggaagtattgattgggaagctcagaggcaccagttggaatcctgagcttggcacactcacctaggcaatgggcaccctctctctacttagagatggatccagggttaacattctgactgccatttcactgggctctgttccctctcccctataagggattccccttccattgagaagacctggcccaagcaccactatgagaggtcaacaagtggccaacaggggtccccaactctaacctgtccaaacattcagaagagtcatggcacagatcgaataccatcgctgctatgtttcttacatatatgctggataattaggtgggggtagggtctctccctgaccccagagttttctctttcctctccttaaaatggctagtgcctcttctggtccaatatgtcaccgccctctccttgatttccaaaccaatgggggtctttcttctccccattccctgtctatccccgctgcctcctagtctgggcaggcctccatctctgccctattaggcctctcagggttggtcactgtctcttctctttctgaattaacttgacataaccagacagatggaaatgataaaattagaacatagctttcctttggggacatcccacaaacactgtagagttttccagacaaaagcaacagagtggataacattgggggttgtcagctattcagaattcagagatggttccaaggaagtagtaaataaaggccaatgtgggggaaaaaaacctgtaaatgagaaggccgttggcatcgcacaattcaattccgccttttgttattgtaatcagctgaagttgaagaggactcctgtttaaatgggaaaaacaggctgtttccaccctgattccagatttcagggagttctgccttccaagaggaggactctgtggtgctcctggtgggttctggttctcagcaggagagggaaaggccaggcctcgggaaccgacctggtggtgggcaggatggcggacgggggtggatgcggaggtgggtggactcctggccgcagcttggacactggatctcagcggctgaggggcagctgtggggcgcccacgggcagatgcggaagtgccggcagcgttagtactgaaaaaggatgacctgcaagaggagggcatgggaggtggctgagctgggggcctgccccaccctgctgccccccagagaacctcaaaggcacagagaagaagggtggactcagggcccagatctgagtttaaatcctggctctgtcaactgacttgctgtgggaccttgggcaactcactgcacctctctgagcctgtttcctcatctttaaaacaaggatgacaaaatctctctctgagaatcagagagattcaatgagatacaacagcagcagcaaaagccttctgggcatttcaccctgcaccttctgtgcctgatttcacggaagccgcaccatagccccgtgagggagttccaacgttctgttttacaaggagggcactcaggctcaaagaggtggaagcgagtgagctcgtgggcacacagcgaggaggaggacctggcactggaggccaggcctggctcacagcaagctctccctaccaaagcacattgcctctacctttccaaggtcaccgtgaccatagtggctgactgcttattacccacagggccacgggctaagcacttcacatgcgcttaatcttcacatgcacgaagcctagaagtgcgtggctcagacacactgggtgcccgatacacagtgggagatcaggactgtctgtccctttccccctcccactcccacctctagcacttggttgacatctcactgctgctgacacagccagttccctgaagttcaggtcaaggatcactggctggctggtcaatggcaatgtgtcatttcacagtaaagtgtgaggggcatctggtgggcatgactacatggctgttcccttttctgatcaggaatgttacttgcccagaactggttatcacaaggaggtgatggaggaaagcaatgatgatgatcaccataatagtgatcatgatcataaccaacacctgggggcattttctgtgcaccaggctctgtgctgggctccttacacacattatgcatttattctctgcagcaaccctacggagtgggaactattattatccccagtttgcagatgtagaaaccgcagctcagagaaactaattgcattcccagatctcacaggggaggtggcagagctgggattccgagctggcctaactccagagtggccagggtgggcattccttccccaccctggccactgctccactttggcctccagaatgcctggcttttagcccttattaggaaaagctctctcaagagtggcgaccctggtaggacccttcccctccatgggtctcagtctcctccactgatcaatgacagc

SEQ ID NO: 7052 - DNA, 55346 bp, Homo sapiens
gaaagaaagaaaaacagccagttttctatgctacccacagaggggtccatatggggttgttatggattcccatcataacttaaagggaaactttcacaatgtccagagcccttgctgtcctgcaaatgaaggaggaggatgtccttaagttccttgcagtaggaacccacttagtggcaccaatcttgacttctagatggaacagtacatctataaaaggaaaagtgatggcatctacatcataaatctgaagaggacctgggagaagcttctgctggcagctcatgccattgttgccattgaaaaccctgctgatgccagtgttatatcccctaggaatactggccagagggttgtgctgaagtttgctgctgccaccagagccactccagttgctggccacttcactcctggaaccttcactaaccagatccaggctccttccgggagccacagctttttgtggttactgaccccagggctgaccaccagcctcaaacagaggcatcttatgttaacctacctaccattgctctgtgtaatacagattctcctctgcagtatgtggacattgccatcccatgcaacaacaagggagctcactcagtgggtttgatgtggtggatgctggctcaggaagttctgcacaaaggtggcaccatttcctgtgaacacctgtgggagctcatgcctgatctctacttctttttttttttttatttgagacgcagtctcgctctgtcgcccaggctggagtgcagtggcgcaatctcggctcactgcaacctctgcctcctgggtccacaccattctcctgcctcagcctcccaggtagctgggactacaggcgcctgccaccatgcccggctaatttttttgtatttttagtagagacggggtttcaccgtgttagccaggatggtctcaatctcctgacctcatgatctgcccgccttggcctcccaaagtgctgggattacaggcgtgagatactgcgcccggcctgcctaatctctacttctacagagatcctgaagagattgaaaaagaagagcaagctgctactgaaaaggctgtgacaaaggaggaatttcagggtgaatggactgctccagctcctgagttcactgttactcagcctgaggttgcagactggtctgaagggtgcaggtatcctctgtgcctattcagcagttccctactgaagactggagcactcagcctgccacggaagactggtctgcagctcccactgttcagaccactgaatggttttaaattgttcttgcagggactcttaagcaacttggaaataaggttgatggaaaataggcatcagtttctttttttttttttttgtttgagacagtctcgctctttcgccaggctggagggcagtggcgcaatctcggctcactgaaacctctgactccctgtttcaagcaattctcctgcctcagcctcctgagtagctgggattacaggcaggctaatttttgtatttttagtatagacggtgtttcgtcacattggccaggttggtctcgatctcctgacctcgtcatccgcccgccttggcctcccaaagtgttgggattacaggtgtgtgtgtttatggccaccgtgcctggccataaacatcagtttctaaaaaaaaaaaaaaagaaaaatatctaaacaagaacagcatcttcttccatttgaatttttttctccaagaaattctgagcagattatccctttacctttttttccttttttttttttgagacagggtctcactctgttgcctaggctggagtgcagtggcacaactttggctcactgcaacctccgcctctggggctcaagcaatcctcccgcctcagcctcttgagtagctgggactacaggcacatgccagcatgcccggctaatttttatattttttgtagagatggggttttgccatgtttcccaggctggtctcgaactcctgggcccaagcaatctgcccacctcagcctcccaaagtgctgggattacaggcatgagtcattgcacctgtcctgcctttttttcctcccctcccctccctctctctctttctctctttctttctttttgatggagtctcgctttgtcacccagtctggagtgcagtggcgcaatgtcggctcaatgcaacctctgcctcccgggttcaagcgattctcctgcctcagccttcccagtaggtgggattacaggcatgcaccaccatgcctggctaatttttgtatttttagtagagacggggtttcaccatgttgaccaggcctgtcttgaactcctgacctcaagtgatctgcccgcctgggcctcccaaagtgctgtgattacaggcgtgagccaccatgcccagcctcctacatttttttttctgaagtcttacatgttacaccttcagaaatgcctttcctgcccacctaatactcagagttaacactcatattgcactcactctgtgctagacaatgtttttttgtctttgttttttgttttgagacagagtctcactgtcaccctgatgtagtacagtgacacaatcacagctcactgcagccttggcctcctgggctcaagtgatcctcccacatcagtctttagagtagctgggtctacaggtatgtgccagcaccaaacctggctaattttaatttttttttttttttggtagagatgaggtctcactatgttgcccagtctggtcttgaactccttggctcaagtgatcctcctgccttggcctctcaaagtgttggaatcacaagtatgagccactgtgcccggcccagacattgttttaagccattttcatataccaactctgttaaacctttgtacaagcctatgaggtaagtagtattcttacaatctccagaggaggtaagcattattattatctccatattggagctgagaaaactggagtacagaaaggataaataacttctccaaaccaaaatcacacaataagtggtagagcctgtatttgaactctgcccacatggtgctagaagctacatcctgtactttacctcctctgtgttatcaacctaaagtaggcctcttttttttgagacggagtctcgctctgttgtccaggctggagtgcagtggtgcgatctcggctcactgcaacctctgcctcccaggttcaagtgattctcctgcttcagtctcctgagtagctgggatcacaggcacgtgccaccacaccaggctaagtttttctttttctttctttctttttttctttttcttttttttaagacggagccttgcattgtcacccgggctggagtgcaatgacgctatctcagctcactgcaaccgcaacctccatctcccaggttcacgcaattctcctgcctcagcctcccaagtagctgagattacaggcacacaccaccatacccggctaattttttgtatttttagtagagacagggtttcactatattgaccaggctggtctcaaactcctgacctcatgatccgtccgcctcggcctcccaaagtgctgggattacaggcgtgtgccaccatgctgggcccttttttttcccccaaaggacacaagtacaggtaagaaaatgtagttttttgttttttttttttttttagacagggtctcactttctctcccaggctagagtgcagtggtgggatctcagctggtcaggaactcctgacctcaaaaagacctgcccgcctcggtctcccaaaatgctgggattacaggcgtgagccactgtgcccagccaaaggtagacctcgtctactccatttttcttgcttatagtacctcctattttcccttttgagtactaatcacaatttgcaattaaatatttgctcactgccaggtatggtggcttacacgtataatcccagcactttgggaggccaaagcagcggaatagcttgaggccaggaatttaaaaccagcctcagcaagacctcacctcaacaattttttttttttttctgttggccaggctggagtgcagtggcacgacctcagctccctgtaacccccacctcaaagcaattttcatgcctcagactccggagtagctgggattacaggcatgtgctacaatgcccagctaatttttgtatttttagtagagatcaggtttcaccatgttggccaggatggtcttgaattcctagcctcaagatatctgctcaccttggcttcactactgggattacaagtttgagccactgcacccggcctcaacaaaaacaaaaattttaattacctcaccctatgcatctcttcatttgtatcctttgtaatatcctttatattaataataaaccagtaaatgtaaataaataaataaatactgtttgtctcttcccagcagattgtaagcctgattagggcagggatcatatctgttttattcacatcataagcactgtgtaacctctggtttcttttctctttgagatggagtttcactctgtggcccaggctggagtacagtggcgccatctcagctcactgcaacctctgcctcaagcaattcaagtgatcctcctgcctcagcctccccagtattttgtatttttagtagagatggggtttcggcatgttggccaggctggtcttgaactcctgacgtcaggtgatctgcctgccttggcctcccaaagtgctgagattacaggcattagccaccgcggcctggccaataggcactatgtaactattagtttaatgaatgaagaaatgaatgcttgtgggcatcattcattctgcaacaaacttctaaaaattaattttactttgaaacaatttcatactttcagaggagttacaagaataatacaaagaagttcacccagatatctcattcagggttagccaattgtccacaaaatatactttagagagcaagaggattaattccagggtctcttgagcaacaaatatttattgagcgcctgctactattggattacataacagtctcttaactggtctcttagctataggcattgcacccccacccctagtcccatacagcagctccttttactaatttatttttgaggaggatctcgctctgtcgcccaagctggagtgcagtgccgcgatctcagctcactgcaacctccgcctcccaactcaagcggttctcctgcctcagcctccagagtagctgggaccacaagcacgcactaccgcgccaggctaattttggtactttttgtagctacagatagaatagagatctttgtctattttgttcacgaagtactgcaagcgccttgagctgtacctggcacatctttgttgctcagcaaagagtggttggataaacgaacgctgaaggtatgctagtaccaggtactgttctcggtgctggagttacagcaaaaaactccctgccctcgtgggattctcactggaagcatgcttaagcttaagccatttttcaatcttgaccccaccattttgttccctgtgagatttggggtgaactgcagtttcctagcctcactttcctatcaatcgttacgaagattaaaaggaaaaatatcatttgtatcgcatttagcatcagaaatgctttaataatattcgtttcccttcctttcaggctggaagactggggcctgacatctctgccacaggcttaggcgaggttttcacagggacttggaaaggtgcaaacggttactacggccaggcttacccaattgttaagtgaagatattctggagagtgcttaaaagggttggaaaaacaaaccagtgagtggctaggaccacctactccgctgttttgcctcggaaaagcctcgccggctgccgggaggtgaaagtctggaggaacgggaggaaaagagaggggtggctgtccacaacagaaaactacacatcccagcacccccgcggcagacgactacgggtcccagcaggtttcgcggggtggaccgaagcgggctctcttggggcctgcagtcggggttcagccagagggggcgccgggcgtaccgacgtagcggggagaaacgggtcgcgctttaacggcgctgcgcaggcgccactcacgggccggacgtgacgcagggaaagttccggcttcggcctccgccgctgccgccgccgctgctacagccgccgccgccgctgttgccgcggcttgttattcttaaaatggcgccgctagacctggacaagtatgtggaaatagcgcggctgtgcaagtacctgccagagaacgacctgaaggtgagccctatttgcgggctcgccccttccggctgtggggcgcccgccggccggcccttyctttctccaggacccccgccgggtatccagtccagtcgcggtggagggcctcccccattgccagtcgacccggtcctacccggcgtcacgccgagggtctcgcgagccgagtcgtcgaatgctgtcccggttgcctcagtggggatcccgagggatgtcgcggcctctgtcccagggtcgccccttctggccttcgggctgccccaggacccgcagctgtaacagctttatttagaaggctcggctccccaccccatccctgggtctcccgcagtcggarscgagcccccgcggcagtgccctcgggatggggtcgcctccaccggaggtgacaggagcgcggagtggccggcgtctgacaggagatgccaccggctaccggaacgcggcctcagtgtgtttaggtctctgaggaaggggaaggcggtgggcccgagtggtttggtactggcgggagcgaacgtcaggtcgtccctcttcattgccactcctccaaattgctttttaggatcgtcggttttgctaattcagaggtgaatcccgtttctgagtatgttgttgagcttactgaagtggataaagtagttggttctcaataaatacaaatactttctccttaaccccttcttaactcagtatttcattttcttcgttttctaaaggaggtgagttccttgttactcctgagtccaagtaagagtaaatgtatgtatgggtaaaggaatgactttggtatactgcttttcttttttaaaactttttaattattattattattattattattattgtttttaactgagatagagtctcactctgtcacccaggctggagtgcagcggtgcgatcttggctcactgcaacctccacttcccgggttcaagcgattctcctgcctcagcctcccgactaggtggaattacaggcgcccgtcacgacgcccggctgttttgtatttttagtagagacggggtttcgccatgttggccaggctggtcttgaactcctgacctcaagtgatccgcccgcttcggcctaccaaagtgctggtattacaggcgtgagccaccgcgccggcctaggtatactgcttctttgaaaagtgtttctatgcatttgctgaaatcagagcttaggtttctagcagtgcttatcagctcgtgctagtatttaaccgactcagtgtattctttttttttgagacggagtctcgctctgtcgcccaggccggagtgcggtggcaccatctcggctcactgcaacctccgcctcccgggttcacgccattctcctgcctcagtctcccgagtagctgggactacaggtgcccgccaccacgcctggctaattttttgtatttttagtagagacggggtttcaccgtgttagccaggatggtctcgatctcctgaactcgtgatccgcccgcctcggcctcccaaagtgctgggattacaggcgtaagccaccgtgcccagccccgactcagtgtattcttaaggaaatatattactgtgggttttgttttatttcttctttgtacagtaagttgatacttaacatcagtcaacaagtatgcataatatttgaggccacacgtgctgttgtgaatgtgactgaattgtacttacctgttaattttatgtggcatatgataggggagtcattcttgtgcattytcccgtttttaatagaataatttcaaataaggacagccttcgttagtagtaatgtagcatttgtgctcatctgagtccttcagacattccttttgtggcttctttctgctatgtggtttttttaagggaataagaatacaactagcattgggacccaattcatggaaaactaaccagacctcttagtagcattattaatcccataggtgaggttgactattgcatgtcagtgaattgacatggaattttttcttcttatttatcatgcataaagcttttttgaactttgtgtttatgatgaataaaatgttgctttttatgaaaatgtgtctagggcacagtggcgtaatctcagtacttggggaggctgaggtgggcagatcatttgagatcaggagtttgagaccagactgaccgacttggtgaaaccccctctctactaaaaacacagaaattagccgagcatggtggtaggtgcctgtaatcccagtttacttacttgggaggctgaggcagggagaatggcttgaacccgggagaattgcttgcagtgagccgggatcacaccactgtactccagcctgggagacagagcaagactctgtctcaaaaaaaaagaaaaggaaattgggcactgaaatgatttgaaagataatctggccaggtgcagtggctcacgcctgtaatcccagcactttgggtggctgaggcaggtggatcacttgaggtcaggagctcgagaccagcctggccaacatggtgaaaccccgtctgtactaaaaatacaaaaataaactggaggtggtggcaggtgcttggaatcccagctacttgggaggctgaggcaggagaatcgcttgaaccagggaggcggaggttgcagtgagccaagattgcgccactgcagtccagcctgggtgacagagggagactccgtctcaccaaaaaaaaaaaaaaaaaaaaaaagaaagaaaaatctgttggacttctttgtacctcttagtttgataaacattagatttccttcttaccttaaggaagtacaatttttagaccattttatttcttgttgaaacatagctgcattgtacttgacttgtatttgtttctttttttttcttaaaaaaatttttaatcttttttttggtgggggagcggggacatggtctcactctcacccatgctgtagtgtggtggcacaatcatggctcattgcagcctcgacctcctgggctcaggcagtcctcccaccttagcctcctgagaagctgggaccacaggcacatgcccccatgaccagctaatttttatttatttttttggtagagacagggtcttgctatgttacccaggccagtcttgaactcctgggctcaagcgatcctcccaccttggcttcccaaaatgctgggataacaggcatgagccactatacttggcctgtatccatttcttaataaacttaaaaatatatgttttgggcaaccaagacaaaagtattctgaatttttctttataggtagagacttttttttctgtcttggaaatgcttttatcagattaatttgttgtgttgctcatctctggtgtatttaaagaaatttaatttttttctgtttcttggcatgaagtgcaacctaaaattaggccaagaaagtatgccaggagtactttttctgaggctgtaaaggcaaaataaaacattctattaagaaaagtaatcattgaggccacttaatgagcaagatggaaaagatttgttctgtagaaaagaagacagaaatttacttgtgttttaaattgattagaagataaaatactaaatgcatacgatgttccagatttaatcacaatttctgtttygctaagttggaaatggtcacatcactagtactggatcaaatctacataactgtttttgtttgtttgttcgctcttgttgctcagggtggagtgcaatggcgtgagcttggctcactgcaacctctgcctcccgggttcaagcgattctcctgcctcagccttcctgagtagctgtgattacaggcatgtgccaccacgcccagttaattttgtatttttagtagagaccaggtttccccatgttgttcaggctggtctcgaactcctcacctcagatgatgcacccacctcggcctcccaaagtgctgggattataggtgtgagcctggcctgttagtttgtttttttgagacggagtcttgctctgttgcccaggctagagtgcaggtgcacgttctcagctcactgcaacctccgcctcccggattcaagcgattctcctgcctcagcctcctgagtagctgggattacaggcacccaccaccactcctggctaatttttgtatttttagtagagatggggtttcaccatgttggccaggctggtctcaaactcctgacctcaggtgatccacccttctcagcctcccaaagtgctgggattacaggcgtgagccaccatgcctggcatacataacagttttgaaggaataagaatgacatatgtgggccgggaggctgaggcaggagaattgcttgagcctgggagatggaggttgcagtgagccgagatcatgccactgcactccagcctggccaacagagcgagaccctgtctcaaaaaaaaaaaaaaatgacatatgtgaaagtaaatggaccacagtgtaacctttcttataaagagctcatgtgattttatccacaagaaagatttcagagagattaataaaagatacagattccatacctggctaaatggaagaattaatgataaaggcaggtttactgaatacttatatttaagtattaatatttttggggagcaggggttctataacttggaggttgtctaatctcttggacagttcttaagggtgacatgtttacctgaggttttttttttttttttttttttgagactgaatctaactctattgcccaggctggagtacagtggtaccatctcagctcactgcagtctccacctcctgggttcaagcagttctgcctcagctgggattacaggtgcgcactaccacacccagctaatttttgtatatatatattttttggtagagatggggtttcaccatgttggccaggctggtctcgaacttctggcctcaggtgatccgcccacctcggcctcccaaagtgttgggattacagatgtgagccactgtgtttggccattccttatttgtgttttccacaattttagaacactgccctgtatgtgataatcagtaaaggtttattgactcaaactgtttactgctttatgacaaatacttgtttcttcttcttctttttttttttttctttgaggtagggtctcagtctgctgcccagggtggagtgcagtggtgcagttgtagcttgctgcaacctcaaactcctgggctcaattgatccttctgcctcagcctcaaaagtagctgggagtacaggtgtgcaatagtgtgcccagctgattaattattatttttwtttttgagatggagtctcactctgtcaccaggctggagtgtaatggcgcgatctcggctcactgcaacctctgcctcctgggttcaaacaattctcctgcctcagcctcccaagtagctgggactacagatgcatgccaccatgcctggctagttttttggtatttttggtaaagatggggtttcactgtgtttgccaggatggtctcaatctcctgacctcgtgatccacccgccttggcctcccaaagtgcagggattataggcgttagccaccgcgcctggcaaaaaaaaaatttttttaagggatagcgtcttgctatgctgtccaggctggtcccaaatgcttcargtgattctcctgccttggcctcccmaaatgctgagattataggtgtgagccactgtgcccagccaacaaacacttatttacatggttccttgtgttgagtactgttccctgtgggtgccaggggcagaattggatacttgtgtctgcctttgaggggctttcaatatagtaagggaggtaaggaggtaaacaaagactgtaatagaggctgaccagggtgttggcaaacagaagaagcagtatgtaactttagagtcagagatgatttcataaaggagcagttacgaggrgcagagttcaggtagacaaaatgagaaggaaagaacatgcaaacagaataaacaccatgtgcaatagtataatgtaatttgcaagaacatggctggttcggggaacttgaagtggtttggtatggctggaggtggtactggaaagaaagatgccaaatcatagaagagtaggctgttaaacttagattgttattttttaggtggtgcatgaacactatgaaatgtttttatattttagggaaaaatcatactgtgattcgtgatactgtttaaaatgtagctaactaaaaataaaagtagattcaaagaaaattattacagggatacactgttgtatgtggtaggaatatgacaaaataatgaaaatggtatttggtgtttgggaaacactgccataaatggaggaatacgcttgaggagtttttaagaaggagaatgacagtaggcttttgaaatgtttattctggcagcattgtggaccatggattggaatgcaggaaaaatgtcatagaagcagtaggcccggtgatatgagagtctgagataaggcaatgataagtgattgttgtgttggaaaggaaatgaagaaggtatagtggcacctgttaacagatttggtctaggttatgatgaagagagtttagcataattttttagtttctggcaaggattacttagtactataactagattaaggaatacgggaagtttggtttgggccatattgagtttgagatgctgccaagctaagacattgagatagaggtgtccagaattactcttggatacttatgttacttagataacaactacttgttgattgccaaatgtgctctaaacactgttctaatagtattaaacgcaggagaaagatctagaccagtcgttctcaactgggggcaattttgccccccaaagaatttttggyagtgtctggagacatttttggttgtcacagctgggtcaggggaggggtgggaagttactatgggtatctagtaggcgtagatgtcggagattttgctaaacatccacaagacagcaagcagtcmcctgcaatgaataattagtagtgccatggttgagaaactctgatctggcctgaggatacagatactaccttctggatcataagcgtgtgaatatcatggtcattccagatttctaacttctcattcccagtgatctgtattatagtagagactttatataaagactgtgtgaaatataatgttagctagatatttatttagttagttacttagctagctagttgagatgaggttttgctatgttgcccaagctagtcttgagctctgggcctccagccatcttcttgccttggcctcccaaaatgctcattttacaggtgtgagccaccacacctggcagtgagatctttttttttaaagctaagagtgttttataaataccagtatgtaaaagtagataaaggaagtagtatgttttagataacaagatcaactaaacaagtaattttaaaagtttagaacccagtgtttgtgagggcaagagggaactgggagacagaacagagaatagaatggaactgtgaacaaatgtcttgaggaaaaggtagagaagagacatagaggtctgctaagaatgatggctatgaaccccttcctgttcaaggattagaaagtagttgggcaccaaacatatgaaaaagagcactggtcattaaagaaatgcaaatcaaaaccgcaatgagataccatctcacgccagttagaatggcaatcattaaaaagttaggaaacaacaggtgctggagacgatttggagaaataggaacacttttacactgttggtgggagtgcaaattagttcaactgttgtggaagacagtgtagcgattcctcaaggatctagaactagaaatgccatttggcccagcaatcccattactgggtatatacccaaaggattataaatcattctactataaagatgcatgcacttgcatgtttactgcagcactattcacaatagcaaagacttggaactagctcaaatgcccatcratgatagactggttaaagaaaatgtggcacatatacaccatggaatactttgcagggacatggatgaagctggaaaccatcattctcagcaaactaacacaggaacagaaaaygaaacaccgcatgttctcactcgtaagcgggagttgaacaatgagaacatatgggcagaggggaggggaacatcacatgctggggcctgtcagggggtccggggtaaagggagggatatcattaggagaaataccgattgtagatgatgggttgatgggtgcaggaaaccaccatggcacgtggatacctaagtaacaaacctgcacgttctgcacatgtgtcccagaacttaagtataataaaaaataaataaatagaaaacagaacacaaaaaaagaaagaaaaaatatttgggcacgatgaggagaaaggggtatagtttaccctaaatttgggataaagctgtaaagggtttgggaggagaggagcatgtgtctttactatgatgacaaggcagggctctttgaggccgctgtgagtgtagttgattgagtcacgtagcgtttatagtgagattgcatagacttcttatttttgtgtgcgcgtgatagcgatttgtaagctactgccaaactagagatgagaggcaatagctttggcttagagacatagctctctaaatcctcagttggggtcagcagaggtggcagtcgtaggacgcagctgtaattttactctagttagtgtgcctgggccctggttgaaggctgctgctaggtagtttacacgtgttctccagacactcaatctttcagattgacagagtttcacagcgatgttcttcagtttatagtccactgttattttcaggctagcacatagtgtatggggtgataaccagggatgacttcaagtttaggaggccttatggactaggagaaccagttacatgtcagcgaaaattctggcacattgaaatatgggaaccggccagacacagtggctcacgcctgtaaccccagcactttgggaggctaaggtgggtgtatcacctgaggtcaggagtttgagaccagcctggccaacatggcgaaaccctgtctctactaaaaatacaaaaattaaccaggcatggtggcgtgtgccgtaatcccagctactggggggctgaggcaggagaatcgcttgaacctgggaggcggagggtgtagtgagccaagatcacgccattgcactgcagcctgggtgacaagagcgaaactccatctcaaaaaaagaaaaaattacaggccaaacttagaatcattcatcagttcctggcatatttgttctttaatgcaaataggttgcaaactttggatgctaattattataaaaataaatatgtatcataggtctaatggattattaatagaagtaggatgctgtgcaacactgatattttgaaattgactggaaagacagccgtctatccacaaggactaactggattgagtggttgtggtcaaggttgtgattattattatttatgaggtaatacatagggctgtggggtgttggtatggggatgaggggagtgactgctaatgtgtatatggtttctttttggggtgatgaaagtgtcctaaaattgattatggtgatggttgccaccactgtgaatataatgaaaaccattgactcttacccttcaaagggatgcattttatgtaggtgaattatgttgcaatagttgttttaaaaaattatattcgggctgggtgtgatgctcacacttgtaatcctagcactttgggaggctgaggcgggtggatcacctgaggtcaggagctcgagaccagcctggccaacgtggtgaaaccccatctctactaaaaatataaaaattagctgggtgtggtggcaggtgcctgtaatcccagatacttgggaggctgaggcaggagaatcgcttgaatctgggaggtggaggttgcagtgagccaatatcacgccattgcactccagcctgaacgacaaagcaagactttgtttccaaaaaaaaaaaaaaaaagagagagagaaaaggaaagctggatgaagagagatagccaagcccatgtctagggaaaagcattcttgactgagtgaacagaaagtacaaagcctcagaggagggagcatgcctaggtagccacccagacctggtgaggctggtgtgtggggcagcctccatggagaggagttagaacaaaactctgtctaataaataaaaataaaaaattatattcatagttccccaccctccaaaccaaacctaaacaaatcaaaacaatctgctcttgaaagaaatagttgataagccagacttcattaaaattaaaagcttttgctttgtgaaagaccctatcaagagaatgagatgatgatccatgtactgggagaaaatatttgtgaaagacgtgtctgataaagtattgttatccaaaatatgcagataattcttttttttttgagatggagtttcgctcttgttgcttaggctggagtgcagtggcgcgatctcagctcaccgcaacctctgcctcccgcattcaagcaattctcctgcctctgcctttcgagtagctgggattataggcatgcgccaccacacccggctaattttgtattttttagtagagatggggtttctctgcgttggtcatgctggtctcgaactcctgacctcaggtgatctgacctcctcggcctcccaaagtgctgggattacagacgtgagccaccatgcctggcctgcagataactcttaaaactcaataagaaaatgaacaatctgattaaaaaatggacaaaagttgctgtcagatcatgccagtttttcagaatggttgtgctaaattacactttcaccaccagtagaaactgtctagaagaagctggctgcaggagggctaagggatttattgggcctcagtgaagcttggtgatacgtgggtggctttgcagaaatgtttcctttgttggtgcattattacaaagattcaaatggggatttgctgcatttgtggtagctgtaggagctgaatattacttggagtcccagaataaagataaacatcactgaagataatacctggaagtatcatagtggtttcttaactaagatttcctcactgtagcctacttgcctggtttgtcccttaaagaatattagtaagatataataaagtaaatacagatatgccaaaaaaatggacaaaagacacctcatcaaagaagatacagtgatgacaaataagcgtatgaaaagatgctctaccttccgtgtcattagggaaatgcaaagtgaaacaaccatgagataaccactatatacctattagaatggccaaaatccagaacaccaacagtaccaaatgctgatgaagatgtggagcaacaggaactctcattcattgctggtgggaatgcaaaatggtacagccactttggaagacggtttggcagtttcttataaaactaaacaaactcttcatataatccagcagtcctgctccttgatatttaccsaaatgagttgtaaacttatgtccatacaaaaacctgtacatagatttttatagccactttattcataattgccaaaacttggaaggaaccaagatgtccttcactaggtggatggataaacaaactgtaatacacccagacaatgaaatattatgcagtgctaagaagaaatgagctatcaagccataaaaagacatggaagaaccttaaatacatattactaaatgaaagaaaccaacctgaaaaggctacatatatatgattccaactatatgacattttgggaaaggcaaaactatagagacagtaaaaagatcagtggttttcagaggttggagggaggtgaatttgaataggtgaaactattctgtatgatactataatggtaggtacatgtcattatacaattgtcaaaacttatagaatgtgcagtaggagtgaccctaatttaaacaaactatggcctttggatgataatgatatgtcagtgtatgctcatcatctgtaacaaacgtaccactcaagtgtgagatgttgatgcggggaggctgtggggaggggcagggggtatatgggaactctgcacttttttctttttttctttttctttttttccctttatatggagaacgargtctctctatattgctgagggcggtcttgaactcctgggctcaagsgatcctcctgtctttgcctccctaagtggtgggattacaggcgcgagccactgtgcccagcaggggaactctgtactttaagattttttttkttgtttgttttgagacagagtcttgctgtcaccccaggctggagtgcagtggcgccatctctgctcactgcaagttcggcctcccgggttcacgccattctcctgcctcagcctttcaagtagctgagactacaggcgcccgccaccacgcccggctaattttttgtatttttagtagagatggggtttcaytgtgttagccaggatggtctcactctcctgacctcgtgatccgcctgcctcgaccccccaaagtgctgggattacaggcgtgagccaccgcgcccggccgggaattctctgtacttttctgctcaattttgctgtgaagctaaaactgctctaaaaaatagtctatttacaggggtaaaaaaacacaataaaaaaatctactttccctggagttgtaactgtctcagtaatgattatttccagccttctaattgtttaagccagaaatcccgcgtcatccttgattctttactttctcttaacaccctgtatccagctggtcataaatctagcagatgctacattcagataacatctggaatctattttccctattttctacttctactaccctgtccaagccagttaacttttacctagattattatagaagacacttaactgatctccctgcttactcctttgtcccaattccaaccccagcccagccacccctccaccaccatcaatccattttctcttttcttgttattttgagaaagggtctcgctctgtgacccaggctggagtgcagtggcacagtctcacctcactgcagctttgacctcccgggctcaagcgatccttgcacctcagccttccaagtatctgggacttcaggcacatgccaccacgcccagctagtttttgtattttttgtagagactgggttttgccattgttgcccaggcaggtctcgaactcctgagctcaagtgatacgctcacctcggcctcccaaagtgctgggatgataggtgtgagccaccacgcctggccagtttgttttcaaaacagctgacttaatatcatgtcagtcttctgctctagaacttctaatggcttcccgttacactcagtagaagcccaggtccttattttcaccaccagtgacctaaataattctgtgatgctctcctgtttttcttctcattcagtttactctraacacaccagccttgatgatgtttcttagacacaagcatgcttcacatcaggacttttggtctttatttctctgcctgtagtattgtgtccccatagccttacctcctttagagttttgctcaaaattcactttatcagtaaggcttccatactctccctgtttaaaataacagcacctactctccaccccagcaccccatccctcttctagtgtgtctgtttgctctatacttccttgatatyactatgtgacaaattactrttatatattttacttatttattgtctgtctcattctattagaatgtaagccccttgagagcagagcttttagtctgttttggttgttgctatttactttgtatctagaacaatacctggtaacataccaggcactccataaatatttgttgcattgaacaactaaatattcaatataatgtagtggaaagtggtaggaaacttggattctagatctgttgctaagattaagtaacatcttttattatctaagtcaagtgagaaatttggtgtaggtaatttctttttttttttttttttttgagacggagtctcgctgtgtcgaccaggctggagtgcagtggtgcgatctctgctcactgcaagctccgcctcccgggttcatgccattctcctgcctcagcctccctagtagctgggactacaggcgcctgccaccatgccccgctaatttttttgtatttttttttagtagagacggggtttcactgtgttagccaggatggtctcgatctcctgacctcgtgatccacccgcctcggcctcccaaagtgctgggattacaggcgtgagccaccgcgcccggccggcgtaggtaatttctaatgcaaaccagaattttataattctgatggaaccttcgagaacatctttcagtataaagtttaaggctcaaagttcagaaacattgtttcactcaccagcatctattttttgcttttgtttttgtttttttttgaaacagagtctcactctgtcacccaggctggagtgcaatggcgtgatcttggctcactgcaaactctgctcctgggttcaagcaattctcctgcctcagcctcccaagtacaggattaccagcgccctgccaccacgcccagctaagtatttgtatttttagtagagatgaggtttcaccatgttggccaggctgatcttgaactcctgacctcaggtgatccacctgcctcggcctcccaaagtgctgggattacagatgtgagccacacacctggcctgtttttcttttttttagataggttctcactctgtcgcccagactggagtgcagtggcgcgatctcggcacactgcaacctctgcctccaaggctcaagcgattctcctgtctcaacctcccaagtagctgagattacaggtacgtgcctctactgaccagcttatttttgtattttttagtatagacagggttttgctatgttggctaggctggtctcgaactcctgacctcaaatgatccacctgcctgagcctcctaaagtgctggaattataggtgygagccaccacggctggcctgtttttgttattttttttaatgagtgatggatgtactatatggcaggaccatggattgatttgttgaagcatataggtgtggaaaattcaacacaaacaggagctagctacccagggactcaaggccagaaggattccaggccaaaaagaagatcttgcctttgaggtgctattttaagatcaggaacttaccctaggaatgaaggcaaatcattttattttgaagttttctgattttttgtataatgtttaggaaattaacaactctatttcccctcattgtcttttgggagcccttttttcccccctcccactcccattgagttctgttcttgctactgtgtagctattgttgtagctgtaactgttaaagtgtttctcatatattaatgagattatagcatttagaktccttaattaatgtttaagtgatttcattatgcttgttagtttaatttctcctttcttggcagacctatcgtaaaatccaataagcctttggcaatagtacaaactggtctcaggtaggaaggaaggttccacctgagacctccagttccctgtatatagcagggatgtatacttccttttccagaacgttggtgtgagaatcatatgctttctatgacattttttggtttgattactttcagtggacaaatatttttgaagtgcaaacatttagagttcctttaacaaaaagaatggcttggctgggtgcggtggctcacgcctgtaatcccagcactttgggaggccgaggcgggtggatcatgaggtcaggagagcgagaccatcctggccaacatggtgaaaccttgtctctactaaaaatccaaaaatgagctgggtatgatgactcatgcctgtaatcccagctactcgggaggctgaggcaggagaatggcttgaacctgggaggcagagattgcagtgagctgagattgcgccactgcactccagcctggcaacagagcgagattctgtctcaaaaaaataaaattaaaaaaggctcatcttttttgttgttgttgttgtttgtttgttttgagaaagagtctcaccctgtttcccaagctggagtgcagtggcgcgacctcggttttcggcaacctctgtctcctgggttcaagcgattctcttgcctcatcctcccgagtagctgggattacagctgtgcaccccacgcctggctactttttttttttttttttttttttttgagagggagtctctctgctgcccaggctggagtgcaatgggtgcaatctcggctcactgcaacctttgcctcccagattcaagtgattctcctgcctcagcctcagctgaggattacaggcacctgccaccacgcccagctaatttttgtatttttaatagagacggggtttcactacgttggccaggctggtcctgaactcctgaccttgtgatccacccacctcagcctcccaaagttctgggattacaggcgtgattcaccatgcccagcctaatttttatatttagtagagatagggggttttgccatgttggtcaggctggtcttgaactcctgacctcaaatgatccacccactttggcctcccaaaatgctgggattacaggcgagagccgccgtgcccagctggctcctcagttttagatttgaattttataattaattatagttagcctttttatttcaaaataacccagttttccccagtggtaacattttgtagaactatrgtgtaatgccacaaccaatacaacatcagccaacattgacactgatacaactcatgatctttaggtacaacccaagatcatcacctcatgatgttcagatttcttcagttttacttgtgtttgtgtgtgtgtgtgtgtgtttgtgtgtgtgtgtgtgtgtgtgtgtgtgtttgtgtgtattcagttctttgcagttttattgggtaagggctcatgtatccaactctatagtcaaaatacagaacaggtccatcatcacaagaattcctcatgttgcccttttatagccacacccacttccttcctgcaactgctggacccctgacaacaactaatccgttctccatttctttaattttgtcatttcaagaatgtgtaaacacggccgagtgcagtggctcaatgcctgtaatcccaccactttgggaggccgaagcgggcagatcacctgaggttgggagtttgagaccagcctgaccaacatggtgaaactactaagaatacaaaaattagctgggcatgatggtgtgtgcctgtaatcccaggtacttgtgagactgaggcaagggaatcacttgaactgggaggcagtttgcagtgaactgaaattgtgctactggactccagcctgggcaacagaccaagactctgtctcaaaaaaaaagggraaaaaagaaggttatataaatggaattatacagtatataaccttttgggacagttttctgttgtttcatttttttcactcaacataaatgccttgagatgaatccaggttgttgtgtggcagtattcgtttctttttattgctgagtagtaktacatggtgtggatgtaccaaaatgtgtttaaccattcactcattgaaggatatctgatttgtttttagttttgggctatgatgcattaggcttctgcgagtatttatatacagattttgaacatgtttttattgccaagactacagttgctgggtcaaatggtaagtgtgtggtttgcaatttattttttaaattaccagataaaaatcttttactggctgggcacggtggctgacgcctgtaatcccagcactttgggaggctgaggtgggtggatcacctgaggtcaggagttcaagaccagcctggccaacatggtaaaaccctgtgtctactaaaaatacaaaaattagccgggtgtggtggcacatgcctgtaaccccagctacttgggaggctgaggcaggaaaattgcttgaatctgggagatggaggtagaagtgagccgagatcgtgtcactgcatttcagcctgggagacagagtgagactccgtttaaaaaaaaaaaaaacaaaaaaacccaaaaaccttttactgttaaaattatttcttcatatatatatatatatatatatatatatatatatatatatatatgtgtgtgtgtgtgtgtatatgtgtgtgtgtgtttggtgaaaaacatcattttacagttcttgtaaagctgtctgtctcctagaaccttagtgtctctgtaggtagtttgcattgcattaagaattctgtgtgacagctgacagaaatccaacccccgaattatcacagggtactttcctatcaaaaagtatacttgggttttgtaagtattagacctggtatttttcttttttggtattttatctttagttttaatgttgtagtaaatgtttaccttttattttctctttttatagcggctatgtgactacgtttgtgacctcctcttagaagagtcaaatgttcagccagtatcaacaccagtaacagtgtgtggagatatccatggacaggtaaaatttcatgagcagatttttaagttttgtactgtccatgatccatgtgtgttttcacatgtgctgcaaaattaaaacaacaacaacatcaacaaacacaactggtggtaagctaggttgcctcagtctctgtgacacaaatgattcctggtttacatttttggtgaataaaagcagtggtcaaattagtgatggaatttgttgataattacatttgtgaagtgaataatgcagcattagttttctgtggaatggtggggttgggggtaggtagaagatataaagtacaaacacatactgctcataataactatgattaacaggagatgttttggtgttaggcacttttttcattcagttcatttctgttctcctgtcatatattgttgaaaatttatcatttctttagtgggaatgagaatagcaaaggtacagaaaaataaaattgttggtccatgatgtcacagcaaatcactgatgaatgagctagaaaatatttagctcaatttttcatctgctgggtgtttgtaagaatttcaaagcagtgccgggcgtggtggctcacacctgtagtcccagcactttgggtggctgaggcgggtggatcgtgaggtcaggagtttgagaccagcctgaccaacatggtgaaaccccgtctctactgaaaatacaaaaaaattagctgggcatggtggtgcgtgcctgtaatcccagctactcaggaggctgaggcaggagaatctcttgaacccgggaggtgaaggttgcagtgagccgagaccgcaccactgcactccagcctgggcaacagagcaagactctgtctaaaaaaaaaaaaaagaatttcaaagcagtaacaggaggggcatacctcatatttagattctgttgtcagtgtttagtctcatgtatatttgtagaattttttcactgggaaatgaaagctgaacagattactyatagagtgctatatgcatacagtgtagttggggccataagacttaataatacattgcaaacaatgtagtctttaaaggatgccaacaggacttactgtcacctgtgcaatttccctgctttaaatatgactgtgtaaatgagcagaaatgtgtgtaaattgactctgattaggggctgctccatgagtaaagtcttgttttggctacttacttacaggctgattttcttttggtttttcaaggtgttttctggattttttagattataaaaaaatctgacacttgcatgtcatcacctcctagatggaggtcccattatgtcatctttgattgttaaaattacagttctttagagtagactttaggaattgatttcctaaaatttccatgtaacttctctctcaaacatttgtattttgctaacataaaggatattaatataagcagtgtcttaagacattcctgaaaactggaataaaccaagtcatgttttcccccagtgtagtgtagaagtttctatgtaacttctctctcaaagtaaacatttgtattttgctaacataaaggatattaatataagcagtgtcttaacacattcctgaaaactggaataaaccaagtcatgttttcccccagtgtagtgtttcccccagttgtagastttttaagatgtgaagtacagccatgatcaaaggtcagaaagttagagaccaacctcgaactactaaaattggaagcataaaattgaacttttgtattatatataccttcagtcaaatgtgcagttcttgctaacatatatcttgtgttttgaggttaacaaagtactttttcacatattctgtgtcagttttttcccaaagtcctgtgagataggattattttgtagacaatgaaagggagactgaaagattgaagagaaatagcccaaactcacacacagctactacagggcagattgagatttgaaactaatttgggtttcttttgtacatgttattttaagaccaccaccaaaccgtgaacaattgtttatgttgtatgtgttccttaaaaaacaattgttccaggtgcagtggctcacgcctgtaatcccagcactttgggaggcygaggcaggcagatcagaaggtcaggagttcaagaccagcctagccaacatggtgaaaccctgtctctacgaaaaatacaaaaattagccaggtgtggtggtgcgtgcctgtaatcccagctacttgggaggctgaggcaggagaatcgctagaacccgggaggcagaggttgcagtgaaccgagatcatgcattgcaccccagcctgggcaatagagtgagactctgtctcgaaaaaataaaaaataaaaaataagccgggtgtggtggctcatgcctgtaatcccagcactttgggaggctgaggtgggtggatcacgagggcaagagatcgagaccatcctggcaaatatggtgaaaccccgtctctactaaaaatacaaaaattagccaggtgtggtgacaggcgcctgtaatcccagctccttaggaggctgaggcaggagaattgcttgaacctgggagacggaggttgtggtgagccgagatcgcgccattgcactccagcctgggcaacaagagcgaaactccgtctcaaaaaaatgaaaaacagaagattgctaatcagaaacatgggatttgagcctctaaatagctattgactgattaaatacaatgtaaaatgtatcctttgggacttatcttcctctggggcctgttctggaattgcaggattgggttatgagtatgaataaacatgttagcaagcatgttgtgctgagaagtattgaagctgtgtaatatagtgaggagttatagatttcagtgtcagatacaacttggtttaaatcctggcttggctatatattagttgtttaagaagccatttcagctagctcacaaattcgttaagtgtggcctgtggacccttgggtctctaaggtggtacagaggcaatggagggtaaaactrctcgtgccttagcatgaaccaagggaatgacactagaatatactgattatcattgagttcttcaccaacatgcctgcacagtaaaataaaatgccagtttcacttaactctcaatcctttagaatatccattatttgaaaagtctggctgggcatgatggctcatgcctataatcccagcactttgggaggctgaggtgggaggatcgcttgaagccatgggttcaagaccagcctgggcaaccaaatgatacccccccccccccccatctcaaactcctgacctcaggtgatccacctgccttggcctcccagagtgctgggattacaggcgtgagccactgcgtccggcctgagactccccatctctaaaaaaaaaaawttttttttttttgagacagagtttctctcttgttatccaggctggagtgcaatggcacgatcctggctcactgcaacctctgcctcccaggttcaagcgattctcctgcctcagcctcctgagtagctgagattacaggcatgtgccaccacgcctgactaactttttgtatttttagttgagatggggtttttccatgttgctgaggctggtcttgaacccctgacctcatgtgatcctcctgtctcctgtctcggcctcccaaagtgctgggattacaggcgtgagtcaccatgcccggccttttttttatttcttttttttttttttttttttggacagggtctcgctctgtcacccaagctggagtgcagtggtgtgatctcagttcattgcagcctctgcctcccgggttcaagtgattcttgtgcctcagcatcccgagtagctgggactacaggcacgcaccaccacgcctggctgatttttgtatttttagtagggatgggattttgccctgttggccaggctggtctcgaactcctggcctcttgtgatccacctgcctcagcctcccagagtgctgggactacaggtgtgagccgctgcacctggcccccatctctaaaaatattaaaaagaaaaaaattagccaggcttggtggtgtgagtctgtaagtcctagctcctcaagaggctaaggtggaagcattgcttgagcccaggagtttgaggctatagtcagctattattgtgccactgcactccagcctgggcagcagagtgagaccccatctaaaaagaaaaagaaaaaagtctgtgtgatgaaatgggaagtatgcataaagcatatctactgcatgctgaagaaagatagtttactcaaggaaaagtagttgtgggttgggcacggtggctcacacctgtaatcccagcaccagatcacctgaggtcgggagttcaagatcagcctggccaacatggcaaaaccccatctttactaaaaaatataaaaaattgccaggtgtggtggtgggtgcctgtaatcccagctactcagggactaaggcagggaaaattacttgaacctgggaggcggatgttgcagtaagctgagatctcaccattgcactccagcctgggtgacagagtgagactctgctaaaaaaaaaaaaaaaaagaaaaagaaaaatacttgtgaaattctttgagtcatgagttaaaataactgcttttttatggaacactatttttacttgrgaatgactgacaaactgtgattatttagacttgggtatttggcaactatatttgcaaaagtgaaggaagtgggccagtcacttcaaggagaacaattgacagtatttgttgccgatgacaaaatttgaatttactaatgaaaaattggaattttggaaaatctgagtccaccactatggggctaacagtttccgacacttaaaagactttcctgagatgaaatgagcagtgatattaacaaatatggttttttgatgatataaaatgcaatgtcattttcatttttcaaattactagtttaccatttactcaaagtgtaagataacaaatgtaacagggtatgaaagatgactattataggccaggcctggtgactcacacctgcaatcccagcactttgggaggccgtggcaagcggatcgcttgagcccaggagtttgagaccagcctgagcaacatggtgaaaccctgtctctactaaaaatacaaaaattagccaggtgtggaggtacgtgcctgtaatctcggctacttaggtggctgaggcatgagaattgcttgaacctgggaggtggaggttgcactgagctgagaatgtgccactgtactccagcctggacaacagggagagatcctgtctccaaaaaaaaaaaaaaaaaagcaaaagattactgttatggtttcagatttcatattgcgattaacttttaagtgtcataaactgccacttgtcaaattttggtacagtatttaaagagtatgcacagttacctgaaaatgttattaaaatactccttccttttgtaactgcatatctttgtgaagctggattttcttcatctgctttacttagtatattcccaacagactgagtgcagaggcaagttctaagactagccatgttctatttagccagacattgaagagatttgtgaaaatgtaaaacaatgtgaattctcctctcactaaacaatttttttgttttggaaaagttaatttttcattaaaatgtgtttgtgatactttttgatgggtatgttattgatttktttttttgagatggaatttcactcttgtcacccagactgcagtgcaatggtgtgatctcagctcactgcaacctctgcctcccgggttcaagcgattcttctgcctcagcctcccaagtagctgggattacaggtgtgagtcaccgtgcctggcctatgttattaatttttaaaaattcatttaaatatttaaaacttctgagttttaatctctaatatggtaaatattgatttgtaaaacttacataaaagattttcaggacctctggtttttaagatcacaaatgaatcctgaaaccaaaaagtttgagaactactgggcagactggatgtttccttgcctctgataaaaaaaaaaattccacttcctagccgggcgcggtggctcacgcctgtaatcccagcactgtgggaggccgaggcgggcggatcacgaggtcaagagatcaagaccatcctggccaatgtggtgaaaccccgtctctactaaaaatacaaaaattagctgggcatggtggcacatgactgtagtcccagctactcgggaggctgaggcaggagaatgacgtgaacctgggaggtggaggttgcagtgagccgagatcatgccactgcactccagtctgggtgacagagcgagactccgtctcaaaaaaaaatccacttcccaggctgggtaaagtggtacatatatgtagttccagctactcaggaggctgaggtgggaggattgcttgatcccaaaagtttgagaccaacctgggcaatatagtgagcctccatctcaaaaataatgataattaaagaaaaaaatctacttcttaagattgtttttggtttaaaatgggagcagagtatctgaaatatgaaaaacagagtagctgggtgcagtggctcacgcctgtaatcctagcactttgggaggctgaggcgggcagattacctgaggtgaggggtttaagaccaacctggccaatgtggcgaaaccctttctgtacaaaaaagtacaaaaattaggcaggtgtagtggcacgtgcctgtagtcccagctacttgggaggctgaggcaggaggattgcttgaacccaggagccagaggcagcagtgagctgagattgcaccactggactccaggctgggtaacagactgagactccgtctcaaaaaaaaaaaaaaaaaaaaaaaaaaagagagtgagggagagacatagagtagatggtagatattatttgacgatgaggtaggtgtctagtaatgtaggatgaaaatagggccgtgtgctgtggctcatgcctgtaatcctagcatttgggaaaccgaagcgggtggatcacctgaggtcaggagttcaggatctgcctggccaacatggtgaaaccccgtctttaataaaaatacaaaaatcagcgggggtgcggtggcagataagctactcgggaggctgaggcaggaaaatcacttgaacccaggaggtggaggttgcagtgagctgagatcgtgccattgcactccagcctggacaacaagaacgaaactccgtctcaaaaaaaaaaaaaaaagaattgcccaagttctcgggaaatgggaacctatgtatcactgacgcagaatatttaatcgtctacctgtgtgtctggtaaatacaaactttaaaagcttttgtttaagaacagatatctggccaggcgtagtggctcacgcctgtaatcccagcactttgagaggccgaggcgggcggatcacaaggtcaggagttcaggaccagcctgaccaacatggtgaaaccccgtctctgttaaaaatacataaattagctggggctgttggcacgcgcctgtaatcccagctactcgggaggctgaggcaggagaatcacttgaacctgggaggcggaggatgcagtgagccgagatcgcaccattgcattgcagcctgggcaacagagtgagactgtctcaaaaaaacaaaacaaaacaaaaaaacatatctgtaaacatcaatagaaaagtttaaggatactcactcttctaccatatttttattaaaaaactgacttacaaaactttttaatgttcacttcctgactttgtgtatataactactcaattttttacataatagaattgtgtagttataggtatagttttgtattccattcttttccctaatgatttttgcattttgctacatggttttcgtcataatttttattcatggcctcataaggtccttgagttgctagatcttaatttaagatattcacttatgttagtcatgaaggctgtttcttttgatgttttaaatgttgtcataacacttttttttttttgagacagagtcttgctgtgtcatccaggctggaatgcagtggcaccatcctggctcactgtaacctccgtctcccaggttcaagtgattctcctgcctcagcctcctgaggtagctgggactacaggtgcccgccgccacgcctggctaatttttgtatttttagtagagactgggtttcgccatgttggccaggctggtctcgaactcctgacctcaggtgatccacccgcctcggcctcccaaagtgctgggattacaggcgtgagcctctgtgcttggcccactttttttttttttttttgagacggagtcttgctctgtcacccaggctagagtgcagtggcgtgatcttggcttactgcatcctccacctctcaggttcaggtgattctcctgcctcagcctcccgagtagcagggattgattacaggtgcccaccatgatgcccagctaatttttgtatttttagtagagacagggtttcaccatgttggccagtctggtcttgatctcctgacctcatgatccacctgcctcagcctcccacaatgctgggattacaagtgtgagccactgtgcccggaccataacacttttttttttttttttttttttttttgagacagaatcttgctctgttgcccaggctggagtgcagtggcatgatcttggctcactgcaacctctacctcctgggctcaagcaattcttgtgcctcagcctcccaggtagctgggattacaggtgcaggccaccacccctggataatttttgtatttttagtagagatggggtttcaccacattggctaagctggtcttgaactcctgacctcaagtgatctgcctgcctgggactcccaaagtgctgggattacaggcgtgagctcccaaagttccaggattacaggtgtgagcagcttggcctgttagctaattttcagatacattttatattaagcttcctaaagttgtttttttttttttgtctgactttttagacttatggaacattgttataaaaggtgttactttatttctttcagtagttaacatctcactttcagttttcttcactttgactaacattcctattaagtgttaaaagtttaaatgataattttatttcaagtgtaaaagatgaatgtgttagaagttgttagttgtaattggtccaatgtattgtagtcaattcccttaatccaaaatcgtttttcttccagaaaaactgtaatgctttctttggaaattagggctagggtaataatctagtggactgaaatttgacaaatgcacaatttgccagttaccaaatttcagtaaatagaaatatgatgaaatatcmttgggtgtcatggatcacacttgtaatcccagcactttgggagactgaggtgggaggattgcctgaagccagtagtttgagaccagcttgggcaaaaaagcgagaccctgtctctataaaaatttgctgggcatggtggtgtgtaactgtggtcctagctactgaggagggcaaggtaggagggttacttgagcccaggaatttgtggctgcagtgagttatgattgcaccactgcattccggcctgggtaacagagccaaaccctgtcttaaaacaaaaaacaaaaaatatgatgaaatatataatttttttttaactgatcattgaggagacactccatggctgtggagcctgagggtatataactctaactgtagaatgtgggaagatctctgtataacactggagtgtcatgtaagttcagtttggaagaaaaagaggtatccacttgtttctgtaatcttttgtctcattaaaatagatacagaatttgggtgggctgttagattagcttactgagaaattagacaattgataaaggatgtcagaattctcaagagatagatggggagatgtatgaaagaaaatgagaaagggaatcctatgataataatctaggagtgactttatggtaactgagctttatttagtgctttttttagtcttgagaactgtgtgcttggcagtttggcttacactttatttcttaaaaatgtaaatatttggagtcctcttagctgcttctttacacatttcactctcagttttgttgctttgcttcttaacaggaatttgtaatcagcatgtattgcatttcttttatagttttatgacctttgtgaactgttcagaactggaggtcaggttcctgacacaaactacatatttatggtatgtaaacaccagtgatatcaagtgcttgtttaaaatggaaaggatctgacttattaaatgtaaattgcataataattctttaccatgtgacagtccctatttmrgtatattaaaagatgtgtattagtccgttttcacgccgctgataaagacatacctgagactgggcaatttacaaaagaggtttaatggacttaacagtttcacatggctggagaggcctcacaatcatgcagaaggcaaggaggaccaagtcacatcttatgtggatggcggcaggcaaagagagagagactgtgcagggatctcttgtttttaaaaccatcagatctcatgagacttattgtcatgagaacagcacaggaaagacttgcccccatgattcaattactttccatcgagtccctcccacaacatgtgggaattcaagatgagatttgggtggggacacagccaaaccatatcaaggtgattgtatacttttctacatttaactatgtcctctaattaattgccttagtaagccactgtagatagggttgggttgtagctgtcagtaatggttgggcataaaaaataacccagaacccctggtttaaggcaaaaatcttcaattgactattatttattcagacttttcgagcattcatttttatctctcgttaatctatggatggattaatatacacacatacacatttgctatagatgtttgcttttcttttggaatgtaatgttactgttgaactttttctggatccttctctcattttctttccttctgaaagtttctgggtcactttcttattttttttttttgagacggagtctctctctgttgccaggctggagtgcagtggtgcgattggcttactgcaacctctgcctcttgggttcaagtgattctcttgcctcagcctcccgagtagctggtattacaggcgtgcgccaccacgcccagctaatttttgtatttttagtagagacaggatttcactatgttggccaggatggtctggatctcttgaactcgtgatccgcccacctcggcccctgccttggcctcccaaagtgctgggattacaggggtgagccaccacgccggccactttcctattctttcagctgttttcctattggtgtaatattggcccaagtcagacattaatgggaagtgtaaatagtatattatcatatatggttgttaaatgcaaaactgagcctagaacgctgttataattatggtatttgcttttacaaaaaatttttttcttcaagtaggcaactcttccaatacagttaaaatgattcttaaaataaaaaattattttacctgggcatggtggtacatgcctgtagtcccagctacttgggaggctgaggtgggatgattgtttaagctcaggagttctagaccaacctgggcaacatagtgagaccccatctctaaaaaaaaaaaaaaattgaatttttaaaaattaaattacttggccgggcgcagtggctcacgcctgtaatcccagcactttgggaggccgaggcaggtggatcacctgaggtcaggagtttgagaccagcctgaccaacatggagaaaccccgtctctactaaaaaaaaaaaaaaaatacaaaattagccgggcttggtggtgcatgcctgtaatcccagctactcaggaagctgaggtgggagaatcacttgaatccaggaaggggaggttgcagtgagccaagatcacgccattgcactccagcctgggcaacaagagtgaaactccatctaaaaaaaaaaaaaaaaaaaacttaaaaaatactggttagcagatgaccaaatcaactaatgtaggtaatagaggattgaaaaaatggtggttttgccaggtgtggtggctcacatctataatcccagcactttgggaggccaacgtgggtggatcacaaggtcaggagtttgagaccagcctgaccaacctggtgaaacccccgtctctacaaaaaatacaaaaatcagccgggtgtggtggcggcttgtacctgtaatcccagctactcaggagtctgaggcaagagaatcgcttgaacccgggaggcggaggttgcagtgaaccgagattgtgccactgcactccagcctgggtgacagagtgatactgtctcaaaaaaagaaaaaaaagaaaaaaaaatggtggttttttttttcagggaaagtttttgagagaatggcacagcagattcttgtagatttccctggaatcaaaaatcttgtttgtataaacatttaatagaaaaaatttgtttacgtgtattttatttttttgttaaaatcaaatttccaaataattcagtatgtaactctttattgtagttataaactatatgtttgtacagtttgatataatttgaaaagaatattgtggctattgtattgtttgtaactgtaaacttttacttcacagggtgattttgtagacagaggttactatagtttggagaccttcacttaccttcttgcattaaaggctaaatggcctgatcgtattacacttttgcgaggaaatcatgagagtagacagataacacaggtctatggattttatggtaagaattcctatttctctgattctgaatattattttactttcctctttggaaaacaaagctacacaagtcatacacatgctttatgtatattattttccccacatcctcactccttcactcctcccaaacaattgaaaatcttatgctcgagagaagaccactgttaactttttggtgtgcatctttctagatctgtgcctcaaagtgtagctggaatcacctgggttctcattaaaaatgtagattgccggccgggtggggtggctcacacctgtaatctcagcactttgggaggctgaggcaggcggatcacaagatcaggagatcgagaccatcctgaccaatatggtgaaaccccktctcttctaaaaatacaaaaatgagctgagcgtggtggtgtgtgcatgtaatcccagttactcgggaggctgaggcaggagaattgcttgaaccaaggagtcagagtttgtggtgagccgagatcatgccacagcactccagcctggcgacatagggagactccgtctcaaaaaaaaaaaaaaccaaaaaaaaaaggagaatgctgggcctcaccacagatttattaatcaaaatattttggagtgggaatctagaatctgctgaaggtgaatgttctgcacaaatttgagagtccattctcatccattttgtatgtgtgtgtgtgtgtttatgtgtgtttatatatgtacaaacacgtgcacactaaaatggggacatacctgattttttcactttattaatgttattttcatggctgcttcatataccatatggatgtagcataattgatgtatcagtttttcctctatcgttggactttagagttgtttttaagctgctgttatacatccttttacatatatctctgtatgctcactccagagaatgctaggacctcagggatcagaagcagaacttagtcataaacagcaaaataggccaggcgcagtggctcacccctgtaatcccagcactttgggaggccgaggcgggcggatcacctgaggtcaggagttcgagaccagcctggccaactaaaccctgtctctactaaaaatacaaaaattagccgggcactggtagggggaggggggagggatagcgttaggagacatacctaatgtaaatgacgagttaatgggtgcagcacaccaacatgacacatgtatacatatgtaaaagaccgacacgttgtgcacatgtaccctagaacttaaagtttaataataaaaaaaatttagccgggcatggtggtgggggcctgtaatcccagctactcaggagactgaggcagggagaattgattgaacccaggaggtggaggttgcagtgagccaagatcgctccattccactccagcctgggcaactgagccagactctgtctcaagaaaggaaaaaaagcaaactagctaattctttaaaacttttatttggttgaaagagagagagagagagagagagagagagagagcgagcttattaggaagccccttcagggaaatagaactgtcaagattatgaatttggattttccttgagcacaattaagacagatattgagagatttggaaacattaattgcagaaccctttagatttaaattttatattttgaattatcttctttcattataaagataggctgggccaggtgtggtggctcatgcctgtaatcccagtactttgggaggctgaggcaggcagatcacaaggtcaggagatcgagaccatcttggccaacatggtgaaaccccgtctctacttaaaatacaaaaattagctgggcatggtggcacttgcctgtagtcccagctattcgggaggctgaggcaggagaatcccttgaacccgggaggtggaggttgcagtgagccgagattgcaccattgcactccagcctggatgacagtgaggctgtctcaaaacgaaacaaagcaaagataatctgaactctcttactcttcagtttgtctgccattatcaattagagaaattttgagaatttattgtttttatataatttttttaatacgtgtaaagttaggtaatatttatctcctttctacaggtgactttttattttcattcacaaaataaacaccaattgaaatacaacttttggattcttttgcaaaataatcaatattttggataacatactatgatattagctcagtgaaaacagtactaaaactaatgttataaaaacacacacacctactatatatatgtaactaatgctacatgtataatatataaaatacatattgttatatatggctaatatatgacttttttttttttttttttttgagacggagtctcgctctgtcacccaggctggagtgcagtggtgcgatcttcgctcactgcaagctctgcctactgggttcacgccattctcctgcctccgcctcccaagtwgctgggactacaggcgcccgccaccatgcccggctaatttttttgtattttttagtagagacagggtttcaccgtgttagccaggatggtctcaatctcctgaccttgtgatccgcccgcctcggcctcccaaagtgctgggattacaggcatgaggcactgcgtccagccatatgacatatgttttgaataagataattttagttattataggacttatattgattttcaaggaataaaatatccctatatgactttacactgggacttcagttcacactgataaacacatactgggcagttactattgagccaagttcaagatccctgcctgcaacctgagctcattgttagggctctcttatggcaagtttacataacaatcttgcttcacgtagatatataattgagaaaatcttggggattggtcataacctgcagacttctttcctatatcattttcagcttcacttaaggcaatagtgatatgtcaggtttttttttttctaaaattatggaagaagccaaagtacagagcttccatggtgttaacaaaagaagtgtgtaccctattaactatgtagacagtcagggtacagtggctcacatctgtattctcagcactgtgggaggctgaggtaggaggattgcttgagctcaggagttcaagaccagcctggacaacatagggagatccccatctctaccagaaataaaattagccaggtgtggtggcacttgcctgtagttccagctgttcagaaggctgaggtggtgggatcgcttgaacccaagtggttgaggttgcagtgagctgtgatcgcgccactgctgattgtgccactgtattccaacttgggcaatagagtgagaccttgtctcaaaaacaaaaaactacgtaggcagcagaaagagtgttcaactgagaatttgtaagaacctgattggcaatctgtcctcagttttgatccactgaagctcaagtgtttagtcgcacgatttgcagaaaatctcagaagagacaacttagccctgagaagagttaggaattgctcatgctcctataactaaggatcctctaatttgtttgatctgtttatcctgctagaattgtctccttaaataaatttatctgcttaccagaattgcctaatattaacataactgttaaaacatttgcttcaggttgtgtgaaattagtatttaactcttctaatgatagcattttggctaataatttcagctgcttcttaggtccattccaggaatgaagagcagtactacatccttaggaaatacagtcatgtgccacataatgacatttcagtcgatgatggactgtatatatgacagtggtcccatagataaaacggagctgaaaaattcctattgcacaaatacttaccattgtgttactatttccttatgatatttagtacagttacatgctgcacaaatttatagcctatgagcaataggctatatcatattgcctaggtgtgtagtaggctagaccatctaggtttatgtaaggacatccgatgatgttcacacaacgatgaaatcacctaacaatgcattttttagaatgtatccccatggttaagggacatayaactgtatgtagttagtcactagcgttcttttggctctatgtggaggtcctagcaggactaaatatgtgtcatatcttgctatcctagtttaagctgaatttctgttgtactgaaggctgctctagtattggatatattgtttatttttattagcagattcattaattaaaacccttctgtttctttcacagatgagtgccaaaccaaatatggaaatgctaatgcctggagatactgtaccaaagtttttgacatgctcacagtagcagctgtaagtttctatttttaaagtctcatgtacgttcctgccaataacacattgcatatttttatctagttgtcatctcaattatattgatakctttagtattcactgatgagtttagatatgcctgaggttatatgttcaactctttgttatccttttttgctagttaatagatgagcagattttgtgtgtccatggtggtttatctcctgatatcaaaacactggatcaaattcgaacyatcgaacggaatcaggaaattcctcataaaggagcattttgtgatctggtttggtcagatcctgaagatgtggatacctgggctatcagtccccgaggagcaggttggctttttggagcaaaggtcacaaatgaggtaaagccaacatttttggaaatgtaatttgtggattgctaatgggctgcatagagaactatggtggccctagataacaaacttgtagtctagcttactcaaaatatggtggctgtggatattaaatttctagtttagttattaacgtatgtctttctttaatggttaaataagatgacacagtgaaagcacctactccagcatccatttggtaataatgtataaagtaaatgttctttccttttttttttgtttttgagatggagtcttgctctgtcgcctaggctggagtgcagtggcgtgatcttggctcactgcaacaacctctgcctcccaggttcaagccattctcctgcctcagcctcctgagtagctgggaccacaggtgtgcgccaccatgcctggctaatttttgtattcttagtagagatgggatttcaccgtgttggctaggctggtcttgaactcctgacctcaggtgatccacccgcctcagcctcccaaagtgctgggattataggtrtgagccaccgcacccggccagcccctttcctttcaagtactgtagttaagtaacaaaatggcaagaccaagataggcaatacttttttttttttttctcaaagacctcaaatcacacagatacagacactttattagtttcctctacaagagacaataacatgaatctttttttttttgagacaagagtttcgctcatgttgcccaggctggagtacaatggtgcaatctcggctcactgcaacctctgcctcctggattcaagcgattctcctgtctcagcctcccgagtagctgggattacaggtgtacaccaccacgcctggctaattttgtatttttagtagagacggggtttcaccatgttggtgaggctggtcttgaactcctgacctcaggtcatctgcccaccttggtctcccaargtgctgggattacaggcgtgagccaccgcgcccagcctacgtcaaatcttttttttctttttaacagaaatctctgttcatttgaaaagccaaatagatccaaagaaagaagatgaaaattaaatacttaaattaatcaaaaggcactatgataccacctaaaacctactgccacagtggtagtaggctaaggaagatcaagctacagcaaatcatgtaatgtgaatgttagcgattacatagcaggaagcacatttgctttccagaagactacggtacagtgttcatttgggcccaagaggatctttggccaggaaaggatcaagatggatgaaggtaaagccaaatcaaaggagtaggtacaaaagagaatccaagctacatagtcaagcagatgatgatggatcaggcttcttcctcccaagaaacatttgctgcgctgtgctgcctcccccctcaaccaccccccaccccctaccccatggctgctcaagcccaactgcctactcctgccttacagggtgctcagccaccgggactaggtttggggttgcccagggctcttgccataatttagcatagaccttggggagaactgctcacacatgggttggctttgctgctggttgttctcaacaaagaaaaccctgaagcattcacatgcagagtagtctgagcttctccagtcacagtcaaacacccccacacaacatcctcaaaagtctgaaatcttgtaacagctgagctatagttaaagctgcaaggctcacagaatcatcaaggaagccagaatgagacaatgcagataggaagtcccagcagttaatctcaatccttctttcttcatttcggataagctcagatatacctgatgtgggatatasmaagctacwstggagcaagctgggtcttctgctgaattcgtcatcaaataccaagggaaaacaaggggtggggtggattttattcttaaaaagcctcagaagttactgtattataaagggacatgactgaataggtaagaaacrgattcttcattgtgaattttcctgatggcttctgcaaggctcatagagatgttgatcacctgtattttggaayggtgcttcatcttgtcctcctggggtatgttattggtgactactactgctttaaagcatgcgttgttgatgtgagaaatagctggaccagagaagattctgtgagtcaagatagcataaactttggtgactccagctgagagaagtttgtcagctgcatggcagattgtgccacaagtgtcaaccatgtcatccgcaaggatggccaccagatccttcacatctcccacaagcaccatgcggtcgacttcattggccttctttgtgaatcaaggcaaagtccacattcagcctgtctgcaatggaggtcactctcttagctccaccagcatcagatgaaacaatagtgcagttcttctgctcagagatattctcccttatccacttcaggacacctggctctgcatacagatagtccactgggttatcaaaaaagccctgaatttgagaagcatgtaggtccatggtgataatatgatctgcgcctgccacagatagcatgtttgcaacaagcttggctgagattgtcacctgactctttattatcctgctgggcataagggaagcatgggatgactgcagtaagctggctcgctgaagcagtcttgcaggtattagtcatgatcaaaggcaccattaaattgtcattgattttgccacaaccactctgaatgatgtagacatcctttccacgtacacttttgccaatttccacacaggtctcctagttgctgaatttctcaatcactgccttgccgagctccaggcccaggcgatcggcagttttytgagataagccctggtgggagctgccgctgaagattttgatattcaggatcctggccaactaccctaagcactcttcactaagtgatcactgctgctgcagagactgcaaccaaagtcggcccagagactcaatactaatctctttgcgatgctactccgccatcttcaagataggcagtactttgaactttcaactgttttcagttaaaacacacacacacactttgaactttcaactgttttcaattaaaacacacacacacwcacacacacaccccttatattgggaagtgctccagcatcataatgaagtcaaaaaactagattctgatcctgcatcagtgtatcttaatttagataagttatttatctagtctgagcttttgtttccttaagttgcaaaagaataatctctttcagaattattgcaacatctacatatactaaaccttcagtaaatggtagatactgatagcaatatctttattattaaatcagaaaacacaaaattttgtttcatagtacctattgaatgctttttcttccagaaatttctaactgtttatgtagctgtacagtttccatagttgtgcacttgactcaggccaaaattgctgtttgcctaaacttattaaattgttggagataattatagagtgygttctataatcttgatgcctttagtagtaataggatttggtattttatttaaatgattatgtaggccgattgttttttaagtgctaagtacttacagtgcctttctaaattgcagtttgttcatatcaacaacttaaaactcatctgcagagcacatcaactagtgcacgaaggctataaatttatgtttgatgagaagctggtgacagtatggtctgctcctaattactgctatcgttgtggaaatattgcttcgatcatggtcttcaaagatgtaaatacaagagaaccaaagttattccgggcrgttccagattcagaacgtgttattcctcccagaacgacaacgccatatttcctttgaggccttcgcccatcctgctgacccatttttctgccctcttcttaccccaattttcttgtattaccctctacaatatactttttattgagcactttgctgctgaaatgctgcctcttgcctttttttttttaaattttaaattatctaaatttattgtttgttgtggtgtctatagcaaagtttttctatcaattttcccccatcccatccccaccctggactcatttgagaagacttgagaaatgtcttaatactcacactgctgcatgtagctcttgcttatttactggtctgggaaacaggatgtgtttcctttttttaaaagccaattgacagattacacctaaatactcctccttttgtatcattcagccttttgttttagtttggtaagttttaagaaatttcagcagcaaagttgttattcagtgggcacgatggactccaaatgcctcaagttatgtatacctgtcccagatgtaaacttcattgtcctttgttggatgatattttaaatggatataaaataaattggtctaaagggctgccctccttgttgtgtttttaaattttagttaaaaactgctacagcttatgactttgtactttaagataattgtattgatcttttttcagattccttgtattttttaataaagtaatcttaaataaaactcagataggttaagtgttagaaattttaaacagcttacattgttagcgtaaagttatcttttcttttttcctaatcagagttcttgaccctttggttattgagtttaaaacttcaattgaaattcaatagtatttatttttkaaaaaaatcactaaactgtgcctaaagaacataactgccatattaatgttttggtttatatcctctatagtaatagaaaaacatttaatacttgtaatgctgatgtgttaatttgataccagttgagtagaatgtgatcaatccagtttacaatctatcatgagtattattaactaaaatctatgtgcttttcaataggaatcattcttctcttgctgtaacacttgaccttaacttttagaaagtgttcatttttaaactgcaactggaaaggttgaaaagttaggactcttgtatttgtgaactgtaatctgaagcagattatttaaagtgtagaaaaagaaacaagttcttcttttttgcaaaggtctgtgataccatatttcagctttgtgtaagtaatttgaatatccaaagggttgtgatgatcagttctgaatatgcaactgtccacttaataaggacaagtattccagtatctcttatgactgtagtcataaatgatgttggaatgtacattttgtgaaatagttggtatccctttactatgattaatttttgttattccaggaaatacttgtgaagccagccaattaataaagcactttagcatctgttcaggtagttttgaaaaccmacttttccccttcaggataagaacttccaggttacctaaaaatgcaataaaaatctttatagtctaagcttcttggcatataatttttcatcagggttttcttttattaattgagcacaatactgttttgatttaatttttttccctcaaaccacccagctccttacatagtttttaattatatagctatmtgaaagaggtggctaagacatttgctgcacacacttgaactaatgttgggtcagtagcttcgtgttactgccctgatcccagtgtaattcaggtggaaaggtatttttatctcacagggatatgtagctatgtattttactaattgtgaaacactggaaattaatgatgcagacaacttggtgtggtctttgaacagctctctgcagtatttttttttttcctgttaccataaattgtatttaagtgcttgctttccacttaagttgtactaatagaaccggtaactcccagccctccctgtttgacactccttagcttagattgatgtagttgtttttgttatccctataatgtgacttttatttttaagtcattgtgtactgcatttgtttgtcactagttgggcacgtgccaataatattctctccattccttatctgccatctctgttttgcctgatttctcttcaactgaataatggctttttgcatggaaaaaatagtttttactattagacgtgtaaagggaagagagagctaatgtattggactttgtgagcctacaaggaatattttggatccctccaataaataagggctatgtactatatgtactatatagagttatcatgtggtggaagatacttgcaagtcatagatttatgggcaggaggatttgttactscctatatctaggctgaatgtaaaatcccttatgttgtatcaatgggggtaaaaactatttttatttgcctatgatatacttggtttctaataaagtgccctaggctctagtgagaactgtctactttgaattgccatttactccctttcctcctttggccgatatgctcttggctagctttttataagttaatgtgtttccccaaaaagtttcactactttatattcatttgagtgtgatcctaaaacacctggatcaacagtacatctcatatgcaatctgcatcagctcctattctgtctggatgtctagaactgttggaagattttgacgtcttaagccctaggttttgctttgggaaataaggtttgaaatattgttcattgcattaagatttgtgtgtgtgtgctttgtaagcccagaaccaggttttggaaaatgcctgtactgtgaaagcaaattaggactctttctgagcctctttcattgtcagaaatagaatcactttccatcagcttccaggaaattgtgtrtctggagtcgaagagatttracatcaagaatccagatttttaaatgtaattgttttttaaatgctaatgtttgtaaagcaccttcagttcttcggatgaaaggtgctatattccctcagtgtaaattaataaaaagrttacaggaagtttgtcaaaaaattcaatgcatagtctgtagtatgtcctgacaagaagttagcattttatataagaaattaaaaaatgcttattcctccacttggttgcttgactggtgaacaaaagtgaaacctttttttttttgttttgcatttgactctgagctaagtgttccaactctttaaaggcaatgtttattgttacaacctcgatccagtgcccagaactatgcttcatgagatcatcacaactctttaaattgtatatttacagtgtgtagtgatgctgacgaaatacacggtagtaaaccaaaaagaaacatttggaaagtcccctagcatgatgccagacacactagatgcttggggaaggttggttctgcattcccctcctgttttctatttccgtatcaatttattggtgaatttgtgccctcatgagagtaggcttatgctggcttagatcattcaaatgttttcttaattcaaaaatgcatgacatttatagatttgtgttgtcaacaaaaatactacataagtatattccactcaatccctaggcacccactatgctcagcagcactgtgcttttgtatataaatggtgggttataaaagactgcatggaggcattatggaatagcacaggctttgggatcagatctgggtgaaaaccccagctctgtcatgcagtaatagcaactaacctgtatacagcatatgtgctaaattgttatgttctctattttgtgatgcccttgctgtatgggtctatgactatattaccttttattttttttttttcttggtagagatggggtctccctatgttgcccgggctagtcttgaactcccggctgaagagatcctcctatctcggccttccaaagcactgggattacaagcataagctactgtgcccagcccaaacttcaaaaaaattaataaatcttgttcatccttctctagaacttttctccccctagatgaggaaataggcttagagaggataggtgacttgtctaacgttgcacaagagagctggaacttgaatccctagagggcacaccagagtatttctttagcgctctattttaagcaatattggttattgtagttgtgtgaccctgaacagattgaattttctgaatcttaagtttctgtgtctaaaataagagaatatcaggcagggttaatctcactattaaaaatagcacacacaaagcacccagtatctggtccaaagctgccttttattaagggctcatactcataggccatttgttcaaattcattgtagttgggaagaataatccaaggcaatgtataattgctaacatagtgtagattttgtaagtacaacacatctggacaaggaaatgtttgatgtaggatggagtaattggggaagataaagaggaagtgtgaattaagtgtggactggaatgatgggatttgtatgtcttacagagttaaaataagcagagatcacttggacacaatgtgaagactcgaggatcctttttgggaaggcgtaagaaatgaataggtcctgttttattgacaatatctgccatatatcagtgaggattggtcaattatggaagatgctaaaaagcaggcaatggatttttaataaggaatataataaatgtatttcaagattacttccctagtgagttgatgatcccccttcgtctgacacaaattattctcgagttctttcctctctctggcttgataatatgggtggaaactgttagttgagattgaggtgatttgtggttctgtgactttaggattacgtgaaatactaatttgggggaccaacagagatttgacattttttcaaagcaatttttcaattcctactacaatttaccgtcagtattacttcataaatggaaagtcattttaccattaaagatgtaggtaggaccatctcagaagaaaagacaactctttacaccaaatacatttggttttgtgaaaaactagtatcctaatttttgccgcttatggagatcaatgagagattttccccaccccaatgttgacatgtactactcgacgctgtcatattattgaggcataaaagatgttctaataaaatggaagtgacttaagagaaagttttatgcctcctcccaactctgaacagatgctgagaatataccaaacaagttcacacaggagtagagatttagagaggccttcccaccttcaagaattttataatacgttaatgagctgagtcttattttcaaggatggctttgttaaagcagaagaagggtaactatgcttatgaaaggcagttttgcatgcctgtttgtcaaaaaatacagtacaatttattttaaaattgattaattggtgtagaacttgcaatggtcacacaatcaggatggtcagcttccattcagggatcaaatttgtccaggcctttcaaaatggaacacgttgcttttagtatggcattggttctgtttgtagtgctgatttttctttcatggtaattaaaaaaaaatcttactttcttaaaagcctgcacccaagctagtgagcttttctgcagaggattgagcatccaaaccatgctttattttggtggattcttagagttttctggctgggtcctttttgaggggtagctgtgagctgtgagacaatttcagcaagatgtagggacaaggatcgcattcgaggtggcttaaaaggaaacacgtttgtgagagttgcctcactgtctcacctgctagaagaaattgggagatttcagggcttgttttcggtcctggcgtggtgcagaggtggaggggcgccagcaggtgtgtggtatgcaggacgcagagccaggagaacctggggcaggtgtctggagccgggggtgcagttcctacttttagacgcatggtggcgctagggtctcctccggccctgctagcaatctctaaggcacctccgccgccacctgcagtctcaaccaaacctctgggtgggcagcgcgggatgtgacgggccgagcgtccaatcgactgacagatttccgtccacactactgctctagccaatgggagccgaggagaggcgcggaggaggcgggccccgcggcaagcctggcagaggcgcgaggccctcctcccgcctctccgcctactccagcctccgccgcctcagcttcccgagcgagccctgcggccgccggagcagctcccgcggcggagcaggagccggatggtcagaggagcccggcagccccagcagccgcggagtcgcctggcccccaggtgcgggggctgggtggaggccggggttggggatggggtgggggccagggagcgggcccaggggcagcggctcggggcggtggagcattcggggcgcagagaccggaggggcggggggtgcaggctggggggaccttgggggcgcctgcaggcggcggcgcgggctgggcgcgatcgcctcctcgaggccaggtgagaggggcgtgtgagggaaggggcgccgaggggtgaggctggcggcgcggggccgggaggggcaaggcgggcgcgcccccggaggggccgtggaatgcgggggtcgccgggcccggagaggcggggcgtggagggggcagtgcacggtcgggaacgggtgggcacaggaaaggggaggctaggggggcttgcgggggtgacgaggcagacaatgagtaggtggaggtgggtgattttggggagctgggctgtgacgagcaggggtcgaggatggggtgagggaccaggaaggtttgagctcagggggaattgggggaacggtgagtcccaggaatgctaggtcttggtaaataggggaaacagggcatgaggcgtttgtaaggtcagatctgggcttggcgagcctgtggtcccagagggtggtctatttagttcttgactggcacggtagcgccgggagatgttttcttgtatgttacttttagttaccgtcttatttgtttggtctgcagactgactggcacagtggagaaaccgcctcgaaaacggagaagcaggtaaggcagtgccttcctattttgcttcatgtttttctttttgcttggctgcacctgtgccgtactgcataattgtatactgtcagtagatgaagtttcttatttatcccccttttaaaagaatataaccacatgcatgatttttcttttgaggacttcaaattactacctctacagtcgattttttttttcttggtatctaagataatgtgggaaatcttgagaaatcctacttttttactttttgatgttgtgtaaggatctcagctatttttttttttaaccttagccataatttcattttctccagcatctctgtttaaaaagctcatcttggctggggtggctcatgccttcaatcccagctctttgggaggctgaggcaggaggatcatttgagcctgggagttcaagaccagtctgggcaacagagcaagactccgtctctacaaaaaattgaaaaactagccggtcccataaatatatacacctactatgtacccacaaaaacaaaaaattaaaaaaacaaaaaccaactagctgagcgggtgttgtggacctgtagtcccagcttctcaagaggctgaggtgggaggattgcttgagcccaggaagtcaaggctgcagtgatgcagtgagccgtgatcatgccactgcactccagtgtggggaacacagcaagaccctgcctcaaaaaataaactaattttattgagcatctactatgtgccaagtactgtgtacgaatgctctatgtgtatcttctcctgtaatcctcaaagaaccctaagagaatatgtagtgtcactattttacagaagagggaactgcgacacagagaggccaaatatttacccaaaatcatgcatctagtaaaagataaaaccaggatttgaatccagacagtctgactccagagcttaagctcttaactgttataccataatgctgctaataaatatgcaattgaaagtaggttttcttattgctttatcttttgtcgttggacactgtgtagttaactcgaatggttgaaccttaggaaaatagaagcaaagagtttaagtagtccacaaacaaagtgaattagtccttgagtaatggagatgaagatatatttatcacataaacatttttgactgcattccatgtgagaggtactacatagcaattctgtgtagtcattagatgattcctttttcacagatgttggcattgacctagagaaagtaagctactgtagttatgtgaccagtaggactactttcatagttaatatctggcaagttaatgatgttaatacacagaaaacctcaatagtaaatagacacgaaatgctgatggtggaagtgccaacagagtttccttgtcacactttaggcctgtactgtccaatccagtaaccatatgcagggtgagcactcaaaatgcatctagcatgactgaggaactaaatttttaattttatttaattgtaattaaattaacttgagaaactgctacttgatcagctattggaaaacgttcaagtatgttttgaacaacttgggtatgtgagtctgtatttttcatccgtcattttatgaaatctaagtatatatcaaatatttccaatgagaatttagggtctgaaatgagataagtataaaatacatgctagatttcaagttagtacaaaaattgaataaataaaatttctcagtaactttttatattgatgacatagtgagacaatattttaggtatattggagtaaatacttttttttttttttgagacagggtctggctctgtcatccaggctgtagtgcagtggtgcaatctcagcatactgcaacctccacctcctgggctcaagccacccagccaattcagcctctggagtagctgggactacaagcgcctgacacctcacccagctcttttttttttttttttttttgtagagacaaggtttggccatgttgcccaggctggtctcaaactcctgggctcaaatgatccaaccaccttggcctactaaagtgctgtgattacaagtgtgagctgccatgcctgg

SEQ ID NO: 7053 - DNA, 117985 bp, Homo sapiens
ttattaaaattaatttcatcaacttttacttttactttttttttttttttttttagatggagattccctcttgttgcccaggctggagtgcagtggtgcaatcttggcttactgctacctccacctcccaggttcaagcaattctcctgcctcagcctcccgagtagctgggattacaggcatacaccaccacacccatctaattttttgtatttcgtagagatggggtttcaccatgttggtcaggctggtcttgaactcccaacctcaggtgatccgcgcacctcggactcccaaagtgctgggattacagacgtgtgccaccacgcccagcactttttttcttttcttttcttttgagacagagtcttgctctgtcaccaggctggagtgcagtggcgcgatcttggctcactgcaacctccgcctcctgggttcaagtgattcacctgcctcatcctcctgaatagctaggactacaggcacacgccactatgctcagctaatttttgtatttttaatagagacagggtttcaccatgttggccaggatggtctcgatctcttgacctcgtgatccgccctccttggacttccaaagtgctgggattaccgcacctggcccctccttttaccttttttttttttttttttgagacggagtctcgctccgttgcccaggctggagtgcagtggcatgatcttggctcactgcaacctccccctcccggattcaaccaattctcctgcctcgtccttccaagtagctgggactacaagtgcatgccgccactcctggcaaattttttgtattttagtagagatgggggtttcaccatgttgcccaggctggtctcgaactcctgagctcaggcaatccacccaccttggcctcccaaagtgctgggattacaggtgtgagccactgcgcctggctcctttcaattttttttttttttttttttgagacagagtttcgctcttgttgcccaagcgggaatgcagtgctgggatcacggcttaccacaacctccgcttccctggtgaatcaagcgattctcctgcctcagcctcccaagtaactgggattacaggcatgcgccaccatgcctggctcagtttttgtatttttagtagagatggggtttctccatgttggtcaggctggtctcacactcccaacctcaggcaatccgcccaccttggcctcccaaagtgctaggatcacatgcatgagccactgtgcctggctgggcaagtcactgaactttctgatgctctattttctcgactgttaagtgcaggtattcaaaacaccaggtatgttttcttcctctgacaccttgctggatgctttgtccccatagtggtgacagtaggggaagggaggctgggcacccacctccaggcttgctgaggtttggaggctttagtgcatgtgcttatttggctggttttgtgagccgtgtgttttgtgtggttggtcaggagccatgattttggcctcagttgtccaggcatccacttttcaaccaccatggagattgagtgcttactttgtgccaagctctcttctctgcttggggatcccagctggagagacaccacagtgctccccacccaattttcgcaggtagaaactcttaggcaccaaaaggctagctctgctggttggagacagaaccagaactaaaacctcggaacatggttgtttttttttttgttttttttttttttgagatggagtcctgttttgtcgccaagctggagtgcagtggcgatcttggctcactgcaacctccaactcttgggttcaagcgattctcctgcctcagcctcccgagcgattacaggtgcccgccaccacgcctggctagtttttgtatttttggtagagacagggtttcaccgtgttggccaggatggtcttgatctcctgacctcgtggtcctcccgccttggcttcccaaagtgctgggattacaggcgtgagccactgcgtctggcctgtgtttgttttattgactgtagtggcccttctctgcccagttcaacagcatggccccagagcctggcacagtgagcaccagagtgcaggtgcccagtgaatgaacggacgaactttgattcccagggctctcctctgggctaagcactttgcagggatggatgactgcatgccattctctccatgaggatggtcagggaggtaggagatggctgagctggatttgaagccaggtctcttctctcccaagactcctagcttgccttttttttttttttttttttttttttgagacagagtcttgctctgtcgcccaggctggagtgcagtggtgtgatctcagctcagtgcaagctctgcctcccaggttcatgccattgtcctgcctcagcctcccgagtagctgggactataggcgcccgccaccacgcctggctaattttttgtatttttagtagagatggggtttcaccatgttagccaggatggtctcgatctcttgacctcgtgacccacctgcctcggcctcccaaagtgctgggattacaggcgtgagccactgtgccctagcttttttttttttttttttttttgatacagagtctcgctctgtcgcccaggctatagtgcaatggtgcaatctcggctcactgcaacctccacctcccaggttcaagcagttctcctgcctcagcttcttgagtagctgggattacaggcacataccaccaggcctggctaatttttgtatttttagtagagacagggtttcaccatgttggtcaggctggtctcgaacgcctgaccaagtgatctgcccacctcagcctcccaaagtcctgggattacaggcttgagccactgtgtctggccctagcttgccttttaacccttccctcgctgtgttgccttcagcaagtctccaaggttgtactagttttctattgctacattaccacacatttagtggcttatgtaactttgttatcttaaagttctggaggtcacggtggttggcagggctcattttcttctggaggctttaggggagaatccattccttgtcctttgtagcttctagaggcagcctgcatttctgggcgtgaggtcctgcgtcattcctttgtcagtcaatatgatgaactccgcttcatcaaccacatcttctccgactccgaccctccttccttcctcttgtgaggacccttgtgattccacctgcccaaccaaataatccaggattcatctctgcatctcaagatccttaacttcatcccatctacagaatcccttttgccagagaaggtaccattttcacagatttcagggatcaggacttggacatctttggtggggggcattgtattgcctccacaaagtctacttttcttctctgttggatgggcacactagtgtctgttttatgggtatgtcgtgaggattacctgagtgactctatagggagtgtttagcacagtggctgtcacatagtaagtgctcagtaaaccaccctgttactgttcagcctcctcctatcattttgttttgagacagagtctctctctgttgcccaggctggagtgaagtggcgtgctcttggctcactgcaacctccacctcctgggttcaagtgattcttgtgcctcagcctcccgagtagctgggattacaggaccccaccaccatgcccggctaatttttgtatttttagtagagacggggtttcaccatgttggccagactggtctcaaactcctgacctcaggtgatctgcctgcctcggcctcccaaagtggtgggattacaggggtgagccaccacgcttggccttacaaataaagaatctgaggcttcagatagtttatttcttttttgcttgtttattttctttctttttttttttttgagatggagtctcactctgtcacccaggctggagtgcagtggcatgatctcggctcagtgcaacctccgccacccgggtttgagcaattcttctgcctcagcctcccaagtagctgggattacaggcgactgccaccatgcctggctaatttttgtatttttagtagagatggggtttcaccatattggtcaggctggtcttgaactcctgaccgcatgatccacctgcctcgacctaccaaagtggtgggattacaggtgttagccactgcgccagccttacagatgaagaacctgaggctcagtttatttatttaatttattttttatttgtttatttgccttctatcatttttattagttgctgggttttgagcactgggccaattctatggccttcctgaagatggtcaaggaacaaaatcgaaaacaaaaattagggttacatcctccctgttttgtagagatagcgaaatattgaagacattggcaggggaataatgcaaatttgatgatgtaaaacagagtggccggcactgtaatcccaacactttgggaggccaaggtaggtggatcactttagcgcaggagttccagaccaacttggccaacatggtgaaatcccatctctaccaaaaatacaaaaattagctgggcatggtggcagatgtctgtaatcccagctactcaggaggctggggcaggagaatcgcttgaatctaggagttggaggttgcagtgagcagagattgcggattgtgccactgcactccagcctgggggacagagcgagactgtctcaaaaaaaaaaaaaaagaaaaaagaaaaaaaggataacactgaaaatgaccatggataaaatgtaggaaaattcagagaattataaataaggctataaaagtatccagaattctactccccaaaaactaagctttgttcaccagcctcagttctggagttaggctgaagtgggttaattttccttctgggtccagcagtgtggcctggggcacattctctcaaagcctcctttgtctcacctgtgaattagaacaataatatctgcccctgggttaggattaagtgagacaaaccacgtgctttagcatagggcatggcccgcagctggtgcttagagcaaccgtgactggaagagggtgggatgatttgggtgccaggccctaacattttttttttgtatttgctttttgaaattgcttttatagttggttaggtgtctaaaaaagtaagaaccctcctccgctctcccaacctcaaaccacggaggtaaccaagacaggagtgcagtctcccggaccttttgttttgcaatcacacaaacacacaacactcaagaggaggggcttattagttttcattttgtaaaaatgggacaaagtacccatattgtgcaacaaccttgcttttgaaatgaaaaaagtattatttctgcttcctttccgttcatataccgtatacatattttaacaaaatccgggcttagtctgttctgaggcgctgcagttttgaagggggagggggcggagatccgggctcgctcccccgtcactgccccctccatcccttccccctctttccgggcgcccttcccccgggcccaggccgggcccatgcccttcccaggccccttctcttggctcctggcccctcctccgggtctcctccccgatccccgctctgccccgttctctcccgcctctcccgccgtccccgggcccctccccactcccagccccctcccagccccctcccgccgctccccgcccctcccccctggccccagccctcgcccggcccccgggccgatcccaaggccgccgctcccgggaggcgcggcagggggcgctgcgcgggcccaggttgcgggcggcggcgggaggaggaggacgaggaggcgggggcggcggcaggcggggggcggggagccgagcgcgagggagcgagcggcgagacaggcgccgaggctccaccgcgcagcgacgagcgagcccgggaggagggagggagcgagcgagcgagcagcccgcgccgccgcctcgcaatccgccgccatcccgccgcccccgtgcccgaccgccgcccgactgccatcgcccggcccggccgcgcccgcggaaccagaccaggtgggtcggggccggggccggggccggggcgtgggggcggcggcgctaagatggaggcggcgcggcccggccgggctttgtctcccgcggccgccgccgggggcccgggggccctgcggccctgcccgacctttgtccgcgagcgcggccgccgccgcctccttcccgccgggcgcggggctgcggggctgggaggccgcggggcctgggggcggcgggcccgggcgcgctcgccattgttgtggcggcgccgcgcggcctcaggctcgggcggggtccaggggccgcgcgactccctcagggctcgcccgccacccccgtacccccgaggccgggccgggctgcagaggccggaggggcgggggtcccgggcccgcagccgggtctcggggttcyggggccggcgtctttgctccccgccccgcccaattgacggagcagcgcgcccgaggcgggatcctgcggggtcgggccttgggtccggggcgctgagcggcgttcgcggggccgttcctggcgcggggtgggccgggccccggcggcgctaaagttggcggctgggggagggaggcgagcggccgcccagtctcggtgtgagtgcgggaaccagagggttattttcgaaatgctgaatgctccatgctaaaaatgtttaataataaacaggatgtcgccactcggggcctgccagatgggtttttttttttttcctcctcttttgcctccccycaacccccaggagagaaattcagccctgttgaaactgtgggcctctgaagagtggatttgccttaagaggtggatttttttcctttttcttttttcctccttctaaatatcgkgggaggtcggagcccacctttaggcaagaattggaggtgttttcagtggtgagcttgaaggaagtgggagaaggggggctggggagtgtcttttgctaaatggcttcctgggagaaatctttaaatgcctttggtttacaggactgttaaactttccctaagattttttttttctttaaggtttagtgtgcatttgatgtggctttgtacagtgtcatccagtttggtttttgtaaccaattgtgtgcggtcttagcatggtttttccgaatctcgctgcagccatttagtcatgtctatgcacagcgctgtggtgtaaggtgggactggggaggcccaggcattggggtgcagatcctgcttctttcttccgtaaacctagtgactctggggctgtctgaggcttcatctgcataaatcggggcgtgcaccctccacctggcaggtttgggcagcggtgaagggcctagcagagggcctggcacagttagtggttcctcctacggttgttggtataactgctgtcaagtcctaggacagacgtgagccccttgtggtgccacccatagagccaaactgtgcccatggatgccacaggtgctggcctaaggcatggacaatacagaaggaattcaaggcccaaacattagtgggcgcttatacagtgctgagcctctcgggaggcagggatgggaaaaagtagcatttggaggtctctagaacttagtagacccggagtgtgtggcagttggtcagtttaaggcagggttagaacagtacgagatgctcaggacaaacagacgcccaaggagtcctgccttctgaggataactgctttccttggggattggcagataatcatctgagagtgagtttctacttgtttgggcaagtgtgtctcttggagcctgcgcagctggattctggtcctcatcgggttacctttacaaagcaagtctctgaggctcagatcttgcatctgtaaaatgggaataattatgcctgccttgggtatctattagggctcttgggagcctcacttaagattcacagtgaattgttttctctccataggaaggtgatgaaatgtatgtgtttgttgattatctgtttttctggttcctttctccttccttcctyccttgccctcttcctctctccctccctccctttcccttccttttccttccttcccttccttcttttttcttttcttttctttttttttttttttgagacagtctcactctgtcgcccaggctggagtgcagtgatgtgatctcagctcactgcaacctccgcctcctgggttcaagcgattctcgtgcctcagcctctggagtagctgggattacaggcatgtgccaccacacctggccaatttttgtgtttttagtagagacagggtttcaccatgttggccaggctagtctcagacatccgacttcaggtgatttgcctgccttggcctcccaaagtgctgggattacaggcctgagctaccgcgcccggtcttctttctcttaatgcttattttttcctcttctcttggttgatggaactgtgacttccccaccccaaattctatggccggctaatgttttgctatggtgactatcacccatctacctggaagcaccagaatggcttagtacagctagggagctcagccagatctcggtgtctgctgtttgagattgtgtggaaggactattgctaagaagcaggagacagactgaacccagtgttggccacaagtgaggactgagacccaggtcacctcttggctgaacatgttagcttgttggtaaatggctctgcagtggttctgcattttaktggggaatttgttttggttcattttggcattcccgcaaccatcttgttggttttttggtaaaatgtggcaccccctccagacctcytagctgtggaactgagatattttagcagggtcctgtcatcctttgatttttcctcgcttcctgcctcttggcccttcctttttgtctgacttcactcgggcccagtctggctctatactgttaactggttagttaggccaggagatagtcgctgcctctcccatgagcttctgcatacctgtgaattttggttatctgtggccccctaatgctgattgcatgcccttgccttaggccctaagcccactgtgtgggcgtcccatctcgtacagtggccgtctccagcctccactgggcccaaataggtaaaaagaaagcctggggaaggaagagccaggaaacctcgggagagtggaatttcaggaatggcaggtcagaactggttccagcatgggtccctttgccttgtgcttagctgagggatttttgttattaattttttttttcctgttcaacactcctaacctcttttgaatttcagttctctttttttatcctgaaggattattttattgtacttttgagggtttttttttttttttttgccttgcacaaagtactgactcatgttgctaatggctgtggctgtatgctagttatatgtctcattatcctaccccttaagattgatcatttctgtgttggtttctatttcaaaccagaataggccaggtgggtcaattcatgtatttctgaattcrataatgaggcttccctaccgtgaaatgtacatatcttgtcatgggcggacaggtactaaatagagcctatctatactagattttaaaacaatggatttctccccaaaaaacaacatttccagcagacaatgggctttgtgctccaaatcttgtaattttggttttaaataaatttcatgtaaggaggcagggctaactagactgtcttcttttcagatcataacttgatctctttttaagattatttctgggacttgtacagcctcaggaaacttgggtctgtcattgggacaaagaaatacaggcactggctgtggtgttggagatgggagcgacatgggatatggtgagctttgtttctggtgaaatagaattgtttgtcattagctttaggtttaaaaggtgccattcagactggacctcctcacctgggagctggcagacctgggccttgccattggcgatattactgtttatacctctgggtggcacgtgggaaatctcttttgtgctgggaggtaggtttgtcttagtgtcttgagccagaagttgtggttgagctttgttctcagctgtacttgttggttttctgtgtgacctgagaagcatccttcgtccgagctgaagtgcacctccgaggtgctggcagcagcactgatttgtgaagcattgcgtgcagcaggagtagctggcagaacaaagcctatctcaagttgctggcggtctttcacatcttgtacaggacttccttccgttcttacctctgcagccagttgtgtggcttccgtctggaccgtcttcctcctttccaagataaccatcagtctttttctctgtggggctgcagcagcagtatttattgcatttttaattgacttgtcaggcaatagatactccttgagcacctatcatttgccaggcattgtacaaggccctttaaatacatttttcttgtggtagggcaaggtggctcatgcctgtaatcccagtacttggggaggccaaggcaggtggattgcttgaggccaggttaagaccagcctgggcaatgtgatgaaaataaaaaaatgcctcttaaaagaaaaaattagtagggtatagtggcrcatgcctgtagttctaactacttgggaggctgaagcaggaggatcacttgagcttgggaggttgaggttgcagtgagccgtgatcatgccactgcactctagcctgggcgacagagtgagaccctgtctcaaaagaataaaaagtaggtcgggcacggtggctcacgcctgtaatccaagcactttggcaggccgaggtgggcggatcacctgaggtcaggaattcaagaccagcctggccaacatggtgaaaccccgtctctgctaaaaatacaaaaattagctggatgccgtggcgagtgcctgtagtcccagctactcaggaggggtgaggctggagaatcacttaaacctgggaggtggaggttgcagtgagccgagattgtgccactgcattccagcctgggagacagagtgaaattctgtctcaaaaaaaaaaaaaaaaaaaaagtctgggcacggtggctcacacctataatcccagcattttgggaggctgaggtgggcggatcacgaggtcaggagatcgagaccatcctggctaacacgatgaaaccccgtgtctactaaaaatacaaaaaattagccgrgcgtggtggcgggcgcctgtagtcccagatactcaggaggctgaggcaggagaatggcatgaacccgggaggcggagtttgcagtgagccgagatcacgacactgcactccagcctgggccacagagcgagactccatctgaaaaaaaaggaaaatactgaaaagaataaatgccaaaataaatatataaatcacttgtgacctcaccatccagagctaactgcagtaaagttgctggtgtgtttctttcctctgataatgtctgtgttttctaaattagagcaatagtatatatacattgaatacacagttgatagcttgcttttccccttttaatgttatagtgtattcctctacgttatttttataattatataattgctattatacggatatgccataatttattgactcctgtattcgtagacatttagattattgttgccctcttttccctcctataagagaaactgtagggagcatctcggcatgttaagtcttggtccacgtggctgattatctcccataagtggaatttctggggtcagaggattgcaggyttgttcttctcttctggacaggatcggttgtctccttcagtctttgtcacctccctctccagccttgagcccaaggcagtctctttcttagttttttcttttttgaggcagggtctcactttgtcgcccagtctggagtgcagtgatgtgatctcagctcaccgtaacctctgcatcctgggctcaaatgatccttctgccttagcctcccaagtagctgggatcctataggcatgcgccaccatgcctgactaagttttgtatttttttgtggagacggggtttcgccattttgcccaggctgtttgtttttcttttcttttctttctttttttttttgagatggcatcttgttctgttgcgcaggctggastgcagccgtgcgatcttggctcactgcaacctccacttcctgggttcaagcaattctcgtgcctcagccttcgagtagctgggattacaggcgtgcaccaccacacctggctactttttgtatttttagtagagayggggttttgccatgttggccaggctggtctcgaaatcctgacctcaggtgatccacctgccttggcctcccaaagtgctgggatgacaggtgtgagccaccgtgcctggacacccaggctgtttcagactcctggactcaagtgatccctccgcctccgcctatcaaagtgctgggattayaggcatgagccacggcacccagcaaggcagcctctttcatgagccactaggttctggggggtctcagtcctggttaagccctttgatgagtggggcttgaggtcttactccatttactggtttgaacctggagaagccttttgtcttaaacagtttttgtttctagggacatggatgccccattgactcctggggagatcctggtctggtggggaggaggccctggagagccccccacctaactttggcctcatcctcttgtggtttctttctttctttttttttttttttgagacggagttttgctcttgttgcctaggctggagagcaatggcgcgatcttggctcactgcaacctctacctctcgggttcaagcgattctcctgcctcagcctcctgtgatttcttcggagccccctacagtttctctttatagcagttttcacaacttgtaaataggtgtttttttctttatttgaattttaaaaattgtggtgaagtatacataacataaaatttaccatttttaagtgtacagttgagtggcgtgaagcactttcacagtgttgtgcarccatcaccaccatccatctccagaacgttctcatcttcccaaactgaaactctgttcccattagatgccaactcccctcccccatccagtggcggcggccaccattcttaccattctttctccttttttttttttttttgagatagggtctcactgtcgcccaggctggagtgcagtggcacgatcttggctcactgcaacctcagcctcttgtgtagctgggattacaggcacacgccaccacacccagctaatttttgtatttttttgtagagacggggtttcaccatgttggctagtctggtgtcgaactcctggccttaagtggtttgcttacctcagcctcccaaagtgctgggattaccggcatgagccaccgtgcctggcctagtttttgtatattttattttattttattgagacagagttttgatgttgcccaggctggagtgcaatggcgcgatctcggctcactgcagcctctgcttcctgggtttaagagattctcctgcctcagcctcccgagtagctgggattacaagcgcctgccaccatgcccagctaatttttgtatttttagtggagacggggtttcaccatgttggccaggctggtctcgaacccctgacttcaggtgatctgcccacctcgacttcccaaagtgctgggattacaggcgtgagccactgtgccttggtctaatttttgtattattgttattatttttgagacagagtctcgttatgtctcccaggctggagtgcaatggcacgatctcggctcactgcacctctacctcccgggttcaagcgattctcctgcctcagcctcctgaatagctgggattacaggtctggctaatttttgtatttttaggagaaacggagtttcgccatgttggccaggctggtctcgaactcctgagctcaagcgatttgcctgcctcggcttcccagagtgctggaattacagccatgtgtaatcccatggtggcaatgttgagccaccttgccctgccaaccattttactttctttctgtgaaaccgaatactcttaagtacctcatgtaagtgagatcatccagtatttgtcattttgtgtctggcttatttttagcatagtatttccaaggttcatccatgttgcagcatgtgtcagaactaacttcattcttaaggcagaataatattctcttatttgcatgtatctaccacattttatttattcattcagcgacgggcagcagcctgtagatagttttgttttcatgtattgaatggtcctttcccccagtggagtgagtaaatgcatccggaagcagaattctgttgtttcccattcatcactgtgtgccaggtgtctgagaagggggtcttataggagcccacgcagaaaccaagctcacctcagtctgggtgtggggcagtcagggaaggcattctggaaaatgtagctgactcgaaataagcacctattgaaaatagtgtgctgagccctggaacattaaaaatgtgttcctatgtggaaatcagaaatgtatgggtcccagaagagaacttgtgggtcagcctgctttccagagagtgccgaggccctttgaatggtgaacattatgcaagcrttcttgtatggccagtggccagcagggaggagggcagagaatgactgtgcctccgggaagccggcgtcaacttcccgacacgcttcaggatcatctctttgtatagaaccatgggatggatcgctgcaggacctactggaaaaaggaggtcatctccaggactctttccatgggtcctttgtgtcttgcagaacttttttcggcaggtgttgtttacatatggttcagagcttaaagaacagctgtgttccaggccagggcagaaagcacaggcctgtctgggaggggcatcatcactcctgcctgcctgcccaaccgacctgtcggtggactgaatgggccaagtgttcagaagtccttgggaagaggatagtgtcctgaatcataatgtggtattttctggttttttgtttgtttgtttgtttttggtaaaatgttaattgcagaagtatacaggttattttatttatttatttatttttttttgaggtggagtcttgctstgttgcccaggccggagtgcagtggcatgatctcggctcactgcaacctccacctcccaggttcaagcaattcccctgcctcagcctcttgagtagctgggagtacaggtgcatcccgccacgcctggctaatttttttttgtattttagtagagatggggtttcgccttgttgcccaggctggtcgcaaactcctgagctcaggccatctgtccacctcagcctcccaaaatgctagaattacaggcgtgagccactgcgcctggcccatactttaaaaaaaaaaaaaaaaaaaattaaaagccaagtgtttgaagagaaatgaaagcttttccccaatgtcccaggcagtaaccattattgataaatttgctttgtttatccttctaggctcagtgcacgtataaatatggcctcatgtagggaggttttttaaaaaacaaaaatgggatatactatattgtattgcaacttggcattttcaaaatatcacagtatttttccatacgtatttttaagcgtaacttctcttatttttattttcagtaatactttttttttcttccttagggatgtgggggtgggtctcgctatgttgaccaagcttgtcttgaactcctggcctcaagctgtcttcccatcttggcctctgaargtgctaggattacaggtgtaagccaccacacccagccatttttccatattcatgtgaacagacctgccacactaagtgttttaaaaataatgttaggtttctaaaaaatatacaggtgtgtaaaagaagaaaaaatcgtttataatcccatggtttagatattcccagttgactttttttttttttttttttggtggtggggacagagttttgcttgttgcccaggaaggcaatggcgtgatcttggctcactgcaacctccgcctcctgggttcaagcaattctyctgcctcagcctccctagtagctgggattacaggcatccgccaccatgcctagttgatttttttgtatttttaataaagacgagatttcactatgttggccaggctggtctcgaactcttgacctcaggcgagccacccgcctcagcctcccaaagtgctgggattacaggcgtgagccactgcacccggcccccagttgactttttaaaaagaaaattcaagttgctcagggaggtataaaggctcttccccactctctctgaaaaaaaaaaccastgtgaggaagttcttgggattcctcccagaaaaaaacccacattatccacatgcacgtttgtattcttcaagcatgctgctgccctttcacgtgataaaatgtctcagcgtgctccctgacagctacgcagacggattatgttatctattttagcaactgcagagaatattttgtgggtatacttgatttaacctctgtctcctactggtggacatttgggctatttgtagttttggaatattacacaattttggtcaaactgtaccagatttgttttcaaaaacatacaatttgtatgtaagcatgtaagtgtgagaatgtggttctgcagtgtggactcttcaactgaatagctttttggtaagaattctgccagatttctcttcagaaaactttgtatcagcttatatgtgtgagcgtatgtttctggactatgggcttttctaaatgaacaggctttttggattgttttgggtgtgcacattttccaatcaaaagctactgtttgcggctttctgtggtgagcgtagggtctgatgttttggtgagcttgggcagacagcgatcagacacagcagctccgttcacagtgcagaagcggccactggaggagttgctctgggtgtcttgttaggtgaaggccactgtgggagctggaaggaggcgatagacacagccaggtctaaggttgattttctgtatcaagtaaaatgattgtccttgctgcctgttttcttccaactgttatacactggagcctggtgcataaaattcagagacggcctccattttaagttttctcatagccccgtctttcacagtccttggtggttttgttgctgttaatattcattgctgttggcgcttttgcagctcctgatagtggctgttgtgcatatctcacttctcgactcaacctcttggcgtcacttgccacccctcctgccccccactttggtttagttcttccaggagatcacaccattggttgaagtgactgcagaaatgaagcactggaatgcctgggtggtggtgtttcatcaggctaggctggcggggatttgtgctctggcaagaggaggtgcggtttggaattacactgctctggctcctgggggggttattgttagctggaattcagagagagctcgctgggagagttgggaatgccatgccccctcttcctggtggagagtagctctcccttgcaggcacagtgcagcaccccacactggargccctgctttggggtcagctgccttcaagtccaggttctaccacttagaagctgggtgacctggggccagcttttaaatctttttgaatctccattctcttcctctgcaaaatgtgatagtaacaccttcataggacctgggaaaggattcagagggtcatgtgctgcagagttgatagggcacctggcacaagacagcaggctctccatagaccgcagctattaatggttcctggattcagccctccccgggggcccgggggtttggagcaggcaggcttttgtacacttggggcttgtttgttacctaggtgttggggtttctaattatgtgctcagcactgtgctacatgctaaagatttggacccgtagcgcattgccctcacctcctggagctcagtcaccttaactagcaagggcctcccatgggcaggtgcatcagggctcttctgtacatctctccacaatgaacaccactgcggatgtctgttcccacgagcaagggcgtttgatagctggcagctgccctgtgtctagtctgttgtgttgtgttcttggggagtttcaggtaaatgtcttggaaggaatgaaggtaggcatgttaaggcagtttgtgggttctggctgcaagggagactgcagctgggccagcaacagccctgacttgacctcaggccgacaggagtgttcctttcagccacttagacctacctgctatgaggtcttgaacaaatcatgtcttttgctcctttaagtctcagttttcttatctgccccaaatggatacggaacctgtctcacagcattgctgcaaagattggcgtaatttctgggatgcagtgttagtgcagtgtaggaaacctagtcaacttggaacagtatatggtgttgatactatgttgctcagttcaccgagatcttaaaaacaatgtaacagttacaatacaggcgtgtcacagttacaatacagccttgctacaaacatcaagctccagaagtgtatagagtagaaagtgaaagtcattccttcttccctgctgtttctttataatatcaagagaggactgctgtcttaaccagttgtttttaactaaggggactgttttaactgtgcatatgaattctaaacctgaagtgaccactggaaggtgggaggtgtgactgtttataggtagaccttaatataagcaaagacatctcatatggctccttagtgtggtctcttcagctttttgaggggagaaaaggccattgtaattctttgcacaccctggatgaatcataatgttgtattggtaaagttcagcagtggcatagactgggtttaattaacaagtgctgcttccaaagatcccacagctttacaatttgctgttgacatggttggagggtgggggaaggggaaaggtgggcatgcccttagggtaatggggcagtgcaatacggttttttagacgcttcggggagatggtgggtgggggaggagagttgtgagtatagagttttgggtgaggtgaggagtctgtgggtaaggtgtttataacgtgtgtagtgtatttggagtgagggtgcatgctcccttttcccaccgttctgaagtcacagcttggcgtacctgggaatgcccttggcgtagtaatccctggcccttattttggatctgtcctttattcctttgttactttagaactggcttcgccggcgattgtcctgggtttcctctagtgtctgaggcttggaggagaagtcatgcacggcttctggggtccagtcctttggcctttgctggagattatttataccaacccagcccttttagctcccacttcagtatttttggatttatttattttcatcaaagagaaagttcctttgtctcggctgagttgatgaacgtctctatagcagcaaacacccgagggcgtgtggcccagttctgagaagctgtggtagagtgaggagggcactgtgtgaccctggttctcacttcacctctgagcctctgttcccttatctgcaaatagggggtgatagtaaggacagccaccttagtggcggttaggaggatgctctctgcagctgtaatgtttattcgggcagcccgatggagtatttcctcaccggggtaacgggaggcattgcatccaggttggagtggttgctgaggagtccttcggtgcttctggtgatagtcattgttggccctaatccgcctcctgcagctgaactgtgggagtgccacagctagagggggtgggaagaagaggatggggttgttgtaagtaggctgtgttctctgcctgtctgggcatttgctgccgaagggcgtctgactcccatgtaatttacctaatgagaggtctcgggccttgctggttactctgtgcggggttacaggtctcaactcttttctttctatggacacaaacgaaaaatgtgctttgcagagatgccaggttgtaaagaaatattggccccagcatgtaaagatacatgtactggagtgttggttgtggcattatttgtggtgggacatgttcagttggacatttccgtagggaaatgggtaaataaaatacgatgccactgtatagtggaatgctgtgtaggcattaaaaagaatgaggtagatcactatgtgtatttttatcttttaatttttaagtctgaactaaacagaacttatgtatatttttagaaagatgaccatgtrtagaaagagaagaacccaggttgaataatacagtagcttcctgcatttgtagagaagaccatgactgctaatatgaatgtgtataagcctggaggctgtccaccagtttgttaacactgtttaccttttgagttggattgttttcttgtgcacacattagtatcttttttttttttttgagacagagttttactcttgttgcccgggctggagtgcaaatgatatgatctcggctcactgcagcctccgcctcctgggttgaagtgattctcctgcctcagccttccgagtagctgggattacaggcatgtgccaccacacccagctaattttgtgttttcagtagagacgaggtttctccatgttggtcaggctggtctcaaactcccaacctcaggtgatccacccccctcggcctcccaaagtgctgggattacaggcatgagtcactgcgctcagccacttttttttttttttttcctgagatggagttttgctcttgtcgcccaggctggagtgcaatggcgcgatcttgtctcactgcaacctccacctcctgagttcaagcgattctcttgcctcagcctcccaagtaactgagattacaggcatgtgccacgacgcccggctaattttgtatttttaatagagatggggtttctccatgttggtcaggctggtctcgaactcccgacctcaggtgatctgcccgtcttggcctcccaaaatgctgggattacagacgtgagccaccgcaccttacaggtgcctgccaccacgcctggctaatttttgtatttttagtagagacgggatttcaccatgttggttggccaggctggtctcgaacgcctgaccccaggtgatctgcccatctcggcctcccaaagtgctgggattataggtgtgagccactgctccctggccacattagtatcttttgaatttgtcttactgaatgtgtattagtaacatgtattggttacaaagataataacaaaggtaactcgcatgcatttcagtacagtggagcctgtgggggccgggctgggctggggcagctgctgtgttggtggctcttttcctggtgccagatcaaacttaccgtgaggtaagagctgctccaggcttcgtattccacgcagacccatccagtgcaccctggctcctggtattgggccccagtggttactgtgaatttaactagttcaatcgtctgtctctgttgatgtgtcagtggccctcagaaactgctttgtttatctggttagaaggaacaatccaatacaaatgctgtctccgatttctcttctctactaaatcagattgtacaataaagaacatagattttggttgcatttgcagagtacttctcatttgttaattcaccattatttggaggtggaaaaggaaggagtaactgaaagaagcccatgtatttcatgtatttcttttatttgccaggtccttgttaaattttgacgccagagagggaggcctttgtatagcacatctgtccaactgttcatcactcaccatatgttgaaatcatcttcttccccaccccccttgctaaattaaccgcatcttcaaagcgggaggtaggcaggaacttggagaccgcatatgggctttccagccagagtcctcttcaggcttcagcccaagcctgcctgcctgtgagctagatgaggagaggggctccaggcagaccctgtgggtgaggagcccagagctggtgcagactctgggggtgtgggatgctgtattagagtaaagataacagtgccagcgccagttcacaccccaccgcaggccaggcctgcacttcacattcacctcaggtccccaggggtgctggcagggccagggagtaccgtgggcaggtggggccattctctggggcccaccgcatgggcctcccaatcatggcagcaggcgtcgttcttccagtgcccaacactgcccaagtaagtctggatgtcacatcaccccgggttcaggttcagattttttagactcactaactggatgatagtgaccttgaactagttatttaaccttgcggagccttcatgtctataaaatggaagtactaatacccttctctgagtggtttatctattttgtttcttcgttcaaggaactaattttattcattttttcttttctttttttccttgtggacctcacctgactggaggagctcctattcttaaatgcaattttatgcagatgtatttattacactccctagctctctttaggctttttcttcattgtttctgctttcccttacatttgcttgcattggtttttttctgatttcttaacttggatgcttaatttatatttcattttttttcgttaggaatttggtttttaggatatttcctctgagtacagatttatttttgctttgaaagttttcttacggccagtaatcccagcactctgggaggccgaggagggcggatcacctaagatcaagagttggagaccagcctggccaacatggtgaaaccccatctctactaaaaataaaaagaattagctgggggtggtggcaggcacctgtaatcccagctacttgggaggctgaggcaggagaatcgcctgaacccgggaggtggagattgcagtgagccgagatcacgccactgtactccagcctgggtgacagagcgagactgtgtcggcaggggaagaaagctttgttatgcagtgttctgtttttcatttgtgctattttcttttttttgtttgtttttttgttttgttttgttttttgttttgtttttttttttgagacggagtcttgctctgttgcccaggctggagtgcagtggcgcaatctcggctcactgcaagctccacctcccgggttcactccattctcctgcctcagcctcccgagtagctgggactacaggcgcctgccaccacgcctggctaattttttgtatttttagtagagacagggtttcactgtgttcaggatggtcttgatctcctgacctcgtgatccgcccgcctcggccttccaaagtgctgagattacaggcatgagccactgcgcctggcctcatttgtactattttctagatattttgcaggtgtggttttgaattccacttagattcaaaacttttttagtagagagtgttaggttttccagctcttggggttattatttctactttcatcatgtcttgttttattgcactgttgtcagttttactttacagaatttgggatttttcttttcttttttcagacagagtcttgttctgtcacccagggtggagtgcagtggcacagtcacggcttactgcaaccccaaactcctggattcaagggagtctcccaagtagctgggatccaggcatgtgccaccacacccagctaattaattttttttttttttctgtagagatggcgtcttgctgtattgcccagactgatctcaaattcctcacctcaagcgatcctctcacttcggactctcagagtgtggggattacaggtgtgagccactgtacctggcckgaatttttcttaaagtctaatatagtcacttttagaacatgtttgctcatctacgttgaccgtctctatcttgatgggcttgatctaccaaggtggacaggcttctgtttgttctaatgtttgtactttcattgtgggtggtcctcttggccctttaaaactaccctgctctgctgcttgctcttttgtgtctgtctcctttgattcaacattttttttgtgcgtttcatctgtatagttgtgtatgtttatttgttcttattgtaggatggtttttggttatgtggatgtaattatccatgtgacagactgagctcatttccatagttcttccaaacaatgctgccacagtgcgggtatgtgcgtgcgtgcgtgcgtgcatgcacacgctgttgggtatatacctaggtttggagttaactgggtcatgggtgagcatatggtggctgcatgggcagctgccagctctcagtgatggcaccaggtacatgagggtcatccttgctctgctgrcgctgtaaagatgttgcttctttgcaaattaaccgctggattccctgtaattctagtgaaaatcccagcagcttttcttttgttttagctgtttatttcagaaattgacaaactcattctgaaatttatatgaaaatgcaaaagggccaagaataatcaaagcattctctctctctcttttttttttttttttttgagaaggagttttgctgttgctcaggctggagtgcagtgagacgattataggtcactgcagcctaaaactcctgggctcaggagatcctccagcctcagcctcccgagtagctgggattataggtgtaaaaagtaaagtagaggtttcattttaaagattttcctcttcatctaattaggaataaatagtaacttcttttagaagcaaaatttatttaaagacctgtgctaacattcttaaatatctgctagctgtaataaataaattaatgtactttatattcttagctcctacaatttagcctgaatatttgccctggtatgcttatactggtccaagcaagcattaggtcatagcctgttcctttttcttatttgaaggtgtttttacctttcttagcattccacaagttactttctccttcctttgttctcctctgccttygcctcttttaaaaagttctaagttcctagccaatcgggacagatacagaatgtgaggtcctgttccagccaatggaaactgaacgcagtagggtggacgcatcaggttgtaaatgaccctgtctcctttgttcggtggcaaaactgctagcgactgtaccctttctgcagaaagtataaaaatggccttgctgaggaaattaaatttacgttcaagtgctatttctttacagcgtcagggaacaagcatttcaaacataggcatgcaccaacacacccagctaatttttagtggagacgtgctctcactgtgttgcccaggctggtctcaaactcctggcttcagaatcatcctgccttggcctcccaaagtgctgggttacaggtgtgagccacctcacctgactaatcaaagcattattttgtttttgagatggagtttttgctcttgttgcctaggctggagtgcagcggtgcgatcttggctcactgcaacctctgcctcccaggttcaagcgattcttcggcctcagcctcccgagtacctgggactataggcgcacaccaccacgcccagctaatttttgtatttttagtagagatggggtttcaccatgttgggcaggatggtcttgatctcctgacctcatgatccacccgcctcggcctcccaaagtgctgggattacaggcgtaagccaccacgccgggccttaatcaaagcattcttgaagaaaaacaaagctgaaggacatatcctaccaaatatccagactttataaaagctgcagtgattaagacaatgcagtgttgccaaaaagatagacaaataggctgattggagggaacagtcttcaaacaaactgcacatcagtagtcacttaatttatgacacatgacaaagagaaaagatggccttttcagaaaaggtactgggagaactgaactctccataagggaaaaaaatgaaacttttatcacaaatcatatcgagaaatcagtgttaggtagatcatagatgtaaacatgaaagataaaacaataaagcctctagaataaaacataggatatcttcatgattttggaaaaatcggacacagaaagcagtaaccaaagtagaaaaatttgatacattaaactgcattaaagtttgtatcttttgctttttacattgctccaagaaaatgcaatcaatactaatttgtaatttcctggaaatggtagataatccatcctgtttgttcctccagaagcctctatcctgtttttaccaggactgttgcccctctggcccatggtgcggctaccatcttgggctttttttttttttggagatggagtctctgctgtgtcgcccagactggagtgtagtggcctgatcttggctcactgcaacctctacctcccgggttcaagtgatcttctgcctcagcctcccaagtagctgggactacaggtgcctgccaccacgcccaactgatttttgtatttttagtagagatggggtttcaccatattggccaggctggtcttgaactattgacctcaagtgatccacccgccttggcctcccaaagtgctgggattacaagcatgagccaccgtgcctggctgctatctcgggcttctgttggtcgtcattctgggacttgtttttgtccctccacacgtggtccttatttcctggatcctatttgtattggttggataatttggacataatgacagcaactgtcttttttgtttgtttttttgagtcggagtttcactctgttgcccacgccggagtacagtggcacaatctcggttcactgtaacctctgcctcacaggtttaagcgattctcctgttttcagcctcctgagtagctgggactacaggtgtgcgccatcacgcccagctaatttttgtatttttagtagagacgggggttttaccatgttggtcaggctggtcttgaactccggacctcaggtgatccacccgccttggcctcccaaagtggtgggattttcaggcctggccaacagcaactatcttaataagaacrttcattgactcaagtaattgcaagtccagaagtagacaggtttgggattatttgggtgcacccattctgaaccagtcattagaaccggagctgggcttctcttaggccaggcccccgctcccctggggctggggctgggtcagcctccctcaggctccatcaggaaggaggaagggagaattaactgctgggtaggcagacaggrgtggtcccactaatattgccagtccctcggtttgctctcttgtaaaaatcctattttgagtccttatgtaggtctgaaaaagtctttttctgtccctacacttgacttggtcagctgagtattggattctagattgaaagtcatttcctagagaggatggtgatactggtaagaagtctccatcattgttgctcctgagaactcattgccattctgattgttcctccctgggaacttttttgcaagagggatgacttttagaagcttttagattctcaaactgtatccctaacatgctgaaatttcacattgtactttgtgttctttttatatccattgttctgagcacttggtgggcctttgaagtctcggctacttggctacttcaactctgggaactatttttggcattttttacttgataatttcttcctctccttccccccaccccacccccatgtttctggaactcctagttaaatctggactcctgggttaatcctttgattttgggggtaggatgtgactagcattatcccatcgctcattttctgagatttgtttggcttgctcttccacctcttcttcgttttcttttctttcttttttttttttaagacagtgtcttgctctgttgcccaggctggagtgcagtggcgccatctcggctcactgcaacttctgcctcccaggttcaagtgattcttctgcctcagcctcctgagtagctgggattacaggcgcatgccaccacgcctgactaatttttgtatctttagtagggatggggtttcactatattggccaggctggtctcgaacccctgacctcrtgatctgccgcctcggcctcccaaagtgttgggattaacaggtgtgagccactgcgcctggcctcttctacctcttctaattggattattttactttagaatagtttagctgtacagaaaagttggagttcccatatagcctactcccagtttgcccccattaaacacatcttatgttagtacagtatatttgtcacaactaatgaaccagtattgatacattattattgactaaagtttatgctttattcagatgttcttagcttgtacccagtgtctttttttttttccgttctaggatgccacattaaatttaatcatgtccccatagtttccactaggttgtgacaattaagtttttgatgaccatgacagttttgaggcataccgatcagatatttggtagaatgttcctcgatttgggatttgtcggatgctttcttcatgattatcctgaggttatggggtttgggctataacatgcttaattgtaactagggtgattcttgttttctagttattttttaagggggaaaaaaagtttatttcatgggtgtggtatcttctcttgattttatgaggatattaattttataatacatatttttaatctttgatctctggcactgtctgtttcctctgttattttgtctatttatttggtgtctgtcttttagttggtcatctctcagatacctgtggtctcgggcacacagctgattggaaactgcatggactcttcagagtgggtgcctggatgggaggctggccttttcatttcttgaatcccatgttggtgtatataggttttctttctctggggctggtttttcaagagaagactcccttgtctttgcctgaggagtggagggtggtgtggtgtttgtctgctgccctcctgtgaggagcagcagaagtggggggcctgaagcttctgaggtttgccactcaggttctctcttcacttttttggggggtctyctttccccaccccttccccctctgaccctggtgttctcaagtctagacttctcttgtttaatgtatccagtgggggagggaaggggccgtaggtgtctagctgttgcacttgcagccttcagccagtccccccacatctgagttcccaccttcccctttcatgcaaggtgcctgccacctcctacgacctcctgagccttctgatatcctgggtgaagggaggttttcccctctgcagtcctcatgttgtggcatctttcagtctgtgaaatctgttcatacttttgccccctccttgccaaaactgtccctgttgtttgggttcttcgctgttttcattttcgggggttggaaggatgagctgtacaagccctcagtctttytgccatgtttaaccagaagccccctgtattctaaatagtgtgtctgtgagttggatggaattgaattaagggccatctgtgggatgtgtgtgcgtggagatgcgtgcacagccctctttatgtacacgggtgtgggagtatttttgtccgagcaccactcgactgccttttccccatgatcgagcatgactctctttttgtgtcagaacctcaagaactgccatttgctgtggtcgctacagagcatggtgaggcccagaggtaaggctggttttgatgtctggtcattggcacaaccttcttacacatatggagggtgaacttctctgtccttccctccagacgccttgagaaagggagtccaaagccccggaggcagagagttcagccagctgcagggggtgatggtgtcaccaccactatctgctgaactcctctgtgccaaggagcattgcatcagggtgctggtggcacacctggggatcatcatctcttccttctaaagcagctgtctgtctccactttgtcactgagaaaacagtaagtgcaggaggtgacatttggcccctggccccctcttccttctggaaacttgtgtgtagagagagagctactgcctgcaaagggggttcatcctctatagggagtgtttgccccagagagtgtttacctagaggttaggtgggagtttagattcagcgttggttattatttgggggatgatagaaccaatcttggttttttttacccccctgtgtttttttctgtgagtctctgtgaggacatagggtttaggaaggtggggaggaatgctttctcctgggctgaaggaagtcacttgctgccagagacaggccagcctgatttgtcttcttcttttgtgcccagattccagcttgctccaggtgacatcattcctacaggggaaaggctttgggtgtaaacaatggcactgccgggcaagccagggacagctgcagctggctgggacgtggccttcctcctcggtgtgtgtgtgctcagctcagcctttctgccatcctgagttttctttaaaattatcttcatagttttaaaaaacaaatagcaaatctgtttggaattaatacacagtgttttatgacccttactgctgaattcttttgaaatgggaagtcaaaacacagtagaacacgggcgaggcagatgattagtattgcagcgtgacagcacctggaatttaagtggctcatgctggtgaagagagatccagggatctaatctgggagctggtttagggatgatacttttctgtaattttttttaagatttacagtttttctgtatcaagcgtatatttcttttgttactaaaaatgtgatggagaaataaatgagcagtactgggattatccacttccataaggccatctattgtaacatcagagggtgactgcagtraatagctacgtttattgccccaaagtgggaagccttgaaactggggcagtttagtgtggtttaaattagtcacagtagagtgtttatctcaagagggttttctgagaatctccctgcatctctgtcttcctgagaattaaaggggtccactagcagatcctaaacacctgggagtttgtcctcatggtgtttgaaggtcygctctctgtaccagcacccttaaactgtgacacttaaactgtgacacaccaacgtggggacgggtccccagtgcacaggaggaggtagaagcacaggtgcctggtctacccagcaccacccagagcagccctgctggggaacggaggcttccctggctgcataggagtctggagagatgagcactgtcaaaagctgataattgggtgggctggagagagaacaagagcagaaccacggtgaggtgacagccgccattggtcgagtgcctgctgaggacaagtgctgggtcaagtgcgggggtctttgttctcttgtttattccttacagcagacctgggaggtgggagattaacatggtatgttcatcttaatccacgaggaaatagacctcaagtcacagtgtggagtggaggcgagatgcaaacccagtgtttcagatttgagactgccgggggtggtgtggggagaaggctgggtggcggcgtggggccagcatgttgggccgggggggtctggacttgaccctggcgcggtggggggtgatgtggaaggtgtgtgagcaggtgctccccgtggtctgtgttgctgtgtgagccgtggctctggtggaggggacccagctgaccatgtggttccggcaaggggcttgcaactaagtgcyggagaaccccccagttctccactgggggtggggagtgcttcttgtgtcctcaccatacgcctcaatgcttctttgtttttcctttcctcttattttaaatttgttgcttcctatatatgctgtctccttggggtgcgtggtcttytggggatggctcatgtctcccataaggaacactgggttaccaggaaccccactttccccactctgtggtttcctcaaaccttattttcaggctgtttattcttggagagtttgtgcagtgttctgcagggacctcacccatttgggcttctgcaggtagaatgcctggattgtgctatagctgagcccagccttcagctttccagatgagccagtgcctcgctcttagggaacagaaatgtgggcgctttagggctctttgaaagccacctctgcttttcttttttctttttctttttctytttctttctttctttctttctttctttctttctttctttctttctttctttctttcttttctttcttttttttttttttttttgagatggaggctccctctgtcgcccaggctggagtgcagtgcatgatctcggctcactgcaacctccacctcttgggttcaagtgagtcctgtctcagcctcctgagtagctgggattacaggyatgcactaccacgcccagctaatttttgtattttcagtagagtcagggtgtcgccatgttggccaggctggttccgaactcctgacctcaggtgcacctcagcctcccaaagtgctaggattacaggtgtgaaccgccacacctggcctacccttgcttttctgacagtgccacgtagggagcctctgcaagctggaggtgtggtgggggttgggttaggctgtcatcgagtgaggcagcagaagtgtcccctcaaacccacctggttcccccaccctgatatgcacacaagttcatcatcatcttgcaatgtattcatgtccatactttaccctctgaaccagaaggcagcaaactgcaaccccgattgcagcccacctcctgtttttgtaaatatggctattctcttttatgtattgtctggggctacttccatgctacgacgacagcctcaggcagagttgagcaattgcagcagagagctctgtgtggccagcaaagctgagtacatttactgtctggccctttacagacaaactttgcagatctctcctgctgcaggagtgcagggtggagtctcckgtctccatgtccccagcaccaagtgacacagggtctggcacacacattggtcagtaaacgtttgagtatttgaagtaggtgaggtcgccttacttacgttaaaggtttttttgccagacattgattggtgtgttggggaaagatagacttctttcatcttgtccctggatttcgtggtgatggttcttggctgagacttaacaagtaaactgtccagtggccacgtccttttctggcccacattgttacttcctgaagcgtttatccagcctgctatcaatttccatgcctgtggaatcatgatttttggtatgttttgtctagcagtgggatctttccgttcgttctataaagagacattccacctttctctctcactgcccccagcctcacggccagggcacgttgcagcactcattgtgtccccctgaggtcgggccttgggcctttgtcactattgtgagtggaggaaagagccatgaaatctctaggtgcccacatgtgaagagtgaagtgactggatttgccttgggtgagaatctggctgttggtggcatggcgtaaataaaatgcttgtttttgaagctgtccaggatcatcatctgyacagttggccagaaagcagctgttgagcctgggctgacttatatcagaacccattgtgccgcctttcgtgtctgcaccggtactcccactgggaaagcagattccaggtcgtggggcattcagtctgcagcctggtggcgtccagtgcagcctgggctccaagcctggccctgcactcggcagccttgtgaccttgggtgcgttacttttcttttctttctttcttttttttatttttttattttattttaagatgggtgtctcactctgttcccaggctggagtgcagtggcatgatcttggctcactgcaacctctgcctcccgggttcaagcgattctcctgcctcagcctcccgaatagctgggattacaggcgcgcgccaccatgcccagctaaattttgtatttttagtagagacggggtttcaccatgttggccagcatggtctcgatctcttgaccttgtgatccacccaccttggcctcccaaagcactgggattacaggcgtgagtcacccgcatcctgccgggtgtgttacttttctatcctgattgactgaaccttaatgtccttctctgtcaaacaggcagtagtatcttccagaaagtgctgttatgaaggggagtagagcacatgagggcttagcagggtgcctggcccttgaagtgctggtggccactgatctcccctgaatgcggagccgtagtggttcctggtgaatgacaggtcatcccagtgccctggtcaggcatctgacactggctggcactcaagtgtggagtgaaattaatcctgttacccggaaatggcttttgataaattaattacagggcagagatgttccctctggtggacagatagcaggaacctgttggacaggcgggcactgtctggagaggcggggcttggatgtgaagttgccgttgttggcgaatctttctggttgtttttgttccagcacagcctgggagcacttctttagattatgtgccaaaatatgcaacctggattctttttcaatgttcttttctccattgatttgttcccaaatctatcttcatatgggttttaggcccctttttcatctgcctaatggcaatattttcttttaggctggcaagtttcagaatgctctagctccccgtggcagtgtctctgagtggcttctgtgggaaaggagggcttacagcaagggggcacataggctggacttctttccagcaggcatcattgggttgtgtctgcttcatatgtcatactgaggttccaagtcagattctgttggagagaaaacgaattctgttgcctacagaagggagagaaggtgaggtaaagccgtggccataagccaggtttgacttatgctaacctgcgaggacttggtgcgtctatgccgggtctagtcccacagacctaggggtgagtcagagctggatggaaatgcctcagaccmgctggagagctgttctcttgcctcagccggcttcctgcttcacacttggatgctcaccggtgctttctccctgcctccggataggctagyttagcttggggtatgcatgtgtgttgatggatggaaactcggcaggtatttgaagcctggtaaagccctgctaacagcgccctggcctgatgtttgtgaaaagcagctggcaagcagtggggccagatgcttgtgggcggggccagcctcgcactcagccggtcagtggagatccctgcaacgggaggaaatccgaatgattctggtttattttggagttgtgtccagtgaaagatctcctgactgccgtaaagcaggtgtgtatacacaaactttgtaaaggaccaggcagtaactgttctgggctttgtgggccatagatggcctcttgcttatttctsttcaggctgccggcccctkctctgatggaacgttgaggctggaagattctccacttgtgcagtcttcactgtggagagtgtaattgtcctcgtaggggctgctttcattcactgcagcagtgactcgcctggttccttgttggtatcccaagtttatataggaaaataggatccaatcccaggcttgtaagaggtggctgattccacagtaagccatttctttctgctacgttttttttttttagacagatttttccctctgtcgcccaggctgtagtgcagtggcccaatctccgttcactgcaacctccacctcccaggctcaagcagttgtcctgcctcagcctccccagtggctgggattacaggcrtgcatcaccacgcccagctaatttttttaaatatagttttagtagagacagagttttaccatgttgctcaggctggtcttgaactcttgggttcaagtgatccgcctgcttcagctccccaaagtgctgggattacaarcgtgagccccggcgcctgggtagtaaaccattatttctgtggctgtcagttgtcaacattgatgggcttgattttagggtcagtgcttgtctaggccactccttcagtagatgaggaaacaggtctagagaggccaatagcgtgcccaacaagtgcaaaacttggttaaaaggttgggggcactggctgggtgtggtggctcacgcttgtaatcccagcacttcaggaggccaaggtgggcggataacttgaggttaggagtttgagacaagcctggccaacatggtgaaaccctgtctctactaaaatacgaaaattagctgggcgtggtggcgcgcacctgtaatcccagctactcgggaggctgaggctggagaatcacttgaacctgggaggcagaggttatagtgagccaagattgtgccastgcactccagcccgggcgacagtgtgagcctctgtctcaaaaaaagaaaagaaaagaaaagatggagggcattaaagaaaacattgtacaagcaggttaagtgcagatgttagtccaatgtgtttcttgtactggcttcaccaaggctctgtgattggaaggggtggaaaacatttcacctggaacacagaaggtgcccagttaatatttgttgggtggttgaatttactgggaggacatagttcaaggaatagttgyagacagactgacatctcgtaaacacaattctaaatttctaggagagtgtctcatgtttgggcraggttttttgttttttgagatggattctcactctgctgcccaggctggagtgcaatggcgcaatcttggctcactgcagcctctgcctcctgggttcaagtgattctgctgccttcaagtgattctcctgctttagcctcccgagtagctgagattacaggcgtgcaccaccatgcctggctcctttttgtatttttagtatagacggggtttcaccatgttggccaggctggtcttgaactcctgacctcaggtgatcctctcgcctcggcctcccaaagtgctgggattacaggcgtgagctaccacgcctgacctgagcaaggtttttttccttttgttgccactagggtatggggaagtatgaatcaaaccttctcagagaagtgtggtgtgtgccaggtagttacactgagagctgtgtgtgtccattctacccttttccctcaggcctggtcagcacagagtcagagaaagtagaggccagggcaaacagcttttaagaggacttttgttgttgttgttgttgttgttttttgagatggagtttcgctctgtcacccaggctggcgtgcagtggcgcgatctcagctcactgcaagctccccttctgggttcatgccattctcctgcctcagtcccccaagtagctgagactgcaggcgcctgccaccacgccaggctcattttttttgtattattagtagagatggggtttcaccgtgttagccaggatgatctcgatctcctgacctcgtgatcacccgcctcagcctcccaaagtgctgggattacaggcgtgagccaccatgcctggcccccgaggactttttaagtaatatttatataaacaaatgtatttctggtcagttttcagaattaaatgacattttagctgggcatggtggttcacgcctgtaatcccagctacttgggaagctgaggcaggtgaatcgcttgaacctaggaggcagaggttgcagtgagccgagatcatgccactgcactccaccctaggtgacagagtgagactccgtctcaacaaaaagaaaaaaaatcacatttgatttaagaaatcattcgatgttgccaggcacggtggctcatgtctttaatcccagcactttgggaagctgaggtgggtggatcacttgaggccaggagtttgagaccagcctgggcaacatgatgaaatcttgtctctactgaaaatacaaaaattagccaggtttggtggcacacacctgtaagcccagctactcaggaggctgacacaggagaattgcttgaatctgggaggtggaggttgcagtgagctaagacggtgccactgcactccagcctgagctacagaaagaaactctgtctcaaaaaaaaaaaaaaaaaagaaaaagaaaaaaagaagaagaagaaaggaaaatcattcaatgtgaaatcttgccatgcctttctttttcttgagacaggatctcgctctgccctcaagaggcttgcaatctagcccacggaacgatgctcttattaattatgacttttggggagtgggacagcaactccctggacctagcctcagggagggagatttaaaatggcccatggaccccagggcaaggaagcagccaggtcatgggcaccgcagtcaggattgggcacgtgggactgactcccattctgagcattggtgccctttgctccagtgcaggaggtgagctctggggagggctgctggggtcaagcagctgctggcaggtaacttgggggcagtgagtgcttggaagcacttttgctggtatgtttcttcattgtgccagactctcttacgccctctagtacattcagcatccttgggcttggccactgaatgtgggcrgcagtcccatcattgtgacatcaaaaatgctcctgcacatttgcaaacaccctggtattccttggcccatggcagcagctgaataaactgggatttgggtgagggaagggagttaagtaaccaaccagcatggctgaagccatgtggggcggagaggagaatttccttgaagaagggcacagtgtcggcccctggttgtgtcccctgctcacacagatcggacgtaggaccgcttatccctcggcatccatcttcctgcgttcttcatgagcatttcttgatacgaattgcatgcggatctgtccctcagtgattggcagatcttaggtatcagtcaatacctgttaaatgaatgaaaggatggtttgcgcacttgcgtgtttgacacggcaccagctcagtcagcgtcttttgtctcactttttttggcccctgtttgtaatcgattttcrctccctatgtttcatttggatcataatatagttgtgtgtgtgtgtgtgtktttttgatggagtcttgctctgttgcccaggctggagtgcagtggtgcgatctcagctcactgcaagctctgcttcccgggttcacgccattctcctgcctcagcctcacgagtagctgggactacaggcgcccaccaccacgcctggctaattttttgtatttttagtagagaaggggtttcaccgtgttagccgggatggtctcgatctcctgacctagtgatctgcctacctcagcctcccaaagtgctgggattacaggagtgagccaccgcacctggcccataatatagagttttatctttaaaatcatcctttggggtacagattgccccccaccacatcgcatgtgttcctcctggcctgcatggtgtcagaacaagatggtgaaatggcaaaccttgcttccgcagctaccaccaagtgccttttaccagtcagtggtaaaatggggaattatagttgttgccattatgtcattgaggacatgttaaacatatgccttaattattgctttagctttgttttccagtgagaagtgatgatcacttatacaagtgttttatttttttgttgtttttgttcttgttgttgagatggagtcttgctctgtcacycaggctggagtgcaatggcacaatctcggctcactgcaacctctgcctcctgggttcaagtgattcttctgcctcagcctcctgagtagctgggattacaggtgtgcaccaccatgcccagctaatttttgtatttttagtagaaacggggtttcaccatgttggtcaggctggtcttgagctcctgacctcgtgatccacccacctcggcctcccaaagtgttgggattataggcgtgagccaccgtgcccggcctacaagttttgttttttaagagataggatcttgctctgttgctcgggctggagtacagtggcctgatcatagctcactgcagcctcaagctcctgggctcaagtgatcctcctgcctcagcctcctaagtacctggggctacaggtgcatgccaccatgccctgctaattatttttatttttatttattcattttgagatgtagtctccctctgtcacccaggctgcagtgcagtagggcaatctcagctcactgcaacttctgcctcccggcttcaagcaattctcatgtctcagcctcctgagtagctgggattataagcatgcaccaccatctctggctaatttgtgtaattttagtaaagatggggtttcaccatgttggccaggctggtctcaaactccaaacctcaggtgatctgcccacctcagcctcccaaagtgttgggattataggtgtgaaccaccatgcccggcctattttaatttttttagacacagtgtcttgctgtgttgaccaggctggtctcaaactcctggcttcaagcagtcctcccacctcagccttcctgagtagctgggattataggcatgagccactgagcccatcaagtgtttggtttttggtaaggaagcttagaacctattgccaaggttgggtatggaataaaaagcagtgaagctcttagtcctcagtgcctggcacacaggcccttggtcggcacttagtatttgtttttgttgtgtttttttttaagatgcagtctcgctctgtcgcctagacgggagtgcagtggtgcaatcttgactcactgcagcccaggttcaagcaattctcctgcctcatcctcctcagtagctggaattacatatacctgccaccatgcctggctaatttttgtgttttcagtagagacagggtttcgccatgctggccaggcaggtctcgaactcctgaccttaagtgatctgcccaccttagcctcccaaagtgctgggattacaggcgtgaaccaccacgcccagccaggcgcttagtattttdagtgagtgagtgagtgagtgagtgagtgagtgaactgatgaggagagcactagtagactcatggacacctgtagcacattagaaagtggcagaggagggaagcttctttcttggagggcttttcaaggttgtctcttcaaaggggcaagtgcggatggcatagcccccatgtggtctctcccttgctagccctggggagttcttgctttctgttttccatgtgtgtagcttagagagcccttttgttgcctaagcagatgttttctctctgggtactagttgtttattttgaaaagtgtatatacttgattatttctgaaggataatactctggctgccctcctttgatttggttttgcttgcccttgagatgaacagccgtggtgtaagtgggttgtgtacctcccctattctgstagccttattttcagtgttatacatggatgtgttaaagtactgagcatttatttttccatcttgagctgtccttgacttggagagggctctgttgaagtttacatgtcagtgtggttggtgtgcagtagactccagccaactcagagtgagaggaattaacagcaggtgggggttgggggggtactccacagatcgcctcggggtgtctacataaatgccctgtaaatgtgaatgaacagcctgtgggtggtgagagcagttttctaaggacagtccaaagccatcttcagatcttcaaggagatccatgattcgtgaaggattcactcctctggatcagaggttctgctgtagtgacactcttttttttttttctctctctttttttttttttcttctctatttcaaaggcagatcgggagcggtgccgagaaaaatttccttactagatgacatttcatcgcaatgtccgatcgtttggggcaaattaccaagggcaaggatgggaaaagcaagtactcgactctcagcctgtttgataagtataaaggaaaatcagtagacgcgattagatcctcaggtaaggcccagggttgaaggccagttcctcaaactttctccgagtgacatatcccagaaacccagagtccctcacctggttagacagatgtggtccgtgcacaccaggcttctgggtgtgcatgtagaatcactctctacttcctacttgaggtatgatttcagagccttgagcatcctgactctttctgtagtggaattttctccatctattaccttattgaagctggggagatatatctatagatatctatagatagatagatagatatctatctatagatatctataggtgtgtgtgtatgtgtgtgtgtgtgtgtgtgtgtgtgtgtgtgtgtrtatatatgttttggagacagagtctcactctgtcacccaggctggagttcagtggcatgatctcagctcattgcaacctccaccttctgggctcaagcgagtctcttgcctcagcctcccgagtagcaaggattacagatgtgtgccaccacgcccagctaatttttgtatttttagtagagatggggtttccccatgttagtgaggctggtctcaaactcgtgacctcaggtgatccacccgcctcggcctcccaaagtgctgggattacaggtgtgagccactgtgcctggccaaagctgtggatttttatcctgatgggtagaatgggacttaataggcattagtgttatcctttttttttttttttgagacacagtttcgctcttattgcccatgctggagtgcaatggcgtgatctcagctcagtgcaaccttcacctcctaggttcaagtgattctcctgcctcagcctcctgagtagctgggattacaggcatgtgccaccacgcccggctaattttgctttttgttttttgtttttcttttttgagacggagtctcactctgtcatgcagggtggagtgcagtggtgtgatcttggctcactgtaagctctgcctcccgggttcacgccattctcctgcctcagcctcccaagtagctgggacgacaggcgcccaccatcatgcctggctaattttttgtatttttagtagagacrgggtttcaccgtgttagccagattggtcttgatctcctgacctcgtgatcggcttgcctyggcctcccaaagtgctgggattacaggcgtgagccaccgtgcccagcctaattttgtatttttaatagagatggggtttctccatgttggtcaggctggtctcgaactcccgaccttaggtgatccacccacctcggcctcccagggtgctgggattacaggcatgagccactgcgcctggccagtgttatccttaataaagaatttttttttttttttgagacggagtctcactctgttgctcaggctggatggagtgcagtggcgcaatctcggctcactgcaagctccacctcctgggttcacgccattcttccgcctcagcctcctgagtggctgggactacaggcgcccgccatcacgcccggctaattttttgtatttttagtagagacagggtttcaccgtgttagcgaggatggtctcgatctcctgacctcgtgatccgcccgcctcggcctcccaaagtgctgagattacaggcatgagccaccgcgcccggccatccttaaagaattttttaaattttgttttaaaatttatttatttatttagagactgggttatgagactggctaatttttgtatttttagtagagacagggttttgtcacattgcccaggctggtctcgaactcctgggctcaagcgatctacccacctcggcctcccaaagtgctgcaattacacgtgtgagccaccacgcctggtgtgttatcagcctttttagctttcatggttcttgatattctagaacttgttggaaaggttcttgttgatccttttcacaccccatgaagacttcatgaatgtcgaagggctcctgttcagtcttgttttggatctaggcagaggctgtccctttagtcctgtaatgagaccagagctgtctcaacttgcagagaggtggttcctctgtaagctggaggttcctgggcctgtctcctcacccatgttgtaaagtctgcgagccttgtcctgcccatcagtgaaatggaagcctttttacaggttttagcagctcctttgtccctgtagtcttcagtgaagagcttgtaaagtgactaaagtgacaccaaacacttgtttgtcccactgctggtctgccctttgttttttgttgggttagctttgttatgatcacttagagattgaaagaacagctgaatgcatcaggcttctttccttctgtgacctttttgcatggtgtctgttccatgtccctctccctgcagttattcctagacatggcttacagagtcttgggaaagttgctgcagcccggcgcatgccaccgcctgcaaacctgccaagcttgaagtctgaaaacaaaggaaacgaccccaacatcgtgatagtacccaaggacgggacgggatgggcaaacaagcaggatcagcaagacccaaagaggtaaacggaggaggcgggtggtgagtgggagctggcgctccaagggtggtcccggcatccttccctgtggcaaactaaccctaaccctttggctactgcagcgctagtcttgcagtggcagaattggaacactgggagatgcaaatgaagctgcttcctctctggccctggtgcttcgtatgtttctttttccctgccttcattttttctggcttttagagccgatggagcagcacatctgtggacaaccttgtccccartgaccastttccccctgtgccttattaggaaaggcctcatcaccccagargagcttatgcaatgactcagagccaattcctgtaagaaacactgtggacagagctggggcttgaggacttcattcctggtgatgggtgtccctgtgagctgagctctgcagagaatcatgcagcttccctaaccatcggcccagcagcttcccagacagaggagacttctgctgttgctctaaacagacctagtcatcagtgagaacagcacagaatcctccaggatcactgtactgcagcctccctggaggctcacctcctgccagcacagtacttacagaaaccctagggggcagagggtggcatggtgctgtcaatcagagaaacagcccctgtgtggtgggctgaaaacacagggcctggctgcctggggcccacttggwtggctgcacctttgtctcctgctgcaagtcctctctgagtgtttagccagtgctaagacaattcagggaaggggatgtgttcagggagggacagggccttgctgaggctggcaggcagaaatctgctgctggggtttgcctgttaaggaatgtgaacaaagctgtctggcggcagcgccctcctggcctgcatctctggtggcctccctgctgatgtaggaaaccagacggtaaaagggacccagatctcagcctgcygaccccagcatccttttcttacaagtctgtgctagaaatgaccatggtagcttttgtaaaattgttgcctgtatttacttcagacaggatgtagagagtgagctagtttagttattcagctagatgattataaagtagtaatcaaaatagggccttagaagttatttttaaaacatttctaagagtttgcttagggatcatattgatggacagtatagcatgacttttgaaatctaccagccctaagtggtttccagctagaccacttattagcttgatggaacctggagaattgtttgacttctgagcctcagtgtcccccccttgaaataggaatgatacctggctttgctggtggttacacggtatccatgaggcattgatgggctagcataggtcaagtgcttagcctaaacctggcacagaggaggggcagatattggctgctgtcatcattccattcaaatggtactcattccattcacaccatgagctctggaacgaaatggatattgcacattttaatggaaggactgaaatcctctgcaccaccaaaagttctagagaggacaaagcattactccctcctgttatccagcctttactctgcctttgcggctccagtgagggctagttgtgctggagcacrtccgccagggaagaggtgaggatggagtgttggtgarggcatagacccccgtgtagttctctgctgccccaggccacatcctcccaccaaggtatcaggtggcaagtgggcccacaacgtggggactcagtgcttagttttggagaacacaaaagtgcgactacttggaagcttctcttttaggtagaaggagatgtaagaacccgatcagtagccttctgtttgtaataatcacgaatggtgagttgcctgggtcaggtgaatcttggaagagggtgtctgtatagagtttggcttccatttacagataagccacttgtattggaggagttcccaccaggggggtggctgccctccttgaatctcgttgagtgaaaagttgcctactgtgaccggagcgctgagttagagcagaaaccttcattcggccatttcttgttgatttcatcacttcacctgtggagtgtaaattcactgacacagcctttttttggagggcagcctggcaatcatttaaacttcaaaatatcttttgatccagcatttccatttctaaggtcgtatgctatggaattacttacagaaaaatggtgcaaagatatgtattaaaaaaaattcttggccgggtgcagtggctgacatctgtaatcccagcactttgggaggccgaggagggtggatcacctgaggtcaggagttcaagaccagcctgaccaacatggcgaaacccgatctctactaaaaatacaaaaattagctgggcgtggtcgtgcacgcctgtaatcccagctacttgggaggatgaggcaggagaattgcttgaacccgggaggcagaggttgcagtgagccgagatcatgccactgcactttagccagagtgacagagcgagattccatctcgaaaaaaaagaaaaraaaaaaaagttcttattgtaggtcgggcgcagtggctcacacctgtaatcccagcactttgggaggctgaactgagcagatcacatgaggtcaggagttcaagactggcctggccaacatgttraaaccccgtctctgctaaaaatacaaaaattagccaggcgtggtgctgcataactgtaatcccagatattcgggagactgaggcaggagaatcgcttgaacctgggagaaagaggttgcagtgagctgagatcatgccactgcactgcaacctgggcggcagaatgagactccatctaaaaaaaaaagccaaaaaattcttattgcagttgtatctgtaagcgggaagaaaaacccatatgagagactggttaaattatgacctgtctagttgtgttgtgtgctcattaaaagcaaaaggaagatccgtttctatgttgatgaaaagatgttcagatgcatgaagtaaaaaagtcatagagctttatgtatggggtcactccacttctgttagaaaaatactgtattcctgcagtgtaaaactctgctggttaaaaacaaaactgtattaacaggtatagaaaagtctgcttggagtttctctctggatgatgagatcatgatgttctgtgttacctagttttatttataagtttatttttactatgagcatgtatttcttttataaactcagagaaggttaaaaagtcagccctctgagtaggtatgggctctgggtctggggtaaggggcacaagcccttcattccagtgattgaatttccctattggcaaatccttcatttgcattgtttacagtgagcttttagtttttgcagacagaaggctctacaagaaggcagaaaagtttcatttttaaaaaagaaaggccaggcaaggtggctcaagcctgtagtcccacctactcagaaggccgagatgagaggattgcttgaggccgggaagcagaggttgcattgagccaagtttaccccactacactccagcctgggtgatagagtgagaccccctgtctcaaaaaaaagaaaaagaaaaagtcagaggactgtcttgtgctaattttaaatgtcagtgactagaacttaagcatggtttgttttcttattagtttttgccagcataagaatctactggggaaagtcgtatttttattggccagaggaggtctgcttcctgtgagcagctgaacagctgtggctcctgagaacgcagagacctggccagcgcactctgtgcggtgcctgaccccactgccctgcctttgtctagttccagtgcgacggcctctcagccgccggagtcgctgccgcagccgggtttgcagaratctgtctccaatttgcagaaaccgacacagtcaatcagtcaggaggtaggtgctgggaccccatcccaactgtttcctgggcatggtagcccctaaatctctttgttgctgggggatggaaggagttgctactgagaagtgtggttgtgcatgacctgtctattccagaggcacacccgatgagtgactttagaaaaccgtcatgggaaaccgtcaaggtcagtggttaagaaatttaatctgcagcttttagaaaaagacctcagatacagactaggatacaggcacctactttggttcctcttgatttaccgtgaggcagggtcactcaggctggactgcagactagttcagggtgaagctccatggaagcgtcacgtgagctccatggaagcttgggtcacaggaagacaaaaagtggcaggtcacaaaaaggttcactggccaggtgagtttgaaaaacaaaacgaagcgagctcctttactgcggtacttctcagtgcctttcatatgctaatacctaatgtgactctctgagaagaggatataatgggcagcagtccctgaatttatttgtcccaggaaacatttctttaccgaatgtctctagggactaatgtctctcagaacacgctttgggaaatacgaagctacaatccttcatttgttgatatgttttaagtgtttttctaagcagaaagtaatgatttcaccaagcaagagctcataacacactcagtccatcagagcctggctacaggtttccagagattggcaggaggatatacttagccagaactagaaatctagatgagaagtctatgaattttttagaagactaaaagtagacgtagatatctcatattcaccagctctcttgacagcgggaatgaacatattttggttttgctttgctgcatgggcaatataaggtctcaaatgtcatcccctctctgctttaaccatactcagggaagtctgtggctttgccagggcaccctctccccacctaacactgaaccgtgcttttaaaattaaagacaagaaaagaggtctataatcatgcaagatgcccttttccttggcctaaatccactgggacccataggctagtcagagtatttagagttgagttcctttctgcttcccagaatttgaaagaaaaggagtgaggtgatagagctgagagatcagatttgcctctgaagcctgttcaagatgtatgtgctcagaccccaccactggggcctgtgggtgaggtcctgggcatctatttgaatgaattgctgaaggggagcactatgccaaggaaggggaacccatcctggcactggcacaggggtcaccttatccagtgctcagtgcttctttgctgctacctggttttctctcatatgtgaggggcaggtaagaagaagtgcccagtgttgtgcgagttttagaacatctaccagtaagtggggaagtttcacaaagcagcagctttgttttgtgtattttcaccttcagttagaagaggaaggctgtgagatgaatgttagttgagtggaaaagacgggtgagcttagtggttagagactcgaaagggcactggacataggcaggctggagactggtcctggtcctgctgttctgcatctgactcagtcactcttctctgagcctcagkgggggatgtgactagagccttctcagggggtggtgagcattcagtcaggctgggtgtgcttcgcataatgctgaccctggcgagttttcagcagaggtgacctcctagggttctcaggaggggagctgtgccttgtagagtcacggtcactacagaaagtgctgcagccagcccacccagatcaagatctggcatgttggccttctttgttcacgttcctcattagcagctgcgcagttttaaagacacatgccggaactgggccttagtctttgtcgctggagcaaaataaagtagctctctgtggacacgggaggttccagagcaccgaatggagagaaacaggtttgggtcctggctttgctgtgtcactgtctgtgtgacttgaagctggtcactccccaaatcctgctccttgtctgtagagtgggcctggcattttctcgtccctgggaccgctgtgtggagtgtgcgttacagggaaggttcagggctttgctgctgctcagaaagtggtggtggatggatccgtatagggtttgaatctaaggtgctggcctctcagcaccttgttgtaataggctgttattgtacagtggaataagggagctggccctcttctgattctcttccttctttcagaatacaaattcagtgccaggtggaccaaagtcatgggcacagctgaatggaaagccagtaggacacgaaggtggtaagtgcgcacgtgtgtgtgttgtttggggacgctggggagagggaggtgaatgccttttccagaatgtctggttgggtctaggcacccagaagctttgaggactctcttccacaaagaggtaccgtctatggagcccttgcctgtgcacagcgggcgctgactctgtagaggtgccagctctttggtttctttggatgtgtgctcttgctgagacagaggagtgctgactgggctgtgctgctggtgatttttgatgatagcttgaatgtttctagcatactgtgcttcagaccaaactaggcagcagctctgagtgggaaggagagtggtcgtggtgtgggcagacgattcaaaggaatgtactggggaaagcccacaattcactttctcctgtaaagcagcactggctgccctttattaccctttgccaycatcctgatatcgccttctgcttcctgcactacccctgccagccaaggcttcaccagacttggtctttagtagcctgtattagaaaaccagctgcacatccttcgttacctgaacctcacccccagcctgccatgcctaggaggtcctgccccttatgggttgaaatccctgtgctcaaaggctcttccctcagtctccaacgggaaatgaccgatcaatgtgccaattggatttcagtgccccagcttctcccaaggggctgagggtacagatcgagtgccagcaggagtgcagtggcacaattatagcccattgcagcctcgatctcccgggctcaagcaatcctcccacctcagcttcctgagtagctgggactacaggtgtgtaccacgacatctggctgmtttttttttttttctttccattctgagtagagacaagatttcactatgttgcccaggctgrtctcaaactcctaggctcaagagatcctcccacttcagcctcccaagtagctggggctgggatcacaggcgcatgcaccaccacgcctggcttattgattaattgattgactgagtgattgattggttgcgacgagatctcactatgttgctcaggctggtctccaactcctgggctcaaatgatcctcctaccttggcctcccagagtgctgggattacagacgtaagccaccgtgcctgacctcaaaagggtctttgaagatgctttatgaagagcattcactggacttgtaactggttctttggctttccatatcttatatttctgtaaggttagaattttttgttttgtttttgttttttttgagacagagtcttgctttgtcacacaggctggagtgcagtggcacaatagctcaytgcaacctccataaggttagaatttttaaaaatagatagaatatattaatttttatttaaaaagaactacaaaaattaaaagaaaaacttctgtataaattggcccaactcctatggaagccagtttggcgctgcctggcaaaataataacacataataccctttgacctagcaagtgcaccctgaggaaattgctctacaaattatactcgcccgtgtgtgaaatgacttgcrcataagattattcactgcaacattataatagcaaaagattgcaaacagtcccttgaaatgcctgtaaaattatggtactttaatgaaatgtgatttggctataaagaaaaaaagcagaagttttctattgatttggcaagatcttcaggtgaaaaaaagtacagaatggtatgtatagtatcttaaccatttgtgtaaaaaatgggggtgagggctggacatggtgactcacacctgtaatcccaggactttgggaggctgaggcagaaggattgcttgagtccggtagttcgagaccagcctgggcaacatggtgaaaccctgtctctacaagaaatacaaaaaatcagccaagtgtggtggcagacacctgtagtcccagctacttgggaggcttgaggcaggagaatcacctgagcaccagaggtggaggctgcagtgagctgtggtcacactcctgtacaccaacctgggtgacagagcaagaccctatcttaaaggacaaaacagaaaaatgggagtgagaaaaaatacacttctaaaaaatgttgtatatgcatgttttaaaagccacccatctgtatactgatgtatatgtgtttaaaaatctccagaaggtaacagaaaactgccagtttttttgagggagtcagaagggggcaaatgggcataggggtgagaggaaggcttctgtgtctacctttacatggtgttcacttctgaaccatgtcactgtgttacctataaaaaatgtaggtaatgtaactgtatcacaataaagcttgatggagaaaataattttaaactggacgtggtggcacacacctgttatcccagctacttggaaggccaaggtgagaggattggttgagcccaggagtttaagtccagcctgaaaaacatagcaagaccctttctctacacaaaatttaaaaaaacaaagaaaataattgcaggcagaaacctgccagcccacagaatcgacacactgggcagggtgggggccaagtgtaaaagtcagtttcagttccccctctcgtgctagagtcatgcatctgtgacactgtcaggagtgtggggatttgagggtgttgcccacaagtgttttcatgactctttggaattcaaaaggacttttcctgaattgatagactcagttgataggtcacctgaaacagacccaggagacctgattgcatgtttgggcagaggtcagaggctcagataccagctgctgccccaccagtggctcagcctgtgacctcggaagaagccccctgactttcctgcctcagtttctcatggcagagaacagatggcaggtgaacatcataaaacattgggaccttatgaatactggtattttggtgtgagattttttttttcctaccctttatccttattaagattaattcatgcttacaataatatattcatgattctcgaagcagaagaaagagatggaacagcaatgttggacaggtgctggtttttttcctaatttcaaatctacctttttttttgtttgtttgtttgtttttttttaggcagggtttcattctgttgcccaggctggagtgcagtagtgcagttttggctcactatagcttcagtcttctgggctcaagcaatcttcccgcctcagcctcccaagtagatgggactacaggcatgcaccaccatgcccggctaatttttgtgatttttgtagagatggggtttcatcatgttgtccaggctggtgatactgtattttaaaaatacagtttttatttgattcttgccagtgaccttctaccataatgaagcgactctgagtcagagcccccttcacagagcactggagctccttcatgacacttagagtccatctctggctggtcattggtgaatggtgtccagtcttaccgtcaggtttatttgaccctggacctttttactaagggagtggcaagcgaattgctgccacgtgcttgtgtggtgatccagccgcgcctttcyggcacagtcggctttagtgaacaggcccgtggatcagtggtgctaagaataatttaaactacttaggggaagatttgggtttagctgtatagggaacaaggcattccacagggggccatttgttgtgtggtgtcgccactgttcctagattgctcctgtctggagtgtgctgcatattccagatcaaaagacgtgccatttttaatctgttcatccaaaaatggtggcagaacctctgtgctaagttttctgtgtaagggaacaacattaggaaaggcttcttctctaaagcaggttgtaatgtcaaggaatgaatgaaagaatgaagaaataaactgttcccaggattataagagtgaaatgtttggccttgtagggctcaaggaacttagtacaaaatgcggaaggacaggtgaatgaggagttactcatgtgtataaatctaatttccacctgatcttaccacatttgatggtagaaagcagcatttgtttattttattttatttattttattttattttattttattatttttttttttgagacggaatctcgctctgttgcccaggctggagtgcattggcacgatctcggctcactgcaagctccatctcctgggttcacgccattctcctgcctcagcctcccgagtagctgggactacaggcgcccgccaccacgtctggctratttttttttgtatttttagtatagatggggtttcaccatgttagccaggatggtcccgatctcctgacctcatgatccgcccgcgtcggcctcccaaagtgctgggattacaggcgtgagccaccacgcctggcctatttttttatttttagagagagggtctcactttgtcacccagactggagtgcagtggcacgttttcggctcactgcaacctccacctcccgggctcaagtgatcctcccaccccagcctcctgagtagttgggactacaggcgcccgccaccagactaattttttgtattttttggtagagacagggttttgccatgttgcccaggccggtcttgaactcctgagttcaaatgatccacccaccttggcctcccaaagtgctaggattacaggtgtgagccactgtgccaggcaaaagcagcatcttaatccttttggggtggactggggcagggatggcagcacactctgtaggtgttgcctccacaggaaagcagttgccttcttggcctcccctgggctgattttataggaggctgtgcttgtctgtggccccaggcagtcagtagaaccttccctgctggggcaggctgtggcctggagcggctgtgatgtcttacctctttccatttgtaagcaggcactggtccttgcaggtcagctgggaaggggcatgatgctgtcagcagcagtctcccttgccaccctcagcaccctcgtggcatctgccagcacagagcacccttgtgacaagactcccttcaaaagcccacttccaggcaacacggctttcaaggtgtggagctgggaagcagacgactgttgactccatctcacttcctccatgtctaccccgtcttcttgacaggtttaaggggctcaagccgactgttatccttctctcccgaggaatttccgacgctgaaagcagctggagggcaggacaaggstggcaaagaaaagggcgtcttagatctgtcgtatgggccaggaccaagcctccgccctcagagtaagtgactgcagcctctgggcactcgatggagtaacagaacttcctcctctcatctctctgcactcctaaaagggtgctgatgccactggggtctccggttcgagctggaaacgtggtctttgactmgccacgtgatctgtgcatccattggacttgctgcctaggccattggattgggccttgtgccttttttgtctcttgggttgggccaggcctgtcccctccccctctgtcatccggttgttaattttgctgtgcctggtggctgtggcaaggatggacaaaggaccaattaacttaggtccccggttcaagagcttgttttctaaagctcccaatcctagctacatctagtcggaatcactggggagtttgtgaatgagtctgatttccagtcctcccctcccccagcccaattaggacctgtatttttaacccattcctctggggattgttacataaatcagcctggtactggtctctactggcccctcatcttaggtcgggccagggaagtggcaggattgtgtagcactggctggaaatttctccttggaagccgagggtggctggaggttaaggtggtgtttaggaatgtgattttccacgtgttctactcagggattttgaagtgkctcatgtagtccaggggtcttgatcaggtcttaaattgtgaggccttttgtttgcttgccttgatgtatccccaaggcctctcccattcaagtcataagtgatgtcctgtaagtcagtgatcactgtggatgtgtcttacttaaaccagcactcactgcctttccagtggcccacacaggactggtttattttgctgcttttttttttttgagatggagtttcgctcttgttgcccagggtggagtgcaatggtgcgatctctgctcactgcaacctccgcctcccgggttcaagtgattctcctgcctcaggctcccgagtagctgggattacaggcatgtgccaccacacccagctaattttgtatttttagtagaggcgggtttctccatgttggtcaggctggccttgaactcctgacctcaggtgatccgccygtctcagcctcccaaagtgctgggattacaggcgtgagccaccgcgcccagcctgtttgcatcattttaagggacacgaattatgtctttctggggttaattaagaggagctgccttgtgggactataaaaacgtagacatagaagaagcttctaagcatcagtttaatctcctcattggagaagatgagaaaacatggacagaggggtgaccttggcttgccccaaatcacacagcaaaggggttgaagagctgggatcagacatgtcctgggtctctttcccttaagggtcgtgtaactcagagacctttgtgcttcaacttctaaccaaaaggtgaccgaaaacaggggtctgttgtctcatttgatttcttgttggcctctaataatttccacccgatcttaccacatttggcaatagaaagcatcattttaaaaagacaggtcagcaggtttccgtctgtgagctacgcaagtgccccacacctccactggaaggacagcagctgcgccttgcctgtcttgtgggctgggggatctttattaaaaggtgccactgctaaacaaagcctgaaaccactgtgcccggaacttgctcctgttttaatgtgtagtccagtgctgaccctaagtgggctggtcagtgtttgttgaaggaatgacccaaggctggtttcatcagggccatcttcatctctctgggttgtgagacttggggaagggtggtgattgttgcttactgatgaagccttctctctgagtagatctcattttatatttcacagtcagacttccctcagcaagttcatcctcattggccaggggtctgccccaaccttccctgacagatttaacagttcttcacttttggtgttttttgtttttcattttatttttttggtgaaggagggggtcccttgaccttcagaacctcatacgatccctccttccccctcctcttccctctccccttttgccccctttcaatttccagatgtgacaagctggagggagggcggtgggcgacacataatttctgccacgtctctgagcacctccccaactgagctgggcagcaggaactcgagtacgggagatggagccccctcctcggcatgtaccagcgattctaaggacccctctctccgcccggctcagcctrtccgaaaaggggcttcacagttcatgggaaatgtataccacccacctacataccatgacatgcttcctgcttttgtaagtcttcagagtgtactttttttccccccatgaagttggattgtgtccagcagataggtcaagtggttgaatgtcccccttggggtctcctcttggccctgttaccctacttctgaggcttccactcgttttgcattttctctccctgctttttaaatcttcagggcctctgacttctttccctggtgatgtggatatgattttagcctttggttctttagaaacaggagaggcaggttttccctgacataggtccccaagtctacttactggcagcaggaatgaaatgggrgagatggtggtaggattaattaggaaaccccatgactttcctgtttcttttycccattttccactttataaaacacattctgatttaagtggaaattgcagtttcagccattaccagcaaatcctgttcattgatgttatgtttcagatgtgttcgccgaagtcatcagaaaaccagggtacagtggaacgaggctcttttccccttcctcagctccgccttgaacctcgagttccttttagacagttccagatgaatgaccaagacgggtgagtccattgcattacagtcacstgtgtagagatgagtgcggtggtgattctggtcaagatgaggggctgatgaatagaagtgctgtgtctcctggagaccacagagaacttaaccagctcagcgtggcagggtgtgtggggtggtggctgggatttggagctggatgacagattgagtcatgatttsaagtgcctggtagagttgaagttctggcacgtgtgtgttgctgctgccctaggccttagcaaccagcatgtaaaactgcaggacaaggcagaacttctttctgggatgtactcgtttgctcattatatatttcttttaaaggaactgatagaaataattaaatcaaacatgaacctttgcagtgtggaatttatttttggaaagrtatttgattttgcttccgtctgtatactggacatgattccatcatcttttcttttatcagaaaagaaaacaggctgggattgtctcgcccactccgcccactaaggcagctggtggagcgggcaccacggcccaccattatcaatgcggaaaacctgaagggccttgacgatctggacgccgatgccgatgatggctgggcaggtgggcagagaagcacgggtggtttagacrggcaggaccaaagtccatmtgtacttaccagggatggaaaccccctggcaccaccgtgtgttttcccttggcaagatagggatgaagagccggacagggaagcagacctgatgccctccttcctcatttactccctgactagmggttccttcctggccaagccattagcttcttttggtctttagtcttgatcttagagttttgttgttaactttttaaaaattattgatgatgcaaaatttaaacaaaaaagaaaatagctcccaaccactgatcactcaggttcaataagtaccaatgttctgccattcggtttttgtttgttttaatttaatttttttccaagagacagggtctcagctactctgggcatactgcctgtgggttagccctactctgcaaggagcagtaaaaaatataaagataaaaaggaaggctgggcacggtggctaatgcctataattcctttggaaggctgaggtgggcagatcacaagatcaggagatcgagaccatcctggctaacatggtgaaaccctgtctctactaaaaatacaaaaattagccaggtgtggtggcgcgtgcctgtagtcccagctactcaggaggctgaggcaggagaatcacttgaacctgggaagcagaggttgcagtgagccaagatcgcaccactgcactccagcttgggcgacagagggagacactgtcycaaaaaaaaaaaaaaaaaacaaaaaaaaaaaaaaaaaaaaaaggaaagagaaagagtctggctgtgtttcccattctggagtggagtggctgtttgcagggtccatcatggtgagctgcagcctcaaactcttcctccttcctcagcctccggagtagctggaactacacgcgggtgccacaaacccagcttgttctgccattcttattcgtttatctccacccactccccatcccccaacctgattattttcttttatagttctttttattttcaagtagatttaaattatagtgaaaggtacccatatcacattttacctgtacagttttacaaatggatacgtgtatatcacacacatccatatccagagaaagagggaacatttccctcaccaccgcaggcttcctcattgcttctccagtgctctgccctgccaccgctcaagggcctgctgctcttctgattcactttaccctagattagtttwgcctagttaacagacttcagatgagtggagtcatacagtttttactcttgtatggttttcatattcatcaatgttgtttatatgccagttgcttttagttgctgagatatgttccagtgcatcaatatactgtaatttgtttattcattcaaaagccccactatatacatcatacttctatttctcttgggtaagtatctagaattgttgggtcaaagggtagacataggattaagtgtttaagacctgtccaaaccttttcccctggtggttgtgccattttacattcccagcagcagtgtgtgagaatttggtaggtctggatcttacattttggtgttcatctttttttttttaaagagacagggtctcactttgtttcctaggttggagtgcagtggtgtgatcaaagctcactgcagccttgaacatgtttgtgtttttaattttagtcattctagtgggtgtttagtggtatctcattgtgcttttaatttgcattttgctgatgactaatgatgataaacacacttttatgtgctatttgacagctgatatattgtcctttgtttggtatctgaattttaaaaaattgagtggtagggtaccagcccaggatacaaatcctttgcaacttttattttgcaaatatatttccttattgcattctttgtcttaattttttttaaacactgttttggtgagcagaagtttgaattttgaagtttaatttacaaatttgggtttttttgtggttattatttttgtgtcctgtttaaaaaaatgtttgcttccccttggtggtaaagatgttcctagatgttttatagttttaactattaattttaggtctttgatccacattggattaatttttgtatatggcataagataggagtcaaggtttgttttttcccatacggccaattctccacaacatttgttgataagacttcactttccctatcgaattgctttggaacctttgccaaaagtcaattgactataaaagcattggtctatttctggacactgttccattgatctagttgttcctcataccagtaccacactgtgggtttatagtaaatcttaaatttcagtagtgtaagttttccaactttgtcgttttccaagattgtttccacataaatttagaatcaacctgtcagtatttacaaagggcctgcgggcattttcgttaggattatgttgaatctgtatcaacattgataagtgacatcttaaatttttttttttttttcccgagacagagtcttgctctattgcccaggctggagttcagtggcatgatctcgactcattgcaacctccgcctcccgggttcaagtgattatcttgcctcagcctcccgagtagctggaattataggcgcgcaccacatgcccaactaatttttgtatttttagtagagacagggtttcaccatgttggccaggctggtctcgaactcctgaccttgtgatctgcccacctcagcatcccaaagtgctgggattacaggcgtgagccactgcaccccacctgacatcttaactttgaaacttggtggtgtttttttttttggatatggggtctcactctgccacacaggctggagtgcagtggcatgatctcagctcattgcaacctctgcttcctgggttcaagtgattctcatgtctcagccttccaagtagctgggattacaggtgtgggccactatgccctactaattgttgtatttttagtagagacgaagtttcaccatgttggccaggctgrtctcgaactcctgacctcaggtgataggtccgccttggcctcccaaaktgctgggattacaggtatgagccaccatgtccagtccttaattttgaatctttaggtccaggaacctggtgtatctctttattagggctttcatttctctcagcagtgtcttacttacagttttcatgtagaggtcctgaatgtcttttgttaaatttattctcaggcattttacggttttttgatgctattagaaatgacattgatttttaagaacaatttcattttttaagggtttgctgtcattatatagaaaatacagctgaggccgggcgcagtggctcacgcctgtaatcccaccactttgggaggctgaggtgggtggatcacaagatcaggagattgagaccatcctggctaacatggtgaaaccccgtctctgctaaaaatacaaaaaattagccgggcgtgttggcacgcgcctgtagtcccagctacttgggaggcggaggcaggagaattgcttgaactcgggaggcggaggttgcaatgagccaggatcgtgccactgcactccagcctgggtgayagagcgagactccatctcaaaaaaaaaagaaaatacagttgatttttttgtgttcactggtaccagacactttgttgaatatacattagttttactagtttttgttgatttcttagagttttctacataaacccttatgtagtttgtaaataaggagttttacattgtctttttcagattacrtgccttttatttatttatttgtattttgccttattgcactgtggtatacttctagtataatattaacctcaagttctttctggtctgaggaagaaaatgtttcatgtgtcagcatgaagtgtcagctgtgggtttttcagagatgctgtttatcaggttgaggatgtgttgccttctgtgtctagtttgctgagcctttgggttttttgtttttgtaaattatgggtattgcattgtgttcaatgatttcctacatctgtgttcatattatttttctcctttattttgataatagattgcatttttttttaatgctaaaccaaccttgcattcttagaataaaccctccctctttgtatgcctagactcaatttgttaatatgttttaaagttctgtcatgagggatattagtttgtaattttctgttcttttaatgtctttgtcaggttttggtatcaagttatgstgggcttataaaatgagttgtggagtgttcttctctactttcctaaagaataagattggtatttttgtaagatcagtattatatatttttctttttctttcttttttgagacagggtctctctcactttgtcacccaggctgagtgcactgctgcaataatggctcaacgcagcctcaaactcctgggctcaagtgatcctcctgcctcaccttctgagtggctggggttacaggtttgggccactgtgcctggccagtattactttaccagtgaaacaattttgcccctksagttttcattgtggaaatgttttcagtaatttattttatttgattagttatgagactgtgcagtttccctatgtcatttcgtgtgagtttttcggtaagttgtgttttttgaggaatttgttcatttcttttgagttgttgaaattattaacataaagttgttgaaaatatattacattatccttttgatgtctgtaggatctgtagtgatatcttttaattcctgataatttgtatatttctttttcttcatttctgccaaggaattgaattgttagttttattaatctttacgaagcagcagcttttagcattgttcattttctccattgtttgacttgttttctgtatctattttaaatgattttttaaatcattgaggcaattttttattacggggacawttctagattgctaatttagttgtcttacagccagagagcacattctgtatgatttcagttgttttcaagttagtaagacttgttttatgactaggatatgatctgtcttggagaatatttcaggtgccctttgaaaagtatatattctacagttgttgttcagtgtcatgttttgtatgttccaacttagtcaaggtggttgatggtggcattcagatcttactgtatatttactgatgtttttgtctgcttctatgagttaaggaaagtgagatgttaaactccaattatggatttatstgttcctccctttaatactgttggtttctgcttcatttattttgaagctgctattaggcatacacacatttatrgtttctatgcctttctggtgtgtttccacatttccctcgttatctctagtagtctattatcttgcagtctgttttgtcctgtgttcataccattgctctgacttactgttttcagcgaaaatctttttccattcttttcctttaagctcctttatgtttgtatttaaagtgattatttagtagacagcacgtaattgcaacttgctttttcagttcctaactctgctttttaattagattgagtttttgttgttaccttttaaatttttttaattttaatttaatttattttttctagagttgggatcttgctctgttgcccatgctggtcttaaactcctgggctcaagcartcctcccaccttagtctcctgtgtagccaggactgcaggcatacatcatggtgcttagttagccttgtgtttgaggcaagatcttgctctgtygcccaagctggagtgcagtggcacagtcacagctcactgcaacgtcaacttcctgggcttaggtgattctctcacctcagcctccggagtagctgggactacaggtgtgcacccccatggctggctacttttctgtatttttagtagagatatggtttcgccatgttgcccaggctggttcaaattctgggcctcaagtgatcctcctgccttgacctcccaaagcgctgggattacaggcgtgagccactgtgaattatatgattatatgattcacataattttaatataattatatgattgacataattgtcatataacataaaatttacccttttaaagtctatagtttagtggtttttagtatatattcacaaggttgtacaactaccaccactattcaatttcagaatgtttccatcactcaaaaaagaaacccaatacctgttggcaggcgctctctcccacctcctaatcctgtggcaacaataaatctactttccatctctatagatttgcatattctggacatttcctatcaatggaatcaatatgtggcctttcttgtctggcttctttcacttagtataatgttttcacagttaattatgttatagcatgtgtttgtattcattctttttcatgaccaaataatattccattgtgtggacctaccacactgtgttcacacagtcctctgtgatggatactttctgccatctgagccacttgggctgatcagtgcctggggcaagtggtaactcacaaatctcacaagtcaagcttctgtattctaagggtagacaactacttggtttctgcctgctttgttcatcctcttgggccttgaaatagattttaaagatatawtgttcagatttaagaattgttacctgtgggagggttagtctaaccaagctgccctgctcttaccagaagccaaaactgcccttcagtcacaggggtaggcagccaggtggttgactcagctcctctgctgggatagcgagatttctggccaaaagaacctctccgatggtgcctgggtaccactgaccttttctttttctttttttttttttcgagatggagtctcgctctgtcgcccaggctggagtgcagtggcatgatctcggctcactgcaacctctgcctcctgcgttcaagcgattctcctgcctcagcctcctgagtagctagtattacaggcacacgccaccatgcccgactaatttttgtatttttagtagagacggggtttcaccatgttggtcaggctggtctcaaactcctgacctcatgatccgcccacctcagcctcgcaaagtactgggattacaggcatgagccaccatgttggtcagtctggtctcaaactcctgtcctcatgatccgcccacctcagcctcgcaaagtactgggattacaggcatgagccaccacgtccggccaccactgactttttcattctttctcattcttcctgggccctcctgctgttgtaggcctccatgaagaagtggactattctgagaaactgaagttcagtgatgatgaagaggaggaagaagttgtgaaggacggcaggccaaagtggtaaggacccgttcctgccctatcagcatgagtgcatccctgcttagtgttgttgtgtacccagagcatttcccagtttccatagcaacctggaatggcagacagatgctgtttccactttgttttgagggtgacagctattgatgatggctgtgaaggaggggagccagggtttgcctgcaggtgtgactgtgtcctgtgcatagtcggcctcttcaccactgcatcagtgtgtccccaggtgtgttatgcagaccacgtcttcatggattgcttgtggctgtcgtgcccaaaaaggctgctgtggccaagcaagtttgggaaacctccctgggttcaacttctttttttttttttttttttttgagacaggctctcactctgtcacccaggctggagtgcggtggcatgatgtcagctcactaaaacctccatctcctgggctcagcgattctcccaccccagcttcccaaatagctaggaccacagatgcacgccagcatacccagctaatttttatctttctgctggagatggggtttgccacgttacccaggtttggtctcaaactcctgggctcaagtgatccactgtgcctggcctcaacttctttctttactccagattcctcggagccttgaacatgctaaagtacactgggggccgggcacggcggctcgtgctgttaattccagcactttgggaggccgaggcaggtggatctcttgaggtcaggagtttgagaccagcctgcccaagatggtgaaaccccgtctctactaaaagtacaaaaattaaccaggtgtggtggcgtgtgcttgtaatcccagctacttgggtggctgaggcaggagaattgcttgaacccaggaggcagaggttgcagtgagccaagattgtgccactgtacttcagcctgggcgacagagcaaaactctgtctcaaaggaaaaagaaaaaaaaaattaagtgcactggggaggtgaagaagcagaatgcatgccagctttcctgaatttatttgaccatgttaattttgtctctytttttttttttttttggatcatttccttggactagtttagttttgtttaatttcctttagaaaatactgcattgtactctcatccctctagtttttataatgttagtagcacttttaaaataataccccacaatggccaggcacggtggctcacgcctgtaatcctagcactttgggaggccaaggcgggcggatcacgaggtcaggagatcgagaccatcctggctaacacagtgaaaccccgtctctactaaaaatacaaaaaactagctgggcatggtggtaggtgcctgtagtcccagctactcgggaggctgaggcaggagaatggcatgaacccgggaggmggagcttgcagtgagccgagatcacgccacatgccactgcactccagcccgggcaacagagcgagactccacctcaaaaaaaaaaaataccccacaattagttgggcgtggtgtgcacctgtagtcctagctactcaggaggctgaggtgggaggactactggaatccagaaggtcgaggctgcagtgagccatgattgcaccactgcactccagcctgagtgacagagtaaggccctgtctcaaaaaattaatrataacaatcatacctatggttgtcataatttgtattttttgagtactagcaagtaagactttttcctttgcttcctttgtataatgcctgtttccttcacatttatcactgctttccgttaaaatgtaatgttttatattgtttagatgttaatgctttgctgttggtcttgcaaatatttttctctgttttcttgtcaataactgaatatttgtttagtcaaatctgtgagtcatctttttctttgttatttcatcctttacttaaaagcttcctaaagtaagtgcccatcttctggaaagagttggtaataatctttgctactctttttctgatgacacacaaaaaatgaaattctgtaatttcctttcatgctgtttgatttcagctgaagctttggatgcagtcgggacatacctatgggtcagttcctggaacactaagctcagaaggagctgtgatcaagaattaaaatcaaaggcaaagacataaactcttagagactgattggagcagtaggacactctgtgttccttgtctctttgaggcgatgggaactgcatattcccctgaaggaactggacattggttttggagacagttttgcccctractttgaccaagggcacttcaaaatcagagtgcccgaacgatctcctcctgaaacctgctctttttcttcatgttctctgagctggttggtgacctggtagagacttagtgcatgcatccatgtcttatttggcatctttatttcctcatacacaattggctcccaaaacttgccctgactctgtctcctcttttcattttctctggggccactgggacctcctccttttccagaccatccatgggtccaccagttcatctccatcctttcagcctgtcctccatggcccgtccttgacaccctgcccatagtcatcttctaaaaacacaggtcttttagacaggtcagcagctttactgtggtctccatttctsacaaagtcagataggaatcaccgttgtcccctctgtaattgttgtcccctctgtaattktcccctctgtaatctcctaagctatgttacctgcctcgtcttccctccctcgccacgtacgtgtgtgggtagacacacaggcccacacatctgccatccctgattcccgcttttctctgatctgcagtattaccgggcccttgyaaatgctttgccccagcaccattgcttccattgtgaggcgtccagacgagcatggcacccatccccttcttgtccagccacccctgcagctctgtttggaacacctcctccttttccatgctgtgtcggctctgcttgtctcctcttgctctttttattgtggcactgtttagtagtcatcttttgttcttttgaggggcatttattgagcaactggcttgtgcagagcatagggagggagatgtaccaaaaggagacggacacgcacctgggagtcctggttcaaatctgtgagctcctccctgtgaggggtgccccgttaaccttgatgagactcagctactgactttttaaatcaagagtgtccaatcttttggcttccctgggccacactggaagagttgtcttgagccacacataaaatacactaacactaacgatagctgataagctaaaatgaaaaagttacgaaaaaatacctcataatgtgtttttattttttttttttctgagacggagtctctctctgtttgttgcccaggctggagtgtagtgccgcgattttggctcactgcaaccttcacctctggggttcaagcacttctcccacctcagcctctagtagctgagattacaggtgcctgctaccacacctggctaatttttgtatttttagtagagacttggtttcaccatgttggcctggctgatctggaactcctgacctcaaatgatcagcccgcctcagcctcccaaagtgctaggattacaggcgtgagccactacgcccaggccctcttataatgttttaagaaagtttacgaatttgtgttgcgctgcatccagagcccagggccatcctgggccacatgtggttggacaagcttgctttaaagtgaggatcatgaggacttttttttgyatcggtgaaatagtgtgacatatcgtgcctggggctctgtttaatgagagtgacttgataaatggtggggctgaaccgtggaattcacatggaagtagtgggagtggtggtccattctaatgaagaaaatgatttggacagctgacttgggaattctcaaggcctctgaccagtgagatcagaaatgcttggcctgagtgcaaaaacttaacatcaaatgtggtttgtcctaggaacagttgggaccctaggaggcagcggcagttgtcartgagctctgcagacagtgcggacgctaagcggactcgagaggaagggaaggactgggctgaagcagtgggtgcgtcccgtgtggtccgaaaggcgccagaccctcagccaccgcccaggaagcttcatggctgggcaccaggccctgactaccaggtaccaagggcccttggctgtcctgtgtatttgtacttcattgagttgggtggctgggtttctgagaagtcctaagtgggcatttctttttcatttttatatttcttcttttgttaaaatgttttttcatagagacagggtctcactatgttgcccaggcttgtctcaaactccagctcaagtgatgccaaagtgctaggattacaggtgtgagccaccatgcccggctgttcttmctttttttaagataaggtcttgctctatccttcacctcccaccctcaagcgatcctcccacctcagcctcctgagtagctgggactacctgtgtgctgccacacctggctcatttcattcattttttgtagagacgaggtcttactatgttgcccaggctagtcttgagctcgtgggctcaagggatcctcctacctcagcctcccaaagtgctgagattataggcatgaggcactgtatttgtcttcttgttatagttaaaaaaaattaaaacagccaggcatggtggctcacacartttgcaaggctgaggcagggggattgcttgagaccaggagttcaagaccatcctggccaacacagtgaaaccctatctccaaaaaaaaaaaaaaaaaaagccaaagaaataattaaaacagcttcaaagtgatagaaaagttggaagtacattacaaacaatattttttctaaactgattgaacagtaagttgacaacctgatgagactctttacactgtggtacttgtttcctaccaagatggggacattccacccaggtaactacagttacttccaggaaattagccttgataattgattgtcrtttaatctgcaggccccattcagcttttaccagttgtcccattaatgtccttactcgaaataatccagttcagaatcacacacctctagccttctttatctggatcagttcctcagcctttccttcactttcatgactttgaggctttggaagattacaagccagtggaatgcccctcaaattgggtttatcatcatctttcttgtgaagaagtccacagtttccatccttggcagggatcttcaggcatgacctgacttttctcatttcatcccaccaaggcaaccacgacttcatcctgtccccctctggctacgtgcactttggtctcttgattaatggggtgcctgccaggtttcatgctgtagagttactcttttccctatttgtagttgataagaattttgttgggagaaactttgagactgaacatctcgtttttgatcaagcttttagtttactcatttatttacatcagtgggtgtaatctactctcacctggttggccattgggtgttccttcaggccagtgcgtgtcctttttccctgttctccatcctttttggagcccttccttcatctttcccggatgcatgacctgtcttgtcctgggtccgccctttctccatgaagtcctagttcctcttagtgaaggatgatatttagaaaccagtgtctgagacccagcaggctccttgctgctggggtgtcactgcttccgggcctcctcagcggacagttgcggggaatgtatgtaggtatatgtgtgtgcacaaatacacactttcatatttgtattatttctgtacctgtccatattggaaactgtgttctcattgatacctccagttccacagactttgttccacttcctcccagtgcatgtttgcacctcctttctgtgacagkgagaatctatctctcatcgtccctcgtatttatactcacttggtcagtctccccatgtatgaccaatctcatttctgctgccacactctctcccttgcacatatgcyctccttgcccactcagatgtcattgtccccactcctggatgccctgaatgtccctgctgggccaactctgcctatgaatgtccccctcatctagcttgggctttggccccacacctctacctgcatgccctcctccccttgcctgggctctaaccatttggagtgcagtcagccgccaggactccctggcaccaggctcctggcttgcattgccacacctagtgactctgggactggactgttgaggagtgggagggctggggaagggggagtcatgactttgaatacacttggtaaagcctgctattttcagtgctctttgctatttatttattattgtttttggagatggagtctcactctgtcgccaggctggagtgcggtggcgtaatcttggctcagtgcaacctctgcctcccgggttcaagcgattctcctgcctcagcctcccgagtagcgggattacaggcgtgcaccaccatgcctggctaacttttgtatttttagtagagacagggttttgccatgttggccaggctgatctaccctgatctacccaccttggcctcccaaagtactgggatttcaggtgtgagccactgcgcccggcctgctctttgctattgaaagggcttctattccacattcttataaaatgaaaatgcccctyagctacagtcttcttattgaatatttattgtatgccaggcacatacatatgtgctgggtacaagagatacagaagtgaaacaaaatagacacaatgccactgctcttggaaattattctgcagttaatccacattttcattcacatgttgaggttgctccgtattcctttttttttccttttcaccagtcaagaagtagtgctgatcagtattcaaaaggtttcactttaacctactcataacagcactgtaaattagctgaacatcaacagtgatgaaatctatatactaaatttatgtatccaaggcatcttctgaccaaatttctttcattctttcttttttgagacagagcctcactttgtcattcatgctggagtgcagtggtgtgctctcggctcactgcaacttctgccttccaggttcaagcagtccttctgcctcagcctcccaagtagctgggattataggcatgtgccaccacacccagctcatttttgtatttttagtagaaatggggtttcaccatgttgctttggctggtcttgaactcctgacctcaggtgatccacctacctcggcctcccaaagtgctaggattacaagcatgagccaatgcacctggcctcttctgactgaatttttaagaaaatttttaagaattctcaatttggccagccgcagtggctcacacctgtaatcccagcactttgggaggccgaggcgggtggatcacgaggtcagaagttctagaccagcctgaccaacatggtgaaaccccatctctactaaaaatacaaaaattagccaggcgtggtgccgcacgccggtattcccagctactcaggaggctgaggcaggagaattgcttgaatctgggaagcagaggttgcagtgagccgagatcatgccactgcactccagcctgggtgacagagtgagactccgtctaaaaaaaaaaaaaaaaaaaaaaaaggtctcagtgcaaattactttgcagaacatttagtctataaaatgattgctaatttcagggccttttaggaaagcacatcaaaggtcttgacggtgtacatgtgccctctgagtctattatttcctttccaggaaattatctgaaggaagtaatcagggctaggcgtgaaggctatgtgcagtggtgtattgaatcccatgggataaaggcagataggcagattttggtatgagccatgaactgatcaatacacagccgttagaaaggtatggatagaccctcaggttcgatggcaaagtgaaaggaaactgcacgcttcggttccaatgatattatataaaatgtaccttcatgcctctaaattggaagtttataatcttatgattacagtacttacctctggcttatgagaagttaatttttaggaaactccttgactacagtaaatttgttgtatatttcttttactgaagtataactcacctacaagaaaaggcctagatcctgtttccttgatttgatttttgacagctgtatacatttgtgttactagcattcaaaataggaagttctgtctttttctggtactcagatctcattagaatttcagtggccagagctcaggtgacagctgtccatcatttgtcccgttgccaggtctgcatgctgcttgacccctgcagaccagtaagaaagggtcccagtaactggcaaccagcaagaaactcagaaacggataaagaatccaaaagagattttttttaggcatgcttttttttttttttttttttcttaatgggatctagccttgtcccctggctggagtgcagtgatgtgatctcagctcactgcagcctcctgggctcaagtgatccttgccacctcagctcagtagctgggacccataagcatgtgcccatccccaactaattttcgtatttttttggggggctggggggtaaatacggggtctcaccatattgcccaggctggtctcgagctcctaggctcatgcagtcccccacgttggcccccacaaagtgtaggaattacaggcatgagctaccgtgcctttgctagacatgcttttttttttttttcccccagatggagtctcgctctgttgcccaggctggagtgcagtggcgcgatctcggctcactgcaacttctacctcccaggttcaagcgattctcctgcctcagtttcccaagtagctgggactacaggtgcactccgccatgcccagctaatttttgtatttttagtagagacggtgtttcaccatgttggccaggctggtctcgaactcctgacctcaggtgatccacccgcctcagactcccaaagtgctgggattacaggcgtgagccactgcgcccagccaacatgcttaataaagatcacttcgaagctttatgtctgacagtgaatttcattttcctagggctctttctacccaggggtttatgtattgttgtgcgggcaggagtagcagttttcgtgacccaggaatgatcagtgtgtggcttcctgttccggttcttagccttggaggcccttagcttgcatgcccatcagcagtggtgggagtgtttgtcgtgtgcgggtcgcatgttgctttgcaaacatggttttcaccttcacaatcctaagagcttcctttgttgtccccattttaaaaacaaggaagtgagatatggagagttggcacttggcctaaaccacatttcacatacagcagaggccagagcaggattcgaacccagctctgtctgccacacgcctgtgctgcctcttgaaggtgcttgaggatcttgggaggagaactgatcccaaagtgggagtggttcctgtatcccgggtcccggacccaccgccttatctcagagacattctcttggcagaagtcatcaatgggcagcatgttccggcaacagtccatcgaggacaaggaggacaagcccccaccaaggcagaagttcattcagtcagagatgtccgaggcggtggagcgagcccgaaagcgccgggaagaagaggagcgccgagcccgggaggagaggctrgccgcctgtgctgccaaactcaagcagctggaccagaagtgtaagcaggcacgaaaggcaggtgaggcccggaagcaggcagagaaggaagtgccctggtctccaagtgctgagaaggcatctccccaggaaaacggccctgctgtccacaaaggtaagagctgggccgtcttcccaccaactggaaaycctggcctgttgtcctcgtcttgttacttgcaactgccttccttcttagctagcagaacgtatggcttacaacgagatcgtattgggaagcatcagttattaagagcataggcctgggtcaaatgcctgggttctgatcctatttgaacttcttttttataatttcaacttttactttagtttcagggggtacattgtgtgatgctgagatttggggtatgaatgatcctatcacccaggtactgagcatagtacccaataggtagtttttcagccctttttccttctcccatctgaacttgttaaactagctggtgagcacctcacctctctgaagcctgtttcttcatctgtgaaatgggatgagtatgtacctgccagcacgcggaggggtgtacagcacgctccagtttctgggacattgaaaccatgcatctactcactgatgatactcatcatcgtcactattatcctcgctatccctgcctaatcaaagacacgtgtgctctaggactttaataaaaccacagatcctttaacatggaataaaaataagcccacttgcttggtagaatacattttttcctggtgttgattctaaaaggaatggatcacatggccctattttttttttgaaatggagtctctttctgtcatccaggttggagtggtgtgatctctgctcactgcaacctctgcctgccgggttcaagcgattttcccggctcagcctcctgagctgctgggattacaggcgtgtgccacgacgcccagctaatttttgtatttttagtagagacagggtttcgccatgttggccaggctggtttggaactcctggcctcaagtgatccacctggcttggcctcccaaagtgctgagattacaggcgtgagccactgtgcctgggcaacacggccctatttaagagtaatgaagcagtgctctataatgcagagtgtctcttgtagcagttttgaagaatataatcagctgttttctttataattttcttaaataaactcagatcagctcttgttaggagacaaggggatgtttgaggctctgaaagcttctcgggttagagagtcctagtgcccttctggccagggaactcatttctagtttttcttctgccctcctttcattaaaggttgagtgaggactgtgccactcttataggaaagttgcactgagcattttctgcctgtcaggcactgttttcagtatattattgtaattaattcaattcttacagaaacccttggtgaacacatggtagttattcttatttgcagatgaagaaatggccaaggagagcctgaaaaatgtgcctaggtcacacagcctttctcttgtttttgtttttttcctcttttaaaaaaatgttttttcctttatatccttgccagcaggaagtcatacacagcatttccatatgttgagttcctgctgttcagatgttggatatgtgggctgtcactgagttcatggctgttctctatcagtcctttttttttttgctggggggagatggagtcttgctctgtcacctaggctggagtgcaatggtgtgatctcactgcaacctctgcctcctgggttcaagcgattctctcacctcaacctcccatatagctgggattacaggcgagcgccaccatgcctggctaatttttgtactttctttttttctttttttttttggagacggattctcactctgtcgcccaggctggagtgcagtggcacgatctcggctcactgcaagctccacctcctgggttcatgccattctcttgcctcagcctcccaagtagctgggactacaggtgcccgccaccacgcctggctgattttttgtatttttagtagagacggggtttcactgtgttagccaggatggtctgtatctcctgacctcgtgatccatccgcctcggcctcccaaagtgctgggattacaggtgtgagccaccgcgcctgtcatttttttgtactttcaatagaaatggggtttcaccatgttggcgaggctggtcttgaactcctgacctcaagtgatccacccgcctcagcctcccaaagtgctgggattacaggtgtgagccactgcacccggccttattagtcctttttaataaaacatcttccacctgaagtcacatctcagctctgccactgaccgtgtgaccctggacgtcatctaacctcttgacccttagtgtcctagtctgtaaggtgacaacaggtgaagcctcctcacatgtgttgtggggagtccctgagcttgtgtacgtgatgcgtttggcacagggccagggttcagggacgtgactgttctagcagtggagcgtacgggccaacaggaagaagtacttgtttgtaaacacttggttggctgagcttctgtgagctcactgtgtcatttctctgctggyrtattctctaggctccccagaattccctgcccaagagacccccaccacattcccagaagaggcacccacagtgtccccagcagtggcacagagcaacagcagtgaggaagaggccagagaggctgggtcccctgcacaggagttcaagtatcagaagtcccttcctccccgattccagcgccagcagcagcaacaacagcaggtaaacagatgagatggtaaaagactgtgataaacaggcctgagtgccgagcagatgtttcccctcctcgtccccatgccccacctccaacttagaaaaaggccagaatatcccttatgtgcccccaagaccagtggggacgtcaggagttgtacctcaaaacttgtgaccttggtagatcagcccctggccattatttatttctctgagtggtggaggtccctgggaatgaatacagtctttgtggtttattgagcttgttttctaatattgttaaggaacctattcagtgctgtatgcagtgagctccatttttctagtgtgcaggctggttgttttatttcagagcagtgcaccttggacgttccttagaggacagtgtttcccaccctggggtcctcccaaggtgtaagggaggcctgtgagctgtttgaagagctgcccaagagaggcacgtcacctttgggttacagatgtaggtttgcaggtttcaagttggacagctcccttcctgatgttgctgctgaactagttgtgcatggccttggaggggtcagttatgcccctctcacccatatttcttcatgtgtaaaccaggaagaatgaatacctgcctttcagcatggcagagtgtttcatgccatatcgcctataaactattttattggtgtcaccgttattggctttttataaactttatttttatttttttataaattttaaaagggacctactttttgtcctaaagatcatgtggataatggttgtaattccacccatctctcctagtcctgatagtcttgaagcactcatcagcaatcgtgcctactagagtagtaataagtaagggaacacagtagtcaatactaaggaatagtgcattttggtgggacactgagatgatacatagacattacttagtgcacaccaaacagcaaggtgtgcagtaaattattactaatattaattgaaaatatttcaaaacgtgtgtgccatggagaaacaaaccaaggacttaaggcttttcccagtatctcacttaattacctttaaacttctcacctcagcctcttctctcctctgggcacctgggagccttccagggactgcctttaatgtgattttagagcatgggagtgtaggcgagcactgcacagttactcatgttcttggggtatagaattactgatgggggagagctctggaattacttgcgccaaacctagcagcgacaattgctctaggtaactccttggggtgcggaggaagtgatgggtaagtccttccttaagaatagaaggaattgccgggcgtggtggctcacgcctgtaatcccagcactttgggaggcagaaagatcacctgaggtcaggagtttgagaccagcctgaccaatatggtgaaaccccatctctactaaaaatacaaaaattagccaggcgtggtgccgcacacctgtaatccgagctactcaggaggctgaggtaggagaatcgcttgcacccaggaggtggaggttgcagtgagccgtggtcgcaccackgccttccagcctgggtgacagagcgagactccatctcaaaaaataaaataaaataaaataaataatagaaggaagtctgaaagcaccagggcagcctgtctggtcatattccctggagacctagggtgtagacaggaggtggagctgggagatggaggcccacagccttctctgtggactgggagagtgaatgactcaagtctcttgattgatgagctatatttattgagtgctcttaataggcactgggagtgccaacagaactgtccagggaatcagctcaggatgtgctgtagactgccaggcaggttggccgcctttttgtttgcggaatggaagggtgtgtgctggaggccgtttgggtgtcctcagagtgtgacgcagcagtgagtcctgcctcaaggccaattcagggttcctttaggaattagcgcccgaggtcactgatgggatagagcagggtctgaaatgaaccctcctgagtcaggcaagggccttgattttgaatagttactgataatttgtttacccatttgtgcaaatgttctgtatcctgagtgtggtgctgtgggcaagggtgcacagggagtctcttagggttcagtgagggttaccagcagtaaaatccatcagctgctgtgagtgcaacaaaggagcactggccattctgtgggagcagaggaccggggacctggtctcgtctgggggttacgacagactttctagaggaggatgtgtttaaactgaaaatctgcgtttagggatggagggaagaggcgcttacctaggggtcccagtgtgttcccgtggcctgaagtgcgtggcagggatatatggagcagaaagtggagggccagtcttgcgaggcaaagctagagaggcagactgggcaaagtcacacgggacccaaccctcactgtaacaccgtaggtcacgagtagcctcgtaggatttaggcgtcgggtggagagcggtggagaaccactgaaggctcttttgagctaggggttgacatattgggcgtggggtgtctgtgtgaaaagatcatcctagtcaaggatggaaaatggattgaagaggcctggagggagcagggaagggatgctggtgtattatttaacctcaggtggtagctgcagacaaggagagaagtggccaatgtccagacattctgtgggaggctgctgttcggttccaggagtgtctgatctaggtgaaaacctagcctgtctcgtgtagcacaggcacagatgagcctccattgtgataatggcatggctgtccaccagccttggacagggacctgagcttgcaagctgtaacacactgggggcttccccttgagcagctgcccatccctcccctccttggtcttctgttctaggtgggctttctgtgctgcctgctggaaagctggaagggcgtgtgttgggtggcatctctgtccctggccgcaccagcctgaccaagtctctctctctctgtgggcaggagcagctgtacaagatgcagcactggcagccggtgtaccccccgccgtcccacccccagcgcaccttttacccacaccacccccagatgttgggcttcgatcccaggtggatgatgatgccttcctacatggacccacgyatcacgcccactcggaccccggtggacttctacccctccgccctgcatccctcaggtaagcactgtggtctgacggtccatacctgtatcacccaggatagcgtggtggtcaagggtgtcctctcgagttaaacagatacacctggattttggtctggctctttgtcaagtacacaactggtctgagtttcaaagtagtcacttgcaaagtgtaggtacaataatagttctgtcataaagatttgttgggaaagtcatgaagatcgtgtatcataaattgctttaattaattttagatttctgctatgtcgttttgtccttcttctcattcttaatgttctttgtgctgtctcttttttctttgattagtctttcccaaggtttgtctagtgcctttttaaaatcagtatttgggcttcttcattcctctaacttatttgggttttattttaataatgcctgctttttcttttcttatttcctttaaaatattatcatatacttagtttattaatttttggcttttaagattctctttgcagtactaatttctaatgtagttgctctgtggtcagataatatggtctgtgtgatacagaccaggggtcagcaaacttctactaatgaccagatagtaagtcttttaggccttgatcagctagtcagttttggtgttgtaggacaaaaacagccataaacaatagtaattgagtgaacatggttgtttttccataaaacgttacttgtaaaaactggcagcaggctgagttttgtttaatggctgtagtttgctgaccaactcctgacttaggttgcttgacatttgttgggttttctctgtagcctcttccatggcaattcttttttaacattctacatttgcctgaaaagactgtattctctggttggagatagtccattaagttgagcatgctaattgtgttgtgcaaatgtcttcatcattgcaagtttttatccctttgaccagttactaaaaggtgttttaaaatgtcccactatgatgatggatttgtcaaatcttctttgggagcctgtcagtttttgctttgtctatctggaggcatacaggtttagaatttctgtatcttgttccttttatccttatgtagtacctttgttgtcattaatagtgctttctatctttattgcctactttgatagcaatataataattatagttttctgttgataagtatttgaagtcttttgttccaatttttactgttagcctctttgagcccttatgttttgggagtgtatctttgtatctacaagatgtgtatagctttaccactctgaaagtctatgacttttaattgcaaaagttggtccttttagatttattgggatgatgattattattattattatttgagayagagtcttgctctgtcatgcaggttggagtgcagtggtgcaatttcaactcactgcaacctccgcctcccgggttcaagcgattcttctgcctcagcctcccaagtagctgggattacaggcgcccaccaccacgcccaactaatttttttttttttttttttttttgagacagagtcttgctctgtcacccaggctggagtgcagtggtgtgatctcggcctactgcaacctccacctcccgggttcaagcgattctcctgcctcagcctcctgagtagctgagattacaggcacctgccaccatgcctggctgatttttttgtatttttagtagagacggggtttcactatgttggtcaggctggtctcgaactcctgacctcaagtggtctacctgccttggcctcccaaagtgctggggttacaggcatgagccaccatgcccagccttattgggattattatatttagatattccaactatgatatttcatgcattccattcttattcttctctttctgtgccttttcttctaattcctgccttttcttggtcctrttgtttttcttttgcttctacatttcatttctatatgttagtggttacrtgaaaattctaacatgcaccttcaacttagcaaagcatttggggaggtagaaatctgaagtctctgtcccttaaacctccatgaaagtaagcatgtgagtctgaatycctgggagggggacaattgtttccctgccctggtccaggccagacagacccgccagtctgttcctggtagtaaagcgcatgtgtctatctaatgtgccttttgaggatgtggcccttttgggtctttgttttaaacaatgtctcagttgtatctccctgccctgtatagaaaggcttcatcccctgtcctgagtgttaaggaccaagcctatatctgacaaatgtgcttttcttgcccccttccttggacaggtctttgaaccaggcagggtgcatgtgtgtgtgccttcaraggtcctcaggtcaggaaagattaagagccctatgatgtgtaggtgggtggggtgctgtatccacatgaaagtcagggtaactrttaacttctttggcctttggttgaccctgagattggagcagggctttctaaatgagatgatgtagatcagtctttgccttcttcaggactgatgaagcccatgatgccccaggagtccctcaatgggacaggctgtcgctctgaggatcagaactgtgtgcccccactccaagaaagaaaagtgacccccatcgactcaccccctgtgtggagcccagagggctacatggcactgcagagcaagggctacccgctcccgcacccgargtcgagtgacaccttggctatggacatgcgtgtcaggtgagatgaagcctggtcctgctgccttgccactgaaggargactccaggtcctaattgagagggccctgggatgagctaccatcctaggagacactgcccacgggagacgtgctccttgaagggactcctggttcctctggggaaggagagtgtgaggaggattgcttgaatgctttgtccaagaggctcttttcagatggtgagacgtaaggtgaaggagaagtcccggggtcctcaaatcctgggcacagggcaggcgggtgggggcttcacaaggcaggtggggtccagagcatgggtcttggctcatttctgtggaagtaaacagagttagccctgccacccccatagccccagactcttcacggcctcccaggctccagcttgctcttgctctttgacccggaggattgcctggctcctctgtctccagggggcacaccgtacccagcctgcggccacgacagtcttcactctcatggactccaggggccaccgaccaattcatggcctggcatttctgagacgtgtttaaagatagaacaaatgttgatgcttatgtttttttttggttgttgttttttgttttgtttttctagctttctttttaaaaagtgtttttgtttttgtttttgttttttctttttaaaactaagctctgtgttcagcatggaaaccaggaaccaggctccaatcgcattgactgatttttctggttccttttcaggaatgaaagctctttctctgcctcactcggaagggcagggggcgtaagtgctcagcgcgatctctttgaggagagaggggaggagtacttgagtgcttttgacaagaaggcccaagcagactttgacagctgtatctcttctcaaagaataggccaggagcttttgtttccaccccaagaaaatgttcaggatgcaggtgctcctgggggtcacacccaaaacctcaggtgttccccattggagcctgactttgtcccagatgagaaaaagccagartgtggcagttgggatgttagccaccagccagagaccgctgacacagcccatggtgttgagcgggagacaccccgggaggggacggcctttaacatctcctcctgggacaagaaygggagccccaacaaacagccatcctcggagcctgaatggactcccgagccccggagctccagcagccagcacccggagcagacgggcaggasccggaggtcgggacccatcaagaaaccagtcctgaaagccctcaaggtggaagacaaggagaaggagcttgagaagattaagcaggagctaggggaggagagtacccggctggccaaggagaaggagcagagccycacggcagaaaaggatgaggacgaagagaacgatgcctctctggccaactcctccaccaccactttggaggacaaaggccctggccatgccacttttggccgcgaggccaccaaatttgaagaggaggagaaacctgacaaggcctgggaagccagacccccacgagagtccagcgatgttccccccaygaagagaaataactggatctttattgatgaggagcaagcctttggggtcagaggacaggcccggggccggggccgtggtttcagagagttcacttttcgtggtcggcctgctggcggaaatgggagcggcctctgtggtgggggggtcctgggggcccgcagcatctactgcagcagtcagcgcagcggccgtggccggggcctgcgagagtttgcgcggccagaggactgccccagagccaagccccgacggagagttgccagtgagacccatagcgagggctcagagtatgaagaacttcccaagcgccgccggcagaggggctccgagaacgggaatgaaggctcgctcctggagagggaggagagcaccttgaagaagggcgactgcagagattcttggcggtccaacaagggktgctctgaggaccacagcggtctagatgccaagagccgaggccctcgggcctttgggcgagccctccctccccggctgagcaattgcgggtatggacggagaaccttcrtctccaaagagtcaccccactggcagagcaaaagtccaggcagctcttggcaggaatatggcccttccgacacatgcggatcccggcgacctacagacagagactatgtcccagattcctacagacaccctgacgcatttggtggccggggctttgaggacagccgcgyggaggacaagagatccttcttccaagatgaacacgtggcagattctgaaaatgcagagaaccggcccttcaggagaaggcgccccccrcgccaagataagccccctcgattccggcgcctccggcaagagcgggagtccctgggcctgtggggaccygaggaggagccccacctgctggcaggtcagtggccaggcaggcccaaactgtgttctggggacaagagtggcactgtgggccgcaggtcccctgagctctcctaccagaactcctccgatcacgccaatgaggagtgggagacggcctccgaaagcagcgacttcagcgagcggcgggagcggcgggaaggccctgggtccgagcccgactcccaggtggatggtggcctgtcgggggctagtttgggtgagaagaaggagctggccaaraggagcttctccagtcagagacccgtggttgacagacagagccgaaagctggagccgggagggtttggggagaagcccgttaggccaggtggtggtgacacctcccctcgctatgagagccaacagaatgggacgcctttgaaagtgaaaaggtaaaaccagacaccatctgggccctttttgttgttgtgttctgttctcagcagcactgagttcacgcatgcatgccgatgccgccgtgtgtcggggctgggggcctgcccccaggccgtctgtgcgcgtctccattgcctgcccccacattgcctgtctgcttctcgtggtggtgttattgtggctagagctcccacccccacccccaccccagtggtgctcttgaggccactgtccagcacctgacctgagagtccagtcatgtgtccctggagccccgccgaggggccgctgcagcgaggaacgttgcctgtgcacagtgccaggtgccggtcagtccaccagagtcctctgctccggagttgctgccaggcggcgtcctagggggcatcgctggcctcgtggctgcatggaagtggctcttcctaggtggttctgcttctccactgtgaggagacgtggccccacggtggggttgccacctcagcatggcaggagcccagcaaacgcagaggggagcaggctgcacatggtctggcgagcacctcttccacagccagagrcattcgggtgatgacctctgctcagggaccaggagagggtcccctgcacagtctgggttgactgactgcacttggcttgtgcctcggacagggaggtgcaggggctgctgaggccttccctgtcctcagcatactgaggaagatggcttcacacctccactctccttagaattcaaggcagagaaactcccagagaaggagccacagggaacaccgactctttcaggtggcatctaatccagctttccaggcgccagaggctgacccttggcttcacctcagttttctgccccaagggccctccggcagggcagtcctggagaggagcagaaatgctggcgtctccattctgagcatattccccttgtctctctcccccctacactctgaacatagcatgtgggagagccctggggagccactttccccaggagcaggcagagccggtgggggcagccttacacgtatgtttgcacacggacatggatgcaccgtggccagcctgccgctcctccccacccgaggagtcagctagaggaagtgggcctagatcagggtgccgggcttgtgtgcaggctgtgtgcacgtgcggtgttttccctccttscccagctctggttaacaagatcctctttcccttacagatccccagacraggccttgcctggaggtcttagtggctgcagcagtgggagtggccactccccctatgccctggagcgggcagcccatgccagtgctgaccttcccgaagcctccagtaaaaaggcagagaaggaggccaagttggctgctccgagggcaggtgaacagggagaggccatgaaacagtttgacctgaactatggaagtaagtcatcctcatatcttcaggggaaagaactcaggcagaaccaggggccatgcagtcctcgggcctcccgagtttgcccttgcactgagtaccttagctttcggaacagctcggccaggccctgggctgggttctggggctgtagaggtgagcagagtaggtaggattcccacygagtgttgctcacagcccgttgaatccccgtgacaccctgcagcttccgggctttaaagagaggaagcctggggcccagagacgttcggtggtgtgtccgaggtcacacagctgtaggagcagagctggggtttaagctctttgcgtgttctctcagttgtgcccttgggcctctttggtttggggtaacaatgtgttagatcagaggyggcctgagaaaagtgcggaagtcctgtccaggtttctgtcgagcctgatgctagatctcaggcgcctgttgaattgggttgttcttgtctcctggtgagtggaaagactgttccttctcgtgaaatcttggttcaggtgccatcattgaaaattgcgggtccagccccggggaggagagtgaggtgggttctatggtgggcgaaggcttcatcgaagtcctgaccaagaagcagcgccgcctgctggaggaagagagaagaaagaaggagcaggccgtgcaggtgaggggcggagggtgggggggcatggggctggagggcaggctggcagatgcccaggaaacccagagccagagggtaagggagttctcggtcaagctcaaggtggcagagaggaagaaaggagtatttagcaagcacacattgtctccccgttcctgctattaccaaggcccttctatcaatgtaggaataggtggtggcatcactgttatgcagtggaagaaaccgagtcttgaagagggtgacttctctagggtgataacagtggaaacttgtccaaggcaagatgcagacctccgtcacctcccagcttctccttcctccccactcctcattcctgagtggaatgagatttgtctccctcaagtcaagtggatcgtgaacgctatactaaaatggagtcagggctggacctgcacacagattacagtccgttggcctttcaggtctttcttggggggtgctttgcttggcatygcagttctgcttgaggttttgggagacgagcgttccacacatctctggagcattttcaggtggtgtgatttttggtacctgggatacttatcctggggagaatttgtcagtcttggtgcctttggctagactacagcatcctttcttcccctcaggtgcctgtcaaaggtcgaggcctttcctcccgtattcctcctcgatttgcaaaaaagcagaacaacttatgtctggagcaaggtgacgtgaccgtgcctggcagcagcctgggcactgagatctgggagagcagcagccagggtgagagttggggrtgtgaccccagctgtggcacccaaggtcacatcacacactgggtttgcttctggggaggatcctgcttttgagctacgaatatagatggaatacagatggagtacctgtttgctgtgttccgctgctgagctagtcgctgaatgccgtctgagtgatttgctgctgcaacccccaaacggatacacaattttccttgcctaaaatttggtagaagagcagagcattcattagtctggtgatctggaaaaggatggccccttgggcttagatcacacagtagtgggaatggccttctttgttggtcgtcgttttctcccactaacttatggaagagaagcaaatgacagatagaccagccgcaagagttcaggagctctcttctgtgctgtgcacccttttcttaacatggggaaggctctggaaacccctccctgaatgctcttctggaaaggcaaactgagaccagaagacggtatacgttacttcttagaacatttgttgccctgaaaactttttttttttaattctatatcaaatgtaatttttctgggaatttttccttataaaatagaaaactattttcatagaataggttcttcttgaggtttaggtgaggcagggccctgtgctgttagcccagagcatgcatagatgaataaaaacatggacattcgatatttcacagctcaggcccatgaggggagcttggagaggtcacctagtgccagctcatttttctgcaaagcagctgaagcttctagagggaagggacttgactcagggactccagggtcataggacaagcacccgagacactgagttctgggccttgattctttcactgtttccacatagcttgtcctcatgtgctcggtgaaaactttggttcttgcaaactacaaaataacattcaacatgcccagctttgatggaaaggaagcacaaccatttgataaaacatcaataacactacatttggtagtggctgagtgacaggtgtcatagtattggtgtccaaaaatgcccaggtgccagattggttgagctgccaggtgtgaatcagatgtgactctcaggtgtgagtcatcatccccttttgtcagatcttttactccagaattctgcaggggctcattggtttctcagaccaggggttgtgtccaagggatggcttcagagagcccttggatattaaaatagcatgtgaaaggattttttttttttttaaagatggggtctcactatgttgcccaggctggacttgaacccctgggttcaagcaatccttctgcctcagcctcctgagtagctgggattgcagatatgtgcccccaccccctgctagcatgtcaacttttgcatgcatatctatttttctgggctccggatccatggccattcaaaaagtggtctgtgagcttaaaaatttttagtaatacccgctgggatctttcaaagactctgtagaagccaccaactttggccaggagtggtggctcacacctataatcccagcagtttgggaggccaaggcttgaagatcacttgagatcaggagttcaagaccagcaacagagtgagaccctgtctctattgtttaaaaaaaaaagaaggccaggcctggtggctcacgtctgtaatcccaccactttgggaggctgaggcaggcagatcaccaggtcaggagatcgagaccatcctggctaacatggtgaaaccccgtcgctactaaaaatacaacaacaacaaaaaattagccgggcgtggtggcgggcacctatagtcccagctattcgggaggctgaggcaggagaatggcgtgaacccgggaggcagagcttggcagtgagtggagatcgcgccactgcactccagcctgggcgacagagcaagactccgtctccaaaaaaaaaaaaaaaaaaaaaagaaagatatattttttaatgtaaaaaaagagaagctaccaacttttagaaatagtataagtgaaaagaagcatgagcatagcggaaataacgacagagaatccagattggcaggagtgagggctctgccctgctcactctctcctgtaatccatgagatgttgagaaacacgttgggtgaggatgtggaaagttgggtaaggctgtcagaccagctcttccacgtcagagccgttcactgggtgtcacgggtagggggctggggtggcgggtgcaggggaggcaggggagttggatttctgcaagctgtgcctgtgcttgttctttaagagctcataaactctctagacgggttgctctttgatgccctgactctgtcttcctcccctggcagctctccctgtgcaggccccagccaacgactcctggaggaaagctgtcactgccttcagcagcaccgagactggctctgcggaggtgagtgtggccgctgcccacatgctgcccctgggatgagtgtgtgagtgtgtgctcaccatccacacggccagcttgctgtggcccacccaagcccctgccacagcagctgagcttggaattaggttgtttccatggggccaagctcatcagtggttttccatcttgatttctggcctgtgcatggggcgtgcatgagcaggagaaagagaaaaggggtaacaagggaggacccaacgctgggtgggaagagggattcagggcctcctctgaactggtgtcagcagccacgtagtctggtttgggtcacaagtgagatgggtttggcagcctcggtctggggcccatagaagatcctgtggtcacgagctctatcggggttggtgtgtttggccacacgtaagttgtcaggcatcctcagcagggcaggatcaagatcaggaccagacttggcaagggacaggcagctggggtagaaaagtctctgtgccacatgcagttttactctctggataatcgagttgggagtttgaggctataacccattttgtgctctgcacagcagggttttaagagcagccagggagatagtggcgttgacttgagtgccgagtctcgggagtcgtctgcgacctcctcgcagcgcagctccccatatgggactctgaagccagaggagatgagcgggcccggcctggcggaacccaaggccgacagccacaaggagcaggctccaaagccatctgagcagaaggtaacctggacgttccagtcacagtggccagggcctgggtggaaggggccatcgtctcatcatcttcctcaattcctgggacagtagaagctagagagtgtggtcattccagtctgtgtgtctccacctctctgcttttttatcaaggattcagaacarggctctggacagagcaaggagcacagaccaggacccatcggcaacgagcgttctctgaaaaacagaaagggctcggagggggcsgagcggctgcaaggggctgtcgtcccgcctgttaacggggtggagattcacgtggactccgtgctgcctgtgccacccattgaatttggagtcagtccaaaagtgaggctttgatttgttttcttgcttgctttttttactttttattttggtacttggagaggctgggggctcagatgggattgtctcctagaaggaatagaaggatgggagccaagcagtcttccagcggctagagtgttggtgtggagtcctgcacatggccagtgctctgttgagttgctttaaagattgcttcactgacaccagacaggccagtgatcttccctgtttctgtcaggccacccaagggacagggagaaagaagtgaggctggcgtcctgtctyctgtgccgtggggaaaatctggccatctcgctcatatgtggctccagtgaatgctgctcagtggagtttttgagtcgsggaaactgcatcacgttaatgtatgcctctggggaatgtagggccaggaggatctcagtggrctgtgtggccttttttattttttcaggactccgatttcagcttgccacctggttctgcctctggtcctactgggagtccagttgttaaacttcaggatgccttggccagtaatgtaagtccacacttccacttttggctccactcactgcttggggctggcaggccctgggtgaaggagacagcacatgtatttcaggctgacctgggctggcacgtgactcagttgctagcagctccatgtccttaaaaggtgcttaaatgttcctgcccaggttttgtraccttccagtggggatcatacagttcctaagggctggtttatttggctctctttggttccattgtctcctctgtgccaggtgcgagcccagactcaggctgccttttctgtggccaggggtaaggggcacagattgagtaggagagccctcctcaggaggccccatctcaccatccaagggtccctgccgcctgcaatctaactgttgtgatccagaagacctgctggcgctctaccatgggctcaggagctggcagttgcatctgttgtggccactcggggctgcagctgaggctgtcgcagtgacatctggttcactgctctgtcctcaccacctgcaggggtgggtgctagtgcatatgctgaatgaacgagtatcatttgggcagcgtttcccagaggattccaaggaatgtgagtgctgtacaatattcataggtgttgaatgaaaacaatgttttggaagtgctgggctctacgaggttctttactcgagagtctgcggtctctgtcacatgcagatggacaccggggatctgcaggaagcgggggcactgttgcatttccagcctctgttaccagagccctctttttcagtttgctgaggggcacagccttccctgtctggcccagggcatctccaggccaggtggcaggtgccttctgaaccagatgtttgtgtgcgggctgccagtccatatttatactgccgggacatggctctccctgtctggagggcactatggagtgtggatatgggggtggctctctgcagacttgtgtggaggaaactgatggaggcagccatctccaggagatcagtcatggtcctggctgccatcagtttcatctgggtggtcttgggtacatgtggccaatactgaagatgcatttggacaattcatagacacggagctstaggtgcttttgggaaaagccatggatgggtttgggcaagtcatagatacatttggacgagccttgagtgtgttcaggagagccatggatgggtttkggcaaagccatctctgcacctgtttgtgttccatggtttccttttcctcctctccaggcagggttaacacagagtatccccatcctgcggcgggaccatcacatccagagggccatcggtctctccccaatgtccttccccaccgccgaccttactctgaaggtaacaccagccctgagctgggtgagggcccacccagtaccttagcttacaaagaggcagaagggaggagtccccgaacccctaaascttagattggctctgtccactgccagcgtgatagtaattttcatccctccccctccccttgcttctgaagatggagtctgcgcgcaaggcttgggaaaactcccccagtttgccggagcagagctctccaggcggcgctggctcaggcatccagcctccatcctctgtgggtgcctccagcggggtcaactacagctccttcggtggagtgtccatgccacccatgcctgtggcctctgtagcaccttctgcttctatgccaggtatctcatcccctgagcaaggccttggggtccttctccatttattatcaagaaaaacggattaacagccccgaatgtcacctcctggccttgtcttaagtagcatgtagaagtagcaacttgtttttaggcccagtggtcgtagctcccatgtgctgcaggtaatgtgcacgtcctgcttccccacgctgggaaacagaactgggggataacagcgaggcactcctgcctactggtgacaggagcgagcaaaggcttgactttgagtcagacctgggtcatgtgctggagccgtgtcrcctcggctggtgagcagctcttgccgagccacagtgtcctctcctctcttacatgaaactccgtggggtggccacacccgtgaggccaggtcttacctggaaagggctttgtatcaacagagccctcagtcactggcagctacttttgtcctgattgctgccatccttatcgtgtgccagtgtccccaaggggaagcgtgggggttttgagggcccagctgccagtctcagtgatgtaattccaatagatccttctgaccctccactgtggactcaatagcagggagatgaagaggacagtgactgagagaccaaggcagccctggttaaagtagaatgccccttcgagtgtctggggtagttggtgagtgggaggtgggaagggtaggccagagcccacctgcctcctccctcctcctaggtctgacgctgcaccctccctacgttccctgaggtgcgtgccaggcgtgttgtgagcaggcgtgtgcttcmggcacacagggaacctagcagcctctgtacacacgccctcgtccccactgagtcccctgggtagagcagacctgtagactgtttccctcagggacattgagaagtagtgaggcttgatcctctwctacgtcccttttgccgctctgtttccaggcagccacctcccgcccctgtacctggatggccatgtgtttgcaagtcagccccggctggttcctcaaacgatacctcagcagcagagttaccaacaggtgacagcagcwagccaggtggcctggctgggggtggtggggaggagccagtgcaggrcggaattggcttgctcatctatttctcattgtctgtctggttttccatccccctcacatgtggtgaccagcacctggcccgccacggcagccaggaggcatttgttaagcgaataatcsagacagggaagaggagtggagttggctgctccagactctgcttagttttcctttctcaaagttctccctcctgtgtcctagccggggaattagctaaaatggaattttctttggtgatcaggtatccttctgatgaagagaagaaaggcctaaactcccaggcatggatgcattagaaagaggtagtcttagaaatgagcaggcgttggttatttatgcaggactggcatactttttctgtgctgccaaggggtgatttttggaagtctcccctctaatgctggtgctgggcctttgggatggtctagccgcccctcagacccatgtgcctccacagccacgacagtggacttccaggcagaatctgctccaagtgcaggcttgctgatggaggatgtggcctctgctgacctctttttaaaaacatgttcttaactgctgtattgtttggttaccaagattttggttcttgcataactgggtcagactgcatgtatctttctttttgtgcattgttaaattcagcgttatgtttttggaactcacctctgttgacgtacgtgctaggatccatttttgttgctgtgtagaattccagggtagggatatgctgtggtttggggttgctaccagtttttcattataggctttatcccaatagcaagggaagcccaggaatgacatgctggcatttgaattttgggcagtgttccagcagccatgtggagaggggcaggggaggtgggaggggaagaaccacctggatgggccttgcggttacctccccgacccygttttcccgttcacaggccgccgctgcccagcagatcccgatctcccttcacacatctctgcaggcacaagctcagcttggactgaggggtgggcttcctgtgtcccagtcccaggagatcttcagctccttgcagcccttcaggtgagctcatgtaccagcttgcggagctggcagctcacagccagggccttggccctgtgtgcagccttcgtcctgcagctgtttggtgcttgtctgctttggggccagtggggcggggaggggtgggagtttgctctgaatcactcttcagtccgttgttaactgtgctctaggagaggcctggggcgagctgataygtggtgggccgtgttttgcttttccatgtcatcttgcctcctttccttgctccttcctcctcctctccccttgactccctgtctcctccccaccgcgggcttctccgtcagtgtggctgccagtcattgtggctgatgtcctgtgcctcgtacagcctggatgtcttcacttgtttaatccagcagcatcagcgccatctaggagcttgttctcaggccccatcctggaccctctgagtcgcgctctgggggtggggccggggatctgtggtttagcaagctctccggggatctctgaagggtgggaccagatccgcagctggactcatccacctgatcccgaccatctgtctggcttttgcagatctcaggtgtacatgcaccccagcctgtcaccgcccagcaccatgatcctctctgggggcacagccttgaagcctccatactcggcgttcccaggcatgcagcccttggagatggtgaagccgcagtctggctcaccctaccagcccatgagcgggaaccaagccctggtctacgagggccagctcagccaggctgctggcctgggtgcctcccagatgttggactcccagctcccacaggtcaggaattcagtcactctacccaaagccctaggcttctttccttcacgaccttgccttttcttttcacccgcctctcagtgtgtgctggcctatcgtgctgttggttggtagccaccgtgcccattcctcagcgtgcaggaaatcagcctcttctgagtagccccatcaccttttttttttttttggacagagtctcgctctgttgcctaggctggagtgcagtggcatgatctcggctcactacaacctctgtctcccacattcaggcgatgctcctgcctcagcctcctgagtagctgggactacaagtgtgtgccactgtgcctggctaatttttgtattagtagagatggggtttcaccatgttggccaggctggtctcgaacccctgacctcaaagtgatctgcccgccttggcctcccaaagggctgggatgacaggcgtgagccaccacccctggcccctcatccatctctttattcttgagacctggctgtcccctaagcactgcctgctcctgcagcccccagacgggggctccttcctttctccctgcccttgtgcagtagggtgtggaatgggttaagagtcctctttgtgtagttgttgatgcttctagactcctcttcttccttcctccctgaaacgccagctttgaagcccacaccatagactgtgcctgacaagcccttcactctgctatggtgccatcaccacatccagtgtctgctgagaaatcttcctctccgtcaacctgtgggcagtatttggcacctttgaaggtcaccctccttgtctggtctggcttgcagtctgtctccactctcctgttccagttcctagtggttttgatgtctgcagagatgaccccgggtctctgtgccatggaccctgtccatgcagtttgtgccctcctcgccactggtgcccttgttcacatgggcccctgctctgtgcactcctgtctaggcttggctgctcccagtagctgtggctctcgcataatctcaactctcagtgtccctctcagttgtcacctctggctttttcaattcactccctctagtgacccaactccaaaattcttttttttttttttttttgagatggagtttcgctctgttgcccaggctggagtgcagtggcgcaatctcggctcactgcaacctctctgtctcctgggttcaagcaattatcgtgcctcagcctcccgagtagctgggattacaggcgcccaccacccaccggctaatttttgtatttttagtagagatgggggtttcaccatgtcaggctgatctcgaactgctgacctcagtgagccacccaccttggcctcccaaagtgctgggattacaggtgttagccaccacacccagtctctgccacccatgtttttgtcatcctcccccttggcctggcttcttcctccccatcagcagatctgccgagccacatggcctttgcatttcatccaagctgtggctcccagtcaacccccaccctcctagcagcttttcagacttgcatcttgcccctcgctgcctcccacccatgacctccctttctgtgtcacccaggaaacaggagcagtgacagtctccaagcccctgtggccacatccctgcctaggtgctgcctgtgcccctggggggccctgccccagcacatctccctctctttcatgcatcagatatcccttcccrtcagtacacagacgagctgcagtgctgaccccgtaatcccgccccccacacccctcgaaccactttcttcacccagtttccaggccgtcgctcctggctttcctgctgcctcaggcctcctcctcagtctcctttgctgtcccctctccttcccagtctgtaatggtcagcatgcccgtgggccctgctttgggtgtgtttcaagagtcatggctctaaattccttcatcttctcctcactcccaaatggacatctttagctcagatctgtccctggaattgaatctcaaatccaatggactttccagcatgtctgctatggtgtcttatggcatctcaagactcatcatattcaaaactcgattttcctcccggtccttctgcttgtccagtccacatcctccttggctccctgctccccctcacctcacccccttacccttcagcaggcctgtcagctctggctttaaaaggattcagaatccagctgtgtctcatcccctccacacccctgcatgctgtccagctcctgtagggactcctacctggcctccctgcaagtcagatcataccccaagtcagcactctataaatggcagcatsttcccatcattttcatcctgcaccattttggtgctccaaggaggagcatggtgttttgcggctctggccaccacaagtctcagtgatgtaattccaatagatccttctgaccctccactgtggactcaatagcagggagatgaagaggacagtgactgagagaccaaaagtggcccagcccccctaccccatcctgttcccctgtccttacagtctctgggcccacatccccacctcgcatatcttgttctagttagttaggccctgcagctaccctgttctcctgtcagcatgcttcaaaggacccccacagtctggaatccagcccagtcttgtttttaccaccacttgatgcaaaacagtaagagtcttgaacgtgtgtgctgtacaaaggaatgcagagatatacgtccgatgcagctttcatcttttgggacttggcttsgccattacttctgactttcctcactcgtcctctccttgcccaccccgccccgtgtgcacccataaatctggtgtgcacccacagatcctatgccgctctgcatcccgagtgtcctgcagctgtgtccagtgtgtgacacactatcctggcagtgtgcaggcccatgttggacagggccctgccgcttccttggcaccttgtatgctttcagtaagcacttgctggacaaaggcagaaagggctgaagatagacgcagcccttagcagagatgtggatgagacacacttaacgctgttagttcccatgcctgcagccagcttagtcttgcccgttttctcaccacctactctattccagcaagaagacgtgcctctgccatcgaaggtgtgaaatcctgggcgatctctcctgtgctgcagtagaaattagagcatgtcctgctttatgcaggctttgctttagttcttctgaagtgtatgaatctgaagtgcatgtgcggtcgctctttggtgcgtttggggtttctccatagcatcattccccctcctgactgtcattgtcgcccagcagctgaccatgccactgcctcggtacggctccgggcagcagccactgatcctgccccagtctattcagctgccacctgggcagagcctctccgttggggccccccgaaggattcctccgcccgggtcccagccgccagtcctgaacaccagcagagaggtaaggggaccccatctgcctctgaccctagggagggggccttgtgtmaccaactttttctagcaagctaagtacccctgtgtggtagaaagagccagtggcgtgggactgccagggcagaaaggaaggtgaccatgtgtggggccatcacagaggcaggtcctggggactctgaacatgtcgagggctgagggccaggaatcagcattcctccccagctccccaggaggccctgctatggacggccatgtttcattggctctcccacttcactttaaaaagaacaaaatattgtgatggttcttgcttctaagaagaagccctcttgagtctggcttagagggaaagggcttgcagatttctctagaacaggggtccccagtccccgggctgcagagctgtactggtctgtgggaaaattgtcttccatgaaactgggccctggtgccaaaaaccactgctctataagatgcctccctgggaattcccatggccctcaccacctctgccctgggttgttcagtaagtgtgtggtccagctgtctccagggcctcaaatgacagcttgttcctgcttggtctctctagccctctcagatggagatgaaaggcttccactttgccgacagtaaacagaatgtcccttcaggaggccccgtgccatcgccacagacctacaggtaaagccactccctggggactgcgtgctgtgtagctgagcagttgccagagctgcggcccagtgactcagaagaatctgggcccagggagagcckccagagacctggtccctctatgggccatgtgtcactgtggtgtttcagcactgggatgcacttgtgttccagttaaatttgggggagtgaggagtcaggagagtggttttggttttaatcattataataagatgctctggattggggagctttctggaaaggtaggaaaaggaacggctgacatttagtaggcatcaggactgacgtgacttcccattagatcctaaaaacaggacccactggccacagggctgcatcctggcaaggggaggagcgtggcctttcccagcgtctctttcctcagacttgccctatgacccctgccaggggactttttattgctgggcttatggggccattccttccatgctacaaaccagcaccctctttttgcttcctttgtgtctgtctccacctccagcaactgtctcaggtccccttagctggatactcaggtggctctgtcggatgttggcgagagcctctggtccactgccttttctgcccgtgctggtgtgtgaaggcagcacgctctggccctgggctccgagggcttgtacagtccacccttgttacatgtgggagattcctgagacccctctgtgtttacaaatgagtgaaacagacctgcctgacccatggtgccctgtgaggttaacaccatcgctgcagacgccatgaggtatccccacgactacacaggtacttgtgggcctgaggagcgctctgcaagccgggcccccatggtctgcaagttgctccagctgcaycccctctgcctygctgccctccctctgccctttgcctgtcctccatcacagcattccactcttgtaccttcatttccagagaaaggggtttttgtagattttcctcccattccatcttttctgttcttattttcactctcctggcttcatttatttctgtttttagtacgtttcgttttcctaccatgtctgtcacatagaccaaaacatcaggactgtgtgaaaaagatagctggacagcaccgaccatggagcggaactggaaggaggaaggcggctgcaggtctcagcagacgctgtcccgctgctgccacaggcagattccagcagcctctggctacagagccttcctcaaaaagcaaaacccagagacagagcctcacgggacaagagtcgcctgtgtctatgtagttgtaggaatgaatggcagcagattattctttggagcatatttagaaagtggaagccttaaactagtagctttgtttctatggtgttttaggggggttggggaaattgctataattgtataaagcagtgtttgccaaagtgttctggaaatagagctgctgagatgtgcgctgcaaaaacaagggttccctggtcaggtccttgggggagtgctgtccccagggtggcctgctggggagggtactcaccacacaggctgagcgggcctaggttgagagtcctgttgaactctgcacacggcacttaggctttttgaccgcagacgttttttttttccacgtagcacctaattaacatccctgggaactaactagtggtcagtggaacacatttagaagcatgttgtacattttggttcccccatccccttttctgaaaagtgaagactagaacaatactcggcacagttctggctcagcgtcaggcttctaggccttttgtctggggcactgcatcgtgttggtccagaccctgagacggccagtgtcgctttctgcacagcaggacagccatgcccatctgtacagggcctcagcctccctctcttgcggtgcgtctccttgagctctgtcctggaggtgccagggtggtcagtgacagccaccccctcacccttctgcgttctgggctgtcttaggtctgtggttgttttccatccaagagatccacggaccgtcccgagtgagcgcctctggccgcaggcccttccttccttgtgcctcctccatgtgctaggctttgactccatttctgtggtgacacgttgtgtattctcaacccctgcctttggttttttcaggcctagctctgctagccccagtgggaagccctctggatcagcagttaacatgggctctgtgcagggacactacgtgcaacaggtagaagatggctttccagacccttcagccctggacacttaggcccgtctccaagcgccaaaagagaagggactgtccaacctatctgagcgccccctgtctaaagacagccatgccctagcggttagagcacagaaccgggagctgggccgcccgcgtccctcctggcgaaggcatttctcctcttgacgggcgtctggatccttccttgtcctgcagagaagggaggatgctgattcctctgaggaggtggtgctggaaggtggaccagccctggcaggtcggggctgaggcgccctgggagactcggttaggtttgggggtcggctttaggagccggggtgcgcgcgctggttctagtcagtggtgtgtctcatctttgtcttggctgggtgggagcacaggtgaaattaagttttcccattttataatgaaaaggacatcgcagtgtcttttcctgcacgcactattctcttctctattctctaaaacgtgctggggctcagagcttaagcccctcagacgtgggtttttaatcagtcactgtgcctggctggtagagatgggaagtgattgctctcattggttcccctaggggtcatgaaagttgtgtggaatgagcttctaaagctttcttccagagttcagacctggtggggggcagatgcgctggctgctctgtgacttccccaccccactccccgtgtagagccacagaccaggggagccctgactaggaatggggccccagggaaaggttacagagtgggaatggtgggggggttggctgaatcgcggccagagatctgtgggggccaagtctgcctagggccccagcagacagtcgggggctccgagacgtgcagggggcacttggatctacttgaaggggccttttttgcctgtggggcaggaggtgcactgatttgaaaaggttcttccagttggccttgggaccagaactgcttccgccctgggatgtgccatcgcggaattctttgtggaggacccggtgtcttcctgcctctccgaatcactgcactcagggcttatggggagggagcagagacggcactcgcgccactttccttactaggaggggggtttctaagtctggtccttcaaccaagggactgacaayttaggggagctttccctgcaactcaggagcaggaagggagtggtgggaactatgtatccaaacacgtttcagcgtcagggtcactttgtttttcccattcatctgtccaaaggcaaaacaacgagtggatgagaaacccagcctgggagcygtgaagctgcaggaggccccctcggctgcctcccagatgaagcgaaccggagcgatcaagcctcgggctgtcaaagtggaggagagtaaggcctgacagtgcctggctgccacctcgcctctccctactgaggacggtgccgccatgcggcctcgacacagccgacactcgggagcctcaccagatccaccgtccaaatgcgtggcccagactgagagacctccctcctctccactcccgaaagctccgttgtcaaccagcttgcacccgtggatatatggcattgacccgcttgctttgatacgaaacaaaaaagcagacgactccttcatcccatctgctcctaccgtgactgtggagtgacgcctcctgtgcagtgcagatttgccctccctgcctcctccctgtcctgccgcgcagccagggcgccttctcagcagtgcttccggcccagccgcccatccctaggcacagtgatttggcagcagggtcattttactttgaggctttttgttttaaaatgtagccaaggtttttacaaaggggaaaggaaaagaaaacaaaaacgcaagctccatgtgtatagctgaacttttatatgtttcttgccagcccctccgctcccttccatctctagcctctgtcctgtttagtttgatacgtcactgcagtaccttaagaggtgactcttaagaatgcatcccctcctgattcctcagctggttcacccttgaggttatttgcaaaaagaaaaggaggttcttgagggcaccgattgcgagcattctggtgcctggctccccgcctgggaagcgatggggtgctcagagcagcaggcaggttgggggagggggggggtcatagttgggttccagctcctggcttgatgagcccagggcgcttacaggcagcccatgaagttgatgacagttttagcatgagaatcacacagggtccctgtcctgggctcctctaaagccagtggatgtgctgggcaccagagacaaatcatggagatggctgctggtggctcccaggttggcccagatggggtgagctgacatacyacaggcccatcccaggccccgtgggctctgcttctggggctccataccctgccctgcrggggtgctgtgtttttcacacatttctttccctgaagccttctgtaacctgtcattttccttccttcctcttccggagcctgctgctttctctggacctgtctccacctcccacacagctcatcgtgaacaccacttggtgatggagggagtggacccgtgtgtggtccccaagtgaggccactgggagtttgtccttttcctcctttgcttcactcccagcagcagacccaggttgtcaggacaggagggcctgagctaagcagtaggcatcagtctcgtttgtcttcagacggcgggggcaggtccagggtgaggctgggtggagggctgaccaaggtccaaagggcctgcgcagcctccgggagggcagcttctccagccagaggyttgtgtgagccatcgtgtgctgggctygtttttaagtaagaaacaaggaaatcactccagattctgtcattccaaggaaagggaaggggacagttcaggtttctcagctgttcttaggggtcactgagcgtctacctcctcctccagaggaggctggctcagaacacctagaggagggggccggggatgcaccccccaccagaggctgccttcagcgtctcacgggtgcaggacagcgctcaggcttgggctctaagctctgtgtctagtgtagaacatggggaaggagcatcttaggaactgctgaagtaacttcttactkctctcacaattctaaggaagcgggagaacggcctcctaccaacagcgcccaccccagagctgcctgggaaagggcagttttactgaaaggtgctttactgttcacctgcatctttcagcagctcccctcctgccctcacctggtcttttccctctttatcccaagcctttatgcttgagtcccttccccaggggctgcccacccgacagttccaggcattccctacctgagcttcttgtctgcttttccttctcccactgcaagcggctgcttgtggggcctgggatgagccctctctgtccccaccggccctccttgccaagccattcctgggtgagttcaggcctgcgggagccacacattcatctccacctggacacttgagccgcatggccagacccctcccacctgatgcggtggtgcgtgtgatttgtcaaaagaaagccttctggatgctgttaagatgtacccttcaggtgaacctggtatcagacccacagtacttgctgtttgagaaaaaataaaaacaaaaaggtcacctgttctccagcccttttctcttacctggtatttccttcctttctcctcccccaccccaaataaaaaaacaaaaaacactagaatttatttatatgtattgatgttgtaggtctaggtgaaaaaaaaagaagtaaatgtttcactgctctatttatatataatgtctgaattaattctgtgcaggaaaggccaggaaattgcatgtgaagttcggtgcagtcaccacctgtgtgtgacctgagctgcagtctcttcgctgagatgcaggttttaaatgagacttggggggctgagggcaggcctcaggcctcccagcgccccaacccctccttggtctaatgaaatgcagttcttagtgcagagatgttttaaggtgcaatatatctcttcctttcccgtggttttagagccaagctcaaggtagtaggacgtagggtcttattttgttttcaaacccccatcctcagagcgcagatacatgcagaggcttctgccaggataccacggggccttagtgggaacaggtggagaccagcacttccctttcctgctgctgaggtagggattggggggtcagaacccactcacttttgcctgttaaagttgccctcctgacgctggcagctctgccttggtcactggggatgcggctcgttgctcagccaccagtggccttgcggtattgtccaccatccactagagtgggatgaagtccagagtgtgggtatacatytcagatgcccatctacccactggggacttcaatgccagctgcatttggtttggttttcttaactgttggcttctccccacagcgttttttgtttttttttaaacattcatattgttttcaaacttggaattcatagacactctggctctaggttccttaagggggaaaacaaaagatgactttatttcacattcaagaaaatcagttcagttccaaagctgtggtccttccagccacttctagggacactggggaaccttgttaaacgttgacatcagtgctctccagccgtgctgtcaccctcctatcttctggatctgccttygsgatggtcagtgacagcttctggaagctgascacacacaggtgcacagccatgctgtggtctggcctgctacggcagcatggcagctctggtggagccttctcccttgccatttggttcccctgtgccaagtagctgcaggctgcccctcaaatcttcatttgtcccttttcacttcctgcagaacaagcctgggttagagggtctgctggaaatggcctttgaagaccaaggataccaggatgtgtgcactctgtcgtgttctgtgatgaatgggaaacgbaggcttccagaaagccagctctcttctgaaatgtgacggacctaagcaggaagtcatccaggacaggagtggctcagtgttggggatggacgctgtcgcccagccatgctccaccagggccaccaatgtgtagttggctggtggtcttcgggcatgtgagacctgctcttcactgtttccaccccacttggtggcctccaggatggtagtggcaccctcagagccccatcttcagcatgttctgaagcctcagagtggaaattcctgctaaggctctgtgtggacgcctttctcccgtgatctaaaggggacactgtactcaagcttttgacctcatgccttgtgtagtaaaaaaggatttgggggttttgtttggttcctgagagggttgtgttttgtttttgtttccttttgtttatgttttggcctttcctctttgtctttccatgtagaccagatatttgaaagggcagacgatggctagaggtgtaatgtgcagcttgtttatacggtattttgggaaacttaccttggatgggaaatcgaatcgtggattcaccaggccggtgctggcacactcaccctcgccctttccctccggttcagtacctattgtttctcctttcaaatatgtgattgtactagctctttccatatgaaagaattctccttatttaaataaaaaaagtttaaaaagataaagctgaacgtgctttctcaggttgtacatccctcgtttcttggtcatttgaccagagagacctacagatcaaagaattctaattttacagagttcacacggaaattaggagtggcacggctgaaatgccttaacagaagctgtgtgggtagagaagggattgaaacccgtggctaagaagcatcttccaaatgcggcagcatcaagcactccactctcttcccacggatggcatctggttgtgcacagtgcctgcctgtggccccgtcacttgccgtgagaaacgagctggtcagaggaggtaagcatttgatgtggcgtgttgtgttgtcacttctagcggtgcttttgcaggaagtggaggaggattatgctgtgctttggggtggggagggagcaagccaggcctggggtagcgaagggtaaaaggtaagaatgggctgaggcagcagttctcggttttgccattgcctcactgacctggggaaagacgtttcaccacctgagtcagtctccttaatcataaaacacagattgtaatggtatcgacctcatggcgtagtgtggattcaaagtcaccagtagcttttagcttagtgcctagaaccagctaagaaaacttataaattacccccaagaaataaaacgctgtttccatgaggaaccccagtccctcaacttccttctaagccttttgactatggaagagagttggggacctggccatgggcatctcagctttaactagccacactcactgccctgatttactgctccctagggacaggtggctcacaaaatctcaaacggagaccagccctgaaagaggctagtcctaaggttgggggcttgcaagatggaggctgtaagtcctgaggcaccaccactgttagcatggcatgaaccaaagcttaacagcccagccccactccctcctggggcccagggaaccctccctgcccactgtaaatacagttgcctgcaggctctggccacaaacccaggtgagccccagctccttgcctctctgtgggatcttgggtgagtcacataacccctcaagggtaagccataaagaagtaaccacgaaattctaactggtgtcatctaatgctatgttgcccaacatggaaaaaaagtcttgcaggcagccaagaaccataatgaaggttattaaacctgcagtgtgcccttttggtctgtatagattaacatacaaatagaccaggagatcaagaaggagcgaggctgagaagagtgatccatcagcctggttgcgttgctgtcagttaccctgctctgggtgccgactgttcagggaaaacatgggaaggggtgcattgacccaaccaaaagtaccatgtctgctccaaagcaggcctttgggaaggctcttgaccctcagcagagggggctggagaggctgatggatgaggaggagccctgggaatggaggaagaagcctccagtcttctgccacggagtttaggggagatgcccccactggagcctctgatggtcatgcagcccccactgatgtccaggtttttttggttttgttttttgttttgagacggtctcactttgtagtccaggctggagtgcagtggtgagaccaaggctcactgcagcctcgacctctctgccccaagtgatctcctgcctcagcctcccttgtagctgggactgcaggcagacgccaaggggccccgctaatttttgtatttttttgtagagacggggtctcgctgtgttgcccaggctctcctggactcaagcgggctcacggatcctcccacctcggccacccaaagtgctggggttacaggcgtgagccaccgcccccggccctaggtccgttttaaatgcccttaccctcagccacttcaccgctagatgtatgtgcaagcaggatcgtggcatcgatgtttttcggcaaggaaactaggagcgcccgcgggcgtgggggcacgtgcctgtggtctcagctgctctggaggccgaggagggaggatcgcttcgggcagagaggtcgaggctgcagcaagccgtggtcctgccactgtactccagcctgggcgacagagcgagaccccgtgtcttaaaaaaaaaattaaggtcggacgcagtggctcacgcctgtaatcccagcactttgggaggccgaggtgggcggatcacttcaggtcaggagttcgagaccagcctggccaacatggtgaaaccctgtctctactacaaatacaaaaattaaccgggcgtggtggcgtgcgccttcaatctcagctactcgggaggctgaggcaggagaatcgcttgaacccgggaagcggaggttgcggtgagccgagatcgcgccattgcactccagcctgggcaacaagagcgaaactccgtctcaaaaaaaaagaaaagaaaagaaaagaaaaaaactaggagcaaactggcgcgcccggcagaacgccgttgtgcagacgcagaattaagatcttcacgccagatggagtgaaaaagcaaggagcagaagatgggtgggagcccactgcgctttttaaaatctgcacgtctgcttagagtacacagaaatcctggcacacaaaacagtagcacccgagagaggggaggtcgccgcgtttcacacctgcctctcctccgggaccggcgccctcgcccgctgcgcacgcgcgtcaccctctcccagtgcgcacgcgcgctgctgcccgtctggccccgcaggctcggtgaatcgaacgttgagcagggcggtgggtggtgcggagtgccgagcggcctcacccccaaccgtcggcccagtcggacggttccgaggcgttgccgggagccgggcgcggctctgtgtggactcggagaaacgcgggtacatttggggacaccggggacgagagcccagcccggacttgggggagtccgtcagtgccggacgcgggtccctggcttgcggacgggctggggccgggggcgtccccgtctttccggagctgggggcggggttcgggcccgggcagatgcggcgttcgggcggccgagccccgaagtaagaactccgtggcgcgtgcagccctagggaggaagggcgtgctgcgggtgcagtctcagggtgaggacggagctggggccgacgcagcctcgggagttggtggacgggacaggtgcggcctgtggggaagaagggccggccagggagatgcggtctgcaaggggagaggaggcactcccaggacagatgggaccttttgggacgaaggcgctcaaggcagatgcagctcagggagggaagggcgcgtccagggtagatggggcctgaggagaccagcggggcgccaacggccagatgcggctttggtgtgagacagggtgtcccaggcctgatgcagcctcaagagaagcggagctcaagggaagatgaagcctggaggagaacgtgggggcgcagggtgcaaatgcaccctccaggcgagaaagggagcacccggggatgatgtgccgctgggatagaaggcagggaggcactgggggcagatgcatccttgaggagagatgaggaggccccgaggctcggccaggttggggtccctgggctgtaagcagctgagatggcacccaggagctgcccagggtcaggtagctgtggccgcactgtgggcttctggtcgtcggggagggaggggagaaaccctggcgttccttagcagtgttctcgcgcccaagacgtgctcggcaggttttgtggaatgagttgttgaaaggagtgaatgtccagtcctgagatcccctgaattcccacccgagttcactgctagtgcccctcaccccacatgtctacctgaaccaaggctccaggaacttcggtctttctcagcagcccggctgtgctgtggttctcctcgtgtgtccgggagccgggtggctggggatcccttctgtagcctctcgtgagccctcatggaccacggctcctcccttcttttctagggcgtctgcctgagcccgcttttctacaagatgtggggatttttgaagcgccctgtagtggtgacggctgacatcaacttgagccttgtggccctgactgggatggggttactgagccggctgtggcgactcacctacccgcgggctgtggtgtaagctaaatgactccattcccagggtgaatctagaattgtactttgtgacaggaggcgcccttactgaatagcataaatgggagagtgaaatcctggcttcttggtgataggtgtttttggcagtgagaggagagaccagtctgtccccaggacagccccagcagagtacaccttttaggtcttgccttctgagtctgtaacaggtgaaatttggcccattaaaggggtgcagtagaggaaaatctggttgccagccttaagtaacagttttaaagtctggacggcagaggattaatggatttggaagtaagtcttcactgttgagagcactttttagaatgtgtttttgtcataatgggaagtgattgctgttattattgaagggctctttattaactgattaatatgtgtgtgtgtgtgtgtgtgtgtgtgtgtgtgtgtgtgtgtgtgtgtgtttttgagacggagtcttgctgtgtcgcccaggttggagtgcagtggtgccatctcggctcactgcaacctctgcctcctgggttcaagcaattctctgcctcagcctcccgagtagctgagattacaggtgcccgccaccacacccagctaatttttgtatttttagtagagacgggatttcaccatcttggccaggctggtattgaactcctgacctcatgatccacccacctgggtctcccaaagtgttaggattacaggcgtgagccactccgccctgctgcatgttcttttttaactttttattatggaaaacgtcaaacatatacaaaagcagggagacaagtataatgaatgaccccccccacacacaccagtattttcattacccagcttcaccttatcagttcacagccaggcccctccctgcagtggtttttactttgcagcaaatcctagtattcatagataattcagcggtatatctgtaaaagatgaggatttttttttttttttttttggagacatagttttactctgtcgcccaggctgtggtgcaatggtgcgatcgtgattctcctacttcagcctcccgagtacctgggattacaggcacctgccaccacgcctggctcatttttgtatttttagtagagaaggggtttcaccatgttggccaagctgatctcgaactcctgaccttgtgatccacctaccttggcctcccaaagtgctgggattacaggcgtgagccaccgtgcctggctgaggattcttaaaaacaaaaatcacataaccacagttgcattatcatgcctgagaaattgacagcagtttcttggttatcttcacctctccctgattgaaaacatgttattgcagttgattcccacgttttcctttcatacttgcagccgtttcattgggtcatcgctagccacagacatgtgctgctggtgggggcgggggtgggggggttgggtaggtgggtaagcaggattagccttgcgtcccaggaggtctttcagcaggttggctcatagtatccacctaaatcaaacacaagggagagacagaatctgtatgggcaggcatgctgagtgccagctgtgcttggtgaattccccatgtctctgtgggtgggtgatgctgtatgcatcttaatatttggggatgggaaacaattggggcaaaagatccagcctttgctgatcactcactcaaagtcatttggaaacacatacacatttatcctcacagtttttgtttacagttaagattctaattgaatataatatgggttgttgtttttttttctagttttgacgaagtatattatgggcagtacatctctttttacatgaaacaaatcttcttcttggatgacagtgggccgccat

SEQ ID NO: 7054 - DNA, 21063 bp, Homo sapiens
catgttactaaacctctctggatcttagtgtcctcatctgcaaaatgagcataatagtggtacttcccttgtaggattgtttttaatattaaacagtatacaaagagcctagcacagtgtctagcacatgttaagcatgcaataattactttaattgtagagtcacaattctggaagccattcccctcaggatacctaagggatgaggcagagagggatcttgggacatgggcagggctggtaaacgtgaaccaggaagggtattgtcattaattggactaaagatttgctagtcatttttcctttgaagatgaggctgaatgctggagccaagaaagaggaacttcctaggcaactctaaaggggcggtcaactagagagagatgatgagaggcaggacacatacttctggcaatttaaggcccagatgtgatgcaggagcaaaaggaaaaaagtgaagcttcagaagagggaagaaggctagagatctaagcctgggagagaaggagctttttagaccctaagccaggagacctccaggggagtgatcagcagaggagctgaactttggtgaaggttcctcaatcagggtgaggaaccttgtactacgtgtctttttttcccatgagtttatagactttgggttttcttttcccttccagtcctacaaaatgttctttcaggcaggttaagtgatttgggaattctctgcattctctgtggttgggggctgcctcagctagttgggttggggcagtgaggtagacaggaggcatttactagagaaatgccagatctgtttactctttcaaggaatgtgtgcttgtgtgtgtcttattcctacggtatatcctagctcagggctgggcacacaggaagcatcccgagagtacttattagattgaatcttattcacatctaactgctaccttctacactagccaagaggtccttccttcttggcctggggaggtattgtcctggcctctccacctcctggctcttacttggtcagcgatgactgtccggtgctgatacattccagggttaagctgccaacgacagaactggcctctccagccacgggtaatagtgcctcccccgatgccacccaagggacaacctagagaaatcagggtggttagtggggtattgggagaggaaaataagcccatttctaactttctagactataaagcctggttcctctgaaaacctaggggatggaacagtgcaatttgcataagctggaagtctcttcctaactgtggtagacctggaggctaggccttctctgagcagagcagagatggggtggggctcaccataaatctgtcttaggggtacagaattgatcatgtcgatgaaaggtgtcttcttttccacatgggtcttccggtaccaccactgcaggtacctgaggagcaagaggcaatgtgagtggaagggggcaggtgggcagctgttcacaggctgagtcacctgcctctctctgtgacctcccattaaatgtcccaaggacatctgctttcaaacctttcttcctcttgatttctatacagttcaaggtcccttcatcttcccagtcaccccagctgaagtgaaggagtggctttgtttctctcctttgttctcctcagaaggggctttctgatctctccttacctctctagcaccaccaccactgctttatttccaacatcaggagcttctgtctgacgtgctgaaaggaccatttatggtttcctggcctacagcctccgcccccaatcccctacctccaaaacaggcataggctgctgggaataactttcttatctttatttttattatttattattttttttttgagacagagtttcgttccttgttgtccaggctggagtgcagtggctcggtcttggctcactgcaaactccgcctcccaagttcaagaaattcttctgcctcagcctcccaagtagctgggattacaggtgcccgccaccatgcctggcacatttttttgtgtttttagtagagatggggtttcaccatgttagccaggctggtcttgaactcctgacctcaggtgatccgcccgcctcggcctcccaaagtgctgggattagaggcgtgagctaccgcttctggcctttcttctttttaaaatgatcatttttctttctaattatgaaaggtgaaagggggaaaaaaataatctcacccatagacaatcagtgtttatatttatttctggacatttcctctcaagccttttttttttttttttttaaattcaacatttaaactgtgaagctttctgattttgctcttggtaaagccttcaaaaaatcccaacattttcctgggcttggtacagccctatatccaagaggcaaatgattgaggctgttttcaataggcaaacgattctgttttcaaggctctgacatctgtcccagcctatcttctaatcttatttcctacaaattctcattccagatgggtcctcactaagtagcccctgccctgccagactctttcccatttccactctcctgcctactgccacattatgcctactgttcagtcacaccacttctaaccaaataattgggtaagtaacccctaagtcccagtttcctcatctacaaaatggggataccacctgctctagctatctaatgaaatggttgaaagatcaaatgacataatagataagaaagccataaagtacaggtatgattattactcatatatacaaactgttatctcaattcctaatcagacattgccttgttatttcaatgttcctcatgtgaggctgacatacttttaagttccttggggaaagggacaatgacaaagactagctgaatattaccctcaggtccaagcacagggtaggacatatggtctgcagtcaatgcatatttgccaattttacagatgaatgaacatacaaatgatggggcacaagagagataacagactggagcagaggagaagaaatgtgattaatgaatagggacagcggccaggcacggtggctcacacctgtaatcccagcactttgagaggccgaggtgggcggatcacgtgaggtcaggagttcaagaccagcctggccaatgtggtgaaaccccgtctctactaaaaatacaaaaacattagccagctgtggtggcaggcacctgcaatcccagctactcaggaggctgaggcaggagaatcgcttgaacccaggagacggaggttgcactgagctgagattgcaccattgtactccagcctgggtgacaagagcaagactgtctcaaaaaaaaaataataataaaataaaaagggacagcacattctaggggtggaaagaagagggaagacaaaggatgggatgacaggaaggcagagaatcctctctgccagcttagagaaaaccggactttgaaactagagaccagaaaggactggtagagggagggtgtggccgaggattagggcaaccagggagagtaactgcaatctatgaggacagacagaacaaaggactatctggcatggaacaagcactcaataaatatttattgaatgagtggactctggctggaagggagaacaattgaaattgagttcttacgaaggtaagacccagagaattctgtcttgctagagctcctggtcagagtgcccacagttcagctccatcttaggagctctcttactcccttaatatggtagctggccattcctgacctatttggccttctccacaatttcaacctcaactcaagagttatcacttagaattcttgtctcacctgtgctttctcctcataggaactcatcctattccaaaagccttgtatcagtaccccccactctatcctggaatggggagccagggtccagggggttgagcacagcttcaggcctctatgactcagttcatatttaagggctaagaggctaggatgcccatcttttcttgatctcattgttcctaccacatgcaactcagtgtacttctctatgtacactagatcctattttgatgcaaaaacttttggggtcaaacttggactgaattgattccagaagcagcctggagggatgattcttctctgctacaggctacccacaggcaccaacaaagccagatgtgcaggcagcatcaggcccttcccactccccagggctagggttagataactgatctccccatcacagccccacagcactgactggggaaatgaagggtctcctactctagaaactgtaagggcagggtttcccaagctttatgcctccctccacagttctgtgtgtattgtgtagactgagtcaggatgacctcagggtgatgctttctgtcctcacatccacctgttcctgttaatgggtctggctcctcatcactagtctttgaactcagtggggatctagatgggttctacatctatggcagtgcctctctgataaatgacttaatatcaagagctctctatcccagaacagaatgacagcaccttctcatcacttcagaggtgagggcagggaggctcttcttacctactccctggagctaaagcttgaagaaagaagcagtagtgttgggactctaacagtgtgtctaatgaggtacagagaatgccccagctgcttgtgggaaataaggggttgagacccccccacccccaaataaaacaacattgtgttagtatcacagcagccagattatcctttcctaccttgccacaaagtatagctaatcccaaagggaagtcattggaaaccagtatgtgagaagagcctgaatgggaaaggctgattgcatgaccaaatgttcctaccctttccttctgaaaagacaaaacactgggagggaagggtgttgcaaagagatgtgacctggtctcacggtccaaaaccacaggcctaaaatatgccagggatagggaccgcttcactcagacaagaagcccaactgctttcttgccctttcccacctctgctagaagttttgagctggaacaaagtgaagccaaaggcattctaggcaatggggtctactcacctcaagcccatgcctatatgctttatcatgttgcttagggagacgttgttagcttgaaagggtttcctcttctctgtaaactcatgagccagacagatgcgccagccaaagggaggcacctggtagcccatagctttaccctcataggaaaccatcagctgcccagagtcctccggattgcagcagtccgtctcttttgggggtcggctgtcttcgggactcttacagtctgtaacctgcacatccttggtgccgccagtctcttcagggcaataaacttgtggatcctctttggcacagcttatctgctccgaggctgggacgccggttcccatgttccctggatcctgggtccccatgacctcgatggcgccaagtcccgagccctcggatactaagtatctcgccagcctattccagatgcgggcgccggtcgttgttaggtatcgtcccggagggccgggcgttggggaaagcttaaatgagctggtgtttcagtggagccggggagctcttgcttcagtgggggcggcgacagcaaagaagccgccttgggctctccttcggttgtctctgtaggtcctggacgggaagggtcgggcctcgtcgtcattgagccgacgattagctcgcccggccaaagggcgactgggcccgcagagaggggaggagccgcggggccagcccaccaggcaccgccccgggacgggcccgcaaggcaccgcccccgggacctcggcccggcccctgggccacggcaccgggtcccccaggattgggcgccaggtcccgccggccggctccggggcagcgcccgcgcccaggtgccagcccgtgggaaggtgaccctgggcgccgggatgacccgagccctttccggtctggcctgccgggcgcttccggccggaagggactccgcggagggtgggggaccgaagggaagtcccgcctctaccgcccagcggacgccgccgccgccgccgccgccgcgtacctagccaggtccctgaggggcgggcagatgaggcctaggggtgccgatccctagtgtcgactatgcgaggtgactagcggcggtgatcttgggctgggacgtggaactttgaggaaagggggagcggaggccagtttgggaactccgcgggggtgcccagggagaagaacccgtcgcacaggggctggggtctagggcccagagcgatgtcctccccctgggcagtactgagtcttcagtcgcctccctcccacccgcctacccctcctatatccaggagctccctcgggcaccacggtgctgaccacccctgtcctcagccctcagccctaggtgctcaccgcaacgcccctccctgtcaaggtgctgacctccgccccgccttgtttccttctagatctgattccggagctgccatgattgaagtggtagcagagctcagccggggtcctgtatttttggctggggaggcgctggagtgtgtagtgaccgtcaccaacccccttccscccacggccacttctgcatccaggtggggatgctggcactgaaggtggtggcccttctgggaagaagccagattatctctggggctgaggcagagctcaggttgtcctgtagcgacaccacctcctcttgctcactgtgctgtcattgtaggagagggctctttaacagaagatgtggatgacatagctgtacgctttccttcccctcccccgttcccctttttacgcacagtctgctactctttatttaatggtttctctttgggattgtggatttcctgatcactaggacagccatctaaccttgttggttaagatggtgtgatagggagcttgggaaagcatttgtgaggtcaggaactacctctgatgcctccttttccttttcccacagtgaggccctggcctgggccagtgcccaaatccactgccagttccatgccagtgagagtcgagtagcactgcctcctcctgactctagtcagccagatgtccagcccgacagccagactgtctttctgccacaccgaggttagagaggggcatttgcctgggagagggggggtgcggagggtgtgtgtggaggcattgtcacccatgggtgaagttgttaattgttcttgttcttatagtccctgtcatgctggggatgttggggagcatgactattgctttaggggtagaagactattcccatttcacagcagggacggagggcctggcagcctttcactatctccacttgccgtgctagtcttgttcagtactggacaatgggtcattaaattagtcatttttacctttttcaggtgagaggggccagtgtatcctttctactccaccgaaaattctattctgtgacctgaggcttgatcctggagagtccaaatcatgtgagtgattgtccccatccctgaattgccttctaagtctcctggagggaggactcctctggtgcctctggctgtcctgacaactacttcccaaccagactcctacagtgaagtgctgcccatagagggaccaccctcctttcggggtcagtcagtcaagtacgtctacaaactgaccattggctgccagcgtgtcaactcccctatcactttactcagagtccctctgagggttcttgtgctgactggtaagcaagggctcctggagggaagggctggggaagggcgatgccaaagcagaaattgtcttagagggcttgcaagagggactgcagggaaacttcctggtctcagtgacagtgctagggagttgggaagggagggagggttctggagatagagatgtaaacctcagccctggcaccccttacctttagccatctcatgttagaatctaaaaccctaacctctactctcatctcygttccctctcagcattacctctccactcattctttctctaggccttcaggatgtccggtttccccaggatgaggctgtagccccatccagtccattcttggaggaggatgaaggtgggaagaaagattcatggctagctgagctggctggggaaygcctaatggctgccacatcctgccgcagcctccgtgagaattctttcagaattgtcctaccccatccttcccctcattgttttcccatctcagagacagtctcctaaccaccacacacttctgtggatccactgatacctgacacctccaattttaaagaaaagccccatcttttggcctgtggtgcccagtcctagacgttatccagtatgtagactccaggcttatagtgtcctattctccccagatctatacaatatcagtgatggccgagggaaagttgggacgtttggcatcttcaaatctgtgtacagacttggcgaggacgtggtggggaccttaaacttaggggaaggaaccgtagcttgtttgcaggtaagaagggagcagagcttcttacytgctggggtgctggggttgaagggctagggtggaaggcctgtataaagaggggtggcatgtagaaggggatagtggggtcatccagggtccctttgtaaaacagcttgaggttgggctgtcctctcacctacagacagcacttcctgttagcacacacctgtctcttgctcccagttttcagtcagcttacagaccgaggagcgtgtacagcctgagtaccagcggcgacgtggggcagggggtgtcccctctgtgtcacatgtgactcamgcccggcaccaggaatcctgcctacatacaactagaaccagcttctccctcccaatccctctcagctccaccccaggcttctgtacagccattggtgagaccctcactgttactggagaagggagagggggacagtaaaatgctgtgctaagggagggtgtaatggatcctgattccttatacacactcccagacatacccacrtctagcctctgacccggaacagtttctcagaccttcaacctcttcctgtttcttagatgcactgacccctaaactcctaacagcttgatagaactccttccccacacctacctactaggaccctgtgatacactgatttttgattacttcatgctacctagacttgactgcctcactcttrggttattaggtacttaatactgctatcttcagctcacatctgtggtagtacccattgcttcagaaaaacccttaatcacagctccctgccctgtgacttttccctgtcttcctgaacacagattgttttyttctcattcactaactatatcctgtcattggcttttactcctgctagcttctgatgcttctaccttaatctttttcttccatagtgtccttgaagtggagattgcattttgaatttgtaacgtcccgagaaccaggattggtactcctacccsctgtggaacagcccgaacctaccacctggacaggacctgagcaagtacctgtagacaccttcagctgggacctgcccatcaaggtgctgcctactagccccaccctggcctcatatgctgccccaggccccagcaccagcaccataaccatctgaaactggcccaccctggtgctagttccttccggatactgagaactcagcacctggactctaatgggacccactttttccacctggggtccaatgtcgtggacagtgagagtcgggctttcagctatagcattaatttatttgttcagaatacattggcagctgctagtggtttccctggaagtggcagcagcagtgagcagtcagcagatggatgatcagttgagtttagctggagtggggagcaggagccccaggaacaggggtgttggctgagccccattctgggtcaggccctcccmctttgcagggcagccgagggtcagatttttgcaccaaggagaactggcaggttcctgcctcctgacgtacctcacacccagccgggaagtcgatgggatgctgggacctggggaaccaaggataggggaaggagtcagcacagtgaaaggctgcctttatccctgcccacatgttccctctctcacagttttccccccacagagcccctttcagtggccccttggtcctcctaactaagctgtcacctaccatatgtgggcctttttgttttataacaggagtattttctctccaggtccaccccaacctcccctgatttatagcctgaagccttatctttcacactagtgttggtcccttcaggtttggcccatcttgtattgctcttctgttcattcttacatcacagcaatctagtcactccctggtcatccctcagtcactcatatcagagtcattctctctggccatctttggtcactcacgtgtcacagcagcccacgccaacaggatgcagacaggtgcaatggaaacagtccttgcggagccaagactcacccagggtaaaatatttcccctcatagtgacagggggctagggaagaacgggaaatgttagtaggtgtaggagtgctgatgagaggcagaggctcttctggtctggggtggagacagtaagtacgcactatccccgtatttagtttgtctttcctgtttcacagctggargaagcctgggtattttgacacgggatcatctgtaaggccccatcctccctgtgccctctctgctgctcctccattcctaacgcttcaccccactttaccttgagcttggaagtagcacttgctgtagactcctgggtgctggaggagtagagacatcaccaagcagatgatcccccagcctcctaggatccccttggcctgtccagcccagagcatccttagggccattgctgctgcacagccctctcagacccttcttggcctctgctcagctactctggtcttgactccttgactttgctttgcgttgctccttgagtcttagtttctgtctttctcccctgggctcctgtctcacactatctccctgccctctgctctcacaggctggggatgtttataaagtgaggaccctggccccctgctgagtagagctggaaaagttgtaactctgtttcctgaggtgagggcatgaaaacaagaggtctagctttaacaagctgtgagagctgattcatgccccggcacagctagagggagggaggtggccatggagggggcactggactgggcacttccccagcaaggaggcaggaggggcragggcccccaggtggtccccagatctcttccctgacctggagagaaggaagcattccaccttccccctttctcccccactgccaccaccaggggtgtgtatgctgggatccctgcctggaccggagggaggcatttcctggggatggttaatcctgtgccccagccaaacccaggagctgcaatagggtgcgacggccagaagctccaggagagtgagcaggcacctggagtggagactgtgtttccctcagatcctagggcagggtttccctaatgtatccaagaaatagggctgcccctcagagatggtggggagggtctcttttcctcaggcattccagaggtgaactgtccattgcttatcaccttcaaacatacagcagatgtgggatcaccccacatctggggatggttctttcccctttcaaagaggagcatctctaagtgccctgatgggatgaatcactccaggttcacagaggtgtcctctctttcctcccatatataatggagtgaggtttttaggaatttatcatttggcatcctctgagtttcccacaggttctggaggagcccaggatggattattgagagcatgggctgtagagacagtcttcttggattcagatcctgactccacttagctatgtaacctggtcagattacttcacctctctgagcctgtttcctcatctataaattggggatagtaatgccaactcattgggctgttatgaggattactgagataatgcgtgcagtgctcttatcaccatctctggtgcgtaagcgtcaggaaatagcagttgctgtgattggggctaaagctctgaggcaaaatgggcgacattattttctttgaatgacattaagcagtttgtgcatagctgagggcttctattggggatggctgtctcctggcatagacctctgcacctttcacactcatactccttgtcagcagtccccaacctttttggtaccagggaccggttttgtggaaaacaatttttccaccagtggatggagggggatagcagcggggagatgattttgggatgaaactgtttcatctcagatcatcaggcattagattctcataaggagtgtgcaatctagatcccttgcatgcggagttcacagtggggtttgcactcctgtgagaatctaatgcctctgctgatctgccaggaggaggagctcaggcggtaatgctcactcgcctgccgcccacctcctgctttgtgctcccgcttcctaacaggccacagactggtactggcctgtggcctgggggatggagacccctaatccatgtcacctttcccacctctttcaaaaacaggtacctccaggaacattttggttttggcccttgtattgacttctgaatgtctagtttgagaaactgttcccaataagccttcttcccccagatctgcaccctcgcctctaccctaggacaagatgtccttttctcatcatcctgccaggctaactttaagtctcctgctttttctcacttggatttggatccatttcttcctatttccgctcatgtgaactctccagttctcctttctcaccactctcctgctagccatctctttggcactaaaggccctggtcaaattggatttctttcatttttccacacttcaaagacccatgttctaggtattctccatagggatagtctctttggcatttatttggtttttctacgttttcagtcccatttactccaagactcactccctgccacctagtgcatcagatacagctacttctggctgacttttcaagggggaccaccctacctgtcatctcttcactgttcagaaatgactgtgtcagtgcacctcaaactcccttgctgtccttttccaaggagacagctaaggtggatggagatgcagaatggacctcacgttcgccctagtcaggactgataccctttccgtttcagaggattgccaagaaaaaactcacagttgaggcagggtgctctgaggtcggctgcggtgtgggaggcacggcctgggcctgctctctgggctggagcaggtggattcgaaggcctgtctagcacgagggcccaaaggtcttgtcagtggccagtagctctgccgcctttcccagagagggggtccaggggacatcctggaaggctgggccctgggccaccttctgctcttgcaagctagagccagcccaatagggggcggatgtgagtggggagctggggcgcatgaaggtgggggtgatgccgaaggggaagggatcgccagtggggattggtgcgtgtgcggaaacggggacagaagtgaaggttcatcgcctataacgaagatgaggtaggcatataggggcttctggaaagctagaggctgggctgagccaggagtcctctcccagaagttggggggcggtgcagaggtgtgggtcgagcccgcatgcgtgcctgctggggagggggtgagtggtgaggaccaggcccgctgggtcctgggggcgcggtggctggcgcgcaggtcccggagggggcggctggcgcgcactacacgcttgggracaaggaaaacatccgccggaggcccggccgggcggcgctccagcctcggggcaggtgcgcggagaggaagtgagagcattccggcccccccaccccaaccccggccgctggccctcyggtgagtcacagccgacccccgccgccggagggagaggggagctgcgggccagagccccggagggtctggaggagccaggagggtttctgggagcagagggtcacttagtgggcttctgtcgtggtgtcgctacgggcgcgaaacggacactgaacacagtctgactgwatggaggcaggtggggagggatcccctgggagaacttggcgggccgagagcagaccccagggcaaggaggggcccccgagggggaaaccgggagtcgggcaggtggcgtaacccagaaagggaaggagagccggattgattggggtgagagaggaaggaagcacgccaagttaggcctgggagaactgagggacctgaggagggaggagggagaccaacacagggtgggaaggcggaaatggccaaaccccaggcatcaggtctgtccagaggctgacgtagacagtgaagggtgaagggtaggttttaggagtagggggagttatgattatttggttacattttgggattatttggtctcacaggtagaagggagcctgctggtctctgtgtaacggatggcttaaaagcaaggttgtctgcgtcttggattactgtctgccattcagcctttgccaaaaaatttggcactgatctgcacatttttatagtcatttaaaattgtatgactctgtcaaatgatttaagtaattttggtggatttttaaaaataaaaaaataaaaatagaaaagttgcacaatctaattcaatatttgacttaaaaccaaaagtgaggctctcagattggtaatatggtattcagcctttttcttgtttggcttttgtgccatttgcccctcactgacttgattgaattctttgtggctgatgcctcagtttttctggatcagtagtgctgcacttccacttttcctctccctcattttactgtctttatttttagccttttttctgtgtagccctctaacctgccctttatattttgaaccaaataaaacatttcttggaatgggagctttggactacagtatacagacaaacaactcacaattttagcatatgaggctactatcttctgtggatgtgtatgtaattatacagtttctgtatttatcctgtggctgatagaaaaagttaaagctgtttaattcaccatagtatttctacaacacagcaatttattagtctgacttctcttctaaaatcaactctaaaatggtattttgtacttgtctcagagacgaattctgccatgatccttatgatctgtgttatgttgggccaaaggtgattactttataaattataaagatccctaaactctgcattgcctttggtcccaaacaagcaaatctgggtcaattaatgaaaaaaaaaagaaaagaaaagaaaatgtcttactttgggccctgttgcactctcccgtgctgttttagccccagccctactctattcccagtggcctttgccttcattccttctttgctctgctgggcatcttgagaggaaaacttcacaccgacttcctctactataaattctctccctcctctcaactctacacttctctttgccaacatacaccactactgcttcactgattttttttttttaagcccacagtcctttctggctcttttccacctttaacactcttatgttgaaatcttccgtttttcctcctttctctttagtaagacctcaggtttttaaaaaagctaggcttgattgtttattctgcatggtccacttctgccttccttcctcttctattacccttttcttattctagactgtttttaaactcagttatgcttgctttcaccaaagccttaacctttcctgtgattagaaaaagatgcttatgtttccattacttttcctacaagaaaacgcattctcaaattcatatccacttcaaactctcccaacgttttgcatccagaagcataaagtggccattattgtgaagtccactgagtgaccatttaagcttggtgttatgccacacactgtatagtgaatttcataatcctggtgccagatttctaaattattacagacaatagatgatggactgggcacagtggctcacacctgtaatcccaacatttggggaggccgaggcaggcagattgcttgagaccaggagtttgagaccagcctggccaacatggtgaaaccctgtctctaaaaatacaaaaattagctgggtgtggtggcgcgttcctgtaatcccagctactctggaggctgggatgggagaatcactggaacctgggaggctgaggctccagtgagccgagattgcatcactgcactgcactccagcctgggtgacagagggagaccctgtctccaaaaaaaaaaaaaaaaaaaaaaaaaaaaaaaaagaattctttgctatgaaactgaaattgcttctccactttcccttccctctcatgatctctcctcagtaaaaccaaggtgcatttttctggacccacctatcttgggggtgattaggagtagagggttgtaaatacttaaaatttttttcctttctgatataattattgatctccttctagaagtcctgtcgtctttgctggagaatttttatttaagcatccttttgtagaagaatctctaatgtccttttttcatccagatctacacttgatgaatcctaaagctatttctacacagttcctttattcatttttccttttttttttttttcattttttgtgcctgttatttttcatgggtttatcatctctttacaaatgggctgcgtccactgaggggcagcattgatttcccgctgctgtcactcagcgcctcagcctcctttgatcccttttttggttcacccttgttgcccatacttactttcctttattgtcagttctaatcttctccttttctatctctttaatgaaattcaccattttaaaaaagatttctggggtctcaaaagtttttcaggggatctcgcataagtctctgcattgtgacctaaactgtgtagcactgatttccaatggattggggctgatgggcggggtggggggccattgttgggagagcagaatatcctcatgaatagagtttctcagtgacactgttaacattttggaggataatcctttgttgtggggggctgtcctgtgcatcgtaggatgcttagcatctgctcagtagatgccaatgatattatctcagatgtgacaaccaaaatgtctccaaatcctgccaaatgttcctggaagacaaaatataccctctactccagtgtatagaattactgtactagaatatcagctttttgaaattgattaaatggttatactttctcttcccaactgctgatttgtagctggaattttaaaagtgtggtctttgacttacttggtaggtggtagcttcttaaaattgcaggttcctgagcttatcctagacctactgaatcagaaacgctgaaggtagaacccagagatctgatttttacaagacactaccttcccacccccaaccaggtaattctgccctaggcttgaccctcctgtggcataactgctgcattatctacatttttttctcctgcaagtcttcctggtgttccagctttgcttccgcttttggccccatgatgccaacacaaataaggaggcctcaggttaccaagacaactggagcacaggaaactgtacaggctcagtgctcccacaagcatcatggactgtgattatgctggcttgctttctccttagggactcagccatacttccttttccccatccccaaaactacccagactggcagagactgaggcccaagccacagatcctgatttcacagacctggtagtagatttatggggtgggtaggataaggaatgatgaatgaagctttccttctagcattgatatttcatgtcattttggtgataattgaatttgtaatcatgagaactacatttccctgggagttggttgttagatgcaagttttggaatcaggatgcttctctttatttattatgttatttatgcctgcttcactggaccttgagtcttagatgtttttgcatccctagctaaatgtctttacaatttgctttgggccaaaaggtttggcaatctacttctagtacactggaagcagctaatgttcagtaagaaaagaatatttttagggccaggtgcatggctcatgcctgtaatcccagcactttgggaacatgaggcagatggagtgcttgagtccaggagttcaagacctgcctgggtaacatgacaaaaccctgtctctacaaaaaagaatacagaaattagccaggtgtggtggtgcactcccgtagtctcggctacttgggaggctcaggtgagagaatcacttgagcctgggaggtcgatgctgcagtgagccatgattgtgccactgcacttcagcttgggtgacagagcaagaccctgtctcaaacaaacaaacaaacaaacaaaaaaccccaaaaaaacaaaaacaaccaaataatgaatttgggttctatttacacttagttatcaaagctagtcattttttaaaggaggatcatctggcttgattaaattaagtttccttaaagccacaaataaatgaaaacctacttgcacttagatgctttaaaatactgactctgactgggtgtggtggctcacacctgtaatcccagcactttgggaggccgaggcaggcagatcacttgaggtcaggagtttgagaccagcctggtcaacatggtaaaaccccccatctctaccaaaaatacaaaaaattatccaggcatgttggcacatgcctgtcatcccagctgaggcaggagaatcacttgaacctgaggcagaggttgcagtgagccgagatcagtgtgagattctgttgaaaaaaaaaattcaacttgatccaaaacaggagcaggctgcctccatggtatattcatgtcatgccagagcaagagcaagggagaatacaaggaaataaggcagacatgatagctctcctcagacaattgaaggactgtcatgatgaaggagcaattagatttactggtttagttccagaagatagattaagaacttttatttagtgatggaggacaaattttggcttgataaggaaattttgactcatttgaggaccccaaagtggaatgaactgaattgttaggcagtaaattttggccatattgttcatatagaggttagatgaccgtttgcacaagggtcggatgaggttttagacattaaattgggttcaacctgcaaggagaagcaggcagatttaggaaaagtcaattcgccctttttctgtcatatgattctgtggcactattaaattcattattatttttctaggcacctctgtcaattttaccccctcaagtaattgataatagagttgatagtaaagtctttagagatttctcaaactttgttcctcagccctctggagatttctgaaggatgcctcagaagtggctgagaagggtgaaatgaaggctagctggggctctgagcccttttacctatgcttcaaccagaacaatcttgcttttatttgttttacaaattaaacgtactggcttccttgaagattttctttttaacggaaaaaaaaaaacagttctgctgttaaaaaaaaaaagttaaaggctctgatatttcaaggtgttccttttattgaaagggaagctgagatacggaagaagtgtcttgccagaggtcacacagctagtaaatttcagagctgggattcaaatctagctcttctagttcaaatcttttgtttcttccactctacaagtctgccttgttagaattcaatgaaagcttctctccattctactggccaccactgtaatccagaatctcatttcttctaatttactattctgtattagccacttaactagtctccttgctgtctaattctgttctatattatatatactgttgccattttattcttcttggaacattgttttcgtcctgagatttccctgtttaagaaccttctccctatctcttagaacttttcaggctaaccttgtgttagcattctttaggatcctcattgttcagctgaatgagagcctaaatccatcctattatgagtaattaatgggctatataatagtgagattaacggagtccctccctattcctagacttcacctttggcaagattttcatgtgtacagttttaatcaggcatgacaagaagatacaaaagaaacagaaaatcacagcccataaaaagcaagttacataataatatgaataatacaatcctatttatatctcacatgcatgcattttttaaaacaagaatgagatatatagaaattgcctggaagaaaacacatcagactgggcgcgatggctcacgcctgtaatcccagcactttgagaggccaaggcaggcagatcacctgaggtcaggagttcgagaccagcctggccaacatggcgaaaccctgtctctactaaaaatacaaaaattagccgagtgtggtggtgtatgcctgttatcctagctgcttgggaggctgaggcaggagaatcgcttgaacctgggagatggagattgcagtgagtcaagatcttgccactgcactccagtttgggcaacagagtgagactccatctcaaaaaaaaaaaaaaaaaaagaaaagagaaaagaaaaaactcatcagactgatgacagacattaactctgataagagagattgagaaaggagagagaggaggggaggaagagggacttcctttttttactcaggaggctgaggtgggaggacggcttgaggctaggaggttgaggctgtagtgagccatgatcatgccaccacactcagcctgggagacagagtgagaccctgtcttgaaaataaaataaaataaaaagaagaagaagaaaaaagaagtgaagtgttttgttttcccacaatggagatcttttgaagcattatccttttgggaaaaagttaatttcaattcttagcacttggtctgatttttaaaaattcgacttaagctaatgatgagaagtgtgcatattcacactctttaactcctgtggattggataacaaattaacctccatttccactggacagag

SEQ ID NO: 7055 - DNA, 25906 bp, Homo sapiens
atcctcataacagcccaatgagttggcattactatccccaatttatagatgaggaaacaggctcagagaggtgaagtaatctgaccaggttacatagctaagtggagtcaggatctgaatccaagaagactgtctctacagcccatgctctcaataatccatcctgggctcctccagaacctgtgggaaactcagaggatgccaaatgataaattcctaaaaacctcactccattatatatgggaggaaagagaggacacctctgtgaacctggagtgattcatcccatcagggcacttagagatgctcctctttgaaaggggaaagaaccatccccagatgtggggtgatcccacatctgctgtatgtttgaaggtgataagcaatggacagttcacctctggaatgcctgaggaaaagagaccctccccaccatctctgaggggcagccctatttcttggatacattagggaaaccctgccctaggatctgagggaaacacagtctccactccaggtgcctgctcactctcctggagcttctggccgtcgcaccctattgcagctcctgggtttggctggggcacaggattaaccatccccaggaaatgcctccctccggtccaggcagggatcccagcatacacacccctggtggtggcagtgggggagaaagggggaaggtggaatgcttccttctctccaggtcagggaagagatctggggaccacctgggggcccttgcccctcctgcctccttgctggggaagtgcccagtccagtgccccctccatggccacctccctccctctagctgtgccggggcatgaatcagctctcacagcttgttaaagctagacctcttgttttcatgccctcacctcaggaaacagagttacaacttttccagctctactcagcagggggccagggtcctcactttataaacatccccagcctgtgagagcagagggcagggagatagtgtgagacaggagcccaggggagaaagacagaaactaagactcaaggagcaacgcaaagcaaagtcaaggagtcaagaccagagtagctgagcagaggccaagaagggtctgagagggctgtgcagcagcaatggccctaaggatgctctgggctggacaggccaaggggatcctaggaggctgggggatcatctgcttggtgatgtctctactcctccagcacccaggagtctacagcaagtgctacttccaagctcaaggtaaagtggggtgaagcgttaggaatggaggagcagcagagagggcacagggaggatggggccttacagatgatcccgtgtcaaaatacccaggcttcctccagctgtgaaacaggaaagacaaactaaatacggggatagtgcgtacttactgtctccaccccagaccagaagagcctctgcctctcatcagcactcctacacctactaacatttcccgttcttccctagccccctgtcactatgaggggaaatattttaccctgggtgagtcttggctccgcaaggactgtttccattgcacctgtctgcatcctgttggcgtgggctgctgtgacacgtgagtgaccaaagatggccagagagaatgactctgatatgagtgactgagggatgaccagggagtgactagattgctgtgatgtaagaatgaacagaagagcaatacaagatgggccaaacctgaagggaccaacactagtgtgaaagataaggcttcaggctataaatcaggggaggttggggtggacctggagagaaaatactcctgttataaaacaaaaaggcccacatatggtaggtgacagcttagttaggaggaccaaggggccactgaaaggggctctgtggggggaaaactgtgagagagggaacatgtgggcagggataaaggcagcctttcactgtgctgactccttcccctatccttggttccccaggtcccagcatcccatcgacttcccggctgggtgtgaggtacgtcaggaggcaggaacctgccagttctccttggtgcaaaaatctgaccctcggctgccctgcaaagggggagggcctgacccagaatggggctcagccaacacccctgttcctggggctcctgctccccactccagctaaactcaactgatcatccatctgctgactgctcactgctgctgccacttccagggaaaccactagcagctgccaatgtattctgaacaaataaattaatgctatagctgaaagcccgactctcactgtccacgacattggaccccaggtggaaaaagtgggtcccattagagtccaggtgctgagttctcagtatccggaaggaactagcaccagggtgggccagtttcagatggttatggtgctggtgctggggcctggggcagcatatgaggccagggtggggctagtaggcagcaccttgatgggcaggtcccagctgaaggtgtctacaggtacttgctcaggtcctgtccaggtggtaggttcgggctgttccacagggggtaggagtaccaatcctggttctcgggacgttacaaattcaaaatgcaatctccacttcaaggacactatggaagaaaaagattaaggtagaagcatcagaagctagcaggagtaaaagccaatgacaggatatagttagtgaatgagaagaaaacaatctgtgttcaggaagacagggaaaagtcacagggcagggagctgtgattaagggtttttctgaagcaatgggtactaccacagatgtgagctgaagatagcagtattaagtacctaataacccaagagtgaggcagtcaagtctaggtagcatgaagtaatcaaaaatcagtgtatcacagggtcctagtaggtaggtgtggggaaggagttctatcaagctgttaggagtttaggggtcagtgcatctaagaaacaggaagaggttgaaggtctgagaaactgttccgggtcagaggctagatgtgggtatgtctgggagtgtgtataaggaatcaggatccattacaccctcccttagcacagcattttactgtccccctctcccttctccagtaacagtgagggtctcaccaatggctgtacagaagcctggggtggagctgagagggattgggagggagaagctggttctagttgtatgtaggcaggattcctggtgccgggcgtgagtcacatgtgacacagaggggacaccccctgccccacgtcgccgctggtactcaggctgtacacgctcctcggtctgtaagctgactgaaaactgggagcaagagacaggtgtgtgctaacaggaagtgctgtctgtaggtgagaggacagcccaacctcaagctgttttacaaagggaccctggatgaccccactatccccttctacatgccacccctctttatacaggccttccaccctagcccttcaaccccagcaccccagcaggtaagaagctctgctcccttcttacctgcaaacaagctacggttccttcccctaagtttaaggtccccaccacgtcctcgccaagtctgtacacagatttgaagatgccaaacgtcccaactttccctcggccatcactgatattgtatagatctggggagaataggacactataagcctggagtctacatactggataacgtctaggactgggcaccacaggccaaaagatggggcttttctttaaaattggaggtgtcaggtatcagtggatccacagaagtgtgtggtggttaggagactgtctctgagatgggaaaacaatgaggggaaggatggggtaggacaattctgaaagaattctcacggaggctgcggcaggatgtggcagccattaggcgttccccagccagctcagctagccatgaatctttcttcccaccttcatcctcctccaagaatggactggatggggctacagcctcatcctggggaaaccggacatcctgaaggcctagagaaagaatgagtggagaggtaatgctgagagggaacagagatgagagtagaggttagggttttagattctaacatgagatggctaaaggtaaggggtgccagggctgaggtttacatctctatctccagaaccctccctcccttcccaactccctagcactgtcactgagaccaggaagtttccctgcagtccctcttgcaagccctctaagacaatttctgctttggcatcgcccttccccagcccttccctccaggagcccttgcttaccagtcagcacaagaaccctcagagggactctgagtaaagtgataggggagttgacacgctggcagccaatggtcagtttgtagacgtacttgactgactgaccccgaaaggagggtggtccctctatgggcagcacttcactgtaggagtctggttgggaagtagttgtcaggacagccagaggcaccagaggagtcctccctccaggagacttagaaggcaattcagggatggggacaatcactcacatgatttggactctccaggatcaagcctcaggtcacagaatagaattttcggtggagtagaaaggatacactggcccctctcacctgaaaaaggtaaaaatgactaatttaatgacccattgtccagtactgaacaagactagcacggcaagtggagatagtgaaaggctgccaggccctccgtccctgctgtgaaatgggaatagtcttctacccctaaagcaatagtcatgctccccaacatccccagcatgacagggactataagaacaagaacaattaacaacttcacccatgggtgacaatgcctccacacacaccctccgcaccccccctctcccaggcaaatgcccctctctaacctcggtgtggcagaaagacagtctggctgtcgggctggacatctggctgactagagtcaggaggaggcagtgctactcgactctcactggcatggaactggcagtggatttgggcactggcccaggccagggcctcactgtgggaaaaggaaaaggaggcatcagaggtagttcctgacctcacaaatgctttcccaagctccctatcacaccatcttaaccaacaaggttagatggctgtcctagtgatcaggaaatccacaatcccaaagagaaaccattaaataaagagtagcagactgtgcgtaaaaaggggaacgggggaggggaaggaaagcgtacagctatgtcatccacatcttctgttaaagagccctctcctacaatgacagcacagtgagcaagaggaggtggtgtcgctacaggacaacctgagctctgcctcagccccagagataatctggcttcttcccagaagggccaccaccttcagtgccagcatccccacctggatgcagaagtggccgtgggcggaagggggttggtgacggtcactacacactccagcgcctccccagccaaaaatacaggaccccggctgagctctgctaccacttcaatcatggcagctccggaatcagatctagaaggaaacaaggcggggcggaggtcagcaccttgacagggaggggcgttgcggtgagcacctagggctgagggctgaggacaggggtggtcagcaccgtggtgcccgagggagctcctggatataggaggggtaggcgggtgggagggaggcgactgaagactcagtactgcccagggggaggacatcgctctgggccctagaccccagcccctgtgcgacgggttcttctccctgggcacccccgcggagttcccaaactggcctccgctccccctttcctcaaagttccacgtcccagcccaagatcaccgccgctagtcacctcgcatagtcgacactagggatcggcacccctaggcctcatctgcccgcccctcagggacctggctaggtacgcggcggcggcggcggcggcggcgtccgctgggcggtagaggcgggacttcccttcggtcccccaccctccgcggagtcccttccggccggaagcgcccggcaggccagaccggaaagggctcgggtcatcccggcgcccagggtcaccttcccacgggctggcacctgggcgcgggcgctgccccggagccggccggcgggacctggcgcccaatcctgggggacccggtgccgtggcccaggggccgggccgaggtcccgggggcggtgccttgcgggcccgtcccggggcggtgcctggtgggctggccccgcggytcctcccctctctgcgggcccagtcgccctttggccgggcgagctaatcgtcggctcaatgacgacgaggcccgacccttcccgtccaggacctacagagacaaccgaaggagagcccaaggcggcttctttgctgtcgccgcccccactgaagcaagagctccccggctccactgaaacaccagctcatttaagctttccccaacgmccggccctccgggacgatacctaacaacsaccggcgcccgcatctggaataggctggcgagatacttagtatccgagggctcgggacttggcgccatcgaggtcatggggacccaggatccagggaacatgggaacyggcgtcccagcctcggagcagataagctgtgccaaagaggatccacaagtttattgccctgaagagactggcggcaccaaggatgtgcaggttacagactgtaagagtcccgaagacagccgacccccaaaagagacggactgctgcaatccggaggactctgggcagctgatggtttcctatgagggtaaagctatgggctaccaggtgcctccctttggctggcgcatctgtctggctcatgagtttacagagaagaggaaaccctttcaagctaacaacgtctccctaagcaacatgataaagcatataggcatgggcttgaggtgagtagaccccattgcctagaatgcctttggcttcactttgttccagctcaaaacttctagcagaggtgggaaagggcaagaaagcagttgggcttcttgtctgagtgaagcggtccctatccctggcatattttaggcctgtggttttggaccgtgagaccaggtcacatctctttgcaacacccttccctcccagtgttttgtcttttcagaaggaaagggtaggaacatttggtcatgcaatcagcctttcccattcaggctcttctcacatactggtttccaatgacttccctttgggattagctatactttgtggcaaggtaggaaaggataatctggctgctgtgatactaacacaatgttgttttatttgggggtgggggggtctcaaccccttatttcccacaagcagctggggcattctctgtacctcattagacacactgttagagtcccaacactactgcttctttcttcaagctttagctccagggagtaggtaagaagagcctccctgccctcacctctgaagtgatgagaaggtgctgtcattctgttctgggatagagagctcttgatattaagtcatttatcagagaggcactgccatagatgtagaacccatctagatccccactgagttcaaagactagtgatgaggagccagacccattaacaggaacaggtggatgtgaggacagaaagcatcaccctgaggtcatcctgactcagtctacacaatacacacagaactgtggagggaggcataaagcttgggaaaccctgcccttacagtttctagagtaggagacccttcatttccccagtcagtgctgtggggctgtgatggggagatcagttatctaaccctagccctggggagtgggaagggcctgatgctgcctgcacatctggctttgttggtgcctgtgggtagcctgtagcagagaagaatcatccctccaggctgcttctggaatcaattcagtccaagtttgaccccaaaagtttttgcatcaaaataggatctagtgtacatagagaagtacactgagttgcatgtggtaggaacaatgagatcaagaaaagatgggcatcctagcctcttagcccttaaatatgaactgagtcatagaggcctgaagctgtgctcaaccccctggaccctggctccccattccaggatagagtggggggtactgatacaaggcttttggaataggatgagttcctatgaggagaaagcacaggtgagacaagaattctaagtgataactcttgagttgaggttgaaattgtggagaaggccaaataggtcaggaatggccagctaccatattaagggagtaagagagctcctaagatggagctgaactgtgggcactctgaccaggagctctagcaagacagaattctctgggtcttaccttcgtaagaactcaatttcaattgttctcccttccagccagagtccactcattcaataaatatttattgagtgcttgttccatgccagatagtcctttgttctgtctgtcctcatagattgcagttactctccctggttgccctaatcctcggccacaccctccctctaccagtcctttctggtctctagtttcaaagtccggttttctctaagctggcagagaggattctctgccttcctgtcatcccatcctttgtcttccctcttctttccacccctagaatgtgctgtccctttttattttattattattttttttttgagacagtcttgctcttgtcacccaggctggagtacaatggtgcaatctcagctcagtgcaacctccgtctcctgggttcaagcgattctcctgcctcagcctcctgagtagctgggattgcaggtgcctgccaccacagctggctaatgtttttgtatttttagtagagacggggtttcaccacattggccaggctggtcttgaactcctgacctcacgtgatccgcccacctcggcctctcaaagtgctgggattacaggtgtgagccaccgtgcctggccgctgtccctattcattaatcacatttcttctcctctgctccagtctgttatctctcttgtgccccatcatttgtatgttcattcatctgtaaaattggcaaatatgcattgactgcagaccatatgtcctaccctgtgcttggacctgagggtaatattcagctagtctttgtcattgtccctttccccaaggaacttaaaagtatgtcagcctcacatgaggaacattgaaataacaaggcaatgtctgattaggaattgagataacagtttgtatatatgagtaataatcatacctgtactttatggctttcttatctattatgtcatttgatctttcaaccatttcattagatagctagagcaggtggtatccccattttgtagatgaggaaactgggacttaggggttacttacccaattatttggttagaagtggtgtgactgaacagtaggcataatgtggcagtaggcaggagagtggaaatgggaaagagtctggcagggcaggggctacttagtgaggacccatctggaatgagaatttgtaggaaataagattagaagataggctgggacagatgtcagagccttgaaaacagaatcgtttgcctattgaaaacagcctcaatcatttgcctcttggatatagggctgtaccaagcccaggaaaatgttgggattttttgaaggctttaccaagagcaaaatcagaaagcttcacagtttaaatgttgaatttaaaaaaaaaaaaaaaaaaggcttgagaggaaatgtccagaaataaatataaacactgattgtctatgggtgagattatttttttccccctttcacctttcataattagaaagaaaaatgatcattttaaaaagaagaaaggccagaagcggtagctcacgcctctaatcccagcactttgggaggccgaggcgggcggatcacctgaggtcaggagttcaagaccagcctggctaacatggtgaaaccccatctctactaaaaacacaaaaaaatgtgccaggcatggtggcgggcacctgtaatcccagctacttgggaggctgaggcagaagaatttcttgaacttgggaggcggagtttgcagtgagccaagaccgagccactgcactccagcctggacaacaaggaacgaaactctgtctcaaaaaaaaaataataaataataaaaataaagataagaaagttattcccagcagcctatgcctgttttggaggtaggggattgggggcggaggctgtaggccaggaaaccataaatggtcctttcagcacgtcagacagaagctcctgatgttggaaataaagcagtggtggtggtgctagagaggtaaggagagatcagaaagccccttctgaggagaacaaaggagagaaacaaagccactccttcacttcagctggggtgactgggaagatgaagggaccttgaactgtatagaaatcaagaggaagaaaggtttgaaagcagatgtccttgggacatttaatgggaggtcacagagagaggcaggtgactcagcctgtgaacagctgcccacctgcccccttccactcacattgcctcttgctcctcaggtacctgcagtggtggtaccggaagacccatgtggaaaagaagacacctttcatcgacatgatcaattctgtacccctaagacagatttatggtgagccccaccccatctctgcyctgctcagagaaggcctagcctccaggtctaccacagttaggaagagacttccagcttatgcarattgcactgttccatcccctaggttttcagaggaaccaggctttatagtctagaaagttagaaatgggcttattttcctctcccaataccccactaaccaccctgatttctctaggttgtcccttgggtggcatcgggggaggcactattacccgtggctggagaggccagttctgtcgttggcagcttaaccctggaatgtatcagcaccggacagtcatcgctgaccaagtaagagccaggaggtggagaggccaggacaatacctccccaggccaagaaggaaggacctcttggctagtgtagaaggtagcagttagatgtgaataagattcaatctaataagtactctcgggatgcttcctgtgtgcccagccctgagctaggatataccgtaggaataagacacacacaagcacacattccttgaaagagtaaacagatctggcatttctctagtaaatgcctcctgtctacctcactgccccaacccaactagctgaggcagcccccaaccacagagaatgcagagaattcccaaatcacttaacctgcctgaaagaacattttgtaggactggaagggaaaagaaaacccaaagtctataaactcatgggaaaaaaagacacgtagtacaaggttcctcaccctgattgaggaaccttcaccaaagttcagctcctctgctgatcactcccctggaggtctcctggcttagggtctaaaaagctccttctctcccaggcttagatctctagccttcttccctcttctgaagcttcacttttttccttttgctcctgcatcacatctgggccttaaattgccagaagtatgtgtcctgcctctcatcatctctctctagttgaccgcccctttagagttgcctaggaagttcctctttcttggctccagcattcagcctcatcttcaaaggaaaaatgactagcaaatctttagtccaattaatgacaatacccttcctggttcacgtttaccagccctgcccatgtcccaagatccctctctgcctcatcccttaggtatcctgaggggaatggcttccagaattgtgactctacaattaaagtaattattgcatgcttaacatgtgctagacactgtgctaggctctttgtatactgtttaatattaaaaacaatcctacaagggaagtaccactattatgctcattttgcagatgaggacactaagatccagagaggtttagtaacatgcgcaaggtcacaaggttggtaaatggaaaggttgggattcagaaccatttctttctggggtgaagagcttgtggtcttaaccattatgtaccattccaacaaaatgaaaaattattttatacagttgtccctcagtatccatggggggttgggcccaggacctgctatccgaggatgctcaagtctttgatttgaaatggcttatagtatttgcaaataaccattgcacatcctcctatatactttaaatcatctgtagattacttataatacctcatacattgttacataaacccttgttgtgccgtacagtaaataaagtgtgtacatattcggtacagacacaactttttttccacatattttagatttggttggttgaatccactgatgtggaactcacagatatggagagcccactgtatacaataaaaatatttgacatagtttgaaccagggaaagggatattaatccctcatagctcctaccctccaagagctaaaactttttttgagaaaataagacttaggggaaatggagactgtgagaccacatcagtgctaaaaggagaggggtggatagtatactgtggaaaaagggacggtgctgcagatttcgctcattccctccacatacatgccaactctgaagaagggtgcatcagtgaattaaaaaatgtccctaccctcagaagaatccatacagcagtcagggacacagaatggtcagtcaatacattataacataatacaccaaatgctagaatagaaggggaggggggcacacataatgactcactgctggaagaagtagaggaggaagagatggcttttgacctaggctttgaaggatgagaggtttcaccagatagcgaacaagcatgagcacaggcatggaggagagaatgtagtgtgctcaaggaacagtgagtgtttttatatgaacagactataggtgcttgaacaggtgatgagtctgatgggcagggagaggccagctcaagaagggccttgaaagccaggcaagagttgagactttagcctgagggccatggggagtcactgaaacatcctaaccaaggactgacatatcttgatttgcctgtgagaaagatcactctgctacccagatgaaaagggccacagaaaaagcaggagattgggcttaagtgaggtgctaacaccaccgtagtggagaagggagagaaagcttgggagatagatggatggggaggtagcaggacttggtgattcactgagcctgggggatgacttgaagctgatrgtgcagtggtaacagttgcaggctctgaaaggggaggagctgatttgaggagagggaagayttagtctgtggtccctgtggtttaccccgttccagcctatctgccctcttaagttcacagtgtgcctgcgtcgggaagggcagactgtgtaccagcaagtcctgtccctggagcgcccaagtgtcctccgcagctggaactggggcctgtgtgggtactttgctttctaccatgccctctatccccgagcctggactgtctatcagcttcctggccagaatgtcaccctcacctgccgtcagatcacacccatcttgccccatgactaccaggtgaggcccccacatctgtatcttccattgccctcccttccccaggacctgcctctgctagaaactgcatggcctgcgaggcgcggtagctcacgcctgtaatcccaacactttgggaggccaaggcaggcggatcaygagatcaggagatcgagaccatcctggctaacacgtgaaaccccatatctactaaaaatacaaaaaaaaaaattagctgggcgttgtggcaggcacctgtagtcccagctactcgggaggctgaggcaggataatggtgtgaacccgggaggcggagcttgcagtgagccgagattgcgccaccgcaccccccaaaaaaaaaaaaaaagaaactgcatggcctgtgaaagggaggttggagccatgaacatcacactggcttcccagaaccaccgcccaactggttctggtcttctatattccctgctaggcagcttgcctgggaatatggggagatgcaagtggacaaaagaagagtacactggggagtatttgagtcaggtcctctgtgtgcccaggactgatcctagcagagtggggtcaggaggcgctctactgggaccgtctgagtctaatcttctgcccccaggacagcagcctgcctgtaggagtctttgtgtgggatgtggaaaatgaaggggacgaagctctagatgtgtccatcatgttctccatgcggaatggactgggtggtggagacgatgccccagggggtttgtggaatgagcccttctgtctggagcgtagcggggaaactgtccgggggctgctcctgcatcatccaacccttccaaacccctacacgatggctgtggctgcacgagtcacggtaaggaaagagcctgccctrtaccttagcccctgaaccccacctccaccccagcatggtctcttcatccaccctcatcatactcctgtaagcccctgggcctgggaggttaagagtaagtaagaggagctggggagctagccgggacccagtgtactcgtggagcctgccctcacagtccctgaccccttcacaggcagctaccayggtaacccacatcacagcctttgaccctgacagcacggggcagcaggtgtggcaggatctacttcaggatggacagctggactctcccactggtgatggggggtctgactgggagatggtgggaagagaggttgtccctgtcttgggaccaggggtgggaggcctggtaataagtaggccttgtttccatgttagggatccctatccctggggctgaaggggctcctgtcctgaattctcttgtgtttctctcaggccaaagcacccctacgcagaaaggagtaggcattgctggagctgtgtgtgtttccagcaagttgcgacctcgaggccagtgccgcctggagttttcactggcttgggacatgcccaggatcatgtttggagctaaaggccaagtccactacaggtgaggggaccaagaaagtgtaaggatccagagtgctggggctctgacctggggcttgtgttcatccttccccttcccaccccaggcggtatacaaggttctttggccaggatggagatgcagcacctgccctcagccactatgcactgtgccgatacgcagagtgggaagagaggatctcagcttggcagagcccggtattggatgacaggtgccagtggggcccatttcttgcctttctcctgggcactcactccaaatgggactcctcgatttactctccacccaccaaagtcagtagacttgcactgggattcatttgatgatccyactctgctgaacccccaaatcctttccatcttgggaggtacatgttccttaaaccatttcctcctcctcgcttcccagatcactgcctgcctggtacaaatctgcgctgttcaatgaactatacttcctggctgatggaggcacagtgtggctggaagttcttraggactccctaccagaggagctgggcagaaacatgtgtcacctccgccccaccctacgggactacggtcgatttggctaccttgagggtacaggatgctggtgggctgggatatggcaggccatccccaagtcaggatgatggatttgcctaccccagggtattggttaggatgagggggtgttgggtgtggactagtaacaatgccccacctctaaatctagaggacaagctacagaggggtttgaaggggaagcagsaattctggcaacagtgtgtctcattcattcctccaggccaggagtaccgcatgtacaacacatatgatgtccacttttatgcttcctttgccctcatcatgctctggcccaaacttgagctcagcctacagtatgacatgggtgaggatcccttttgtgccgcttctgccctcttggctccccatacccccgaacttctgtggtccctcagattgtctcttctttcccttcccttcatacgtatctgcatgctgcttactggttccccactgcagtcacacacatagctgtgtgcccctcctcaggcatrcccattccctgcctcccttctgtgtctgctcccccagctctggccactctcagggaggacctgacacggcgacggtacctgatgagtggggtgatggcacctgtgaaaaggaggaacgtcatcccccatgatattggggacccaggtaaaartccaccccaaggtcagcttccctccctcaacttttgcaccctctaccctrtccaccaatgcaagtgacccaagtcccctcctctcccacagatgatgaaccatggctccgcgtcaatgcatatttaatccatgatactgctgattggaaggacctgaacctgaagtttgtgctgcaggtttatcgggactattacctcacgggtgatcaaaacttcctgaaggacatgtggcctgtgtgtctagtaagggatgcacatgcagtggccagtgtgccaggggtatggttggtgtctgggaagagcctagctggttgttgcctttcctcggtacctaggtcttcaacatcttggtccctctctaggctgtgatggaatctgaaatgaagtttgacaaggaccatgatggactcattgaaaatggaggctatgcagaccagacctatgatggatgggtgaccacaggccccaggttagcgggtaggggtttccaggaggcctgaggtgagaaactgggcaacaagggattgtagggctcaagaaagaatgactcattgtctattacacggcatgggagcagctggagctgccagtctgacccccaaacccatgtccctgatcagtgcttactgtggagggctgtggctggcagctgtggctgtgatggtccagatggctgctctgtgtggggcacaggacatccaggataagttttcttctatcctcagccggggccaagaagcctatgagagactgctgtggaatggtgagttcggggagcctaagtagtcttaaggcagctgagaggacaccaggagccttatttttctcttcctcgactccaggccgctattacaactatgacagcagctctcggcctcagtctcrtagtgttatgtctgaccagtgtgctggacagtggttcctgaaggcctgtggcctaggagaaggagacactgaggtgagagaggaggaggagcagccagagagaaaaatgggttttccctggaggtgggaagtaagtatatgagaccatgttcctgcccttgcccctccaggtgtttcctacccaacatgtggtccgtgctctccaaactatctttgagctgaacgtccaggcctttgcaggaggggccatgggggctgtgaatgggatgcagccccatggtgtccctgataaatccagtgtgcagtctgatgaagtctgggtgggtgtggtctacgggctggcagctaccatgatccaagaggtaatgcactccttttcccatctctccaccatctgtakcctggcccagaaaacttcctcaaccaccaaatttcttcaaggcataacccaatgccatcttgtccgtctataaagcctcccatttttccctggtatgcattccagctcctgccttcaggcttctgtctgtgggtcatagttatctcctccacttgctgggagctccttgaaggcaaagactctactgcctccatctatccagtggaagtggctcttcagagggtgccaagttagtatgtatgactgtcatctctcccaacagggcctgacttgggagggcttccagacagctgaaggctgctaccgtaccgtgtgggagcgcctgggtctggccttccagaccccagaggcatactgccagcagcgagtgttccgctcactggcctacatgcggccactgagcatatgggccatgcagctagccctgcaacagcagcagcacaaaaaggcctcctggccaaaagtcaaacagggcacaggactaaggacagggcctatgtttggaccaaaggaagccatggcaaacctgagcccagagtgagccgtctgaactgkgggagggaagtgctaacagcccagcctccagcctggcctttcctccttcccctctgaacctcctgcaaccctgagccatcaggacaatcataccccttcccttctctccacccaaytgtgccagtaaatgggggttgagggtgacctaggcagcattagaatcacttatttatttctttcctcacctgttccctgactgcgtgaaatgttcagggaggtcagttgatttccccaggtacattcatggtgtgacagacacatgggtacaaataaaagacccagaaagccattaagtgtggkgkgtttgagccctcagtcgtcctgacagggcacaggagctgcggccagcccttgcccaccgctttttatttggacacagatggggagccccccaggctcctgctgagaccccccacatatcctcatatctagcctgagtatctgtcctgcaaaatgacagaggggctaccagtaggaagccatcctcccttccttgtgagatttgcctgcagggggaggatgggacctcggcagagaggctctgagaagaggtcagggaatggccactccaggggaggctctgcactgggagcctraggcatgtaatgcagcaggcaggaagtgttgccaggggcctggagtacacagtctgagccgtccaaccactggtgtgtgctgtctttcggcacttctgactgcagggcaggcagctccagctggtaagggtcctcactggggagggcacgaagctggcgggacaacactgaggagacaaagaatcttcagaggccaacccagacctctccccttgccctgtctgagagctatccttaagcctcttacctccatgctcagctggcaggctcccccttgtgtcagaggagtacatagcaggtacaaggaggaggcagaaggagactagtaggacctagrgcacaggaaaaaggagatgargaagggctctggattgccctgtccccaccaactgagaaaaggatttctcccctcatcaccatcctcaccaagatgcaggtgctgctgctgctggttttrtttgatatctcaatcaccatggcctggagtttcctcagttgatctagaagggacctagaggaagagaggggccaatagtgagcatcccctggcctagcatcctragacacagtgaaactcctgttcaggccacctcctccatctctgcactggatcctctctcttacttttcattctatttttgcaaacgacttcttcctctctggacaaaatgcctgaagttcctcattaaaacaacaacaacaacaaaaagcaaaaacaaaacaaaacaaaaaaactctgccaggacttaacctcctttgcraatatcatcagtcgttccccactgtctgatcagctatgcacataatcctcaccaggcattttctatgttctctaccttctgtcccagctcatgtgtgttaagagttccagcccaagatgactatgctggactagtcctcttgcctaggatgctttctctctgcctagaatgctttcccaacccaaccccagaatcctaactactatgaaagcccatgacgtctttcttaccccctttctttttcttggtacttaacttattcttagttacttgtaaatgtattcctcactactgggagcttcttggaatcagagacctagtgaaggcagctgcccagttagaaatcaagtgtagggcaggggaaagagtgagaaagcattaaatgaggggcataggaagggaatggtttggagggatacttacaaattctgttcctccagaagctgtactttgttctgaagctccatattctgggctgtgtatttcaagaccctgggggaaataacaaagatacggggatatggcctgtatcctcccttcaaaaacctaatacttacaacagagtccctctccctttcatacctgctctctaaacccccaacatacaccttctttttcctgcggctctcttgagcagatcttttatttcgaatcttcctccgcacacgtttcagaatttgttcctctgtctgaaaggaaacagggaaagggatatcattagaggaactctagaaaaaggagttgaaacgcaactgagatcaatctctttccaatacagaaatcccttctacagcttccctgaccaacaggcattcagattctttctgaatgcctccacggaccaggtgttaaccctaacaagccagaccattttaaactattaaaaaaaaaactggtcgggcagtattcaggcgacgtggctcatgcctgtaatcccaacactttggggagctaagacaggaggaccggttgagcccaggagtttgagaccagcctgagcaacatagtgagaccttgtctctactaaaaataaaaaattagccgggtgtggtggcacatgcctgtggtccctgctactcaggagactgaggaaggaggatcacttgagcctgagaggttgaagctgtagtgagccatgatctcgccactattctccaacctgggcaataaagcaagaacctgtcttcaaacaagcaaataaaaacttccttatcctgaaccaacagctgcctccttataatttctatccgttggacttacctagtatctctggggccaaatagaataaaccctgtttagctattttaaggcacttaacatttcctcagagcttaaagaaaaaaaaaaagacaaaatttttaactcatcttctcaggatagactgcatcctcttagtatctgtcaaagatgtgctctagccagtatcaaggaaagcaagagagtgacttgtagagacaataactctattgctacagtttccaaatcccatgaactttcttagtagccacatcacactgctgactcatcttgtactttgaagaaattaaaattcttcactttgggaggccaaggtgggtagatcacttgagcccaggagttcgagaccagcctggcaacaaggcaaaaccccatttctactaaaaataccaaaaaaaaaattgccgggcagggtagtgtgcacctgtagtctcagctactcgggaggctgaggtgggagaatcacctaagcccagaaagtcaaggctgcagtgagccatgatcacatcagtgcactccagcctgggcaacagagcaagaccttgtcaaaaaatatatatatattcctgtaacctttctattaatgagcactgatttcatcatagtaccccagtactctgcttgtgaagttgccactcattgcttaaaactgaaaactaaggattttacatttattcatgtactgcttagtccaaccctgttgaactctctaaacagttctaccattcagcaagaggtggattactatgaagccaacgaagtgtcaaggcccttcacttacacagtcctttccaaggcccaatactaatgttgcactgataattttgagttatttttttaacagaacaccaaaatttgtataagcccaacaaaaacgaggatctgcccttgcatctggcatattgtgtacctgcctcaacttcctattagcaataaatctactaagtttctcacctcaatccttttttaaagttattgatataaagttaacagaatttgcctacttgggacttttaatcccttttcagcctttgttcaaccaatgagagtcttaccttagtgagaggaagtgtctcaggcagaataagcccctccttctccaatagactcttctcctcatctgtcagtactagcctagcaatctcctagggtaacaagaaagtggacggcagttgcatggggatgtcagagaggaatggggaatcctgcccccacctggggaatgtgagagtaatctcctgaaaatcaagtcaagtacctgctctgccagctcctccatatgctgtggagtcatctgggtcccctcttttctacagctctcactctctgcaaaagggaaagtatgaatagccaggcccatgaaccctgtcctccccgcaaacttatttcagactcacctagatccatagagacagtttcccgtgggagggagtaggtgtggtcatggtggacaaggcaggggttggaggagctgagaatgttcaacgacgctgggggactcagcagggagcacagcaaatcatctacttcccagtcgctcggtacctgcgcagggttccaatgaacaggccttgaccttatcaccatcacctgacttcatggacatcccacgctttccccagtcagaaccccaacctacctcagaaagcggcagcgcccagtccagtggggccctcacggcctcatcgggtgccgtccccaaatcttcactttcctctagcaggaaggccagcaggtcttggtcaccagcatccaattccagctccatttgggacaactacggaaagggtgggccaccgggccccaacgtccgaagcccagacacgagccccaggccagctgtaggcctcgggcacctatccactgtccctctacggccgggattccccgccggcggctttccatagccctctccggacccgcctcccaggctcaattctcctcagcctccaacgcagcgaaagtgacgcaccccaccccgtggcactgtgggacttggagttccctccaactgagaagaggcttgggtgcagcgccacgtcccaggggctatgcaaatgtaggggacggccctgctgccgcctcgcaccccgagggcgggggttccggggctccggctccgccttctaccccaagctagaaaaaggaagagttctagcctgaaagggaactcgggcgtcgtcctggcgtcctctccggattgcgccgcaccctcgcttcctgccagggaggggctgccgggctttggcggctcccgagcatcgagaacggggccagagcagcttcctgcctgccccccgcgaccatagagcgcgggcccagggcgccgcccgcgggtgggggacgttcccaggacggaagtggccgagagagtgtcgaagggagggcgaggccggagcccgagggcgacccgagaagcggcggggcggcgggccggcgggcggggcgcagagccaggcagcgcaggtaggccagaccgggccgggcgggggccttagggtggggccgcggggcctggccccggggcgggcgggccctgcctctcttgcgtgtccggttcgggtcctattagttggagaggtcagcgtccagcgcatctcggcttgagctcggcgtgaagtaggccgtcttggggaagacaggcctttcctgggagcagtcctatgtctgggataggctttggggagcgtgaggagtcgggtggcagcggggcgcagggcggggacgggctttggtgttagctgatagcgggcatgtgggtaggaaagctttgggtgagttggggattaggtggggtccgtttaggaatcaagggtcgctataggagttaaaagctggggttaaaacttaagagttagtgtgagtcaggtccgttttagataggtaaggtttagattacggtcattatcttgtttgctgggatggccatcatacgtcataatttgagttcagggtcaggttaagggtcaacaacaggaatcaggttagagcttgtttgagggattaaagaatgttggcatggtcggtgttaaggataaacagtgaaagcgtgagttaggaatcaaattataaatgaactttaggcttaggggtcaacatttagggttaacatcaggggatttggtgctaaaggcaaaacttagatcagtttcagggatcagggattggatatgagtctgtgctaggaaagggatgaatgtccaagccggtactgggaatcaggaaacaaattagaggtggggttaatgttaggaatttggggcagctttaggggttgtggtttgaggctagcatagttgaccttgagcagataaaatttaagaggttggcagtaggtaaatgcccttcttttgtagggaaatcctttattcctatgtagttacaggggcttctttttacccagagagataaactaatttcaggctagcgttctggctttagctagaattgcaggcatctgggattccagcttctttattccattctctaagcccaaggcccttgctgtggccaccacagttaggggacagagattctggactgtgttgtttacagacaacataggtgggaaatagggacccaggatgtacaaggcctagtcacaagttggggactgcctagggaagaaggagctgatgactatgggggaagctaaccaaggaatcactgttgccatgggagaagggaataactgaatcccctgaaagtttagccctgcttctcccacttcacttgttctcttggtattaagccctcctctccaactctcatccctgactctgcatttcacacccatcctgcctatccccttacaaaatacttcccttgcctttaactctcccatgctcatcttatcatccgttcccatccttagttctacctccctcaccaacctttaatccgcacatcctacctgaatttaccctcatcaaaacctgagctttcccatcattttaaattactctcctaccattttcacccagtcatgtacctacattccacctggtcatctgctgaataccctactcccatcccctgctgtgtgtcaccccctggatctaagcctcttttaatttcttggaccatttgtagatccccttcccccactccccaacagaaaagaggaaacgagacccaaagaggaaactgggtcttgctgatcccacgcccagccaggccactgaccacacccccacttcactcccagcctgaccctgccactgaccacagcactatcctctactcagcctgacccagccactggctgtaccccatcccccatcccagctccagctttacttagacattgccaatgtcccttcactttcccacccccaccccagtctgatttagtgactgaccacaggcccagctcttctcaacctcctatagcctgacctggcctctgacctcaccccatcattccctgacttagccaccatccatgtaatcattccccttcccccaacctgatgcagtgactggtcatatatgtatcttatgtatatgtatttttccaaacaccatcatcaccagcattctttttctacaccctgtcttctcatcctttttctacaccctgtcttccccattcccagcctgatgcagtcactaacccaaccccatctgcccctagtggctactaatcatatactcataccctttttccccacagcctaaccacatcccgtaaccacagcctcatcctcacattctctgcccaacctgatcctttcccctcttcccaattcgtcgcctaaactcaagctgccccagccgctaaagtggctgctgatgataggaagctgtgggactctaacctgtctaccttagtagttattaggtcctgtcatttctacctccccaaacttgttctgagtgacatcttcctcaatgccattccaactccggcttcattacctttaatttgtactaatacagtgtccttctaactaatctccaaggtaactgccagagttatttttctaaaatccagttccggttatgtctcttctctgctcaaagactcccttggcttccttttgtcctccaataagtaaaattcctcatacccctctccagtcttcctctgcctttccatcctaaccctgacttccccaccactgctcccttgcaggtacccctgtgcttcaacagcctgcctgctcacttccctgaatgctcctccacgatttactgc

SEQ ID NO: 7056 - DNA, 23865 bp, Homo sapiens
aagagggagaaaataaaaaaagagaagaacacagggcatgcatgattttcaaactaacagtagaaaatgtcagtgcaacctaatttatgagagttcaagtggttacattattatcgagcacatttttttttagatagagtcttactatgttgcccaagctggaatgcagtgggtattcaagatgaagtcgtggcaccatggcctctcactcctggcctcaagcgatcctcctgtctcagcctcccaagtagctggagctacaggtgcaccaccacacccagctttcaagcacattttttttttttgagatagggtcttactctgttgcccaggctggagtgcagtggtgcgatctcagctcactgcaacctccaccccctgggttcaagcgattctcctgcctcagcctcctgagtagcttggattacaggtgtgtgctgccaagcctggttaatttttgtatttttgttttgttttgttttagagacagagtctcgctctttcgcccaggctgcagtgcagcggcgtgatctctactcattgcaagctccgcctcctgggttcacaccattctcccgcctcagcctccccagtagctgggactacaggcgcccgccaccacgcccagctaattttttttttatttttagtagagatgggatttcaccatgttagccaggatgttctcgatctcctgacctcatgatccgcccacctcggcctcccaaagtgctgggattacaggcgtgagccaccgcacccagccaattttcgtatttttagtagagatggggttttgccatattggccaggctggcaagcacaatttttaatttagaaaaatctattaagctttttactagtggaaactagacgtcatattcctggaagctgctacccatgatgcatcagggatttcccattccttcagccactactgaccagaccagagtttcacagcttctgtctgggttaaccaaacacatccatttcacaaacgaggaaagtgaggccaaagagagccacgatctctcacgtctctacattttaagatgagtgagctgcagggtccctgacagtggggagggaggtgggggggtggcaggacagaggactgtgctgcactgcactttccactcgctcttggttgacttttagtcttactttgtttttactttacttttactctacttttactttagcttttacttggctcttatttcacttttactttgtgtttccttttgctttgctttccctttgcggtccattctttctctggtggcggtgtgagatagctgcgtgtgggcagagatgctctccgcagccctggaataacagagttcagcagcactcaagctcccagcacccactcggcctcagggtgggggcaggggggaatgcaggaactacctccactggcaaatggagtcagtgaggcctgggggcgagcctaggtctgcagcagtaaggaccactcaggagcgcagggtaggcttaacatccaccctaagagcaggtgatgaatctggggagacagaacctcccacctgtaccatgtaataaacagccaaccagagaaaggaggtctctaagagtcgctgcagggcagagtaaactgcaccaggaaggtgggtttggggagaaggcaaatcagacacggggaagggggtcccaaggccaccccagcaccgcaccacccccgcctgggcatataggacgctcagtcaacatccgctgaacaagggaatgtctagtgaatcagccatttgcacctaaccagaggctcagaaaagggcctttttgttggccctttgtggggtctctctctgtacctgcctgcctaggtccatgcaatggcatcgggacccaagattcccttactctgctgctccgcagccaggcctggatgcgtcaggacttgcatgtggggcacaaggaaaaggcttggaacctcctttcttttttttaactacctagtgtcatttctcaccttgggccttctgaacctccacacagggcatctctgggctctgtcctcagctgtaccaagcactaatttcactggtgcactggtagctccttcaaagcagctaatgctccaacgaaagaaacataaaagctccaagacatcggtcctccccaacagctcacaaaggacaggactgatcctccacttggcaaatggaccatggagtggagtgaggggccttccttgagtgagcgcctccctcctccccagttctgtgctccggccttgggtcaggctgacctgcaccggccaactgcaaaggtttggggagctcggaaactcattaacaggctccgataatgagaccatcggaaaagcccaagagcttgcctgtctaggtagaccagaaaccaaacttacacctgacaagtggagtgatcagagagctgaaacccaacaggcgacatcagctagggcaggcgaaagcattaataattgattccatgggtcattctggggttttcattttaataacttggcaagagaatttttataagttgtgctccaaaagaaatcaaggcatttttcaatgaaccaccacctcaagttgatgaaacccctcccttctgacctcccttcagacacaggtaggacagaatggtgctcagctattctcgggatggggcagggttcctggagaggaagaggaggaggaggcagaggagtcagggaagaaggggaaggaggaggaggggaagggaagacgaggaggggaagagccccagccagtgctcaccattgtcgttgtctctatgcaagtgctggatcatgaaggggatgggatcttcgggctggtggatcaggagttgctccagcatgttctgtgggtgcagggcagacacccaggtggttaatacctgcaagggcacctggtcaccacagataccagctatggggcctgctctctccactgcaccccaccaaacatgccttcaacctgggacccagccaccgccccagctggcatctgcttgggtccccatgagcagaggcatgaggggggccacgtggtgctgctgcggaggcacctatggggaggcagaagtggaggagtctcgcccctgattcagagcaggcagtccagggctctctcccctggggccctttgagcttcccagaccagccttctccaagttctcaagcatcaccattcccctcagagccttagcagatgctgttccctcagcttggaagcttctgccttgtcctcatcctggctaacttctgctcagtctcagatctcaatgggaacataccttcctgagtatgtgcactacgtaaatatgtcagatgctcctgcacctgcctgcgggcatcgccctgttccatgcctcaccctgtccctactcaccaggccaccatccccccggcaggccatgggttctgtgggcctccttgtctgcctagagcccttggcaccccaatacctggcagtcatagcagatgcccagcgcagatgtttgctggggaacatgaccgtcaccactaactgtgtctctccagaatggaacagaatgttaccagccagatttctaaatagtcctgggatattctggccatttcatccaatcaggcaagcatatcaagagaaagcagcttctggggttgcagaaccctaggcagagaaatgaggaggagctcatagcagctgtgctgctgcaataaggggtatccttgagccccagggacaaggagggaggggctgtagccctcttggagtgaagggagtgtggggcagggaaagagcaccgagccatgagaagtcttggttccagccccactgtatctcatcagcaagtcccttcccttctctgggcctcagcttctctgcctgttcagtagcacagctggagtgaattcatgtttgtatgtcactggtgcgatgatggaatgagatgattttagatggttcacacataaatattttacatttcatgtttaaatcattgtgtatttaatgtgtattagaaatataagtacatcaaatcaataatttcaaggatatcacttaggatgaggcaaaagcggctatttaattttttaaaaggtgagttgatttaaacaagtgattagtttaaatggaggtgcagtagcggttatgcaaatctgtacatgtgatacaactgcacagaactgtatgcacaacaaaaacatcaatgcaggtaaaaatggaggaaatccaaacaaggcctacagttcaggtaatcctattgtaccaatgccagtttcctggttttgacaatgtgctacagttatgttagatgttatcacgggggcaatgtgggaggggagaccagaaatccatactattttttaacttcctgtgaatctaacattattttaaaatcaaaagtataaaaaatggaaatggtcaaaaacatggagggaatccacagatgactaaggactggaaatactggactgaaagctttcttgttgggaggccgaggcagaaggactgtttgagcccaggagttcaagaccagtccgggcaacatagcaagacctcgtctgtactaaaattaaaaaaaaaacattagccaggtatggtggcctgcacctgtagtctcggctactctggagggactaaggcagaaggattgcttgagcccaggagttcaaggctgcagtaagccatgattgtatcactgcactccagcctgggcagcagtgcaagaccctgtttcaaaatcaataaaagctttcctgggcaattcctccaacaatcaatgtggaaaacacaccaggttctctagagcagacaacagggctccagatgatcccccatcctgccctgacctgctgacttctaacccagctagctatttgatttgtgattggccactcaagcagttttaggaatctcttgctctccctctatcagttaacactttccgagggaaatgtgtttgatggaggtgcagacacgggtttcttcgtctgggctcagctgtctagtgtgcagggcagaacctcaaatgaccacagacaccactatgccctccatgccatgcccctggggatggggtgtaccctgggaagcagacaaatgatctgaaaactgagctccagcttccccttgcctctcagaacctttgagtggctgagagttcttcccctccagctcctgaaagccttgacctccaccacgtgcaaaagggaaaactggggccctggcggggacggggcctcgcccaaagtcacacggtgagctgggggcccagtcaggcctggagccagaatgagagcttcggagctgccggggacgtctggccctgaggaggagggaccaaggtgggagatgctgctgtcccagaggcggccctctctgaggatggagatgccagcttgaactcggacaatgcccacctcagaaacctgggccgagaggctccccacaaattcgacagatggtaattgtcagcgccgggagagcccctgggagaccacctcttgcaacctggcatttcacaggtggggaaaccgagaaaaggaaaggactggttccagaccataaggcccgctggcggcacagccaggaccaaatcccggctcgagtggcccccttcctccccctgggtccgcctgaggcaaacccgggcaggaccaggagcgtccccagctcgagggccccctcggggtcacggcgacacacgaatcgtacatcccgagttgggctgcttcgtgggcgcgcgactcggccccagctgcgggtcccggccgcgcacccgacgtcgcagtggaggctcccgagccgccgccagcgtcgcgacgggcaggggtgtccggtcacctgcatcaactcgaagatgtggttctcctccccgtactggggcatctcgggggggatacggtgcggggcgatagtggcgtccatgtagccgtctcggctcgccgctccctagtaaccgcgtcgctagggccgccgcgccgactgcgtcatcagcacgcgccgcggccccgccctgcaggctccgcgccgggcccagatacccgatcctcggtcgcgcgggtcgcccccgccccgacctccccggcygacgcgctctgcggctcgggcaagttctttccccaaccccggcctcgcttttcccatttgcgcatcttagcgggggacaccctcaggtggcttccagctgggcctcctcgtatctgagacccccgacgaaacccagaaggggcaagtcggccctccgaggggacgggaggcagaacctgcttctggttctgtcagtgctccccggyccggctccctgtgcctcagtttacccatctttaaaacagacgcgggaataaatgtgggggagggtgtttgaagggggaggggcgtccatgagatgggccggaggttcgaggatcgggtggaaatcctcagcccaactcctagagtsgagccccggtagacccctcccagctccccggctctggccaagccgccaagtgacccgattgctatggcaccggcggtaacaatcacgcccgcggccccgccccttctcgcccgacgtccccacccaccctcgcctcccaagtcctggaacgggcctccccaccctccggggcaccgacactcacggagtcactccaacttctctgggtgctccgtggagcgaagagcgctctaggacaagcaagggtaaacagggatgagtgtgggtgggcccactcggaccccaccccggcctctgggtcagaaactggaagctggggtggaggatggaaagatggaggggtccggaggatggaggggcctgcacagctgtctcggggtgggggcgaggggaaggttcgcgctggagacggagctttttaagtcgtatgaattcccagtggtacggggcagcttgatattttattagtcgcaacactgaattgggatctctagctcttgtctgttgccgttaatcgtaggagctgtaagagtttgttgaactctttgtgctctcggcaaaattctgttgtctctgtaccttatggagagggaaaatggcacagtcaatgcagacagccccagcttcaagttctggctccgcttcttactgtgtgagcttggcaaactctctgcttgctccgtgcctcactttcctsccctgtgaagagggaactgctgaaggatttcaggagctaatgtattggagagtaattggcatgcagtaagcacacaatatatggggctactattagtagtagtatctcatttaatcgttccaacaatcctgtgaaataggcaccttcattcccattttacagatgagaagttggaggattagaacaatgaggagtggttggctgggtaactttgggtgagtcacttcccctttctgggcttcttttctcatcagttgttgatcatacagccttagaaccagaaggcctcttgaagaagaggctaatccaaactctctcatttgacagatggataaactgaggcccagaaaagggggaaatcttggctagggccactggttagattgggcagagccagggcatgaactctgcatccaggctccagctaaagcccttttctaccagccatcagcccagagacatgccctcccaacgtaaaagccagcactgttgcctcttcccctccaaaccgcttcctcaaagtgtgtacaccttggtaggcttgtcaaacccaactgtaaagatagctggggaagaaaaggaagctgcctccccctgagcaaagaacacaacagccatgcctgccatttgcactggagaggtttgttttgcttcctggacatttctgaaatgacttgcctttctcctcatttattttaagccctaggcgcttttcctaccatgattcaatcttctttagcagcctggaaaaatacaaatcaattaaagcctaaaacctatgggtaatcatttttttcctccctcctcccccagatcgagaagtgcccgtcccctgtgcccttcatccacactaatttggctgcagtggctctcgttcaagggacgatcacttcggatagcttattacagctcctctcatgacattcctggcgtgcatgtcacaagttgctaggatcaagaacagagtcagttcctctcaaccactaccaaccacagctcccaccatgatgagggaaaagccaggccgaaagggcacacgccctttctccctggaactccacctatgtgctctctctcacttttctggagcttcacctttgagtcatttgtaagccctgggccaacattagggcaaggcaagtgatgcaccctcagcacaaaacttaagggagtgccggcaattcaatcattgaggtggatgtttttcacgttttaatgcaatatattttaaaaatcaaaaataatgctgcctaaaatccatttagaataacatgtcaaaaatttaagtaaaggtaggctcagtgttactgatttctccttttgcctcaggcctcagtatggcaaggtgcagctatcttttttttttttttttttgagatggagtcttgctctgtcgcccaggctggagtgcagtggcgccatctcggctcactgcaagctccgcctcccaggttcacgccattctcctgcctcagcctcccgagtagctgggactacaggcgcccgccaccgtgcccggctaactttttttgtatttttattacagacagggtttcaccgtgttggccaggatggtctcaatctcctgacttcgtgatccacccacctcggcctcccaaagtgctgggattacaggcgtgagctaccgcgcccagccagcaatcttttctttacaaattctgatgttgccagctcatgcttctaatcccagcacattgggaggctgaggtgggaggatcgctggagcccaggagttcgagaccagcctgagcaacatagggagaccccatctctacaaaaaaaaagaaaaaaaaaaaaagaaaaaaaagaagaaaaaaaaaaaaagaaaaaaggtagtcaggcatggtggcacatacctgaggtcccagctactcaagaggctgaggcgggaggatcacttgagcccaggaggtcaagattgcagtgagtcgtgatcacagcaccacactccagcctgggtgaaagagcaagacccattctttaaaaaacgtttttggggctgggtacagtggctcatgcctatcatcccagcactttcggaggctgagaaagggagatcacttgaggccaggagttcaagaccagcctagctgacgtggtgaaattccatctctactaaaaatacaaaaaatagccaggtgtagtggcacccacctgtaatcccagctactcaagatgctttttttttttttgagacagggtctcactgtgtcacccaggttggagtgcagtactgcgatcatggctcactgcagccttgacctcctgggttcaagcgatcctcctgcctcagcctcccaaagtkctgggattataggcatgagccactgtgcctggcctattttcatcttgattgccgagttttttggcgcctccttaagttttgcatgggggcaagtgtctccctcacctcaccctagttggtcctgggtgagccggacaccacgggaggcacaacaggaaaccactgtgcgtgagtcagcatgtctgctccatgtggcagggaccagccaaggatatggcaggtgtcaataaaccatggaccccccatctcattccccaccttcagctctcctttccataggaggttgagctggaaagaggcccctgccctgcctgccctggcccaggcccacccccagggcagctgcgactgtccctgtgtctgttgacagtcacagtgctgtggctctgctgcagaagcatactctcttgtctttccaggagactcactcagtggctcttaaggtggctcctctaaggcagccttgctggcttttggctccagggatagaggctccatggctgggctccatcttgctaaagggcctcttccccagcctcctccaagtgctctgatgtaccacccccatcatctcgcggaggccatctcctggtctgttcttgtgtttcctttcattcctctgatgccatctcttcttgcatcaactgggatgctccccctaccctgcctctttttttttttttttttgagtcagggtctccctgtgtcctaggctggagtgcagtactgcgatcatggctcactggagccttgacctcctgggttcaaactggacccccagctccagccctgctctggacacagcagaaagaaatatttcccagccccgtcttgttattcctatccacctgggacctgcttggaagcttggaatgtgccttccctgccccagtccatgctaaatgttctggccccttccatctccaacatctcccttggactggacctgagctcagcacagccttctctgacccctgctcatgtggtgacacgttcgagcctggcctttgttctggaggcagtggaggggcagccgagtgtggcagcactgacgatgctggttagacgtaaggaagcctaggacccagggtgtcttgggcacaaatttgctgtgacaccctgggcaaaacctttccctctgagcctcactttccccatagcagctcaagggagctggttttctcagtcccttccagctctaacatgaatagaaatctgtggtctggagcattttgcacgcrctcagcaaaactgtgatgtcatggagcacacacccacagacttttctgctcacaggaggattgtagatgctctgtggagcacctaaatcacagcagggacagtctgtgaggcgccaagagagartcctccccacagcctccatgttactgatcatggcattccagcaattaacagggtcagggggcagtccactagccaccagccctgccctgagaatgcgcaaacctgagaccaaggctcctgcccccagcccagagcaggcagacttacatcttctcaaactagacagtctagtattgattcttctccccgcttaatccatgggaaggaattcccagactttcccaccagttgcagagcagctttacaataatttgatccaaactgatcatctcctggttttatatcctgtggcatatcccttgatcccaggttttgctgacaccacagcaagggattggagggcgtgtgtgtacacgcgtgcgtgtgtgtgtgtatgcatgtacctgtatgtgtgtgcrcatgcatgtgtgtgcgtgtgtgtgtgcgcgcgtgtgtgtagatacccacatctggagaaacagaaccagagaaactctgtccacagctgagggaagaagtcacatttcctggcaaagaatgtgttcatggagggtaaatttcgaggtcaggctcagctctgtcatggacagcctgggggctctggacaagtgtgcagcctcccagggcctcgctttcttctgtggggaggcactcacaaggcgctccagtgagaggggccatgggtatccctctcccctgacagtccttccctccggagctggatccgagcattgggtcccaggacctcatcactatcctctgtctccccatagattcctcttctcctgtaaatgaccacagaggaagacaatgaatgaggtgaaagaatcccttygcagcatcgagcagaagtacaagctcttccagcagcagcagctcaccttcaccgccgctctggagcactgcagggagaacgcccacgacaagatccggcccatctccagcattggacaggtggggctcccgacccccaccccggccgaggggcaacaagcccagtcccctctcacaaaagatgaaaccactggggcccagagaggggaaggacgtttgcgccagaattaggacccggacccagaacctaaatgatgtaatgagtccttcattcgtttctctacyaaatatgtaagtgaataacaacaagtgaataaagaggcaggtttaaaactcagccggccagggcttaagtcctagctctaccatgtgccactgctgtgatctcaggccaatgacttcacctttctgtgcctcagtgtcctcatctgtgacgcaggttcagtggtcacccatagaaaaccagggatttactggtgaccagagggatcctgtccttcccatcagattccactgggggttgaggaactgtgggatgccaagcacaccgccaggtgctttcgcagatgtttttatttaacctgcatctcctccagggttagctgctgtccaggtttgctgtgcaggacttggaggcctcaagaccaaatgatccttccaggatgttaggggctggagctgcagtgcagttaggaacacacacaggccggcccttcacagcttggagggagtcagcttgtggaagggtaactgccccaagatgggtgggaacaggcgcagggctcagaactgcagaggagaaacaggctcgggaggaacaagcaacccttgctggcagcatcctttaaaaacatttttttctggccaggcgtggtggctcatgcctgtaatcccagcactttgggaggccgaggcaggtggatcatgaggtcaggagtttgagaccagcctgaccaacatggtgaaaccctgtctctactaaaaatacaaaaatagctgggcgtggtggtgcgcatctgtaatcccagctactcgggaggctgaggcaggagaattgcttgaatctgggaggtggaggttgcagtgagccgatattgcgccactgtactccagcctgggcgacagagtgagactccgtctcaaaaacaaaacaaaacaaaacaaaaacaaaaacaaaaaaatgaaaaaaaacactttttttttctaattttggtaaaatgtttcctcaattttttaactcaaaaaaatgttaaatatagaggccagacacagcggctcatgccggtaatcccagcactttgagaggccgaggtgagtggatcacctgaggccaggagtggagaccagcctggccaacatggtgaaaccccatctttactaaaaatcccaaaattagccagttgtggtggtacgcgcctgtagtcccagtgactcgggaggctgaggcatgagaatcacatgaaccctggaggcagaagctgcagtgagccgagatcgcaccactgcactccagcctgggtgacacagcaagaccctgtctcaaaaaaaaaaaaaaaaaaaaaaagttaaatgtacagaaaaggagcacccatataaccctcacccagattcaccgacttgtgacatttagccaatttagccatatttgcccacgcatgcagcccctgagctattggaaaataaacttcctcttctgtaaacctggacttcgggggaaaaaagaaaagaaactgcctacatcctttttagtccatcctccagaagcttcaaaagtcaacaagtgtcccttcccagaatctacatccatgcataagggagtggccttcttgccttaggttcagccgaaggctcttggtaaacagtggccttgtgttctgagttgcctcacccctcccctgccctccctgaaccagaagtgtccaaaggttccctgcacaccgccccccacccccgcaatgctctgttgtagttacaccatggggcaggttcctcctcctcgacccctacaggtgcctttgtgggtatgagtgtgaagagcctctcccccttacgaagctgcttgtgcatggcagtccttgggaaggaaccacttcagattgtttggggaaacatcccctagcaacaaaaagacaaacggttacagcaagaaaaccctgatttagatgtagacctttgtgggtgctggaggaggtgatacctgcatctgtcatcagattgtggagagtagaaccatctgactacgaaatgggtctgttcatctggcctggaccacagccaattcctccctagctcgagatcagacctccggctctggcccaacctcagatgcagtcactgggtaaccccataagctccacttactggcctgcccctccttctccaccttgtgaacacagtacggctgaagcccaaaggattccagtccctgctgtttccctctcagtatgggtggcccacgctggaatttctcacaatgaaccctctagaagtgggatgacaggcactgtggcattaagtcagggggcagcccccttttgctttaggcggtggttggttcaggtggcaggggacaggtgaggggtagggcacggagccactgagctggggacacccaactaagccactggtgccctgggcgggttatttcacctctgcaaacctccagtgttcatgtcatggtactgatctgtaaaatgggaatttaaaaaggtacctgctcagtgtgtagggtttagatgaagacaggcgagagcaggcccgtaaagcattttgcatggtgcctggaacacttgattttatatccatctatctatctacccatccatccgtccatttaatttaattaattttttgtttttgagatggcatcttgctctgttacccaggctggagtgcagtggcatgatctcggctcactgcagcctcctcctcccgggttcaagtggttttcctgcctcagcctcccgagtagctgggattacaggcrcgtgccaccacgcctggctaattttttttttcctagtagagatggggtttcaccatgttgaccaggctggtctcgaactcctgacctcaagtgatccccgcccacctcagcctcccaaagtgcggggattacacgtgtgagccactgtgcccaaccgatccattaatttcatatcatrtctatcyatccatccatccatccatccatccatccatccatccatccatctatagagagagagataccactatatagagtggtctgtaccttaaaatgcttaagcgttacttgcgtctcccccatgagtcatgtagggtgggagggagtagggtgggtgcttctggacatttgcaccataagccagccaggacccgggttggcatgtccccagctcatgtggcggcggcccttgcaggtgcagagctacatggaacactactgcaacagctccacagaccggcgggttctgctcatgttcctggacatctgttcagagctgaataagctctgccagcactttgaggccgtgcactctggcaccccagtcaccaacaacctcctggagaaatgcaaaaccctcrttagccaaagcaacgacttaagcagcctcagagcaaagtaagtccctctgatgctgctcttgaggccccgtgtgtgcctgtggggaggcctctgtcctgcttctttcctgttgcctggatcatggtgctcctattaraccaccccgggcaggaaatcccagtctccactcatttattggaatgactcsgattcaacaaaaccttttctttacaaccatcrtagacatggcaggacaccaggtgtctcacgggtgttagcaccaggcaggtggagaagggggtgtagagcccagagcagttgcccccagaagcccacagagatcctcactgacatgcaaagaagtggacaccagagccgcctcccaggggcagcagcactggcactgagggctcctcatcctgacagcccgggagcctgcagcacagtgggccagagcctggggaagctctgtagataccagggtgagaagagccagagggatgagccagccagttcctcacccctaacccaggtttctacggaccatggggcagtggtttgcatctcctgtctttcacaccagaattacctggggcttgtggcaccccaggcctggtctgccagaatctctggggacagagcrcctcagcgtgctgtgtgtccagttctaaagcctccccaggtgactctgctgtgcctgaggtgtggcagctgcttgccacggcatggcaagtcccgggagcatgggttcacctggccccctgccgtcctgcagataccctcatgatgtggtgaaccacctcagctgtgacgaggcccggaaccactacggcggcgtggtcagcctcatccccctcatcctagacttaatgaaagaatggatcgcccactccgagaagttgccgcgcaaggtgytgcagcacgtgagtgagccccaggcgcaccaggagagcaccaggggagccgctcgtcctgcccaggccatagggacccagcccagggccactaaacacaagtgtagacagctcacaaaagccagcctcaaacccaggggatgttcaaaaccaccctggaggcctcctggtgggaaattgtaactcagagccaggagctccgtcggcggagagctttgctgtttaatttggattttactggttggtccttttttcactggtacccrtggaccctgccacttactaaccccaagggaatcagccaatatattactgagacttcctctctctcttcttgctttaacttcttttttttttgagacggagtctcgctctgtcgcccaggctggagtgcggtggcgcaacctcggctcactgcaacctccgcctcccaggttcacgccattctcctgcctcagcctcccaagtagctgggactacaggcgcccaccacctcgcctggctaattttttgtatttttagtagagacagcgtttcaccatgttagccaggatggtctcaatctcctgacctcatgatctaccctcgtgatcggcctcccaaagtgctgggattacaggcgtgagccacagcgcccggccctcttgctttaacttctaacatttccacttctaagcatcaggctccgtgctgatgaagaggaaacccacttacagaagttgcccaaacaggatggtgtggtagagggtcccaggagggcactgaactgtcacctaggtcctctttgagccacatccggctccagtgccacgcctgtccctgctgcgggctgcagttttgcagagggtgatcaagctggagaccatctgctccttgccccaccaccagccccaactgtaggcaaggcacacgctgtttgcgagccagggatgctcccctccaggatggagtgggggtcggcatgtggaactcagcgtgtttatttttttattttttgagatggagtttcactctgtctcccaggctggagtgcagtggcacgatcttggctcactgcaacctccacctccaggttcaagcgattctcctgcctcagcctcctgagtagctggaattacaggcgcccaccaccccacctggctaatttatatatatatatattttttagtagagacggggcttcaccacgttggccaggctggtcttgaactcctgacctcaactggtccacccgcctcggcctcccaaagtgctgggattacaggtgtgagccacggcacctggccagaactcagtagtgtgtttagttctctggaccacagccaaaggggaataaactcacctttccttcgcctttacttgggagagggagaccatgacagaagccagaattctgattttgtggctcctgagcaagggcgatgacctggttttcacagcgtagtyraaccccaaacattgtaaaatgtgtccctggcttctgagcttgcccaaagtaatgtctgactgytggtttttcccttcacaggggaygacttagcttctgtattattgttgcttcctcagggggagacagtcaagaataaaaagtattctaccacctctctgcctgacttggtttcctgggatttatccctgaaagaaaacctacatctcccctaagacatcaaaggacaytgggcagtaagcctcagcagacagcagagagagaggccaccctaggcaagggggcatgcctgtctcaagtcrgcttctaagaggctcatgcccaagctccagaggaccagcaatcagatcttcctccaaggatgggaagtctagttaagagacctagtcagataagaaaacctgaattttccagagaaattaaaaactgccgcctcccagccttagtctcaaaggagttgcttcaaccattaaaatgggcagagcagggtgggtgcagtggctcacgcctgtaatcccagcactttgggaggccaaggcgggtgaatcacttgaggccaggagttcgagaccagcctggccaacatggtgaaaacccgtctctactaaaaacacaaaaaaactagccggatatggtggcaggcgcctgtaattccagctacttgggaggctgagacaggagaatcacttgaacctgggaggcggaggttgcagtggagttgagaccaggccactgcactccagcctgggcgacagagtgagactccgtctcaaataaataaacaaaacaaataaaaataaaatgggcagagcaacgctgatttccagacacagccaggcagaggcaagcaattgaaagccacatcacaaatgaaattcatccctggtccttatatggaagtcccaggccaagagatcataagccagggtagatgtcaaaattgtgtaaaggcagtttccggccttcttctaaagcccatgaagggcacggagaagggaatgttgggagctgtactgtctccttggcacactcacattaacacaaccagcaaggctcaagagggcaagctctggagcactgaagtgtcagtgtggtgccaccaaaacatgggacacccaacatgccagcacggaggagccacacacccctgcagacagcctggttcttggtttttctgtaggcaggattcaaatcaccccctcccacactatgccacttggccactcattgaggaagagcatgaatttgaggcagatacaggaaggatttgtggctgtgcaccagaccatttgccagaataaaaagggtcttcttagagacaaaagcccaaatccattatttgtcaggctcctcttccagtcacccaaggtagccaaaccagaccctaaggctttgtatctttggaccagtcccctgcttgacctgtaagcctgccaaggccagtgtaagccactccatgtccacacagcagagtagtgcaaaacaataaatttttatttgttcacagttaaacacaagcaactgccttgacattttagaacattctaagaaggacagcaaactcttttgattccaattcccattcactaagattgtaccattttatcctgcagttcatatttatggcatctgatgtggattgttgacatgcttttaggattgaggcgggaaagtttagaccttttgacaagagctgactttcttcaatttaactaaaagcagtccgttaaaaaaaatcagtttctttcactgatgggacccctttaaactgcaagtttgccacacatggttcattcatgattgagttataaaactagattatgtcttagcaaaatctgttcctccgtaatatatttgtggtccatagaagtcttctgaaaagtgattactgattcttcctagtgcaaaatgcgtggctgcctctttcataagccaaagtacttgctacacagagcagcaccataccctcctgtccaaacactgtaagaggtggggaaagggagggaagggttggtctgggggttctcagactctcagggtttccactgaaaggtccattccaatggttaaaccagcctacttatctcagaggatggataatgtggcgctgcgaagtggggaggaagctcctctgccatcattaactcgtttcatgaccagaagccatgggcacaggtgctcggctcttccaggcaggcttcccttgtagctacagctactcttccctcaggcgagcagataaggactgcaggacggcatggaagagacaggaacacgctcccctgggcacatcgaagagtcccggacaggcaaacaagccacatgggacaagggtcacagcagcagcctaggggccagtcctcgacctaaacttgttctttcacctacagacaaaagcttaatcaagtgcaatcaatgccttgggatctttgcagcaatctggggggcatgtgtcacagaactctggatgtaaacagatacacaaacatcttcagactggatacatttttccaatacttgttgcgggtcggttttaaagcatgtaccctggagagtgaaggtgcagcagataggtatactgatttgagtcactccacaccaggcagcttccttctccaggtggggcagagccccctgggggaacaactctccaagagtatccgcaggaggtgggcggcaccccatctcaccaaggtcctggccgggtcttcgctctgcccaaaccctcctccagcctgtgcaggcctcctcccacctcttagtgctttcagcgagaaaaggtgagtctcattacgcagaacttttgtttgctcttcggttctttccttcttcaagtggtatgctctactatttggtagaaattcacattggcttgtcacagcacacttcagttctgctggctacatgaaacgcatacccagttttctattcttaacagtgagtctgagcctctgtggtctcagagatcctttcatccccatgaccattttatacatcctcccctcaacaactgctagagttttatctttcccaacaaatataccagaaactatgtgtgctgttgcaaatggggacggcccaagagtctggagttttgttccctgctgccctgcttttacccagtaatgtgcggcatggtgggtgaatttttctaattgtcctgggtcgtaacagttcaccttctcagaacagtttggactgtttccccaaccatgtcacataagctttggctcacaaagtagctcacctctcgcctctccactcttcaagcttagtaagaagattccgcagcttagtcccaaaggtcaggcagttttctctcctgaaaaactctgtggacacacctagagaggtcactgtctgcccacctgccttagtaatgctggtcctaaaactcatctccaaggacatctttcacaacttctccatctaagaaatgaccttgaccttcctacctttgggtttgttttttttctattcatgaccacgtgtttcttccaatcccataataacaatttttatagactgtatagcagagccttgtcaacggctttttgaaaatccatcaaagttctatcagatgcagatctgtgtgtttattcacctgcagggactccggagctcatttgctctgcgtcttcctatccccctccccgctaaaactgtagtgcacctttttaaaggaattccatgctgcacagcagcagacttcgggctcctcggggcctgtgctgactctggttagtgtcaggtggggatccgagtaggttatgcacattggccaaacagctgagacaggtatgctcacccatagtgatttctggatggaggccatccaatcccaatatttatgaataccaagctgcttaattggtttcaaggtagactctgcccttaacgcttattgtactaatacctttgcccaggactgaattgcctctcgagagtaatactgtcacctttccatccttagaactacccactgcagcatgatcaagtgacctgttgactcttggcaggtttatcatgtccaaaaccaaaccaaacctaactactgactctggagttctttgcaacatgaaagcctacatttttaggttgggcaccttcaacatgactccaggtctcattctcccaaccgtagttgaataaaacccacagcctcctagaactcaaaggcacctgagcttggagccacatttgttataaagctgagtaaaaggacacccaggccgcatggatgagctgaggaccctgtgcagacacgtccatggagcttctagcacaggcctctctccatgctgcctcctttcttccctttatttttataagctgtccgtttctaaaatgttttttcttttgcacttgggcctcttttcctttccaattcaggaaaaggctttaagtgcctggtatcttgttctatggcacagatctcttgggcatgaggagaaggaaagcacttaaaaccagtttcaggattcactgatgggatttccttccctttctaagtttgttcacgttttccttttctaaaacggaaccaggaaactagactgtattgggttttaagctttcctttggacaaagctgaattaaatgtgtggtgtcactaatactccacatctgacaattcagtaccaactgccagcctgtgctaggctgagtagttgggaccacgccctgccacaggctgggaatcagtcacacccagaaagcctgcctgaacaggttttctgctggtatagctagggtgacagagtctctaactgtctagtcccctttagttagggatgctagaatatttattgccatgctaaaaaaaaaaaaaaaaaaaaaagactttcattctttctgctcgaggcctccgtaggcactaagatttcgtaccgtgacagttttttacctctttatgactgaatccttctattctttttaatgaaagatagaaacaggaaagccaagttcactggctccttcctaccaaatccccctgcctcagctggaacaccagaccacagttcttaggcttctagcatttctttcaggagcacttgttgagtttggattctctgccactgccacttttctgactagtgtcatctctcgggagcacgtggggcagcctagtgggtatacacagccagcctttgccagcattctcccggactctgtttagactgctctgccattactaacatggagagtgtgatgacatcagctccctggagagtcagcccctgaaagttggaattggtatgaaaaagctgcccctcttctggtagcctagaacctgctacagtgaggcaaccctaatggcctgggaaatgatggtcacatacactttgcagaaactctttggaccttcagagcctttctgctgcagtgtcacatataagctgacatgaacaagaggcgtatgcacacaaagggaggccagtagacagaagggtttaacaaaaggcccagcaagctgagatggcctaaaggtgcagttcctcatgctcaagtgcttctcgggtaacctctcccagtgactgctccttccctcctatggagaacaggttttaccacctacacaccagcctgtggtcacaatagtaccagcattcaagcaaacaccaaataaataagaggtagtgggggaagaagagacaagagctttcccaaagggtgtgtggtctccacagtgccagctccagatttctgaaacaggcttctgtttacacagaactttctaggaagcttatcagaactgccaaaagaatgcaagtatgaataaaccgttgttcttctagacctgctgctttagatgctgaacttcagaatcaaaaaagcagtcggaaagtctcatgtaaacgctttcatgtaaagacaaccagctttgcaggctatgtcctcctggaagggacaaaaccagacttacctgcaatgcaacaaactacctggtctaattgagagccaacccagttatctgaacttcgggaaagcagaaagtggtgtgttagactcaaagattaaatttggcctcatattgcacaggttcaaaggacgcaaccatttgggggggaaaggaagaaagtaaagctactgaggaacaccaactggcccttggattagaacacactgcgaggtaaatgagagggggttagggcgggtggaggggaaggtcaagaggcatttcaatgccagatccaaaaaccgttctgcattcagtcagctgtccaaaggacctccgtcccatttccacacatgaacttgcactcagaccctggaaacaggaaagctttgaaacgtgcattcacacctcctgttctgtgccaacaatatgca

SEQ ID NO: 7057 - DNA, 22936 bp, Homo sapiens
acacctttaatggctgcggggcgtgtttcttcctccagggacaccagatccccctgctcaaggctggggggcgagtgtgccactcggggctctgagatgggcagagatgactatcctcgaacttgaaccctttgttcgtgtctctaaacctttcctgttttctagaagtagacaaactgaatccaagggcgggtgtgctggggtcttagtgccaactcaccctccagaaggagagtccagacccttctcccactgccagggggaaagtgtccatccccctcagccaatccaagggtttcaaacttcaggggtgtgatatcatgccaaatatatatatttccatccatgattcctggctcataactcccatagtgcttgttataatgttggggtgttttaggcctcagaagcaggcctcagaaaacagaatgtctctctctgtctctctctctctgaccttctcctgccctcctttcacctgctcctttttctccccaaggcaagaatcttcccctgcctttctgtctggccataaattctctgacctaccttgtctaattgtaggtcacaagatccccattttaggagtcccaccccagaccctggaggaaggaatgctgtagggagaggccaagaagaatctgcacagacaggccttgtgagtttccccctccactaatgctagaccgtgcgccaatgctagaccgtgcgccaatgctagaccgtgcgccaatgctagaccgtgcgccagtgctagaccgtgcgccagtgctagaccgtgcgccaatgctagaccgtgcgccaatgctagattgtgcgctaatgctagaccatgccctttttgtccaaccatgtttctacacagttgtccatgcttcagtcatgcctatccgattacccagtgaagcctccataaaaggcccaagaggacagggtttagggagcttctggatggctgaacacatagaggctcccaaagggtgggcgtccggggagggctggaggcttcgcaccccttcccccataccttgccctacacatcccttcatctgtatgctttgtagtatcttttataataaaccagtaaacatgtttccctgagttctgtgagctgctctagcaaattaattgaacccaaagaggaggctctgggaactccagtttgcagctggtgagtcagaagctctggaagcccagatttgtttgtttgtttttttgtttgttttggagatggagtcactctatcaccccggctggagtgcaatggtgtgatcgcagctcactgcaacctctgcctcccaggttcaagcgattctccttggaaacccagatttgtgatggcgtcagtgggaagtgggggagggggcagtcttgtgggactgagatctcaacccgggggatctgatgctacctcctggtgtctgttgcctggtgtgtgggaaacccccacacgctggaccacagaagtcttctgtgttgactgttgaatgagggaagagaaaaagccctttgagagagagagagagagagtgtgtgtgtgtgtgtgtgtgtgtatgtgtgtgttttccactcaaggagctttgggggaatggctgcacacttcataggtgagatatgctatctaactcattatcttatttcattgtcctgatgcaggcggaggctggattttcatctttccaccatttctgaagcgtggccccttctgctctcaggggagcctgctgaacatgtgttcttctgggcatccctggggtcaaggtctaggtatggcttccagcacagccaagaagctcctctcccaggtgctgggggcccaggaaccagccctgggatccctcctccgggcctagctggctggtttcagttagtgcttggactggcttccctgggacagggtgcagtgggttctgcttgtatccaggccaggccttagctagtgcaggatgatgggcttggatcagagactggctcctggatgccgctgggttctgggtgggccaactgtatggatgtgaacgcacttgtcctcctgaaacaccaggtcaaagaggaacacagtgaagggagccccagaggagtagggctggcccagagtccacccagccctgtagtctttaaaccccacctttttggggcagtgatacattgttctgataatacagatgtagaaccccaatgtatcaaacccaggacagagctgctcagggtggagctgggatgaggtctggactccctacccccaacccagacacacagacacacttcaggagcctcctccccgacaccccattcctaggcctctgagaggcccagcttgacaagcactaaaggaagctgtcactgcaatgcatagtgggaaaaactgaggctttgtccaagatcagccagcaaagcaggggcagaagcttgggtgatgagctgagacttggggtctgtcctcaggaccctcctgctgctgcccacccccaggttccaaggccaaggggagccaaaatcaatgtctgggtccaaactgagctttgcagagatgcctgatggccactcaggagagcactggctcttgttccagacagaagcttctcctaaagtgaggagagtgaggcccacacggggggccatggggcctgcctccaccccacccagtccctccaccccagctccacggccagggaagctctgcagactctccccacctctccttagagattaaaggtctggggggttctgccacccctgctcacctgagttcccagacttgaccatgaactcccttatttctgggaaacactctggagcattctctggcatcccagaggtaaggcc[135 bp omitted]aaccagaagggggactttagccagccccctacgagaggacatttccccattcccttcatgaatgcaaacctcagccctccaggattaccagtgggaagacaggtcacttctttgtcagcttcagaagatcaagaccaatttatggagaaaccgagagatgagtcctcacaagcccattttccagatgaaaagctgaggcccagtgaggggaatggtcacagagggacactggatagcctgggagttcggaccaagagtcctacatcccctccaccgccgaccccacccaggctggccctgagctgctgcacaagaacttgcccgtgacctcccgatcccagccgctgccctctgacctcgcgatcccagccgctgccctctgacctcccgatcccagccgctgccctcgctgagcttggaccacgtgcctgagacccgtctttcctcatttaaaccctgctcggggtggggggggctccacaccggcggggaacgtgcttgttcaccgtgtgttcttagcctctagaacagagcctcaggcacaggaggcacttcacatttattgaataaatagatgaatgaatcagtgtcatcctcccaacagccccttgaagcaggtactcttatttgacagaggaggaacctgagacacaaagaagtcttggtttcattcattccttcactcattcatgcatccagcacccctgttgtgtgcagacacctggaatatgacagtgaaccccagacaccatccctgtcctgagagctcacagcgcaaaagcagggacagcatctcacccacagctagcagtggaagcgccgatctgggtcccagcttcagtggcccaccacctcctcaaaagatagttaagtaaggccaggcacggtggctcacacctgtaatcccagcactttgggaggccgaggtgggtggatcacctgaggtcaggagttcgagaccagcctcgccaacatggtgaaaccccgtctctacttaaaaatatataaaaatcagccagatgttgtaatcccagctactcaggaggctgaggcaggagaattgcttgaactgggaggcagaggttgaactgggaggcagtgagccgagattgtgccactgcagtccagcctgggcgacagagcaagactccatctcaaaagatcacgccactgcactccagcccaggtgacagagcgagactccattaaaaaaaaaattaagtaaaacataaattttatttatttacttatttttgagacatagtctcactctggcacccttgctccagcctcatagcttgctatgttacccaggctgctcttgaactcctgggctcacgtgatcctctcaccctagcctcccaaagtgctgggattacaggcttgagtcaccatgctcggccttaagtaatatttaataagagttttctttaagtcatatagagagagacagacagaaaaacagagacagagagagacagaactggaaggctagcagtgactcttctccccactgctcttctcccactctgcctggcttggatttgttctttctggttcccttgaacactgcaagtctctgcctacattcctatttc[450 bp omitted]ccttttgaacagcactcaccagctcccagggccggtgccaggctcctgcagactgagaaaacaggccctgccttacaggaaccccaaggtgctctagagaaaccccaaggacacaggtaatcatcacacccctgaggggcctgggaggctgtgcccaggcaccaggcagggctgggtttccaacttccagctgcactgtgacctggagcacacccataacctctctgagcccgtctctggctgggtcccaccccccaccccttgggtcactctctcttttattttcccttagggccccttcatttcgccttactgtccctcccctctcgcacccttcctaggagaggtttctgctacgaaaactttctaccccatgcactggcggacctctggtgagctgcaagagggtctctcctggggtcccagagtccctggggtggaaaagagtagcccttcgtggaagggataatgcaaccccgacaggccgtgggaagaaagtgtggccagtcccatttcacagaagagaacacggaggctccgggtaattctgggagccactcacttgtgtcccctcgctgggtaggggcgcctggctcagaggcccccagcaaaggaggacagatcctaaaccggacagcaagctgcgtccagctggttctccctttccgtgactgcttcaaagctcttataaacaaggtaaggttttccccacaaatcgcttcatttctccacccgcaccctaccatggccccggacctgcggttctcggccccccgagctgggcctgctgcatcctaggcagagttctaggcggctagcggaagccaggcccaggggtcagctcaggcgctcggtcccccgggatcctgctcccaggccgcagggaaggggctctgggaccgcaggggcggggcctgcggtaggtgggcggggctgcggcgccctctttcccgtctggcttctcttttctgtcctctttcctgtctgtcttcctcttttctgtctggcccgcggccccgctgcctgccctgctccaggctccacctgcgccgccgatcgcccgggtatcgcgggggcccaggccagctgagtccgttttccgcgccggggtggcgcccctccaaccgtcctaacgccgggccggcagcaaggagtaagtctgcaccccgtagggacagtcgcgctcccttggccccacccagtccctgccacgcaaggggccaaggaggagggccctgagcccaggaggtgcgcatctcggacccagggtcccgggtcccgaccacggactggggccggcggcgctcggggctgggctctgcgttcgcgggaggcgggggcgagacggggcttggaggcccgrgtggggaaactgaggccccagaggaagagagagggagagggcttgccggacactcccgagtggcagcggcctaatccccaggaccccggctctccgctcactgtggcccgggctgcgcccagcgttttacagccgttcccgcgtgtcctccccccgggcgccgcgtgccgccccccatccactgaggccgggagcaggggatgactggcccaaggtcaacgagccagcgagttgaggcgcgttcccatcgttccgtggagaacccgggccctgcctcccggagaggtggacagcggccacctcgctcccctcggggaatcctgggcgccccttcccgcgcatcctgcgctgggactgcatgtgtcctcgctgtgcctcggtgcttgatttccagcggacggtggactggcccatgcacccctcccggcggcctcggctcacctctgacaatggacctagtacggagacgcgggagccaaggcagggatccgccttcgcggcctctgcgaagtcggtcccagcccctctcccaaaggacagctggaagcaacagctgagcaccgagccactgccaccgtgcgcctcccagagctgccagagctgagcccggggtccagcgggacctagagtccacatgaccgcagtgggtgaccgagggagggcagggctgcagggctggggtcaccgtctccccataaagagcattcctggcccggtgcagtggctcaagcctgtcatcccagcactttgggaggccgaggcgggtggatcacctgaggtcaggacaccagcctgaccaacatggagaaacctcttctctactaaaaatacaaaaattagctgggcatggtggcttgtgcctgtaatcccagctactcaggaggctgagacaagagaatcrcttgaacccmagagaagaggttgcagtgaatggagattgcgccactgcactccagcccrgttgacaagagtgaaactctatctcaaaacaayaaaagtgttcctttgcaggtgttcctgggacctcagagaccaggctcagagcctgacatccctgcgaggggacagcctcatcygcccaggccrgtgggggtctctacaagtgcccaggctcaggtgcagcccccagcaatgcatcgccggagactggccctgggtctggggttctgcctgttggcgggcacaagcytcagtgtcctgtggtgagtctgccccacggagctccccctgtctctatccccacccaggactccccctgtctctatccccacccaggactccccctgtctctatccccacccaggactccccctgtctctatccccacccaggactccccctgtctctatccccacccaggactccccctgtctctatccccacccaggacttcccctgtctctatccccacccaggactctccctgtctctatccccacccaggactccccctgtctctgcagatcaaccccaaaaccttgatctcctcataggattccagatcccaccaacccctcctgactcacctgttctccaaccccagccccaacaagacccaactagtgtctccggcttctgaattctgccttgtactggcctcctggcctttgacttgctcttttctctgcctggatcatccttcaaccaatgttgatggggaatccccgttcaygctcccaaattcaccctctgtttctgtccttccatgaagctcctggggctgcccctcaccctgctgtttgtgtggggggcctggcatcaagaatatacactccctaggaatgaatgactctatgggtgaatgaatgactgcatggcaggccctgtgacacatgccaggaataccagcaggctttgtcctccaaggtcagccagacctacagaatgacaggggacctggcctcctaatgcactgtgggagacctgcactcccaatgacgtgcatgaggtgcgttttcagcctctggtgcagagtggatcaacagattttttttyttttttttattcacagggtgtatcttgagaactggctgccagtctcctatgtcccctattatctcccctgcccagagatcttgtaagtatgggtgtggctaggagaactgggggccctgagggctgctcacagttggggagacaggagagtatttaagttcacttcatctgccggttcctgattcctaagttcatgtttctgataaatgcaatagtatttatgtaatttaagggctrtgacaagcgtgaagtgaaattcccatttcggtcttccagcatccttgcagccccctgcatggtctgaccgtccacatgttgcacagctgtgagccttgcttgctgtgtctggccactgagaacacagagtgcaaagatgcccataaacagcctgctgttgctcccggtgaccagcaggggttgtgttcagtgcttttaggacttgaccttgttgctcaattttgtgttccatggattcaaggaacaaatgaacatgtgaccaaagtcctcctcaactaaggagtcttttttttttttttcttgagtcagagtctcactctgtcgycctggctggagtgcagtggcgtgatcttggctcacagcaacctccacctccccagttcaagagattstccygtctcagcctcccaagtagctgggattacaggcacccgccaccatacctggctaatttttgtatttttatttgagatggcgtttcaccatgttggccaggctggtctcaaactcctgacctcaagtgttccacctgcctcagcctcccaaagtgctgagattacaggcatgagctactgcatcggtccggtcaccatcatcttattccacccagggactgacacataatttttgagcctctctctctttcccaccaccaattgctctcgggatttaggttgctcccaatttcccagggctctcagttagtttgtgatgagcagcataaccctttctccatttcaaagatcattttgttcagatatgttcccttagtggccggaggatgtggataggttctgatccaactcattgggttatttccagaaggaccacagcacatcagtcactcattcatgtgccctgcccaagcagtacccagcaaagccaccgtgtagtacacctgggctactgctgggaataccagaggttatgaaaacaaaaatgaacctaccttgctgattgggagagggaaaatgctatcctctttggtataaattttatttattattattattattattattattattattatattgagacagagtctcgctttgccacccaggctggagtaccgtggcgtgatctcagctcattgcaacctccacctcccgggttcaagcaattgtcatgcctcagccacctgaatagctgggattacaggcacacacgctaatttttgtatttttagtagaaacagcatttcatcatgttggccaggttggtctttgcccccttcggccaggcttcgccccctcatcggcctcccaaagtgctgggattaaaggcgtgaaccaccacccctggccttaatttttttttttttttattattactagtgagactctcatttccctacgtcttcccgttaattgaaatttttcttgtgtgaagtgcttcttccccaccttctctgtttggtccgtttgtgggttctctatcatcactcttggctaagtatacctacaacttttttttttctttccagtttgtctatcttgtgtgtgtgcgtggcggagggagataaggtctggctctgttgcccaggctggagtgcagtggcacgatcacagctcactacagccttgacctcctgggctcaagtgatcctcacactttagcctcctgagtagctaggaccacagatactcaccaccacacctcctagctaatttttttttatttgtttgtagagacagggtctcactatgttgcccaggctggtctggaactcctggcctcaaggggtcgtcccaactcgcccctgccgggattgcgggcatgagccaccacaccggcctgcttttgtattcttgtatgtaactcttcactgcagctggagtgtgtctgggcttgtggagagaaaagaggagctcgctgccagggaggcacagaatgctgggctgtttggtaccccttctaactcctgaccgcttcttggaatcccagggctttctgagcagggccctgaaacatgctttcttgtaggaaactagggcagagggccaatttgacgaactgactttaaaaaattgttgattcaagagtagcaacttggctgggtgtagcggcttatgcctgtaatcccagcactttgggaggccgaggctggtggatcacttgagctcaggagttcaagaccagcctggccaacatgatgaaaccccatctctaataaaaatacaaaaattggcggggtgtggtggcacacacctgtagtcccagctacttgggaggctgaggcaggagaatcacttgatcccaggaggctaaggttacagtgagccaagatcacaccactgcactccagctgggatgacaaggttactgagactccatctaaaaaaagaaaaaaaaaagtagctactaatcacaaaaggacaaaaactttattattccacttataggaagtactttccatactcaagttcatagaggcagaagtagaattatggttcccaggggctgggggcggggcaacggcaagctgttgtttaatgaggaccgagcttccttttgggatgatgaaaaagttctggacacaaatgttggatggttgcatgacaatgtgaatgtacctaatgccactgaattgtacacttaaagatggctaaagtagtaaatcttgtgttttgtatactttaccacaaataaaagagcatagcctagaggtggaagagttcaaggaggcttcagccaccccatcatacatgatgtattgaaactcacaggggaccaggcaaggcagctcatgcctgtaatcccagcactttgggaagccaagacaggcagatcacttgagctcargagttyragaccagcctgggcaacatggtgaaacccagtctgtacaaaaaatattaatacaaaaacagctgggtgtggtggtgggcacctgtggtctcagctcctcagggtgctggtgtgggaggaccgcttgagctcaggcagtcaagactgcagttagccgagattgtgccactgcactccagcctgggcaacacagatagaccccacctcaaaaaagaaaagaaagaaagaaaagaaacttacaaggacctggcagactactgtgtcatcagtgggtgggatccttatgagcttctgcctggggacagtcggcctcgggccttttgttgctgctgctggctgggtggcctttcccttttttttgagatgcagtcttgctctgtcgccaggctggagtgcagtggcgggatctcggctcactgcaccctcagcctcccgggttcaagcgattctcctccctcagcctcccaagtagctgggactacaggtgcccaccaccacgcccagctaatttttgtatttttagtagaaatggggtttcaccatgttgcccaggatggtctcgatctctcgaccttgtgatctgcccgctttggcctcccaaagtgctgggattacaggcatgagccaccacgcccggccggtctttcccttctctgcacctcgcttccacctgctggaaacactctaagtggatggttttattgtccccattttgtggatgaggaaactaaagttcacagggtcaactgtctggctccaggtccctgggccagttagtggcagagccagaggtgagcccaggggtctgaccctacagccctggcacctccttcatggacccccttctttcttctccaaccagtttgaccttgaaactgaccatggaggctgcctgccaagacttgcccaggatccctcaccttactgagcacttgctccatgctggacatggtcaagagcccctcacacaccttgtgtaactctcaccacatcgctaaggctaaggatggttttgcccattttgcagatgcagagaaatggcagtcagtgttccactagagaaacagaaccagtaagaggtaggaaggtagacagatggccaacatacctaggaaaattgacttatgtgatggtgaggctggctaagcagctgaaactcagataggagcagacaccacagcccacaggtgaagttcttttttttttttttttttttgagacagggtctcactttgtgggtggcccaggctggagtgcagtagtgtgattacagctcactacagcctccacctcctgggctcaarccatcctcctgcttcagcctcccaagtagccaggaccacaggtgcacaccaccatacccagctaatttttgttgtttttgtagagatgaggtcttgccatgttgcccaggctggtcttgaactactgggctcaagcgctttgcccgcgttgggcccccaaagtgctgggactacaggtgtgagccacctgggctggccaccagttctgttcttaaggcctttcaaccaattggatcggtcccacccaggttgtctaggatactctcttttatgtaaaatcaactgatatagaatgttaatcacatctacaaaatactttcacagaccagcctgggcgacatagtaagaccccatctctacaaaattttaaaaaatcagccgggggtggtaatgagtgcctggcaggtccagctactcaggaggctaaggcaggaggattgcctacaactgaccattacagtgggctcaggttaattagctcttagctcacccgaggtcccagtcaccaggcctttgcagcttttcttcctttttttttttgagatggaatcttgctctgtcacacaggctgtagtgcaatggtgcgatctcggctcactgcaacctctgcctcctgggttcaagcaattctcctgcctcagcctcccgagtagctgggattacaggcgcccgccaccaygcccagctaatttttgtatttttagtagagacgaggtttcaccatcttggccaggctggtcttgaactcctggccttgtgatccacccgcstccgcctcccaaagtgctgggattacaggcgtgagccaccgcgcctggccctttgcaggttttcamatcttctttccgacaacgagagcgacatggttggaaaagcatcagccttgggagcaagcggcactgggttcgaatcactgccctgccacttactctctcagtgaccctggacagatcacttctgtaggggtccccagctcctctgtagagtcgggtggggctgtgggggaaggtcagagggagcctgcatgkaccctgggwgcccacccgcaggggcctctgactcctccttcttcctgtgctgagtgtctctgtccccagacccatgatgatggctctttcttgcctctgccaccagcaacatgaagctgcactacaagagggagaagccactccagcccgtggtatggtaaggagactggcatttcctcttttgtggccgtgagggtggtggctctcctccayyactggtccttcttggttgcaggtcacagtaccctcagcccaagctgctggagcacaggtaggtgtcatggagaggcctgatgggggcgggggaaaaggacaaaagagctctgatttataaggtggggtagtggaggtgctaacatcagggtggccttggggcccagagagttagggactgtggaaagacacagggctgggagtcagggacctgggctgtgtgaccctgggcagcgtacccaactgctctgagctttttctgtgcaggtggatagtagtgcctagctcactggagtttggaggagcagatgagaggtattgtaacatctgcaccgtgcttgcactcaggaggtgctcaggccattgttcataacaacgtggtcttgccctttttaatgaccctcatttattaggggcttggcacayatgaataatgccaggcttctccttggtgtgcgttaaytcctggtactcccaaccctgctgggaggtggctatcattatccccactttccatatgaggaaagggaggcccagagatggggacgaagctgccccgggtcacacagtgtgagagccagggctgggatgagacttaggctttcacaggggagggtctcagtgcccacggcccccctgctgccaggcccacacagcygctgacactcacaccctggttggcgcccatcgtctccgagggaaccttcaacccagagcttctgcagcacatctaccagccactgaacctgaccattggggtcacggtgtttgcygtggggaagtgagtagtgggctggggaakgggagggaggtctccctgagccacaggagtttatagttgggaagagaccagaccagacgtgcacacaggaccctgctgggcacccrggaggctcggaaccaggtgccaagcagatagaaagtacagtgtagggtgtgatagtgggatgggagcttcctggagtaggggatctggctctagcatagacaggatgcagagtccaggtgaggggacagcaggagcctttgtcaggaggcccccttgcccctccctgtttcatctagacccctcctctgcccttgtctctcccatgaccccacctggccttcctttaggagctgccgcttggcagccttcctctgggcctctgggactccttcctggaacttcctggggccctaaagcatgaccagatgatgaatggtccacctagggtcaggtgacccccttgtccaatgagttttggcctgggggcagggctgtgtcaaccacacccccctccatgcccccagcatctagctcaacttgccttcccttgattcgtccacttacctgcttcttcactactttcttctctgtgatcctcaatgttcctgcctgtaaaatgggcatgcttatgcagatcaaagatcataagaattcttagaacgtcgctgggcacttagaaattgctcagtaaaagttcacctggcctaggagcataagaatctctaccaggaacatgctyacaacagccgtaagaggctggtactagcattttgggaattggacaaatgargacccagagggccagagcagagtgacatcttgagatggggagctggtaagtggaccccagcctggctgaccccagcacacagtggggaccctggcaggctgctggtgtagcagtgggtgaccgggtgatcatcactaggtamactcatttcatccagtccttcctggagtcagccgaggagttcttcatgcgtgggtaccgggtgcactactacatcttcactgacaaccctgcagccgttcccggggtcccgctgggtccccaccggcttctcagctccatccccatccagggtcactcccactgggaggaracatccatgcgccggatggagaccatcagccagcacattgctaagagggctcaccgggaggtggactacctcttctgccttgatgtggacatggtgtttcggaacccgtggggccctgagaccttgggagacctggtggctgccattcacccaagctactaygccgttccccgccagcmgttcccctatgagcgcaggcgtgtttccactgcctttgtggcagacagcgaaggggacttctattatggtggggcagtcttcggggggcaggtggccagggtatatgagtttactaggggctgccacatggccatcctggcggacaaggccaatggywtcatggctgcctggcgggaggaaagccacctgaaccgtcacttcatctcaaacaagccgtccaaggtgctgtcccccgagtacctctgggaygacaggaagccccagccacccagcctgaagctgatccgcttttctacactggacaaggatatcagctgcctgaggagctgaccacggagctgggggttgccatggatggggacccaaagacctgcagccaccagtgcttcactagcgtgcagaccagccctgtcccgcctccctgtcagtcaggcgaattcaaccggaaaagggacgtggaaaggccactgtgaactgcagagggctgtgcacacagtagcacacaggatctcacagtaacgcggcatgggaacagtgagacagggggaggggaggcgcagttacaaaggcagggcccggcaggcttgccacgttctgcagccgtgcctttgcggggcaggctctgaagcctcagcccgactcagagtgcctgaaccctgccgcgccagtcccccgtttattgcatattgcccttaacgtagcatttctaataccctggtgtgaaggcgccctagaccccttttctctggtcacaggggtcctgggtcctttgatgtctcccaaccacatgtagccaattcctcactcaggcccccagagtgagcctttgaaatggaacaggtctaggctccctcggtttcctgcaccccaaagtgagccgcactctcaggggactagccacctccttcttaagagggtttggggcagtttataataaagggggcgtgtgctcaaccctagctagggtgattttttttgttttgtttttgttttttttgagaccgagtttcgctcttgtcacccaggctggagttcagtggcgtgatcttggctcactgcaacctctggctcccaggttcaagcgattctcctgcctcagactcccaagtagctgggattacaggtgcccgccacacccagttaatttttgtatttttagtagagacggggtttcaccgtgttggccaggcttgtctcaaactcctggcctcaagtgatccacctgcctcgacctcccaaagtgctgggattacaggtgtgagccactgtgcccggccactaaggtggtttttacctgcacatccagcctgcctgtgtccccagtgtctgttccatcaggcagtggggacacaggcagactggaagtcaaacacaatcgaatagggatatagttactccagaaaatctgagctaaagctagaggctacaacggacaggatttcattccagttctccagggagactgggtgaagtggagcatgctggcagagccaccacactcccaactgtgtagaggggtatggagcccagcagccggacaaccctgggagctcccgtatccagggtcactgcagccctgtgaggtcaccagtgggcgtgggactctgagccaatggtgcaggccaggattagagggcatgggaagatgacctctccagtctggatccagaaggacttcagaggcctacagtgtggttctgtctgcctggccacgcagagatggggtggggtatgggttcagggcttggcggcctggtgctcaccgccctggagacagcagcatctttttcatggaaggagaagacagaaaggagggtggggtagactctggtcatactggaacgggcaggcacccacccacttggtcacccgtggaaaagctggggccagccctgagttcattcttccttcacctgtggtttggctggcgagcagggacagacccgaagagcgtggacagatggagtgaccagttggaggagacagactgggctggagaggcctggagtcttgaaggggcactgagtgcctcctgggcagaggggcaggaatggaaccatggcctctgtgtccctcatagggagcacctgctccaggggaggggttctgtgctgaaggagtaggccctgcctccgaggagcttctgttgaaagcacagagagggccatggagcgctggactcagctgggtggatggctgggagatgggggacctgaggtgacagcagactctgaggcctgggcagctccacctagcaggggagaagtcccccatacccccctcaccccacttacacccagctttacccctggcacaccctcccgggtgggagtccctgactcattttcagtagaggaaactgagactctgagaggtcaccatgagcttgcctgtgatgtggctcagctgcaggtttgaacccaggtcatctgggttcaagactgtgctctgcacagggtgggaggagtgcagctctgaaggtgagtgcattgtggaggaggatacagggaggggcagtgctggcagggggctctgagaggggcaggggcttgatggggtccctgggtcaggatggccccaggaggctagagttggggtatagggaccaggtcacacagggttctgaatgccaggctaggaggcaggggtcaccgcaggcctgtcccagcagggggatcaatatatatggggcccaagcgctggactcaggggatacctggccagcgaggccccaacacaggatgaggcctctgatgaccagctcggggatgagtgacggggaagagccatgaagtgggggtcaccacgcacagcagggcctggccacttacagctgagtggcctgcagtgctggtgccttggctctggtataaaattgaatgaagccgggcacagtggctcacgcctgtaattgcggcactttgggaggccaaggcaggaggatctctggagcccaagagttccaaaccagcctgggcaacatagtgagacttcatctctacatagtttttttaaaaataaaaaaggccgggcacagtggctcacgcctgtaatcccagcactttgggaggccaaggtgggcagattacgaggtcagaagttccagaccagcctggccaacatagtgaaaccccgcctctactaaaaatacaaaaattagccgggtgtgatggcacatgcctgtagtcccagctactcgggaggctgagacgggagaatcacttgaacctgggaggtggaggttgcagtgagctgagactgtgccattgcactccagtctgggtgacagagtgagactctgtctcaaaaaaataaaataaataaataaatcaaaagggttggccaggcaaagtggctcacgcctgtaatcccaacactttgggaggccgaggagggcagatcacctgaggtcagaagttcgagaccagcctggccaatatggtgaaactctgtctctactaaaaacacaaaaattagtcgggcgtggtggtggcagcgtgcacctgtaatcccagctacttgggaggctgagacaggagaatcgcttgaacccaggaggcagaggttgcaataagccgtgatctagccactgcattccagcctggtcgacaagaaggagactgcggctggtgcagtggctcatgcctgtaatcccagcactttgggaggccaaggtgggaggatcacctgacgtctggagtttgagaccagcctggccaacatggtgaaaccccatctctactaaaaatacaaaattagccgggcgtggtggcaggtgcctgtaatcccagctactcaggaggctgaggcaggagaattgcttgaacctgggacgtggaggttgcagtgagccgagatcgcgccattgcactccagcctgggggacaagagtgagacttcgtctcaaaaaacaaacaaacgagactccatctcaaaaacaaaagtaaataaaaaataaaaagggacgaaatcagttagccctaataacactgactacccccaacagtcgctcaaccccagtgtgaggcctccttcccccaggctcccttgagccccatcttacaccagctgaagctgcagctggaccttgtggtcccgggtgctgtcagggaagacaaggagggaggtggggaagaggaggggaaggggagacctgactttctccctgcccaggctgagttcgctgtcacctcgggtcccccagctcccagccatccgccgagccgagtccagcaggtggcatcggggtgctgggcgccagggtgaacgtgtatatttggtgacgccggcgcgccgactcagcggcccccgcctggctggggcgaggttggccctaggtcctagcggggtggggagtactgagcaggcggctggggcggacggacacgtgagatcggccgcacatggcgctgggagcgtggcgcgtgcgcgcggcgaagcggagtgacgtgcacgcgctgtctgcggtcccgcgcaggccccgtgtgcgcgcccggccttggacaacaggcccggctgccccgcggggggaacacccgcgtcggcccgcgggagggaggcctgagcgcgcccccgagcgcgtccccgagctcacgcggcggggcgcgcccctcgcacctgcgggcgggctggggcggggccgcggctgtccccgcccacccgggcccgagcccggggagccggggcggaaccgagcggcgaggcccgagcggccggagcgcggcgcggcgcagacaatgggagcggcgctggcggctgccggggcggccccgagggccgcagagtcctgggcccggcggggaccggaggccgcgccatgagccccgcagccgggcgcacccctgcgccgcgcgcgggcccaggcgagcggcctctgcgagccccgggtcccgccctggggccggcgatgtgccaccgaggctgaggatgatggtagattgccaggtgagtgcgcgccgtccccagcctcgcgtcgcgggtggagggaggaccgtatgccccagcccacacccaccggggggagggagcccggcgccgcgtccacgctgagcgtgcgcttacgcagctccgcgtccaaccccgcccgggacagtagggaaactgaggacaggagaggggcagggactcgcccggggcacacgaagttggcggagtccagagatgaagggagggttccggcctcttaggccaggaagggctcggctcacccttcccgtggggtttgctttgggaatgacagcctctaagatcctggggacccctgcccatctcccatgtgggctcatttgcctgggcttctccgcgcacgtacaggcgcaggcctgcgcatacatgctcacacacacgcagacacacacaccacacacttcctggggctcagagtaggacgggacgctggggaagtgactgggggaaagaagaaagagggcgggggctactctgccacgggcaggggcatccagtacccagcaacatgcctggggccatggcacggggtggggggcaaggggaggacacgccagcttgatgggcggggattctccaaggttcccaggatctgtctgggctggggcagcctggagaggacagattgtggggttctgtgttcaccgctgtgatcacctggaagcaggaaaagaccccttcagtgtggacggggctgtaggaaaggaagcctcaaattcctgctctataaattggaatgtttggcctgggtgactccaagggtcccacaggctcgtagacgtgtctgtcggccttaggtctccactggggatgcccccactacccaccgaggtctgtggaaaatgccttcttcttggaggttcttctgagcaagagaagccgggggggctgaagggctgagggcctggggtggtgcagagcgtggccaagcactggacaactcttgtgggacaagactgtccttgttggagcctcagggttcttatttggaagtggggccagagccgttgccctggttggagtgaggaggcctcacgagtgaactggacaccccaggaccagcagagggaaagaggggagcaaatgaagcttctgaggcgccttgaattacccctggagcctgcaggttctgctcctttgaccccctgggactcaggagagctgctaccttgacaacacccaaacaaaggtgtgtgttttgttttctgggttttctgcctgaggctgctgctgctgtgctagtgccggccaccagggggaggcagtgcccactgtactcattggagcaactggagtcagggagagcccggcagggtccctctgggggaccccggcctctacccaatgcacaccccccattactagcatccctctccacaatgttagctgctcagaggcgggagggggctccaagagcttcctctttcccttcagcaggtgtgcccaagcactcaccctgggttgtgggggggcagcgttgggcttgggcgtggctctgaaagtgacccaggggggcctgccctccagagctggcagtctggagggggcgatggacagggcacaaaagcaaacaggcacagaaaggaaaaagcagtgctgcagcgaaaataatgccggggctgccatggagggctggggcctgctgggtggggatctgagaggtctcgctaaggggacatctgtgctgtgaccagaagacaaagcatgggccagccctgcacgagtctggacagtgtgatggagaaggctcagcaggcagggctgggaggcagaaatgagtttggccagagaggagtgagaaaggaggccagtgtggcccaagtgagctgggggtgggaggggcagcccaggggcctgtggacagctatgtgacaacactaccctaatgtacagcttccagcaacagacattgatcatcacacagtttctgtggacccagatccagggcagctcagctgg
